United States Patent Application Publication US 2007/0083945 A1 - sequence listing, part 3

SEQ ID NO: 13523 - DNA, 407 bp, Glycine max
  unsure (1)..(407): unsure at all n locations
gcttggaaggatgcttcaatggaggaaattttgatagagagaagagagattgtgttcacgaaatngaaggaataaaagagggagagaagtggaactttgaagtatgtctcacaagactctcattcatcaaagttacaacaagtgttacacatgcttctatttatagactaggtagcttccttgagaagctttcttgagaaaacttccttgaaaagcttctttgagaaaacttccttgagaagctagagcttatctacacacacccagctaataactaagctcacctccttgagaagcttccttaagaagattcctacagaagctagagcttatctcacacaccccctataatagctaagctcacccccatgcaaaaagacatgaaaatataaaaaaagtccctatta

SEQ ID NO: 13524 - DNA, 406 bp, Glycine max
ggtgttgcttccaggctaaaaagctgtgtgtagaattctttctcaagctatgagcgctggggaggtattctaacttggatacaagtgctggtgaggtatctggtcttggatgtatgtgctaacgatgtatctatgcttggatgcttatactcaagagttgtttctgggctaaagagatgggttttggtgatgctttagatctgctaggtctgagctaatgatagacactgacttagatgttggtgcatgtgctatttctataattaaacgaaagagtgtattgggctaagtatgtacaaaaataaaatgtgctaggcaagtactacacttaaaacaaagaaataagttgcagtagattagtagttaactattggcttgatgactttacactgagatgtagaaaacc

SEQ ID NO: 13525 - DNA, 372 bp, Glycine max
  unsure (1)..(372): unsure at all n locations
agcttgtggtgatgcctcgagggttcgcttatttaccanagaccctaattacaatgcttaaaaaatgaaaagaaaagaaaatgtttaaattgagattgatataaataaaagctaaataataataataataattgttggaatacaagtataaggtgaagtcccacatcaaatagaaaggaaaaatttgaataacatataagtgcgaataaaactcataaacttaagtcttacttaaggttttgagttaatgtatgatgtcaatttcactaagtgatttgctcatgacccatngtataaaactcataaacctaagttttaaaaattttaagttaaaatgttatgtcaaattcacttatatgaatagaatattac

SEQ ID NO: 13526 - DNA, 234 bp, Glycine max
ctgctagcgttgtgcaatcaccaaccacaaaaccagcgaatcgctcctaatggagcaccgtcacacatcacttaactcctattgccttagagggtgatcacagccactcttataaagacagtcgggagagacttgctggcatacgatatatgcaagacccactagataccttacatatgacagtctgctaagtattggtaaaatcaatatacgctctaacttacatacgttcaa

SEQ ID NO: 13527 - DNA, 276 bp, Glycine max
  unsure (1)..(276): unsure at all n locations
cattcttggtgtgtgaaacttcttcttccatggcttaatccctagtggatggtgccttccctctcctgttctcctttgccttccgctgcatctacatggtggaaaatcaccattgaaggacctcattgaagctcaaagatccagcctccataaaaactccacaagcaagcttccatcatgtggttatcagagcacaagagcttcaagtaggtgctccttanacctccattaattttttactttaacttctcttccattggtgtttcttcatttttc

SEQ ID NO: 13528 - DNA, 406 bp, Glycine max
  unsure (1)..(406): unsure at all n locations
tgctaacccatggaagctcctaatatctcccacactttttgtggtgggccattcttggatggccttgattttctcagggtccacttggaccccatttctaccaactacaaaacctaagaaaactatattatctacacaaaaggtacacttctctatatttgcatagagggtgtttttcctaaggactgaaagaacttgtctgagatgtcctaagtgatcatctaggctcctactatacactaaaatatcatcaaaataaacaactacaaatctacctatgaaatcccttaagacatgatgcataagcctcataaaggtgcttggtgcattagtgagcccaaaaggcatcactagccattcatacaaaccaaacttggtcttgaaagcagttntccactcatcaccc

SEQ ID NO: 13529 - DNA, 330 bp, Glycine max
ctacatagaatttctgtcaatgcttagttctgttaggtgattcgtgtgttacactaacattacggtgttattatggatacaatgtgcttgatctgattatggttacatggcctaatatgggcctgaacggaagggtgagaagcccctgctttttctggaaatcgcgatgagtgcgctaagcgagatcatagttttgctgacatctagattttatatgaactcactcagcgcggccctgaaccctaagcgcgttcatcttatctgattggaaaatcattgcttacgaactctctaagcagtgatgcgcgctaagcgagtaatgtgttctca

SEQ ID NO: 13530 - DNA, 193 bp, Glycine max
agcttggtaaaatcttaagtattggctcttatatattccaacaagacataactacaaaaggggaaaaacatattttctcacttgcaacatgaagcgtcgttgcagatagggcatccacaaagtggaagacgatgatggtgatgacaacttacggcacaatgactatgacatggtggagttcgccactgtgagg

SEQ ID NO: 13531 - DNA, 394 bp, Glycine max
  unsure (1)..(394): unsure at all n locations
agtgactgtgtgcaaccatagattttatattgagtttcctcattgatatgttctacagtcgattntgcataaatttctaattgtcataacatatgattcatggatatgatttaggctttctttctttctttacattttaagccattctccaaaaagctattccaatgtatattatctttgccatttgcaatccctacgagccaaacacttgatatttttggaacactaacctaggataaaatgttcctaccttaccctaggttaggagagcaaaggtgttttgttggggatctctatcatttggtggctaatgtgatgtaaatactctatttttaatatgggtattaagggaaaacatataataaaaaaaaaattgaaaagaaaagaacacgag

SEQ ID NO: 13532 - DNA, 349 bp, Glycine max
agctttccgcgaagagatctaggagagattccgtggctgaagggaccagtgccatcctcgagtttgatagtcaccctttccggagcgccgtgcactaacatcgcttcgaggccattaaaggatggtcattccaccgagagagacgcgtccagcttatggacgatgggtacaccgattttcaagaggagatagctcgcagacattggacgtcgctggctactcccatggataagtttgaccttgaggtaatcctggagttttatgctaatgcttggcccacagaggagggagtgcgggacatgcattcatgggtgacgggtcagtggattccttttgacgtagatgccct

SEQ ID NO: 13533 - DNA, 381 bp, Glycine max
  unsure (1)..(381): unsure at all n locations
acgcttncttaagaagagtccgaaggaagcttgttcttagcttttcatacctctctaatagctaagctcacctccttgagatgagaagctagagcttagctacacaccccctataatagctaagctcaccccatgacaaaaaaacatgaaaatacaaaaaaaaggccttactacaaagactactcaaaatgccccgaaatacaaggctaaaaccctatactactagaatggccaaaatacaaggcccagatgaaggaaatacctattctaatattgacagagataaccgggctcatacttagcccatgggctcgaaatctaccctaaggctcatgagaaccctaaggccttcccttggatctctagcccaatctacttgga

SEQ ID NO: 13534 - DNA, 460 bp, Glycine max
  unsure (1)..(460): unsure at all n locations
cgcccatgaccctgtgaccctttgatgcacctgtctttcggacctataaaacccaagcagcttcaatctttactcgcgcttatatganggccttccgaggacccccncgcgtactgaaggttgctgtttccaacatcttcgcgtgctactaatccgtcacaatgctatgatatctacgactgaatgccaataccgtatatcataacacaggatgcatttcctaaagtccgagttaacgcggccaaccaaatccaatggagctcctatgcaacttgcgtggctgaatatatcgatgctgtctaagatagcaacctcatctactagaccctatatacatgcacgcgtttcctctgaggggcacttttgtgaattttttacccaaaatgccttatgaacactcgcatcgaacacacctaagtaacatcagcactttctctcgtgacactcttctataaaaccn

SEQ ID NO: 13535 - DNA, 209 bp, Glycine max
agctttgatgtgaaggaccttaatttccctgattttgtatccaaccaacgtgaggaaacaagggacaaaagtgattccacaatgcaaatgctggacattctcacttctcttatcacatcaacaaccaacactagcttttgtttattaaacattggagggtgcatggtggctgttttactctttatacccttcttcaaacactaaatgtt

SEQ ID NO: 13536 - DNA, 407 bp, Glycine max
  unsure (1)..(407): unsure at all n locations
tgagattngctgttgtcaaaaaattaatgggctgcgttctcctcctgatttctacaaaaagggcatatgctgtcgtttatctctatttgcctccttcgcagattagacttagtcagaaatcaatcattgattaacctccaagcaaagattgaagctttagctaggatttttagtttccataagtcctgaagcgctccatccagatttgcctccactaaactttcttgcagcaagttataagccctccttgtagagtaatatccgttaggctcagatttccacatccaacaatctgttgtatgttgctggattgcaatctgtgagatgtcttccatanaacctacagccgatgcgatttcattatcaaacaaaggccttctccatcaagggttccatgccatgctgag

SEQ ID NO: 13537 - DNA, 515 bp, Glycine max
  unsure (1)..(515): unsure at all n locations
caaaaacaaaattgaaaanccgtggtaagagacngcgatccttgatagacgttgtgaangcatcgcgagctnggcttatacaacatgaagaggcatatgttgtttactcgctcggcaacgcgcacctttattatgtcgcacagtagaagaaggacctcgcgaagtctcgagtgtcngaatatcacatgagacttttttgtgtgtttaaaattaagtgcanaccgcaatttcaaaagcaagtagaattgatagatttaataataagagagtaagagaaatatatatangatcaagatagaagatttgaaagatgaacaataaacagattttaattaaaaagatgatcaatctagaagaataagaaaataaaagtcaaatgatagaaaaataaaagattacgattgtgattagacaagataagatgatataagaataaaaataaaatgtagaaattgaagataaagaaataaatcaagaacgtgataatgtgggacctgcctgtcttgttacttacn

SEQ ID NO: 13538 - DNA, 407 bp, Glycine max
gcttatctcctctcggattcccaacatatcactattaatttttcatggccattttaggatgggataaagagagactcctagcttattgaatgttgctgtaacaaacattcaggtgtgtcatatatggtcctaatgtttcatttttattatgttatacaaataccttttaacataactcagaaatcatattcgttttttcgttttcgtgcagttacccaaatacaatggtgttcaaatcaattttgcttggctgaatatattgatattgtctaagattgaaactactcttacttgaatgttgatagttacacggttttccgatgagtgagaaattagtgagttatttatcaataatgatatatgaacactcgtatagtaaatacttaattaacatcatctctttctct

SEQ ID NO: 13539 - DNA, 353 bp, Glycine max
atcacctatgctgtccccatatatataaaacagtcccacaatcctaattttacaaaaatcacattcatatgtcattggggcatttcaccgagcacttggtgggcgcatgtttagacataaattgcaagagaacgggggcaatgtggcatgcctcattgcttcaaaatacaacacaggcctaaggccttcccctacaaaccctcaactcaacaaaacaagcatggattcagacgtgaattgcttcacgaatttcgcataaaatgagcaatttaaagcaccaaaacacatcaatggagagccaaataaccaaaggaaattgtacttacttgtggggagtgaattaaaccgtgaaa

SEQ ID NO: 13540 - DNA, 425 bp, Glycine max
gcctgtccgatgcagtagtaatgatggcccgagttattttggggaacgtttacgaacccggaatgggtttagggaaagacaacggcggcatgactaacctgataaatgccaaaggaaatcgtgggaagtatggtttaggctataaacccactcacgcggatataaagagaagcatcgtgggaagaaagagcggtggtcaaagctcgcggttgaggcaagaaagtgaaggaagcccgccctgccacataagtagaagctttataatgcgcgggtctgggagacgaaggtcaagtggtcgcgatatacgaagatgatgttccgagtacattggatttggtacgaccatgccctcctgatttccagctgggaaattggcgagtggaggaacgccccggcatttacgcaacgagcataatgtaaacctt

SEQ ID NO: 13541 - DNA, 439 bp, Glycine max
  unsure (1)..(439): unsure at all n locations
ggatccttaagtcacctgcngcatgcaagcttccatcaagtggtaatcatagcacattatcttcaagtaggtgctccttatacctccattaattatttttctttaccttctcttccattgttatttcttcatttttctccatgtatctcctcacatgtcttgttctaaatgtttttaacatgattctttataagtttccaccgattaaacttgctatagaaactagatttgattttctatggttcaaatttcttgttcttgttcttgaaccatgaattgtgttgagtttacgttcctttgagttttgtcttgttattttttgtggctgaaacctaaaccataaaattcttacaaaaatattaaagtagaagacaacctcaaaaatctagagtgactcgttcacctattgtagttttgtcatagaagtcatgtctagtca

SEQ ID NO: 13542 - DNA, 425 bp, Glycine max
  unsure (1)..(425): unsure at all n locations
ntgtcctcagatccctcttgttggactagaattagacttcttcaacattattgtaatagcatacttaaaaccaaaacttaatccgtagatccctcttgtaagactaagcttcaattctgcttcattcaagttctaaggcaacaatacatttcctaatgctaaagtcacctaactaggcacacaaatggttgatcagaccaagagcatacaaaatttaagcactaaaagaagcattgaacacaagaaacacaatcaattagatattaaaataattacatcagttgttctttagaaatccccaacaagggtgtttagccagccattacagaagaaaccctaataataatgagcttacaaaacctaagtatctctgcaaaagctgctcctcttgctgccttcagagctcttttcccaaaataggcatt

SEQ ID NO: 13543 - DNA, 386 bp, Glycine max
ctgcagcttaggctgctcaattgctccagattgctgcatagaagggcaaaggtctatatggtggtcggaagaggaggataaaccacagactcttgcgataggtacaaatttctgattcaaggccagctggtttaccaagttaaccaaggcatctagtttaccttcaagcttcttagtttcaactgatgaagatgaattcgtggctacttcatgcactcctctaatgacaatagcatcatttctggcactaaattgttgggagttggaggtcatcttctcaattaaattcctggcttcagcaggggtcatgtctccaagggctccaccactggcagcatcaatcatacttctctccatgttactaagtccttcataaaaacattgga

SEQ ID NO: 13544 - DNA, 450 bp, Glycine max
  unsure (1)..(450): unsure at all n locations
ggacactataaaactcaagctgaggattatggngtacccatcacatgtggtactatgtggcggtcgggcgatggtgcacaacaattctccacatccacaaatcacgtataaaaccaccatcccctgttgcccacctccaactgagctcacgtactcccacgtagccctcatcctcattcctctcaacgccgggtccccatcaatcctcccaagcttccacaacatccaagaaattccacatcccatcatcatagactaacaaaaccaagcaaaacagagcaaaggcagaaaactctgtccaaaacacaaaccaaaatcacaactttttctcacttaaagaccccagtaacatttccttcgttccaattcgttaaccgttggatcgactcgaaaatttttctgggagtctctagtacataagtctacantttgaccgttgggatctgtaac

SEQ ID NO: 13545 - DNA, 421 bp, Glycine max
gcttctgctcattctggaacttcaagcttctttgatcagtcctaattaaaattttgtttcctagcagataatgcctccatttcttcactgctaacaccactaccatcagttccctctcatatattgacttgacttgagccctgtctgacagagccttgctccaaaaagctaaaggtttctcttcctacaataaaactgcccctagcccagttcctaatgcatcagtttccatgataaaatttttagagaaatctggtagtgccagaataagaagcctcctcattgctgccttaagctcttcaaaggcatgagtagcttctacgaggtatttataaaccaagttagagatagttacaatccaggtatttataaacctctatacagcagaactaactataactaactctaacaaaaagcttac

SEQ ID NO: 13546 - DNA, 333 bp, Glycine max
  unsure (1)..(333): unsure at all n locations
tcggtcatctaagagactatgcatcttttaaaggcacaaatcgaagatcggaacaccgaatcaccaatcccacgttctctaaaagatttcgaccaanaagaaatatagagggcacggaatccctggggaaaccacaaaaaataaaaaaaacatgcagcgacttctttaattgccccaagtcttaagcgtagtatcgcttgatgacgtcggagtttacgggtgaaggtagttcctcgtcatccatgttggtgagcacaggggcccctccagagaaagccttttttacgacgaaagatcctttgtagttcaaggcccacttttccctattgtctt

SEQ ID NO: 13547 - DNA, 259 bp, Glycine max
tgtgatgggtaccccataatcctacaaacttgaaatgaagaagtgttgaagggtgaaacttcctgcttttattgttgaccacagaatggtacctggagatatgtcgcgggggtcaagaaaccttggggacgtcaagtggggtgctattgcccaaaaccaagcttgaccaatcccgacccaacccgggcatagtcggtcagtgagaacatgtgacgtacctaagcaggcgagctcctggcagtcaacagataaaggaaaa

SEQ ID NO: 13548 - DNA, 389 bp, Glycine max
tatgcgcatatatgcctacgaacgttttcttgcacaatttatcctattaactaagagaaatgcgcccatatacaatcaaggtagcttcattacctagattatttacatgtacttgcaaggtgtatttgttatttacatcacacacgcctgcttggctaaatttacatacatgcatactcaaagcatttcggggtaccaaaaattgcacatgcgctcatcttggtatttctaatacctatacatatacaaacttcatgatgaatcttgactacctacgcaataaggtgctacatttcatgcactatgttttttttttatttttgaggggaatattaaccatgtcccctcccttctcatggattagcatattgcctaacttgaacttactt

SEQ ID NO: 13549 - DNA, 323 bp, Glycine max
  unsure (1)..(323): unsure at all n locations
agcttctcaaggaagctacctagtctatatataaaagcatgtgtaacactggttgtaactttgatgaatgaaagtcttatgagacacacttcaaagntccacttctcttcctcttttattccttcaatttcgtgctccccccttctctctttcttttcctccattaaagcatcctcttcaagcttcttatccaaggcacattcttggtggtgaagctctttcttccatggcttattcccttgtggatggtgtctcccctctcctcttctcctttgccttccactgcatctccatggtggaaaatcaccattgaagctcaaaga

SEQ ID NO: 13550 - DNA, 327 bp, Glycine max
tcaacctttggccaccatttctgcctcttatcgcgaatatagagcattttttgagccgtgaagtgcgtggctacgagtgggacttcgaaaatccaggtttgggtggacttctttctctcttaaatttcgtgggtatggggttttgggagatatgatgggtggttttgttagttttctgctgtgtgatgattatttgtgaaggcatttgctgaaaacttgttgaaatcgccatgtttggatgagttacacataccctctctgtttagggattttgtgatgatgtttgtgatgtttatatgctgaaatcgctgacggaaatctgttaca

SEQ ID NO: 13551 - DNA, 267 bp, Glycine max
  unsure (1)..(267): unsure at all n locations
agcttgtangattatggggtacccatcatatgtggtactaggtggcggtcaagcgatggtgcacaacgagttttccacatccacaaagcgcgcataaacccaccatcccctgttgcccacctccaactgagctcacgtactcccacgtaacccatatcctcgtttctctcaacaccgggtccccatcaatcctcccaagcttccccaacatccaagtaattcaacattcaaatagcacaaactatcacagccaagaaaacagggcaa

SEQ ID NO: 13552 - DNA, 419 bp, Glycine max
  unsure (1)..(419): unsure at all n locations
tataagaacaaaatngccttaatcatttccaaatatgcatgtgaattaggacgcatcaacaagaatcaagccaaggctattgtgcaagcaatcaatggggcaaaacacaccaaatgattataatgatggatggctcaaattctcacaaaggtaaaatcatcactttcaaattgagctttcaaaactatcatgacatgtagagaagaatcaaggatttcaagtcacaaaatgtcaagaacttatattttcaaaacaattacccatttcttgaacatatcctataattcaaagaaaaacatgcaaagtcgtacgtgcacacaaaattgacccaaaatattaaactgaaaatccgacgaaactaacaacattaacaaattaacacaactaacaaattaacaaaaccaacaaaactagcaaaa

SEQ ID NO: 13553 - DNA, 297 bp, Glycine max
agcttgattgatgctggatgaatgacatttcaagaggatagtccgaatgtgaggactaatccactcgccaatcatagaggctcagtagtgaatgcagtggaagaatgggagtctcgggggctaaagtagatagggaatgtgtcaacctccagacggttcatattggaagcattgtgtgcggctggtatgattgaccttgttgttgtcaaaggtgattcttgtttaatgcatccaaggacatcgcacgatgtggagacatgtccaatagcagaggagctgctacaaggaatgatgaac

SEQ ID NO: 13554 - DNA, 419 bp, Glycine max
  unsure (1)..(419): unsure at all n locations
tcatgatgaatcaagattgattcngtgtgttatgatgataacaaagatgattacaaaaagctcaaaagtcaagatcacttcatgataacaaagattatgacattcaagaatgagttcaagattgagtcaaaaacacttcaaggatcaagaggaaatttgatttcaagaatcaagattcaagaataatcaagatcaagattcaagactcaaagattcaagaatcaagagaagacttaatgaagataagtattaaaaagtttttcaaaacattgagtggcacaagaagttttcacaaaatcattaccaacgagttttactctctggtaatcgattaccagattatagtaattgattactagtggttttaaaacgttaagattctcaaaattcaaaatgaagagtcacatctgttgatgtgt

SEQ ID NO: 13555 - DNA, 413 bp, Glycine max
tagaaacaaggattttcaaaagccttgtatagcagatgttaatctcgaagagttaaagcatatattaaaactacaaaccttgtcaagatacggccacatatattctacaaacttgttcagccagtcaagcttgacaaaaaaaataaaaattaaacaaattattcagtagtcaaatcctactaaagtaaaaaaaaaaaaagcaagtacaaattgggtaatagtaggttacccgatcaaaatcgggattctttatccaaagaggaatctcgggaaacattcgttgcagagtctcttgctcttgctccgacaatggcttgatttcaggatcctgtccaagccacagttattaaattcaaacacaaagacaacaatgcttaaagaatcatatgcagcagcatatagctgctacacac

SEQ ID NO: 13556 - DNA, 315 bp, Glycine max
  unsure (1)..(315): unsure at all n locations
tttgagagccctcttgagccttgtttcccttttcttgtgttggagctcactacaagccttaagtgaaaaaccatgatattaccatatccttaagggaatttggagctttggaattggtttgggaataaatgtgggggggttttgtttcattggacaacttggtttggtggctatgcttcatgaagtattntgggccatacttgatgtacattggatattgggtaaatggtggacatgcctaatgaaatggtggttcttaaacgcccaagaggttaaaaaaaaattctaaaaaaaaaaaaaaattctaaaaaaatt

SEQ ID NO: 13557 - DNA, 324 bp, Glycine max
cgagatgaggaagtgtacaagggtttaactccctgcctgtattcgttgaccacagagtggtacctggagatatgtcgcgggggtcaagagaccttggggacgtctgtggggtgctattgcccaaaaccaatcttggacaatcccgacccaacccgggcatagtcaatcagtgagaacctgtgatgtacctaaacaggcgagctcctgtaagtcaacacatgataggatcaaagaccactacccatggaggcttgtgtggtggttggccatctgtgaactttgattgatatatgggatatgggctctggtaatcgattaccaagg

SEQ ID NO: 13558 - DNA, 152 bp, Glycine max
agctatgacaggacgatttatgtttactttttaaatatcactgcagctcttaaagaagttaaaatgaaagcatctttattaattacaattgaaatatataaattggttttaacatatacgagataaggtttaattacaacagggagtgggta

SEQ ID NO: 13559 - DNA, 408 bp, Glycine max
gtggattcatcagctgcgagtcacatggagtcaaatgttagtttctctgatgttgcaaacttactcaaaatgtggctttatcttaaatcaaaagatggatatattatggttacgtattttataatactttaaggggaattacattgagtattaaatggaaaataaaagtgagttagaaaattaagaactctgcccagtatgaaacctagaattccttttggattaattaaagattaacattataaccttggcatgaaattgtgtggtatatccccatgaacacaagaccgtgtctaaacgtttcaaggcgaatacatttaaagactgataatttaatataattgatcaaagttcattcttttttaccgattacaaaattactattcaaagttatatatataattaagt

SEQ ID NO: 13560 - DNA, 302 bp, Glycine max
  unsure (1)..(302): unsure at all n locations
ctctatattcatcttcttttttcgtgacgggctcatacatgagtcttcttttccattcctctgtactcagacctcccgaagcataggaatcgacggatgaagaacatccacagcctacaatcttcaaaggatctacatgatgcggcctcaagagcatctactattgtgcgaagacactacgacctctctatcttctccgaatgattactcaacatagtctcccactcctcatctgagtctccatgcataatnccatgggggggtgggaaggctctggaattaggctactcaagctaatccta

SEQ ID NO: 13561 - DNA, 219 bp, Glycine max
caataagcacggccgacatttataagcttatatgggcacgcctcattcggggggtaaacatgaaaagaaaggacattaaattatatgccttcctcactgccgctccaaacatagaagaacaggaaaaatatcttattatgataagagtttatctggagtaaaataatctaaacacatctctgacaaacaaatgaaataaaagaggaaactgggtgtacc

SEQ ID NO: 13562 - DNA, 425 bp, Glycine max
tgtcaatcacagcatgtatcagtattataggagtcctgtcaagggtcctatgtatgtataatcttaagaagccacaagcttatggaagaaaggtttgaaaaaattaatcattgaatcaaaatatttaatatacaacacgtatgtttgagattgagggtatgcccaaaattcagacatgtcaaagggagtggcgccaaaaagaaatgaaatgtaacatagcacaaaatggtttatgattatgaaccctctgctgcattacattcccaaggctaaacttataatcaatgaggtattaatttaataattaaaaaaaattattgccttgggtcggacttacggaggcatagcatatgccacagagatgaacgattttgtgagagtactgcaatgtttataggcgtatcaaacatcagtttctcgtgttt

SEQ ID NO: 13563 - DNA, 391 bp, Glycine max
  unsure (1)..(391): unsure at all n locations
agctngctctanatntacattgatgtttgtgtttatgggaggaggttatatgccatttttgctttaagagtaatgtcccactaaaactaactttccaaatgtttgccttcgcaggaatggccccgaggaagattgcctcaaagaggtccaggaaggacaaggcggccgaaggaactagttccgccccggagtacgacagtcaccgctttaggagcgttgtacaccagcagcgctttgaagccatcaagggatggtcgtttctccgggagcgacgcgtccagctcagggacgacgagtatactaatttccaagaggaaataaggcgccggcggtgggcaccactggttactcccatggccaagtttgatccaaaaatagtccttgagtttta

SEQ ID NO: 13564 - DNA, 426 bp, Glycine max
ctcagcttataagtgcgggtctgggagacaaaggtcaagtggtcgcgatatgcgaagatgatgttccgtttacattggatttggtacgaccatgccctcctgatttccagttgggaaattggcgagtggaggaacgccccggcatttacgcaacgagcataatgtaaacctttatggttttaaaagctctatagttgggcctaggctttagagtttttccttttgttaaggctttgtgtcttttgtttttgaatttataatacgaggacctttcttcatctgttcctacgtctctacccattctcattcatttgcatgttcacttctttttctgaaacgacagatccgatgacgagtcccccgaaggtactaatacctgagacccgcttatcaacttcgagcaagatatgaatgcaacggaagatg

SEQ ID NO: 13565 - DNA, 411 bp, Glycine max
cttctcaaggaggtgagcttagttatgataggggtatgtgtagataagctctatcttctcaaggaagttttctcaaagaagcttctcaaggaagttttctcaagaaagcttctcaaggaagttttctcaagaaagcttctcaaggaagctacctagtctataaatagaagcatgtgtaacacttattgtaactttgatgaatgagagtcttgtgagacatacttcaaagttccacttctctacctcttttattccttcaatttcgtgctcccccctctctctttctctccctctttcttttcctccattgaagcatcctctccaagcttcttatccaaggctcatcttggtggtgaagctccttcttccatggattattccctagtggatggtgcctcctctcacatattc

SEQ ID NO: 13566 - DNA, 435 bp, Glycine max
agcttcacatcagaccacttccagggtgctggaactactttcatggacttgttggggcctatgcaagttgaaagccttggaggaaagaggtatgcctatgttgttgtggatgatttctccagatttacctgggtcaactttatcagagaaaaatcagacacctttgaagtattcaaggagttgagtctaagacttcaaagagaaaaagactgtgtcatcaagagaatcaggagtgaccatggcagagagtttgaaaacagcaggtttactgaattctgcacatctgaaggcatcactcatgagttctctgcagccattacaccacaacagaatggcatagttgagaggaaaaacaggactttgcaagaggctgctagggtcatgcttcatgccaaagaacttccctataatctctgggctgaagccatgaacaca

SEQ ID NO: 13567 - DNA, 364 bp, Glycine max
  unsure (1)..(364): unsure at all n locations
agcttgtgcttgttttatttaaattcctatgatcatgagcaactaggtgtgtcctgctatgacttgagaaacaaaggtgatcaaataacaagcagagatttaaaaggtactangttgcctcctagtagcgcttctttaacgtcttgagctggatgcttgatggcttgtcggtcacggacctantactttgcttacctttggctctggacttggttgcctattggtcggccatgggtcgtaagcaacgctctaacctttttgtggatgagctgaggtgaactctataggtgatggcggtgcgtctattgcccgctgttggccatccccaggctgctgtgggtgttcaccctgcgcctgcctgggg

SEQ ID NO: 13568 - DNA, 397 bp, Glycine max
  unsure (1)..(397): unsure at all n locations
nttatccatggcttcatatggtggtgagcttcttctatactcatcttctacttaaagtgacgtctccattcatctttctccttctccattcctctgcaatcagacctcaagaagcaaaggaatccatggatgaagaagatccaaggcctacaagctccaatggagctacatcatgtggtatcaagagcatcttcgtctaggtgatgttcttttgcttcctctatctttttgttctgtcaactcactataattcgttggtcttcatcttattctccatgtatatcgtccattgtcttgtggtttggttctgcttagagtagattcaattaaatcttagatctacacttgttcttgcatttctatggtacacattttatagatctactcttgaatcatg

SEQ ID NO: 13569 - DNA, 352 bp, Glycine max
  unsure (1)..(352): unsure at all n locations
gccattaaaatcattgaagacatgtgctcttaccccgacaacaactcaaaggatatgaagattatgaaaaaaggcatcaattaaatgaggatggattaatccccaacttaattatgaaagcagatacacgctctatcactgaagattgagacacccatgagagcttaagcttcagtccccattacaaaaccttcattctcaacctataataaatgtgggattatgcatgttccaagagaatgcattattgatgaaagctattggcaaccatggatgagatcaacttttgttggggaggaaataattcttatatttagtaccccaacaactttcattcaaaatagggctttcn

SEQ ID NO: 13570 - DNA, 367 bp, Glycine max
  unsure (1)..(367): unsure at all n locations
tcanaacctcctcttcatcaatgtccagatcagatactctacggtgcaggctataaaccaacttagcaagaagtaaaaaaaaataaaatttggttactcaatcaaaatgaagctccactcacaattttaatgttgcaagttctttagccaaagccatattcctttcttttaatgctccaaccttaagagattcctagcgacaatctctgctatcttaatgaatttgtcaagtttgcaggctacaagaacaacaccccagatactagcatatactttttgatggaagcttgcttgtggagcttctatggaggttggatctttgagcttcaatgaggtccttcaatggtgattttacaccatggagatg

SEQ ID NO: 13571 - DNA, 370 bp, Glycine max
  unsure (1)..(370): unsure at all n locations
agcttcttatccaagacactntnttggtggtgaagctcctccttccatggcttattccttagtggatggcgtctcctctcacctcttctcctttatcttctgctgcatctccatggttgaaaatcaccattgaaggacctcattgaagctcanagatccaacctccatagaagcttcttaagcaagcttccatcaagtggtatcagagcacaagagcttcaagtaggtgctccttaaaccttcattaattntcagctntaccttctcctccattgttgtttcttcatttatctccatgtatctcctcacatgtcttgtgctannatgttgtaacatgatnnntttagaatttcacccgataaacttacta

SEQ ID NO: 13572 - DNA, 342 bp, Glycine max
  unsure (1)..(342): unsure at all n locations
tgtccaanaaacttgtgatgaggttctggatgtacggatgagggcctgaaccacattaaacaaatttgaggtcgtggatgtacgcatgagagtctgaaccacgttaacaatataaattgtgtggatgtatggatgaagacacgaaccacattaaataaatgtgtgatctttttctatttaatcctatggcgttgccttttgttttgtggtgtgtgctctcatcaatatgaataaagagatgtctgtgttttcccacatcagatgagagagatgggaaaataaaatgacaagtggcttgagaggagtgaataaaagggattctgctactgattgagaagagca

SEQ ID NO: 13573 - DNA, 337 bp, Glycine max
agctttggagtttccaagtgccaattcgtcttcttcttttgtccagtcttcttttggcttcaattcattagtgggctttccttctgtgtccaacatcttgggatgttcccagcctttgatgacagctttccaggttctgctatccagtgatttgaggaaggccaccatccttgctttccagtattcatagttggttccatccaaaattggtggtctgttcactggtcctccttctttctccatgttcatcagaatttatctccctagatctcactcagtgatttcgagtgccggctctgataccaattgaaattctgataccaatgccagatgtcgt

SEQ ID NO: 13574 - DNA, 410 bp, Glycine max
tgccacccagctcacccaggcaagcaaggttgcttccttcataacaaccttcttctggaggaagaatctggaaggcccaagtgggcttgattgctatttgtacccccctttttactaaatgtacccctctttaccttttgtggtgattctttttccgtaacgttacgaaactttatgaattttgtaacgatacttattttctttccgtaaggttacgaatccttacggatcatgtatttactcttttttagctttcgaagaagttaccgaaactcacggattgcgcaacaacacctccttttggttttcgccacattacagaatttcacggatcccgtaaccctgtttccttttgatttccggcgcgtctcatgacttacatattgtgcaacaaaagggtaccaagtatc

SEQ ID NO: 13575 - DNA, 345 bp, Glycine max
tttgtcctgtttctcatcacaaaacacattgttatatacccgccattcacttacaaacaccttgggtggaaagcaatacaagtataattattagggtgatgatactttcacgtatcacataatctttctttcatcattcacatagtatcaatcaacatcattccttttctccctgctattccctcccctatttcatcaaaaacaacggttcaaaattctacaagtgagattatgagaacatattattatgtgaagaaaaacaaaacagaatcctaaatatttatgaattcatgccaaaagacacacaccttttcttctcttctaccaatctgccaagaccaaggg

SEQ ID NO: 13576 - DNA, 409 bp, Glycine max
  unsure (1)..(409): unsure at all n locations
tcaccaaacaagctctccgttatgaatcccattgatcataacagnacatgtctttgaattgtaagacctactattaaaggctttgtttacaatgaaggtcaactaataaaacatttccataattctccagttccaatctagtacaaatgtaaaatgttcaacttgccttcaatattttatttttctgaaattcttctatgcaaaactgagtccacaaaaatatcatgccttcttaattgcagaaaattgacttaactattgcatttgccggcttctgaaacacatagcttanatggcccaatcagtttgttattttggtaacattagttaaaaggcagacagaaatataagcagatgagaaaatataggtaagaaaccattatctaccagaaacctaatagcagatatt

SEQ ID NO: 13577 - DNA, 288 bp, Glycine max
tttttcccttgtaaaagggcttaaaatttaaaagggggtgaatagaattccaactatctaatttaaatttatttgatttacccatccagaattctttaataattctaataatctcacacttaaatattgacatcaaagccatgagcaattataaataaaagagtttatcggaagagaaagtgcacactcagttgtatactggttcggccacacccttgtgcctacatccagtctccaagcaacccgcttataagttcactaactcgcataaacctttacaagttctgg

SEQ ID NO: 13578 - DNA, 405 bp, Glycine max
  unsure (1)..(405): unsure at all n locations
cggaagagtctgtttcagagatctttactangccagctaatttcaagatagtgctagattgcagaatgaataggacatgctgacttgttcacttcagtacttgacatgaacctttgaatacctttaaagttcaccttctccttagaacgatacattcaagtattctacattcacatagagagcaagaatcttttgatctcaagaagcaatgcctcacatcatggagcatctttacagacccatcttgtatctatcttattcttagttgcgaggcgcatgacattacacgccatattgtgttccatgagaacatttcctcgatgtatctccttagaggagctgaaccatgccatattgngtgtcagatggagagagcaacgccgggtgtagaaccctttctcattn

SEQ ID NO: 13579 - DNA, 79 bp, Glycine max
agcttgcttgagaagcttctatggaggctgtatctttgagcttcaatgaggtccttcaatggtgattttcacccatgga

SEQ ID NO: 13580 - DNA, 323 bp, Glycine max
tggatcttccactttcgccaccactatcatcttagactatattttaatattagtactttgattgtcagccttgtattttggctatattattatggtatttgaacaatatactattttcttatttgcatgggatggttgaacaagtaaggtatttgactatgtggattatatagctaatctatttatgattgtttgcttcatggatcatatggttcttgcttattgcttcatggtttggctgttagtttctcaatgaatgttgtatgaatgtctacttatatttgcatacttaaattttgatacgtaatttggctttctgttga

SEQ ID NO: 13581 - DNA, 315 bp, Glycine max
gcactgagtgcactacatgtatcattgtatggctgacaagctagctgttcggctatcacttaagtgtgtactgtaaatgattgtttattataaaatataatgaaatatttaaaattatacagattttactaaataaatgaatttttattatggtgaattaaagagaaaacaattgcaaataaattatagaattgctagtcatcatcaacttaaagatagcagcgaaaccccactaacattatcacctagtaacttctaaattttttttatgatctttctctttctatttaactttattagccttaataagtacta

SEQ ID NO: 13582 - DNA, 211 bp, Glycine max
  unsure (1)..(211): unsure at all n locations
tcttctacacttggagtgatcacatgcaatcctcttgaacccttaccacccactctgtcatcatgccgagactcangaagcccaacagggttagccttctctaagtattctgaacaaaattcaatggcttcttctgcaatgtacctctcaacaatagatgcttctggacgatatagattctntgtatacnctcttaagatcttcatgtatc

SEQ ID NO: 13583 - DNA, 77 bp, Glycine max
ataaatctttgcacaacaatgaatcagttgcataccatctggaagggaaatgctctaaccattccctctgaagggaa

SEQ ID NO: 13584 - DNA, 612 bp, Glycine max
  unsure (1)..(612): unsure at all n locations
ntatggcacgtcgacgatctattacactcagactgtgagcctgttagtnganacagagacgcccncatctntgaagtctgccactggatctgcaacctcaactagaagactangagtgctagggtcctntagatcagttntaagaccaattntccccatgtcagnnnncaacctgttactagtacagctatcagttacaagttttcccttggagctaccagaatcagtgtggataccggttgcagactcagtgccagaaattccatgcgcaggatgttcaaccttgcaatgagcactttntgccaggaatgtgtacaanagccaattcgaaccttngtataaagttctagagtgggtatgcagttacaaaagcaatatgttaccgcaaaacaaataaagactaggaaccactaccgttctctcattgntatcacagatcatagaagcagtatgctgtatgttgaatgaagtacgagccctgacananatgtgttatcangatctactatctcattcgatacattatagaccaagaccaaccaatgcaccccttattcgatactttcatctcaccttgcagagcccacattacgctctctctattgttcaaac

SEQ ID NO: 13585 - DNA, 436 bp, Glycine max
  unsure (1)..(436): unsure at all n locations
tctctntaattccttgttcttcatcttattctccatgtatatcctccattgtcttcgtggttggtgctcttaagagtagattcacaacanataaaccgattaaatcttagatctaaacttgttctcgcatttctatggttcanaatttgtagatctactctcgaatcactgttttgtgttgatgttaggttctattcattttcattcataatattcttgtattgaacctttagatctaaatgtcttccaaatattgattaaaaaaacacaaaattaatgtcatcactaatcctgtgactagagcatgttagcatataatcgccatatgtctaagntggtgaatttatttgttatgaatccaatcattgtcatgattctgcatcctactatcttngatntgagttaatcatcatgtattagtcatacatgtctaatc

SEQ ID NO: 13586 - DNA, 103 bp, Glycine max
tatggtgccttgctatggagtctattggcttgtgtttctgatacatgggttgtaatgctagcttatgattgatatggctgcatgccgtttgttgtgctacccc

SEQ ID NO: 13587 - DNA, 239 bp, Glycine max
  unsure (1)..(239): unsure at all n locations
atctggaacatgtgcatatgctatacancccaaaactntaagatgnnttgataatggtcgccttccactctanngcttctttggcatcttgtcatgaacactcttagtcgggcacctattcaaagtgtagacaatggtagcaactacttctgcccagaacttcttaggcattttcttggccttcaacatgtacctcactatatccatgagtgttctattcttcctttcagttacttcat

SEQ ID NO: 13588 - DNA, 616 bp, Glycine max
  unsure (1)..(616): unsure at all n locations
naatacacattagacctttgatctcatctgnantcacatgggtgaactcanggagagtgtggttctggttgatgggaactcangcggatgaagctntntctgatgctnggcattcagatgcatcaaaagctactggtgagaacatcgctcacactcgttccaaggtatatatttctcctangctgtggtatcttagaaataatgtgattcaagcccacgattagctgctaacagacaagagtggcaataataactcggacatttcatccaaggtgttctgggaacttgctctgangaccgtctataagtgtgtacaagccctcgtgaataggattgatgttgtgtgcagacccttgatatgctgttgtgacatgacacgggatacttcacacaaacttgcattgtctgtccttgagatgtgacagaaatgatccctccacactagtgtgtgacatcttacagccaacganagggggagaaagcngangtantnnntcagtaactacataggactcttaatganggacatgtcttatagggctcctcacactatgaggcatcttagattgtgcatcagatgtgtctgaatggatctgatcttgncgcttcatgacag

SEQ ID NO: 13589 - DNA, 104 bp, Glycine max
  unsure (1)..(104): unsure at all n locations
tgtggtgacatanacgagcatcgcaaccgctccacgccaattcattcacaacaccacatcaacaactaagctnttgccgagaacacgaagaatggatgagaaac

SEQ ID NO: 13590 - DNA, 114 bp, Glycine max
  unsure (1)..(114): unsure at all n locations
gttactgtagttnngaagtgctcagagcttcaacattcaatatcgagcgtntcgatatattacgggactgaatcagacatccgagtaaaaagttattgtcgtttgaattatctc

SEQ ID NO: 13591 - DNA, 136 bp, Glycine max
  unsure (1)..(136): unsure at all n locations
accacttanacctcccaattattcttcaatntataattataaccaacatacagtataaatatgatgattaataaatttctatgtnagtatttatgacttaaaaagaataatttaatgagatattagaaaaagttct

SEQ ID NO: 13592 - DNA, 172 bp, Glycine max
  unsure (1)..(172): unsure at all n locations
cttaatcccagctggttngaattaataataatacttgtcactcataanaatattaatgcaagttgcatgacattcttgtctgtctcactcatgattagcttaatgacctcttgcataagctcgttgaaaagatctgagaccagttttatntatatcgattatcgaagtccct

SEQ ID NO: 13593 - DNA, 190 bp, Glycine max
  unsure (1)..(190): unsure at all n locations
cattctacccccatacttgcctttatttaagcacttacttcatctcattactntgcaacatacacacttattaaattcatttgtacttacannatttttttaacaaaacagtgtgtatatgctactcttcttttgaccatttaattcttacccaatatctcccccacaattggaacaaatttaccttgat

SEQ ID NO: 13594 - DNA, 202 bp, Glycine max
ttctcgctaagccaatctgctggcttagcgagcgtccgctaagcacaacactcatgggctaagcgcgaggaagactctggaagaagatgagttgtacaggtttgctaagcgcaccgcttcatctcactaagtgcaccgcttcagtccatccgctaagcgagaaagcacacgctaagccaaaattcactaatatgcgctaagc

SEQ ID NO: 13595 - DNA, 219 bp, Glycine max
ttttcatatcggcgctgtcacgattcctagtgaggatgcagagtctcaactcttataaggcagaaaaaagtgcagtggaagcttttgagacagcccacgttatgggtgttattatgttcgacttgccaaattgccctaagaaacattgtcaactagagacatccactgttaatggagaaggatcatctacccatactgttactgcgtcttttgaaacta

SEQ ID NO: 13596 - DNA, 131 bp, Glycine max
cttcatctcttcaacatatcaattcttcactcttctcaaatttctgatctttcttccatttctaaagtttgtcaaacttctttcataatttgcaaactggcttattttatcttttccttgcaaaaacaaga

SEQ ID NO: 13597 - DNA, 190 bp, Glycine max
gctggctaaccacttattatgcagaactggttgtaattgattggttaaagaacggctgaagtagatatctgtagagttttaccaattgggtgcccataggtcttgccctagtactgaaatcttcttggatgaatattgtgtaatatcgtagctggaaacacttaatgggtgtttgtattatggataattc

SEQ ID NO: 13598 - DNA, 659 bp, Glycine max
  unsure (1)..(659): unsure at all n locations
ncgcgtagatgctgatcacnattcaagtgacgcacgctattangnacactatagntactcaagctcggtggatatggggtacgcgccatatgtagtactatgtggcgatcangagatggcgcatatactagtctccacttncgcanatcanacatgaacccatcatcctcagttgngcaccttcaactgagctcacgtactcctacgtagcccttatcctcgttcctctcagcactgggtccncatcaacccctnncaagcttcataatatccaagcaatntcaatccaactatcatgaactaccctaaaccaagaaaacanggcagaagcagaaaactctggccanacacatttaataccacagctntccctactcanatacnncatgtacattctcttcgttctgactcgtaaaccgttgatcgactcgaaagtntactgggatgtccagacataatctaaatttgaccgtggactgcttaaatgtcagaaccatatgtactacttccataacagcatgacagcatntcgccatgtgaaaatctgttccaaattacagctnttgtgccaatngccaatcgaatcatctaccacatcatttgtcaantgatctacagctgacatgtaatcatttaccaacagctcacacgatctattt

SEQ ID NO: 13599 - DNA, 468 bp, Glycine max
  unsure (1)..(468): unsure at all n locations
gtatttgtgccttcataaccacctatagtaccttaatctagctgctctaataaactaactactcacacccttattctaactacctgctgccanatacatcaaatataaaaagtcctactcaaagactgtcnaatgcctataatcaggctagacctatatactagatggcaaatacacccacaaagaaaaactatctatattacaagaaaatgacccatcttgccatgactcatattgatattacacatgatgccgctcagaattgcaccttgtgccattgtagcccaactccgaataaagaaaaccaccatctgaaatctgttacgaacaagagatttccacctagttctactttcaactaaagatatctatcgagactactcgagaatattgtcaatctaatttacgttgaaaatacaaagtagtcttataagggcgataatagccttgctcaactcccagttgttg

SEQ ID NO: 13600 - DNA, 179 bp, Glycine max
  unsure (1)..(179): unsure at all n locations
catcgccaagtaccaagaagagttaggtctagccacggcccacgagcatagaatcgcggacgaatatgcncaagtatacgcggaanaagaggctagaggaagggtgatngactctntacaccaagaggcaaccatgtggatggatcggttngctcttaccttgaacgggagtcaagaac

SEQ ID NO: 13601 - DNA, 138 bp, Glycine max
cacctatataagaacattctcgaataaaaaattatgatgagaagaagttcgtattgaagttgggattagaggctaagaggatctgattgtgtgtggatggttgcatgttgtaatgatggagcgctaactaaatgcaag

SEQ ID NO: 13602 - DNA, 247 bp, Glycine max
  unsure (1)..(247): unsure at all n locations
cttctctctctctcgaaatagctgaggaaaatagttccgtgaagaanatccaagccgagggcgcttccgtaacgttccgtgagtaattacgcgaagattctcgaccgttcttcaagattcatcgttcgttcttcgttgtcttcagtcttcaacgagtaagtacctcanaccaagctnttcaattcattctatgtacccgtggtgggccacatcttggttcatgtatttttattctcattttcattta

SEQ ID NO: 13603 - DNA, 607 bp, Glycine max
  unsure (1)..(607): unsure at all n locations
ntataccttgatgacgtatctatngacactcaagctntacagcagatntagtagtgacccactaatctagaataannataactaantgccattaacctatggaattaaaaaanacttaatggctgagtgtaactganattgtggcaaccaaaagtcaccctncaacagccaacttcagccaccattgtgtctccaaaaggctgatgcctangntgccaattgngcccttattacaactngaactannacctaactaaagccctttagttgattaacccanaacatatttttggtcagccaactntacaaggatngngccattatntagacaaactannacactctaaattagacanagtggtgtcattagtccctctcatttggccatgnacaactcacacctngactttctcttgaacttggcttgatcaatatatgacagactgttaaaagctcttgcttcttcttagcctgatagtctcagtctcagtgactgcctgcttgcatgctatagacccgaagcatactatagattgacangaatcatctgcacagtatacccaagaactgtacatatctatcttttgcaatatgttagactgattat

SEQ ID NO: 13604 - DNA, 179 bp, Glycine max
tactgctacgagcatatcccagctgaggcactgacagttcatgctgcactcactgcatacaagagtcatcactccacagcctgacgaccactgcagagtcttagtgtcgcagcttactacattgaaggacaacctcctgtgagtgaagagactgatttaaacgtgtcctactcactcta

SEQ ID NO: 13605 - DNA, 303 bp, Glycine max
  unsure (1)..(303): unsure at all n locations
taccaccggatatggtactttcacaccttcattcacaactnttcctctnttcttctctctagctttgtcacttctactcctctcttcattctatttgttcatcttttcattntatcatttctctttcttntctacttcttttctgggcattaattctttttcttaaccattattgtattcttttcctgatgcttcacttctcacatatcttcatttatcagacctttctttcacagcctcttctggatacacactatctcatcctcactcacaacctctactcttgcatacagcttcattctc

SEQ ID NO: 13606 - DNA, 602 bp, Glycine max
  unsure (1)..(602): unsure at all n locations
tgtactgccggctctctaagcacctgggctgcagctcttcgctcaccctttgcactacactaacacaatttcacctgttatgtcactacgccctaagaagcagtaggtattagcttctctcatagccgtcttatganaacctgtactatacacatacaaccacctgtcgtattcctaaaacttcataaggcagagtcaccatactactattctaagttgtcttcaacagcacttactactagctacgcacaacaatgtgtgaggtccattcacaccaatggagtggtggacaacatataatatggctagcgcacaaaggcatgtcacctanaagtgctacggagatnagggaagactttcagagatggctctgtcaaacgccagacttggcgatcgttctgtcacttagctcatttcggcttaatcagattatagattaatcaatgagtacaatgttgacgtcgtgccgatgaatanatactcatgactatcatgtcatgcatgtggatcagcgatcagctctcaacactcatgagagctcttatcttgttagtcctatgcactcaccttacatgaagacatagaaattgtttgttgtatan

SEQ ID NO: 13607 - DNA, 146 bp, Glycine max
  unsure (1)..(146): unsure at all n locations
gagaatcttcgcgtaattactcacgganatgttaccgaagcgcctcggcttggattttcttcacggaaaccaatttcctaagcaatntcgagagagagagaagttcctaagaggctgaacccttttcttcttcactttctccccta

SEQ ID NO: 13608 - DNA, 224 bp, Glycine max
  unsure (1)..(224): unsure at all n locations
gcacttatgaataaacanataaatcctgtacaatgtataactgtatatcaatatcatataagaatatctaactttggaaaaatacatgtgcatatgtaactcttagatgaataagctaactaactaacaaactatatgttaaataaagatcattatgcatnntatataacatgcagtcacttgtaccaatntgcatggccaatatatagctcgatcatgcacct

SEQ ID NO: 13609 - DNA, 291 bp, Glycine max
  unsure (1)..(291): unsure at all n locations
gcttgatctctccatgtctactgagaggtcatcatatctttgctgaaacgtcacgatggcagattttcgctgactaatcttgaaggaggaaagaacctcactatgaatctctgctctacctcttcccaagtgttgaggcttttattaggatgtgataggagccatgtnttttccctactagtgaaaataggaaagctctgaggtacacagcttcagcatccttgtcagaagctcccatagtactacatagttccatgaaggtagacaaatgtgtgtatggatccacatgat

SEQ ID NO: 13610 - DNA, 645 bp, Glycine max
  unsure (1)..(645): unsure at all n locations
atgatcacgattgacgnatcctatnacacnttagactactcacgcgtatctgaagtgggcctggaactngaggtaccatgcaatgatagcaccaatattgntaggctgaaagctatgttcaaggaccagtcctccagaaaggtataagagtgaaagaaagactgacggaagaaagctcttgatggattntctatatctctaanatacaagcattgccttatttatgctaatgtacttctaacggcacttgtccttttgtgccaacgacaatttatttgcaatcataggataacantagttattaccctatccccaatagccaaccttacaacgaattggcacaaggagacaagcaaacagatgcatatggcactcaggtagctcctcctctggtactgtttagacatctcactacaatagagggcctgtgaggtactctancactactgtatctgacctcttggtctgctctgcaccctgatgtgtgtctgcactctgctatgagctcatactctgctcctctgctcgatcacaatacattatttggatgagaagaagaatctctttcatcatgtatcctagtgactgagcatatacacttgtctctagatcattcattccacaagacactcattagtatgattn

SEQ ID NO: 13611 - DNA, 187 bp, Glycine max
  unsure (1)..(187): unsure at all n locations
tgagaatgacggagaaacccatgttgtgactgtcattcctatacagtcaagtntcccaccaacccaacaatgtcattactcagccaataacaaaccttctccttacccaccattcagttatccacaaaggtcatccctaaatcaaccacanagcctgtctaccgcacttncaatgacaaacaccaac

SEQ ID NO: 13612 - DNA, 261 bp, Glycine max
  unsure (1)..(261): unsure at all n locations
cattaaaactntattaatactctgtctgannattcatttgcagaaactgtatcanaagaaattcttctaggatctatngaatcctattaagagtaaataaagttctaaatctaaaaagtgccacacgtcatcaaaagacacactctactntgatagacctactctgatgcanagcanacagtttcttactgtagtgctcaacatgaaagccaactagagtggtgtttcaacattaagaagtacgtgcatgtaatgcaagca

SEQ ID NO: 13613 - DNA, 115 bp, Glycine max
  unsure (1)..(115): unsure at all n locations
tcgattaccagttcatctngaacgtggaattcanattcaattgtgaacagtcacatcctttcataataagctttgtgtaatcgattacaacggattggtaatcgattaccaatga

SEQ ID NO: 13614 - DNA, 171 bp, Glycine max
ttctgataaagatcctctgtggatcaagttgtttcttcacagctgaggataatatttgtgatgttaaactggagtgctatttgaacattgtttgtgtttttttgcacaacaatttttacacttgctaaagtaaaacagaatggcctatgcatgtgtcattgtgacctgcta

SEQ ID NO: 13615 - DNA, 516 bp, Glycine max
  unsure (1)..(516): unsure at all n locations
tgtgatgtcgtgaggccttgatctcagctatataataaagtctatgcgtgttcatgccggttgtaataatatgtttttatttataaaataatctaagaataaatatatntntaacatagttaaattaattatattatgagaaanaggcatgcactaacacatattaatgtgtactatactctacgttttagatccactctccttgatatgtaaagagtaagctcaagtttttaagatacataattaaaagaataataagatattgagtatagtagtacgaaaataataaataatatatatattctcatatgggacanatagcctatgtctattttggctaaagtcctatagtaagacaataaaattaaaatagagagtattatattttatttgtactaaactcttatataagtgacaatatgagggcacttacttaatttaaatcctttgtatatcttaatatactctaacattctagtagcccaaactaacttgtaatatacttaaaaagtttat

SEQ ID NO: 13616 - DNA, 611 bp, Glycine max
  unsure (1)..(611): unsure at all n locations
tgtacttacacattgccggatcttgagcacctgngctgcagcttgaggagttgatgcatagggacaaattanncttanagtatgttctcattggattcctaattntcaacttacctatatggatgtgacatcatggcatatangtcccaactttccatcgtggattcagtcacaaaacaaacttcaatatggtggactgtctaacacggcgattttagattctattcccacttggntcttggaaccacactctcagggtttgtatttaaacctctctcataatcatatccatggtgagctngtgactacaatanaaaatccaatatctattcaaactggngatctaagcacaaatcacttatgttggtaaataccccantctttcanatgatgtgtataagtagacctttcaaccaattcattctctgaaatcatgcangaaatttatgtaacatctgggacagccatgcantagaattctaatcttgctcaatatctgcagagaatactgatgttgataatggcatttagggagtgattacaagcacatttgtggaactcccatcatgggtctgctgctgagcatagaatcgacactgtctcgatatctt

SEQ ID NO: 13617 - DNA, 274 bp, Glycine max
gcatgcctatgtatctctctgacagcctatatatgatggttccacattaactatgtggcgtccaaggatgatgttgatgctgcaataaacgtgtcatggagttctggtccatgataaacttatgactacaaatatgtcgtactctaagccaaacgatataaacctttatttttatatgtttttacactggtatattatgtacagttattctaacaatgactactgtgaaacttgaatctatgtaaaatgtattcaattctatcagcttatgcat

SEQ ID NO: 13618 - DNA, 210 bp, Glycine max
  unsure (1)..(210): unsure at all n locations
ctccatgaatccattctcttcctaatagcaagttagaattagccttggactgaatcaccaggaatagagttggtcgaactatactgcctacagcaacatctacttgaatggctcccaaagaatagccagttntaccttcataattcgaaagcacaatgtngtgggcagatagatcagtgtcacgtttcccgatcttgtagagcatagatc

SEQ ID NO: 13619 - DNA, 643 bp, Glycine max
  unsure (1)..(643): unsure at all n locations
taatgcgcaccattacgtacacantgantactcagctngcatancanantctgtccttatgaagactctgaagcatggactcaaagcactgagagtctngagtagatgagtctgaaggagctggtgtaagagtagcagaagtggaaggagctggtagagtagaagaaaaaggaacctcagctggtcaacctttccttcttagccccttgaagtaactgttagatcatccatattccaacaanttttcttaatgtaggccacagtaatggccgngctcaagctctcatangtcagaatgtcagaagtaactnctctagctctgcttatggcagtgatcaaggctagagatctgagcctaganggagtactctgagaaatagaagagatctgacctgagataacggctcccatgttcatgtcatgtgggtaccaagcatagaccaactagctctgtcatatcaaatctgaggtgtggatgtggagctaggtctgagagcttcatggctgcctcacatcaaacaacccttgcggatcaagctgctcatcttggtgtagcctattganactaagagtggaagatccctcttacacctgagtaaggatcatagctgctcatcattgacaggcctcttactgctgactg

SEQ ID NO: 13620 - DNA, 177 bp, Glycine max
accttctcttccatcgttgattcttcatttattctccatgtatttcctcacatgtcttgtgctagatgtttgtaacatgattctatagagtttccaccgattaaacttgttatagaagctagatctaattgtctatggttcacatgtcttgttctcgttcttgaaccatgaattgtg

SEQ ID NO: 13621 - DNA, 201 bp, Glycine max
  unsure (1)..(201): unsure at all n locations
gcatcacctctcaatgagctggtgaagaagaatgtggcattacctgcggtgaaaaacaagagccaagccttgctttctccaagnaagctactaaggacctgttctactcttctgattttctaaactttgatatatanggacttgatgcttagataacattctctccattacanagtgtgggaaaagccaaatggattctat

SEQ ID NO: 13622 - DNA, 603 bp, Glycine max
  unsure (1)..(603): unsure at all n locations
atgtactctgccggatctcagagcacctgcggctgcaagctttgagtnanacatnggaccaactcattntatntanaaaaagaagtcgtatccaatcaaggtctgagagaccatacnnagttcctaacgatntctaattatgtgggccattaagtctatcatatgctgacaatagccgagaagcccatgaatctcttcgggggcggagtaggtgtctgccatcgccttggccttggctaacaatcggngaagttcttgactcccgttcaaggtaagagcanaccgatccatccacatnggtgcctcttggtgtaaagagtcgatcacccttcctctagcctctttttccgcgtatactggggcatattcgtccgcaatcctatgctcgtgggccgcggctagacctaactcttcttgtactnggnatgatagctacatgntggctccgctccataaacctaaacaagctcttggacctgacaggcactactctcttcaaacctgcctgtctccgactgtcctttcttcctcgcacttggtactatgtcccataactcgcaattgtccgctctctctgcagccttgcttgtcaggtctgcgatg

SEQ ID NO: 13623 - DNA, 134 bp, Glycine max
  unsure (1)..(134): unsure at all n locations
tctctttttctatttatttatntaagctatgccacatgtcccccattgagtggagcaagaagggcccactttctctttngattgtgacctatactcagtcacanaagtgagaaaatctgacctttgaaaacgct

SEQ ID NO: 13624 - DNA, 616 bp, Glycine max
  unsure (1)..(616): unsure at all n locations
ntgcactgtcggcgatctcagagtcacctgcngcatgcaagctntcaacanatgtcttcacanataatcatcacacagcagaaacctagcaagactactcatcatatctnnccaaaccccatacccacgaaatntaagagagaaagaagtccacccanaccttgaatttcgaagacccactcgtagccacgcacttcacgactccaaaaatgctctcctttcgcgaattggagcagaaatgatggccaaagggtgaagctntgcttggagcttcaatggagaatganggagaagaanatggcaacgtgagggagagagagagctatctcgaaaagtgtgggggctgagtgaagagagagaaagctttttggtntaaataaaggggtttctcttttctattatnntattaacaatgcccatgtctcattgagtggacnanagggccactntccnttttgactggaccatactaccacaaagtgagaaatctgacctcaaacgctaaatctgcctcgttgcggccgtctctgggtcagtctccattctctcgccgcaggccagttcgaagaccatatttataaacctagataacccgacgtgttaaagtgttcgtaat

SEQ ID NO: 13625 - DNA, 304 bp, Glycine max
  unsure (1)..(304): unsure at all n locations
gtcgtatctagtcaaggtctaagagaccatacaagtttcctaacgatntctaattatgtgggccattaagtctatcatatgctgacaatagccgagaagcccgtgaatctcttcgggggcggagtaggtgtctgccatcgctntggccttggctaacaatcggggaagttcttgactcccgttcaaggtaagagcanaccgatccatccacatggttgcctcttggtgtaaagagtcgatcacccttcctctagctctttttccgcgtatacttgagcatactcgtccgcaatcctatgctcat

SEQ ID NO: 13626 - DNA, 206 bp, Glycine max
  unsure (1)..(206): unsure at all n locations
tctctactntaatcgattacttctctcttaaaatgtgcttcagaagtgatcacaactnttaataaaaatagaataaggtgtcgtaatgggtgcaagctatgtaattgattacatcaagaatctaatcgattacattgttctttgaaattttccagttggtgggaagaacactntaatngatngaaatgataatataatcgattact

SEQ ID NO: 13627 - DNA, 77 bp, Glycine max
tataagcctctttcctttctatgagcccacttctaattccaatttattcataagacacaccaagactttgggtctat

SEQ ID NO: 13628 - DNA, 541 bp, Glycine max
  unsure (1)..(541): unsure at all n locations
catagaaccaacacgctctcaatatttgtgaacttttgtganaggtacttgttnttcatatcccaaggtacancttctcagttagttggcccataccnnnattggttttagctaannagtgttcttatccaatgatgtttggttttccctaggtatataatatataaacaactntagtaaaaaaaaaaaaaagatcgtgtgaagcataagctgctaaagaanaacttgatctttntattaatactntaaagggattgcaaaataaactattggtagattcttgctgagaccagctgngtaggtataaactgctaggtanggctacatacgcaatatggatatattttacttttttgtttgtatcaaaagtggagaaggaaggnatgccccagaattcatcagatactgacatcaatnggtcttgaacaagatgcgacggggataccgatgtgttgattctcagtacagctatcagaatctgtcatcgcattgatagaagtcattagactgatgcaatcaatggatggtctngactactgat

SEQ ID NO: 13629 - DNA, 280 bp, Glycine max
ctgtggtacattttgctacactaaactccttcaatgtgtgtagctagctgttaaaataatgtcatgcaaaaaatgatgaataaaaagtgttttttttgtaatcactgcgtgtaactactgacctcaccagtcactcctcctatgttgcttaaagcttgctacactctctttatgactagaaacccttgtgctttctagtgggttataattgccctttttctgactcttcctgatccagtgatcttcttaacatctttgagtaggttcaaaaaaaaaaaac

SEQ ID NO: 13630 - DNA, 65 bp, Glycine max
  unsure (1)..(65): unsure at all n locations
taatgatntctaattatgtaggccattaagtctatcatatgctgacaatagccgagaagcccatg

SEQ ID NO: 13631 - DNA, 376 bp, Glycine max
  unsure (1)..(376): unsure at all n locations
tctgcagcagtgggtacttctatngtaagctaccacctcctgagacaccttttccttgntacctatcagcaccatagttgacatttaactnttntctagtgctcaatgcacactccanattataaactcattcaagttaaatgttattggtgntgagcaatgttgtcaaatggtggcaccatggccaaatggtgtggaggcttttttgctacccaacctccannaggaagttgtgaaggaagcctgtatggcgcaccatangaacaatgcatgttatatggcagaattctgcttctgcatctgcatgataacatgtgtgagaacaacacaaactctatgtaatataacataaagaggtgagngagcttttataata

SEQ ID NO: 13632 - DNA, 614 bp, Glycine max
  unsure (1)..(614): unsure at all n locations
ntatgtagcttggaccgctgacngagcatcctgagtcgcctgcggcatgcaagctttcttggaaaacttncttgagaaactagagcttatctacacatacccctctcatanataagctcacctcccttgagaagcttcttaagaagattcctaaagaagctaaagcttagctcacacacctctctaatagctaagttcacctncttgagatgagaagctagagcttagctacacaccccctataatagctaagctcacccccatgaganaaaacatganaatacaaaaaaaaaagtcgttactacaaagactactcanaatgccccgaaatacaagggctanaccctatactactagaatntcaaaatacaaggcccanacgaagaaaaacctattctaatattacaaaaagagtgatccaccttgaccatgactcaaaatctacctaggtcatgagacctanggcctcttagtactctagccaagctctggagtctctattataccctgggggaggatgatcatcctcacttgaaggattgactcaatcgaggtctatctctngcatgtgtggttgtaagatgaggctgaaccctatgcatctctgagaaggn

SEQ ID NO: 13633 - DNA, 170 bp, Glycine max
  unsure (1)..(170): unsure at all n locations
ttatctagcttactatggcggcgcttctacttctgctcacgcacttacactgtcttctccacatgctctttatatcgctgatggctatagctnaccatcttccacattccttggcttatcagctagtatgcgcgtgcttgctaaccattcggtataccgccccactaact

SEQ ID NO: 13634 - DNA, 555 bp, Glycine max
  unsure (1)..(555): unsure at all n locations
taatgcggccgattgatctatttccgctcctgagtatgacagtcaccgctgtaggagcgtagtacaccagcagcgcttcgaggccatcaagggatggtcatttcttccgggagccgacgtgtctatgctcacgtgatgaccgagtatactggattntccagtgaaggagatatggtcgccccagcggtggggcatcacttgtgttaccctcatgngccaagttcgatccannaagtagtcccttgagttntatgccaatgctctgccaacagangagggcgtgcgcgacattaggtcctgggtgaggggtcagtggatcccagttgatgcanaatgctatctgccannctcctgngatatcctgtggtgctggaagaggccangagtctagtatgccanaggangaaccgtctgatggtctatgaaaagcatcctcanttctatgataccgggcangatatgcctgactgctacagagatgtgcgatatgccccaattacacctgctagattgtacttgtgtacactctgcacatatatcgactcctgcgatgcg

SEQ ID NO: 13635 - DNA, 189 bp, Glycine max
ttaggccttatctactggcatcatctcgcttatgttcgctttcttttccctctcgtggtctagaaaacactactatcggcctcgcatctatgacccaccgattaacgatgggattgagaacccgtcgatgatgcagtgtggcttaagaccatgggccataggagcctgtacgttgaagactcatgatag

SEQ ID NO: 13636 - DNA, 520 bp, Glycine max
  unsure (1)..(520): unsure at all n locations
ttgtcctgtttttgatnccntttgaccgngatctctgagtcacctgcngcatgaagcntgtaatatntattggataantcgcctgttcactatgtttttgtgtnttagaggtacttcttcgttgacatctttgtctgaatgggatgccatgacaggttattgtactgtctttgattttggtagtgaattgtgtgcgggaagtaattcgattggataactcacatccttacttgcaatttgtatgacattgtgtggacacctatacgtttgttccaaggtatcatatcttttgatgataagctgaaccatcaaacaggacatattttactgtcacaattcgaaactgtttgattgttctgttgacctgaatgtgataacatctcttgagtattctcgaataaatcttcaanggttctatatgctagtgcaataatctaagtcataagattgtgggatgatcatttgcnncttgtttgtgtgtgttagtcatatatgcatctggagtcgtgaacggtgactc

SEQ ID NO: 13637 - DNA, 176 bp, Glycine max
  unsure (1)..(176): unsure at all n locations
tgcatctgcacctattacaagagtctgtggtctatgttcttctacagatcaccatacagatctatgtccttctttgcaacaatctggagtcaatgagcaactngaagcttatgttgcanacatttataatagaccccctcagcagcagaaccaacaacagcagagtaattatgatc

SEQ ID NO: 13638 - DNA, 314 bp, Glycine max
  unsure (1)..(314): unsure at all n locations
tgataactngtaaatatgaagtngtttttattataaaaatataatgaanatatctntaanatatntatnntaacagttatttttacttaaatattagaaaattgatattttcttatntatggcttgtagatatgaaaaggagggataaaatccaaaaatatgcagaanatatcaaaaatatgaataaggaagatntttgccatcangtccaagtccactccaacaactattaaaaaggaantcaagccagcagaaaagacacaccgagtctcagagcactctaatacacacctaaagtctgagaactctccctt

SEQ ID NO: 13639 - DNA, 232 bp, Glycine max
  unsure (1)..(232): unsure at all n locations
tcttctacacttggagtgatcacatgcaatcctcttgaacccttaccacccactctgtcatcatgccgagactcangaagcccaacaggtntagccttctctaagtattctgaacaaaattcaatggcttcttctgcaatgtacctctcaacaatagatgcttctggacgatatagattctntgtattaccctttaagatcttcatgtatcgctcaaccgagtacatccacc

SEQ ID NO: 13640 - DNA, 271 bp, Glycine max
  unsure (1)..(271): unsure at all n locations
acttacatagaagagaatacttgaacccctcaataaatttgaatttgtaaaacctacganataaaaatggtcgattctcacatatactntaacgaaatcatcttattttccactgtattgannttgataatcaattaatcaataaaaaaaaattattcanatcgataaaccctcacgcacatgctntgctatcttctctttatttttatgatttaaatatatagaactgtaaaatgtcggatggtaataatagatataaacctacgtgtag

SEQ ID NO: 13641 - DNA, 235 bp, Glycine max
  unsure (1)..(235): unsure at all n locations
gatatcaagtgaatattcattgcctctattcctctnttatgcttgcggtntaccgagtntggaggtcctgttcctcatcgacctgctgaagacttggcattttcagttgcaanggttatacagaaagggggatcatntataaattattacatggtaacttcattatngattgattntgatgtngtatatttaaatattcaactcagtccctttattttgttcctttcagtatcat

SEQ ID NO: 13642 - DNA, 213 bp, Glycine max
  unsure (1)..(213): unsure at all n locations
ttcgttatctntctatcccagcctcaagttacgggcatcattagcattctaatatttgtcgctttanactntaatactcatgtgagtntcacnaatttagcattaaaagacgtcttaactgatagnnataaagaataanaatattcgtaattatctttggtctcgatttctataatctgaaactttttattcatcanaatataactacttaat

SEQ ID NO: 13643 - DNA, 560 bp, Glycine max
  unsure (1)..(560): unsure at all n locations
gatggcagctatacgtacactatgantactcaagcctatcaacantggtagatcacataacannatnttaagaaactcagcttcactagtagcattatctatatcaataatntctgcttccatagtagaacgtgaaaataatagttggttagcagatntccatgatactgcaccaccagctaaagtaaaacataatcactttgtgatnntgttcatcagaatcaaaaatcaatttcatcactaaaccnctcaatactgcangnaacatgataatgaatgcataatgatggtcctttaagatctaaaactcttctaatgcatcaatgaaatgacngatatagtacccttctaattacactgatatcatgcangctaagaattgcaatgcacaagaccatattgaatattattaaaattctcctcaatttttactgtgatagctanggaagctgttcataatataactctcatactntactataatggaaaattcatatnttttactatacaatacttccaccagttctataattgcaaaactcattttgatcttctacatt

SEQ ID NO: 13644 - DNA, 109 bp, Glycine max
tatggcgtactttcctagagcttcgtttcaattcgagcgctagattatgataggctcaatcgaacatcgagtaaaagtattggcgttgactttctgagagcttcgtttc

SEQ ID NO: 13645 - DNA, 622 bp, Glycine max
  unsure (1)..(622): unsure at all n locations
natgccatattacgcatctntagactctcaagctntgagccaatcanacgacantaactnntgaatcggatgtccgantgtgtcccatangatatcgagtctgctcgtaattgaaacggaagctctaacaaaagtcaaacgacaantaactttaactcggatgtccgatggcgccctgtaatatatcgagacgctcganatcgaaacggaagctctaagacaagtcaaacgacaantaactttaactcggatgtccgatngagtcctgtaatatatcgagacgctcgtgatagagaactgaatctctgatgcatatcatacgacaataacttttgactcggatgtgcgatcgtgtcctgaagatatcgagacgctcgtaattgaaaccgaactctgagagaatctacgacaatactttaactcgatgtcgatgagccctgatatatcagacgctcgaatgaaacggaactctagacagtcaacgacatactttgactcgatgtcgattgagcttgatatatcaacgtcgaatgaaacgaacttgagaaatcacacatacttgatcgatgcatgatccgagattaggctgatgaacgacctgaaataacactagttatgagct

SEQ ID NO: 13646 - DNA, 169 bp, Glycine max
  unsure (1)..(169): unsure at all n locations
atacttcactattcctctatntcattntgcttntttaagtatgcagtatggaaaaattccattcaactntcttttgaatgcatagctntcatgngttaatgtacatacacattatnggagcttgtgttctatctcgtcctgtaccaaccttgtgtctatcacactactc

SEQ ID NO: 13647 - DNA, 535 bp, Glycine max
  unsure (1)..(535): unsure at all n locations
atgcacatgaggcttgatccatctgccctcaattattattggctattaaataaatatcgaaacaataatnntaatatgaanttttatcggatgctggattttgcatgntatgacatgtgatattttacgcatatattcactcatagtcatattntccctaatatagaattcgtgttatatattttaagtaagacattacattcatatatgttatggaatctttttcataatattgggctcggctgtgaactgagatgactaatcgtnttttgatggtanataaattatatttgactgggaaaacagcaatnttcgaatngataacccagtgatttacacctatctttatataatattgcacaaatacaaactatactacattttatanaaatattacaatatatgatatacacattgctctataaaacataatgagtaacaacatgactattgcaccagcactataagacaccttgatctactagctgtattaatacctatacgcgtgaggttagctaaataaaacattatattn

SEQ ID NO: 13648 - DNA, 150 bp, Glycine max
  unsure (1)..(150): unsure at all n locations
atttacatcacacacgtcttcttggctaaatntacatacatgcatactcaaagcacttttgggtaccaaaaaatgcacatgtgcacatcttggtatttctaatacctatacatacacaaacttcatgatgaatcttgactatctacacaa

SEQ ID NO: 13649 - DNA, 655 bp, Glycine max
  unsure (1)..(655): unsure at all n locations
nggtggnaatttgacgcacgcttgtangtgacactactagantactcaagcctcatgatgatgaatgagatganntcaagtagtttgatgatgacanagatgatgacatataacccgaagaatgatntcaagattgagtcaacaagttcaagatcaagaataatntcaagtntcatgagaagaaatcaagaagattcaagaatcaagagaagttcgtttcaagattcaagagaagatgaattcaagagtcaagagaagaaatcaagaagacttcacaacggaagtattgaaaagaattttcannaaacanacatagcacagttntggttttcanaagactntctctannaaatttctanagtacccagagtnntactctctgggtagtcaataccagttcctgtaatcgattaccagtggcannagttgatttaanaagcctttaactgaatntgcaacgtccnantngttntnaaatggtgtatcgataccatatattggtatcgataccagtgatttgaccgtgaattcanatcantgtgagagccatctttctaaatgcttggtatgatcatgtttgtatcatccacgccatttgataatcaaatgaccttcatgtttcaatttcagttacatcatgttctgcacataactt

SEQ ID NO: 13650 - DNA, 607 bp, Glycine max
  unsure (1)..(607): unsure at all n locations
natgcaactgtgacctagangtgacctatgntactaagctgatctggtgtatatatgtgatcanatatanagtgttcctactatgtagtttgcaattgacctattagtgaagttcttatactttggagtagatcgagtcatattttntcttattttgaagtagagtcttgtgtaccgtagacctggaggagaaagaagaaatacanaaagagccantttttttttttttttacaaatgactctctacatcanatctattaaaaagtgatgtaaaaagtgtacttaacatttgatttaataaaaccaatggtgaaatgtctttgtcatcgatttaagcngatcgatgaaacaagtcaatattttcttttggcaatgcttttacatcaattgttcagattgtgananntatatttaacatcgtataaccgtgtgaaagtccacttcacatcgtcatacacatcagtaaacaatgtanagcctataaaatgatgtaaatgatttngagagggatcatatctacattatgttagcttacaacacacaaaatgcatacaggaagcaantatatagctccccatgcgtctcatnttgccagaaactaaaaact

SEQ ID NO: 13651 - DNA, 218 bp, Glycine max
cggtccgactcatcccttttggcgatacatcactgccgcgttacacgcggactggaaactgcgtccacttatgctgaccatcccttcgcactgggtatagcaagggcccgaccgatcgccttccaacagtgcgcacctgatggcaatgggcctgatgcggatttctcttactcatctggcggattccaccgatatgggcactctatcaatctgtctga

SEQ ID NO: 13652 - DNA, 280 bp, Glycine max
  unsure (1)..(280): unsure at all n locations
tctcgctaatttggtattccatatatgtaaatatagaatgaagtattatgaattggcaaacacagtcgtacgtaccatattcgttntctaattatntaaacagntagtggtttgggtagtttatcatttatattctaccagagaagttatatatagttacaaaattagctcatgaacgttggcgtatatagtagtaattcacagtgtaacctgaagtgatanagttcatttatcaatatgagaaaataccatttctctcttctcaatacaatatcatcct

SEQ ID NO: 13653 - DNA, 124 bp, Glycine max
  unsure (1)..(124): unsure at all n locations
ctacttaatccttaatgggtttctcatagtttaaatgatctntggatagattnttganatatctctgtaggtgtttgtanactcttgagagaatagatgagttagactaaagcttatgttaagt

SEQ ID NO: 13654 - DNA, 178 bp, Glycine max
  unsure (1)..(178): unsure at all n locations
cttcatcttattctccatgtatatactacattgtcttgcggttcggtgctgnttagactagattcaagaaagtaaaccgattacatcttagatctacacttgctcttgcatttcaatggttcacactttatagatctactcttgaatcatgtttgtgtggaatactaaggtctatcat

SEQ ID NO: 13655 - DNA, 539 bp, Glycine max
  unsure (1)..(539): unsure at all n locations
atgacaatggaagagtctatacatgtntccttngatgagtctaatggccattcttccaggaaggattntttagatgatatttcagattccttagaagatacacatattcatnggaatganctctaaagaaaagatgaaggaagcaatgaagattctcaagataatggagttagaacaaataatgaacttccaagagaatggaaagcctcaagagatcatccnctcgacaacattattgctgatatatcanaaggggtaacaactagacattctcttaaagattatgcataatatggcttttgtatctatgattgacctanaatataaaagaaccataatagatgataactgatcattgcatgcaagaaaaactgatcaattgaagaaccattgtggaactagtgaaaacctgannatatctgtctangacannatggttttagaataatagataaatggcttatatanaataggctngtagtacaangggttatcagaagaggatnacttgagaactatctcagtgagatagagcattn

SEQ ID NO: 13656 - DNA, 573 bp, Glycine max
  unsure (1)..(573): unsure at all n locations
ctcactttnggctgagtgagtgaggagagagagtacgtggctnntgtgtttaagaataggctntctctctntnttttttaaaaaaagctgtgccacatgtcttcttttgagtggagcananaggggcccactctttctctngatgtgactcatacttagtcacaagaagagaaaaatatgatctttntgaaatgctaaaatcctacctcggtttgcgtgccgtttctctgngtccagtccctcgcgtntctctgcacccgtcggggccagttttcgaaggtaagcaatatatatatcataacgctcagaatgaaaccccgagcgtggtcagaagtggttntgtaaatttaagttgacgcaaaccgatattttagactaattaatgagaataatctaaactatccagtatggattctctcgtaaatacctaaccgatattttcccatatactactctacaggagatattattaatccctgatatactctttatatcttaaagatcgtacaaatctgtaaattctagtgtcattctatgtgtttatacaccgtaactcaaactaatgctgctaat

SEQ ID NO: 13657 - DNA, 304 bp, Glycine max
  unsure (1)..(304): unsure at all n locations
gaatcaagagaagactttaatcaagatagtatganatgggattttcaaaaactgagtnagcacatggattttctcanaacatgtntaccaaagagttttactctctggaatcgataccaaattattgtatcgataccagtncaaaatggattgaaaaagtttcacactgaattacaacgttccaattaatttaaaaagttgaatcgattatatgttntggtatcgataccaatgcctttgacgttaaattanatcaaatgtaagagtcgcatcttcacataaagcctgtgtatcgatacactga

SEQ ID NO: 13658 - DNA, 257 bp, Glycine max
  unsure (1)..(257): unsure at all n locations
ccacagagtggtacttggagatatgtcgcggcggtcaggagacctttgggacgtcaggtggngtgctagttcccanaaccaagcttgaccaatcccgacccaacccgggcatagtcggtcagtgagaacctgtgatgtacctaagcaggcgagctcctcgcagtcaacagataataggaacaaagaccacanagcaaggaggctngtggtggctggccagctgtgaatcttgtgtgatatatggcgtatggcctctg

SEQ ID NO: 13659 - DNA, 656 bp, Glycine max
  unsure (1)..(656): unsure at all n locations
tttcacttgcgacgatctctgagtcacctgcngcatgcagcttctcatngaagatngnacactcatgagagatcaagccanagtctcatcactancatccattccaacctgtgatanatgtganggtgtgcatgggtaaagagaatgcactatngatganncagtangtacaaccatggatgatatcaacttttgtggngcagaanataattcttacaatcaatatcccaacaatttcaatcaaggaccaggcttcanganagtcaagggnatgatangcctcanaccatgcanaatcaaaggcctagacaagagaaaagaanacctactcttcaagagaccatgcttcnatatatggcccanaatgatcagagaatgaagctggtggagtctcaactcaccaacatacaattcctttttgtacanagacagacgatcaaccttcttttacaacttgaaccanatctnaaagggatgatgtcaattctatgatgactagaagcangaagatttcangagaanganattntnnttcanaaagttgagaatatgtcctactgagaagaccaacatctnaanagatgagggtctacttatggnatctanntgcaacagganggtangaagaggtactacactnctgngtangtgtcatt

SEQ ID NO: 13660 - DNA, 313 bp, Glycine max
ttacacttatctttgccgggtcatggtcgcttattgttgtacttatccctggcgctacattactagatttcgtactaaacaataattcacgacgtgatgatatcatactcgtaaaaatctacgtcgcggcctaccctcgaatcaagagtaaaatttattcaaaactttataaaaacgaaatatcgcattctttgatttatctatcatgtatctaggaataggtaacatcctacactgccaaaagttgagtgattatttataaaagaattagcacctaagatcatataaaatctgtaaactcagtgttttcatg

SEQ ID NO: 13661 - DNA, 649 bp, Glycine max
  unsure (1)..(649): unsure at all n locations
tcgtgtacttgacagcgatctctgagtcacctgcggcatgcaagcttcaagaaactntggatntgaggtcanatccatntaaggagganggaatgatgcaatcctaccnctcaagggcattggatataagactccaagaagattgngccaaagatgcaagagaaggccctanggttctcgtgagccttanggtagaatttagacccatggctaagtatgagcccacttatctttgtacatattagaatannattttcattattttgggccttgtatttanggttacatagtgtagggagggtaccccaataatgtaggattnttcagcccttgtattntanggcaccaagactatgttttatattaggggtagttggtaattcacatgcattaagtgcactatttgatgtgtgcgtgtngngatagaaattaattngaatgggagaacccaatctanntaaatntngccatctagggggaganagcatttgcttgtacacccattgcacatatatagcacactttgtgcatgtctcatgtttacatacctcatgacactaacacacttagtggtgaatcttgacttgatctttgatagtgggctcanccatactaaaatgactatcataataaatgaatttgctcccnt

SEQ ID NO: 13662 - DNA, 549 bp, Glycine max
  unsure (1)..(549): unsure at all n locations
nttattaagcaccgatgacgtatactatagactctcaagcttgatgtgaganagagtggaagagtcngtcttcctactttnngttgtgaccacagagtggtacctatagaatatgtcgcggggtcangagacctttgggacgtcangtggngtgctattgcccanaaccaagcttgaccaatcccgatccaacctcggcatagtcagcagtaaaacctgtacgtcctaacagcgactctgcagcaccataaaaactagtcacaagcaggagcttggtgcactggcactatgactgatggattgaattggcttgtatcataccagggttatcatacaggtaaatggacagaataagtggctctgtatcataccatgggtgatcataccaggtatnggctgtatgatacagtngtgtatcataccatgctctgcctgtatcatacagtagtgatcataccatgantgatgttctgtcgactggactcagttgctgtatatacaaagaatttgaagatttacttcacgttgacatgtgtctgatattttgat

SEQ ID NO: 13663 - DNA, 191 bp, Glycine max
acatctggatctgatgcggacttcgagtgtgatgctcatgaacaggaacatcttataaaggatgacaatgaggctgatatactgtgcaactctgagaagaaatacgaggtatctgatctcagcgaagctgagctatcagaggaattatattgtgctacgaagaagcttgaaagagatgatgaacgtatctc

SEQ ID NO: 13664 - DNA, 612 bp, Glycine max
  unsure (1)..(612): unsure at all n locations
cgaatggcacctcgacggtctatnacactcagcatgctatactggcaccangctctcacagacatgtgtgctctccatggaggcctatagtgcaatatctcacacactcagaccagcccaagatatgccgaccaccctagctatgactgagtaaacatacctgcgcggaacacgaatactgctagcatgctaagcactctcctcttctgntgttcctcactattaagtgtatatattttggcatgcagagctagatctctacctcttcacaaatattcagatttcattatcaatattatagacgcacaacgtcatgatacatgtaatgccacaccattacaaaaacaaattctcccagcactccactggaatctttcacatgcaggcaacatcagtagtcctacagttcagcagtgtgaacttgaaatagtgcactatgattgatctgtactgacacancattattgtattatgattgcgacgttatntattgggatagccccccctcgtattggcccacttctttctcaagctaactacttacatctgtttctctaatttggcaagacaatcatgtcattatgcgtccaactactgcgcnttaacactacg

SEQ ID NO: 13665 - DNA, 521 bp, Glycine max
  unsure (1)..(521): unsure at all n locations
cactaacctatatataaataacttaatgccattaacctanggaattaanacanactaaatggctgagtgtaactgatattgttggcaaccaanagtcaccctcaacagccaacaagtcagccaccatttggtcttccaaaaggctgatgcctangntgccaattgngcccttattacaacttgaactaaagcccttntagttgattaacccacaacatantttnggtcagccaactntacaaggatngngccattatntagacanactaaacactctaaaatnganataaagtggtgtcatttagtcctccatttgngccatgatacaactcacaaccttggactnttctccttgaacttgngcttgattaaatagtatggacagacttgtgaagagcgtctggtntcttgctctacctgcaangtctcaatctcaatgatctgcctgctttgctgctatacacacgacaaaactctttctaaagattcgcacgtgaaactgccagcgcaaaatatcggtt

SEQ ID NO: 13666 - DNA, 666 bp, Glycine max
  unsure (1)..(666): unsure at all n locations
agagtggctcatgacgttccgtacctatganactaagctctgcgattgtctcgcaggaaggatcaagtgatctgaaagattctnattaatcatcctgcttagacgaatgagaaaacgtgggcaaatanagagggtgaggatgaaggagaaacccatgatgtgactgccattcctatacnngccaagtntccaccaaacccaacaatgtcattactcagtcaataacaaaccaccttcttacccaccacccagttattcacaaaggccatccctaaatcaaccacaaagcctgtctaccgcacttccaatgacgaagaccanccttagcacaaaccataaataacaccaaccaagaaatgaatnntgcagcgaanagcctgtangaatcacnnccanattcccgtgtcatatgctaacttngctccatatctacttgataacgcaatggtagccataacccctgctaggttccctcaaaccccattcttctgangatatgactcgaacgcacatgtcatatcgtggggaagcctgggcatncattgacactgatgacctcaacgtaggtcanggctaatgatcngctgctgaattangagatncgtgtaatctgacatgcagaatgcaacatgcgcacttgaactgtgtagatgctatgatatagat

SEQ ID NO: 13667 - DNA, 381 bp, Glycine max
  unsure (1)..(381): unsure at all n locations
cggatcttaagcactgggctgcagctctaggaagttctaagaagttcttaagaagcacctagttataatagaacatgtgtacacttgtgaacttgataatgaaagtttatgaacacactcaagtcactttctcctctttattcttcaattcggcttccccttcttcntcttttctcattaagcatctcttaataggcaccctaatttattgtgtgaataatttaggcaatttcctacgattggagtgtntgtgggaacctaatgtgctatcaacctctangatcgccagtatattctgctactttatactattccttacttcattgcaactgctaatagctgctttataatagtntacctatttacacctcttaggtattt

SEQ ID NO: 13668 - DNA, 657 bp, Glycine max
  unsure (1)..(657): unsure at all n locations
tgaagtaccaccttangtgcctatgatctcagctctatgaggctgatcttgagcttantgaggtccttcagtggtgatttccaccatggagatgcagcagaagataaaggagaagaggtgagagaaggctccatccactatggcataagccatggaagaaggagcttcgccactaagaatatgccatggataagaagcttggagaggatgcttcaatggattaaaagagagaggngagcacganattgaaggangaanagggggagagaagttgaactttgagttgtgtctcacaagactctcattcatgaannagtacaaaagtgttacacatgcttctatttatagcctangtagctttctttgagaaacttcttgagaagctntcttaagaaaacttcttgagaagcttncttgagaagctntcttgagaaaacttcttangaagcttctttgagaactttcatgagaagctagagcttagctacacacanccnntctatactangctcacctcttgagaagcttctgagagctgagctagctcacacactctctatactagctcactcttggatagaactgagctactccaccctatatactagctatccctgcanatcatgaatacaaagctctctcanactctccatgctg

SEQ ID NO: 13669 - DNA, 633 bp, Glycine max
  unsure (1)..(633): unsure at all n locations
atgtacttgtccctctgaccgngcatcttaagcaccgcggcatgcagctttgagttgctaagcttntgtagtgtcaatagttataaaacaacaagactctaattgtgtctagacttaagattgacaaatgttgttcactataagaatactacanaaaaaagaattttccaatggcagtaatccgtcgataacanctaaaatctngtgctaatanggatgttctgacggatntcaatcggatatttgtagttcgtcggaaatntccgacacaatttccgtcagaaatggtatgtggactntgtcgganatntcagactggatatttctgcgaanatntcccaagatccttttcgacggganttctgtcacannaatcccatggcttatatagacggatattngcgtcgcanatntcccacagatcatttccgatggcatntccgtcgaanatctnccatgganntattntgacgggatatntcgtcacanatntcagtcagaaaatattntttttatataaattagaaatatnntatgcattatattattacccatgatattgaatangantacttataattaggaatagtggaatgataatcaaacattggtaaatangcattagtaaaatat

SEQ ID NO: 13670 - DNA, 349 bp, Glycine max
  unsure (1)..(349): unsure at all n locations
tgcatgctgcatannttttattctggcatctgtagatctgagtcatattattcatnntatggtagaaatatctggtggtgggttaagctgggaaagttcttatcagatattaatacatttgtttaaatntaaatggctacttgtatctcaatgatggaagcanagtaacaaccatcaatagcctatggatcanacatctcataatatcatattgtanatntctatagatgaactgtctaaatctaaatctntaatggtctggcctatggctnntattgggtctcctctataaatatgggactatctatngtgatctactcgtagtgaaatntaccatctttagtacata

SEQ ID NO: 13671 - DNA, 161 bp, Glycine max
  unsure (1)..(161): unsure at all n locations
gtacttacattngaattcctcgagagctgtccgttgtcaatgtcgagcgtctggatatattatgctcctgaatcggactttcgtgtgannaagtatgaccagttgacattctcgagagcgtntggtgttcaatntccagcgtctcgatatgtgatgtgcct

SEQ ID NO: 13672 - DNA, 193 bp, Glycine max
gctcggtattcagtgctgtatgagcgcctgatcgacgtcaggaagtataccattgaattctcagagcttctatgtctaattcgagcgtctcgatatattatacgcctgaatcgaacctcagtggtaaaagttatgaccattagcatttctttagagcatttcgtgatcatggttgagcgtctctatatgtgat

SEQ ID NO: 13673 - DNA, 236 bp, Glycine max
  unsure (1)..(236): unsure at all n locations
actcgtatgtccgaatgtgtcccgtagtatatcgagacgctcganattcagaacagaagctnttagacaaatcaatcgacaataactttntactcggttgtccgactgtgtcccgtagtatatcgagatgcttgaaattcataatagaggctctgagcagaatcaaacaactaataacttttacacggatgtccgatngtgtcccgtagtatatcgagatgctcgaaattcataat

SEQ ID NO: 13674 - DNA, 305 bp, Glycine max
  unsure (1)..(305): unsure at all n locations
gctctgtctaanttcgagcgtctcantacactatgggagacaatcggacatccgagtaatatttattgacgttngactttgctcagagcttcnntttctgaatttgagcgtctcgatacacaacgggacataatcggacatccgaaataaaagttattggtcgttgattntgctcagagcttctgttctgaatntcaagcgtctcgatacactaagggacacagtcggacatctgagtannaaagtattgtcgtttgattttgcttacagcttctgttctaaatttcgagcgtctcaatacacta

SEQ ID NO: 13675 - DNA, 176 bp, Glycine max
  unsure (1)..(176): unsure at all n locations
acctctactnttctaaacgtttccaagatctctttctcttgcctcttccattttttngtggaaactgctcttggagggaatggaagaaggggaatgtgctgcttctgcaaatcagaattacctgtggaagaagatcacctgcacagaaattgtaggtaaatttttgtcatcacctt

SEQ ID NO: 13676 - DNA, 519 bp, Glycine max
  unsure (1)..(519): unsure at all n locations
agtgcactgtacgtcatgacccctttaggaccttgaactagcttcaagtgaattctttaaacaaaacagcggacccttattatatgattctttcgctcgcatggactttgataacttatttatctacatatcaccaaagacattctatacgcaacgaaggtctatggatatacctagaatcgactaatgaaggcatatatttaatgaatctctgaattgacctgatcactgacangnactaccttatcctcttacacttccatgtcacagcccatggtggccaatcctccatagcacagttcagtaagtggtgatgcgatggcatccctccatacgaacangaccatctcngacgtgtngtggggcaagcatgcgtcgaaatatgactgcgtgggtgtcncgagagaggtggtgcttgcttgctctcgctaggtagtgatattgtgtgaataacaaaaaaagagacgtgttaacaagcactaagttgcatcggatttattttttttatcatcgcaacat

SEQ ID NO: 13677 - DNA, 499 bp, Glycine max
  unsure (1)..(499): unsure at all n locations
ggactctgcttcatcacctttttggcttgaacttgaagaatagttaggcctgatggaaggtggagaagaagtagtgattgtgagagggccaatcattgtcgtcgaaggaaaggtccctcttctgctatttatacaacgatggggacttgggggtgttgggtagacagaatattccctaatatgaccaatgtcaatgcttnnttttctcggatttactttttttacttctctctttcatttgatttccaatgtgatttcgggatttactgtttgccatgaagacccacccnattagttgcctttatgagtaatattgtctgataatgtaagacatttgtatacgatncatatattactataaaaattaaataaatgtatattcgattcaccatataaattattaagattaaataaaatcttcattatatgaccttacatattaaaaataactaattatctataaaacctctataatattaatacttacacagatattaat

SEQ ID NO: 13678 - DNA, 223 bp, Glycine max
  unsure (1)..(223): unsure at all n locations
ctcgtcatcagtcgagatggtgaagtngatgagtacacttctttggaatgggatgaagaanaagtggagaagaaagttcttatacccgctcaactacctcaagaagaagctaaggaagaagacccaggtgaaccaccttcaccttcaccacaacaacaagatcaagaactatcatcaccagagtctactccaagacgagtaagatctttggtggacatatatg

SEQ ID NO: 13679 - DNA, 218 bp, Glycine max
  unsure (1)..(218): unsure at all n locations
tgtgtcatggtcaagaaggtcaatggcaaatagcgaatgtgcaccaactacattgatctanatanggtgtgccctaaagatgcataccctntgtccaacatcgactggctagttgatggagcgtncgggttccaggtgctaagcttctcggacgcctacttcgaatacaaccagatcaaaatgcattctctagacgaggagaanatgacatntatcac

SEQ ID NO: 13680 - DNA, 264 bp, Glycine max
  unsure (1)..(264): unsure at all n locations
aatgtaaaactganataaaatgactgaacataaatcatannataattgaanataaaataaacttaaaatgttcaagatgcactaatntatatgtcctgctcttttgtggtgtcttgtgcatgctcattaanggccaacacctgagcaattggtgaatcctgagagataggctgtcctaacttagatgctggtgcagatggtatggcatcatcangtatgggtgctgggatggctctgggatctggtctgtagaagtctcctcct

SEQ ID NO: 13681 - DNA, 233 bp, Glycine max
  unsure (1)..(233): unsure at all n locations
tacattttcacctganattgcacagatntcatcattaaatccaatgganatattctagagacagctntaacaatacaacaagaattatttacaaaatcactacanaataaccattaaatggggaaactatacaagtnnttggaaatgttntctataaaanaagtagtcgtataagacgactaacagaacccttgtgccttctcttgtatctctggcccaatctttttggagtc

SEQ ID NO: 13682 - DNA, 608 bp, Glycine max
  unsure (1)..(608): unsure at all n locations
attgtactcgtccggatctctgagtcacctgcagctgcagctctngcantaaagaaaataacagtgaaatattagctactnggtcgtttttttaattgntattagtggaaaatatctattagtgctatcgataattaacctttatntacacaattagctaattatctntagtganatgtacttctttctaataatatgttttntccattcataaaattgagctcanatccacttcagattatcgattggtatntggtgtaaaaatccaagacnaacttgtgcttattatataatcaaaagatagattcatagggacaaaanaggaatacacggcgggattggagtgatgcatgattccaaaatagtgagtgcaccatgaccagtgggttgtgcgtaattcccaaagctcacataaccatattcatgctgtggtatttcgcgaaacgnactcattaaacatatcttcaagatatcgacgctctttgctatttgtgaaaatatgaatggtcccactctgattttattgttgttgccagatacatcagttatactaatcatatatttgctgtgtataagccgtgataagtattatgaatcatgattatcgt

SEQ ID NO: 13683 - DNA, 661 bp, Glycine max
  unsure (1)..(661): unsure at all n locations
ttatgcgcaccgatgacgagctctatagactctcaagctggagaggatgcttcntgggnggggaagaatagggagaganagagagtggggggagctctatattgaaggaagaaaagggagagaagtgaactttgaattgtgtctcataagactntcattcatcannagtacaacaagtggtacacatgcttctatttatagactangtagctttcttgagaanacttccttgagaagcttctttgagaaaacttccttgagaagctagagcttaactgcacacacccctctaataactaagctcacctccttgagaagcttccttgagaagaatcctanagaagctagagcttagctacacacacncnnctatatagctaagctcacccncattgccaaatacatganaatataaaaaaaaagtccttantacagagactactcanantgccctgaaatacanggctaanagcctatactactagaatggccannatacacggctaananaggangaatctatctatattancaagaagagagaccaacctggtcatggctcagaattacctggatcatggacccanggctcttacacttagccatctctgagctcttgcatactgcggagatgctcatctagaaacatatctgcggacag

SEQ ID NO: 13684 - DNA, 219 bp, Glycine max
  unsure (1)..(219): unsure at all n locations
cttaaaaactatcacgtaagtaacaccagcggtgctatccttntcaagaccaattcataactatattaataactggtggtcacgatcgagcttatgtcatgactacgttaatttcaaagccacagaagcagaatatatcttatcctaataataatagcaagaggtgtatagctntatatcgacctacgtgaactcaaaaggtacgaatggtcacacaca

SEQ ID NO: 13685 - DNA, 235 bp, Glycine max
  unsure (1)..(235): unsure at all n locations
tgaatcttctantttctgggtggcatgtcttcattgaagtagagncttgaagcccttcttcttccttaatcacagatagggagtctggggcaaactntgccaagcaccatgttgatatcagtacatctgctgatgtggtgctcacaggcataagtagctgcttggtctgatatatacatatgtgtcataccctaatttcgttggggactgcatccatcgatgttttgatcctcgt

SEQ ID NO: 13686 - DNA, 188 bp, Glycine max
  unsure (1)..(188): unsure at all n locations
tcttctcaattatattcctggcttcagcangngtcatgtctccaagggctccaccactggcagcatcaatcatacttctctnncatgtactgagtccttcataaaaatatnggagaagaagctgctcataaatatggtggtgaaggcagctggcgcatagttntntaaatctctcccagtattcatat

SEQ ID NO: 13687 - DNA, 385 bp, Glycine max
  unsure (1)..(385): unsure at all n locations
aaatcttcagaaacaagtcacttgaagaattgtgactctnggaaatgtatntntcgaaatcagtcactggtaatcaattaccattaagtgtaatcgattacacatcanaagatgtgactcttcattntgaattntgaannataaaacgtttagaagctctggtaatcgattactatcttctggtaatcgatcaccagagagtaaaactctntagtaatgaatttgtgaanacttcttgtgctactcaatattntggaaaactttntttagtacttatctttgatgagtcttctcttgattcttgaatcttgatcttgattcttgaaaacttgattcttgaaatcttggaagttgttaactctcattctttggcatatcaaaataa

SEQ ID NO: 13688 - DNA, 304 bp, Glycine max
  unsure (1)..(304): unsure at all n locations
tttcttaattcttaaataatttactaatgctaatgcaagcaatanagcaataaactagttctttccaaatgcttatgcaatgcaagcaaatatgcaattcatacgcagttcatctcccnctttgggcattaacaaggccaaagaagttaaacttatgcacaaaanagaacacacaaatngaaggaaataaaccatagcatttcattaatcatganacattgcannacaataatcattaatcattgacctttctaatcaaacacttaattntcttcagacaaacacaaacatggataaacataac

SEQ ID NO: 13689 - DNA, 246 bp, Glycine max
  unsure (1)..(246): unsure at all n locations
gctctattctagttctaaccccgttctctcccccttggcaacatcaaaatcctaagcacgtgataagcaacataaggtggaagaataataatcatatataactaaagttcacataatcattcataagtcanaaccaaatagaattcagtcataanatactaagtcacataatcatactaagtgccaaatactgaaatataactaaagttcagagaatgataactganaaagcatagccaaatacac

SEQ ID NO: 13690 - DNA, 534 bp, Glycine max
  unsure (1)..(534): unsure at all n locations
ctgncctgttacctgaccggatcttaagcactgngctgcagctgtcaatctggtgaacacacttcttatgntgtattttctgatngctntctacttctagntccacaatcagtatcatcattgtcagggtttcccatattcaccttcanaatggtgtttgcaacctcaatcacttgactatggaacaagcaccattggaaagcaccacttataattaatgtattctgtatcccatgaccaccactttctccttcttttattgatagaaaacggaattttattttgatctgcttctgtatgcttaaaacacccatgtgatataatgtaggtttcttctctccacataataaggtacacaccacattcactcatttagtcataagttcttatgtattgccaatgattattgtataacagatatcctagtacaactatcgagtatgtatacacacttaccataaatatactcagttacacctatcataaaatgaaaagaatgttgcattgctgttaaccacattcaaatgtaacaag

SEQ ID NO: 13691 - DNA, 115 bp, Glycine max
ctaagctcagagcccctatgcaagatatacctgagactatgaagaccgctaccgctatgacgaatatatgtgactcacagacctctggcctatgtcatctgtctaatacatatct

SEQ ID NO: 13692 - DNA, 266 bp, Glycine max
gttttctgacactactttattataatattgcccaaactgaaatgcagaagcatatgaagacaccatggtgactacttaatactaggactagctacgaagatcaatatctgctttcattgttggcacatcactggacttattaaatatcactcatctgagaacgcttacttttttaaccaatgctctttaagatgctgctgttgaaaaaggatttttcactccaaatatattcaactcttctctattcaactctgtactttatatgg

SEQ ID NO: 13693 - DNA, 168 bp, Glycine max
aattgttgcacaacgggtgtagcggcctaacaactggggagtaccttatatggttatatatcaatccctgttctgatatcacccaatgcactgcttgccttacatgtaacgagagaaaccttccccgcttcgtccaatgcttaaaccacacaaaagacttttcacata

SEQ ID NO: 13694 - DNA, 213 bp, Glycine max
  unsure (1)..(213): unsure at all n locations
tctcggttggggatctatggtactgaatctatgtcaacagccaaacatcatggaagaataatcattntaatgatccaaatccttctccttcaaagatgcctatacaataagtgacttaagcctgcatatcaggtatgttaaatgagtatgtacatcactaaactaacctatcttcaggagcttcagcacccttgtaacttgacaacttatgga

SEQ ID NO: 13695 - DNA, 523 bp, Glycine max
  unsure (1)..(523): unsure at all n locations
gaaagtggatcattcttgatttataaaggaacataatcatgaacttgtaccagctctggcatatncatttcggattcatagaaatatganattagctcgaaagaataatattgatatctcgcattgctgtagtgaacgaaccanaaagatgtatgttgaaatgtctaggcaatctagcagctgtcanaacatngngtctttcttgngtgacatanactatcagtttgacagaggccagtatttggctttggatgagggagatgcccnagttatgcttgagtattttaagcatgtacaaaaggagagtcccacttcttctatctatagattaaataagagcagcgctaagacatctattttggatgatgcnaaagatcaatgatatctcagcttaacgatgagttcatttgatccactacataagagcatgacacttcattgcactttgtgaggaccacatctactattgctgatggctgtgaatgaataccacattgttgtatanacatgtaactatgtgcat

SEQ ID NO: 13696 - DNA, 642 bp, Glycine max
  unsure (1)..(642): unsure at all n locations
attaacccctattncgntctagtgacgccagcttgtangtgacactatgaatactcaagcttctatcatcttcatnncgtgctagtgaagcagattttgaatnttccttgattagcattcctcgatgntnttgggacctacataatanaatcatgatcataatccaacataagtaaacaacataactcanacattctgaagagaaananananacatatatatatatatatatatatatatatatatatatatatatatatatatataaatacacataatgatagcactagctagctagcagaaattntaacttggtatcattctacctctattgagctctttagtctttttggaggttctncanagttctgcttctatctttctctacagggtcagaaaaccatcatttatactctctcttagcctgcaaagtgtgtcagcaatagccaattcatgggtaagacttgactctcatcagngtnttattatctgtggctaagagcatacattgaacatgggactaaattgctctcacgacaaacatggacaaataaagttgtttgataagagaggtcactctgantgaagaatatacattatatgtgagtatctgtgaacaaaaatgatttaattgagaagtt

SEQ ID NO: 13697 - DNA, 330 bp, Glycine max
  unsure (1)..(330): unsure at all n locations
cttacctattggaagtgacatcatggcaattaggtcccagctttncattgtggattcagtcacaaaacanacttagatatgntggactatctaacacggggaatttcgattctattcccacacagatgtgggaagcactntctcaggttntgatntaaacctctctcgtaatcacatccatggtgagaatgngactacattaaagaatccaatatctatccgaactattgatctaagctcanatcacttgtgtgggtaataccctatctttcaagtgatgtgcatcagttagatctttcaagcaattcattctctgaatccatgaatgac

SEQ ID NO: 13698 - DNA, 250 bp, Glycine max
  unsure (1)..(250): unsure at all n locations
ttagagacttagatntatnnttgaatttcaatggctaaggatatagtgtacaatatcttctaatgaaacacaatggattaatggcgacttacaatgccattnttaaactnntattgagaagaaaccatcaggatatgaaacgaaagatcctntacanttttctcctccaatctaagtttctaaatctntacttctacagaatactntgtctacattgaactntcaactcccaacttggactcatctggat

SEQ ID NO: 13699 - DNA, 593 bp, Glycine max
  unsure (1)..(593): unsure at all n locations
nttgccttggcagcgctgcagagcacctgcagctgcagctattatatacccanntttcatagccatctatactatgttatctacttctacagnaaagaaaatatttgcgtgtatttcaatttcaaataatagactgatcaaggtgtgctattactcaactataccatacagtattacagtcctggagtgcatattctatttctcaataaacaacaaacgtagntggtggttgtgagatcctgaatattatatgaattnttctattcgcctaagactatggangggaaaataaatgtatgcactttcttgtttcccgatacctactgcttangaatataagagtgggtatactatctgtccagaaggtannagatanatannactcgtatgcttatgatttcgcatatgtaaatagaacaggggtggagaaggatcacactttccagtggatattcagttctaaacaactcgattcataattgaagcatgcattaagctaaatactgtttgactctctttcgacagtcttctacctatctatgctggtgaaaaaanataggacaataagaaaaacaatgatattgtctgttgtt

SEQ ID NO: 13700 - DNA, 217 bp, Glycine max
  unsure (1)..(217): unsure at all n locations
gtgataagatccattgttaagttttcttattaatgtgttgctaatttcttataaaaatatattntaagaacanatatattatntcttacagatacttctttaaaatactttatttaaatattttaaattaacaaccgactatacttacccgacttaataaacatactgaacactaaccatcactcatcttctactgtattgacatgacagattacta

SEQ ID NO: 13701 - DNA, 80 bp, Glycine max
acactagattacaatgtgactggccatgtgctatgtagaaattactaaagtatgtatcttgtcggatgtgatacatgtga

SEQ ID NO: 13702 - DNA, 519 bp, Glycine max
  unsure (1)..(519): unsure at all n locations
tatggcatcatacgacctatgatctcagcttanantngantaaaancgtcantaactgctggtaatagatacctatatgtgtaatcantacacaattcanatttgaattcanattaatagctggtganatcgtnttggcactgtaatcgatacatctctgtaattataccgagagaattgtgaaaactttactaattctgccaaccttgcacttcaatgaatcccttctattaatatcctttctaaactctaagactgctgacattctctgaatatcttgctgaataacttggaacatggatcatgtatcttgcatataaacttcactgatcttgctcatgtgagcacatataaaacacttatcatcctaggtcgtgtgtgcagtgtctttgctccatcatatcttgctcagatgctgccatgttgctactgagctcaatcaagctaatacatgatgctgcttatcatgctaacacactctgacctaatcaacctaacatattatgacctctcagtgcn

SEQ ID NO: 13703 - DNA, 183 bp, Glycine max
tgttaataaaactaatagatgtggaattgtgatggtgccgtgtcttcaagactgaaactgaatggatttggaaatagggctaatctacaagtggatatatttctaataaattgaacggaatcctttgatgcagggtgcagattaatagcttcatatcatataataatggagtgaacataaatt

SEQ ID NO: 13704 - DNA, 631 bp, Glycine max
  unsure (1)..(631): unsure at all n locations
atgaaaccttgcancngctctcagagctacctgacgcatgccgctntnggtcanagacgaagaagaagttcanagagattcaaggcttgtataggattgtaatgatatgattggataagtattcacgagtgatgctagaaagaatgattntctaaatgcacaacacagccttgctttatagactcttcatgtctggtcaagaagaccattcagaagagttataactttctagacaaacttaatacccatttgactcagtcacaacctatttgaagagttacnatctttgattattcagatacagtcaccagtaatcgattaccacataactgtaggcgattacacaaagcttctgagtgaaacaatgtgactcttcattttaaaattgaattcaacgttcatggacactgtattcgataccaccacattcgagtcgatacaacattctgaaatatttggaacgtcgtaatcagttgaaacttctcnactcctctgtactgtatcgatacaccatgtgtatgcgatccaacagcaaactcttgtgaaggtctgcaaactatgtctatcaagttcgaaaacgtttatactatctgatgagcttgctcatctgatctgacctgatctgactgag

SEQ ID NO: 13705 - DNA, 431 bp, Glycine max
  unsure (1)..(431): unsure at all n locations
ctgcagctgtatgtggttaatgtctaaataaaattttatgtttatgttattgaagaaatctatcagtgaaataaatattttgatatgaatttgtagtatttttaatagatangtgatgtaagattattatgtgtaataaggatgaacgttcacttcatttaaaaattgagacatttatttgaaaatatttgagtcacattatttatataagtgagatntttagtagatacgtcttttttgtggaaaattgaaacgtgagtggaatgtaatgagatgtttgtgttatgatcatattaattaatcatcgagaatgtgaatactattcatttgagtatatgtaaaaaatatttctctattcgtatgatattatctgggaaatagatttgattgtattttttagtggccctgaatatctgagcatatttttaata

SEQ ID NO: 13706 - DNA, 313 bp, Glycine max
  unsure (1)..(313): unsure at all n locations
acaatgctngaatttgtgtgataatctngaatatgcatttcaacttaccctcattaactttataatattgatcccatggtaaggattgaaatctttcgaaacatgtnttggaaaatacttaagttttatcccgcatcannataattgatatatgatgaatataatgattatcttgatgatgatgcctntgttttcataattgagaaagactcannaatagtctattatcttgagtgaatannataatatatggaattgaaacanatttactatcacagataaataatatatgatgatataattgatatatgtc

SEQ ID NO: 13707 - DNA, 154 bp, Glycine max
  unsure (1)..(154): unsure at all n locations
cattcaattttcggcgtctcgatatatgacgggactcaatcggacatccgagtaaaacgatattatcgtcttaattggctcagagcttctacanttcaatttgagcgtctcgatatgttacgggactcaatcangcatccgtgtaaaaagtact

SEQ ID NO: 13708 - DNA, 230 bp, Glycine max
  unsure (1)..(230): unsure at all n locations
caataactntntactcggatgtcntgatgagtcccgtcatatatcgagacgctcganattgaatgtcgaagctctgagccaactcanacgacaataactntntactcggatgtctgattgactcccgtaacatatcgagacgctcganattgaatgttgaagctctcagccaattcaaacgacaataactntntacacggatgctctgatgagtcccgtcatatatcgag

SEQ ID NO: 13709 - DNA, 197 bp, Glycine max
  unsure (1)..(197): unsure at all n locations
atgcaccctcccgatgaggaaaanaccgccttcatcaccgaagacgccaattnttgttacagggtcatgcccttcgaactgaagaaggtaggagccacattccanaggctcatggaccgatgacaaatattcctgaatgccaaagtctatgtggaccacatggtcatcaagtcttatagcgtgacccaccacatggt

SEQ ID NO: 13710 - DNA, 269 bp, Glycine max
  unsure (1)..(269): unsure at all n locations
tatactactctatggtatcttaactatcanaatgagccccttaaataatacatatataatataattaatatctttaatagctgccgggacagaggcttacttgtttcanaggattangtggaaaacatcacttttattaacatttacagtgttcattataagatggagatgagtatatgtcacaaaatatgaattatgaatattgtgaatctttgtccagtcccacctttttcttattntccaactatntctctctcttctaaatctat

SEQ ID NO: 13711 - DNA, 190 bp, Glycine max
  unsure (1)..(190): unsure at all n locations
atgatttaaaagttttttttcaaaactgagtgcacatgaattttctcaaacctttaccaagagttttacctctggaattgataccagatattgaatcgttaccagtccaaaatggtntcaaaagctntaactgaattacaacattcaattgacttaaatgttgaatcgatacaatgttttggaatcgata

SEQ ID NO: 13712 - DNA, 155 bp, Glycine max
  unsure (1)..(155): unsure at all n locations
tcgcattcgggcactcatttaacctctatgtgctgtccttatacatataannatagcccacaatccanagttcacannaccatgcncatatgtcattgaggcatttcaccgagcacttggtgggctcatgttcaggcatgaatagcaagagaatg

SEQ ID NO: 13713 - DNA, 645 bp, Glycine max
  unsure (1)..(645): unsure at all n locations
cctgnnctgatgacttgnccgngctctcanagtcacctgaggctgcagcttgcacctanttagggttagactaatcatgtatgtgtgtttttacatcaaatcatgtaagtggtgaatttgtgtgaccaaaacaaagtattgaattactttcttgtaaatggtattgaatntaactctcanactacattatattaagacattnttatgtataggtggatcatatataattagcagaagagcatacaagttcttttagagtatgaattaaagcgccacaagctagccagagtatgcggctcactaagacattattcttcgatctctttctgatacnatggttctttcgcaatagtgctggggtgacntttatttattcatataacatactactgcttttcttctgtttggatatgtatttttttatggtaatccctaaccgncgggatctacatgaataacaaagaataaaagtataatttgatggctaataatagacnattaaatgaagcnacnaatcatagtatagacagatctataaaanaactacattgtanttcgcgagattaagtanacaccactatagaaactaagatagaccagttanaggtattaagtgggcgcataagtccttaacgttattgtacg

SEQ ID NO: 13714 - DNA, 615 bp, Glycine max
  unsure (1)..(615): unsure at all n locations
ctaccgcaagtaccanattttagaatcaaatgcagactaaacatagananatatcanagtaccttcagatacanatcttcaacttctctttcacggatatcaccaggtagattnccaacgtagacagttctgctcgagcgtctactcattntcttttcngcgacacanagaagaatcgaaaaataagtaacaacatgctacaattaanaaactannatattatttccaagcnctagcgcccattataagacccgtgttgtgaaatgaaaccacaatagagctaattcaacgagaaaattaanattctgaatagaacacanatattgtncanaagggggacannagcagtagagtaaagaacantanggtgagtatatggggacagagactcgctttgatantggagattgaaaatcgggcgatcngtgaanggtcaaaagtanggttnntatntagagaagcgacacacatgaacggagaaggaatggatgacaaagctgtatctactaataaataagaaggcatcccgtctgcgtgggcgtcaggattcgtaatgaatatatgttcgaagaagatctatctggagaggatctgaattactagaattcatttgan

SEQ ID NO: 13715 - DNA, 653 bp, Glycine max
  unsure (1)..(653): unsure at all n locations
gttggggcccattgaccccntcattgacgcnacgcttgtangtgacactatgantactcaagctcgtgcanatcanatcactcctacagtttatctctatcttgcattgtatgtagactcgttctttgtcacgggaagccggaaggtccatatcaccttcttaattgtacacatggngcactgcgcccccaaatgcgcgagtaagaagagataattttccgggctctcgtgtgccgtaaatgcattcatatcatgcatcgcataagcatctcttcataacatcataatggacatatcctgcatttgtccgttatcatattccagcctcaccttttgcatgagtcatggcatcatcatgcatatgcgtncaacaaactctntgatctgcanaaatgcataccaattgttntcatgtntgctcatccttgcgttttctctacaaacannaagcaagaaggggaagcgtgaactcacactcattctagttcatgtgtangagccaccatgtcggatcataacccgtncacttaanaacaaatattgacatggacctatgctggtactngaatgtgttctccgcatctatcatatacattgtgctactaagttgccgacatctcgttgatgtgtgagatgcacaattgattcttgtn

SEQ ID NO: 13716 - DNA, 281 bp, Glycine max
  unsure (1)..(281): unsure at all n locations
cccttatagtcctctcacggggtggaggttgtgccatattctcagaatgttcaaaactataatgctcataatcanngatgctcgaaatatcaaccacaaatgctcagactcaccaataatagaatgctcaggatgctcanaaggtacanaataatgcctaactaatctatgaaatgtcctatctatctcangatcaaagcggtgtaagtcagatggatttgccctagtcatacaatacattcagaatgcacaactagttgccttcttatgtaagtaacagt

SEQ ID NO: 13717 - DNA, 230 bp, Glycine max
  unsure (1)..(230): unsure at all n locations
tataatcgattactggctctttaaaaagtgtatcagaagtgattaagaacactctaatcgattacattaaggatctaatcgatacatggttcttgaaaggtttcccagtttttgggaagaacacttcgatcgattgaaatgataatataaccaattacttcttcanaacaattgattacattgtatattttaatcgatacatgcagntataatcattttctctataaata

SEQ ID NO: 13718 - DNA, 174 bp, Glycine max
  unsure (1)..(174): unsure at all n locations
atgcaatttaacatctaactgctccaagtaaagattctttgcagctataatactcagaataactctaatggtagtcatctntacaactggagagaagaatctctgtgaaataattcctttgttctgctgaaaccctntcaccacaagtctcgcctgatatcttcttctatcatc

SEQ ID NO: 13719 - DNA, 239 bp, Glycine max
  unsure (1)..(239): unsure at all n locations
tgaccacatcgcatttcttttctagaanacaatgacctgtntgcatgatgcatatggccaaatgcatccagcataataagctaaattgctaacgcatgggaaaaagaatattactagagtcagagacacagatatgataaacatcactgcatganaagtgcaatatgatgctccgtgcaagacatactgcagttaatgagcagcagcaaaacaaatccccaaatatcttggtccatact

SEQ ID NO: 13720 - DNA, 574 bp, Glycine max
  unsure (1)..(574): unsure at all n locations
ntttgtttattacggtcttgactctaagctgcctaagaggtccgaaggcaggcggcgaagaactgttccgccccgagtacacagtatccgttangagcgttgacaccagcagcgcttcgaagccatcaaggggatggtcgttcttccggagcgacgcgtncagctcagggacgacgagtatactgatnntcangangaaatanggcgccggcggtgggcaccactgagtacttctatgngccaagttgatccagaagtagtcctttgaatttatgccaatgcttggcaacaganganggcgtgcgnacatgagatctgngtangggcagtggatccgtcgatgccatctatcaccactctgngattcgatgtattggaaagccaggatgcagtatgcaacgagaccgtctgatgtcgatangagcatcctactgtatgtaccggcngatttgccgctgtgaggagcggtgcgtatccacacatacacctgactaattgtgattgtgtagactctgcacgaatatcgactcatgcgatgcactgtgccatctaccgtacatcctgtatatctatt

SEQ ID NO: 13721 - DNA, 173 bp, Glycine max
  unsure (1)..(173): unsure at all n locations
cgtaacaagacaattatagttggtgtttgaatacctcacccactcaagtgtatcacacaattatggcttttctctaatgaaacactctngccttttaccactctaattccccttgagttcttaggtaattcaagagaatatggccacaacanagaacaattcaccaatatgtg

SEQ ID NO: 13722 - DNA, 698 bp, Glycine max
  unsure (1)..(698): unsure at all n locations
tatgtncccttgannncnnttgaccccctttgagggacctatgagacataacttttactcgatgtctggtgagtccataatatatcgagacgctcgtaattgagaacggaagctcgttccaaactcanacgacaataagctttaactcggatgtccgattaagtccagtaatatatcgtgacgctcganattgaanacagaatctctaagcanattcaaacgacaataacattttacacggatgtcggattgtgtctagtaatatatcgagacgctcgagattataatacaagctctaagtanaatcaaacgacaattactttngacacggatgtcccgaatgaatcccgtatatatcgagatgctcataatggataacgaaaagctctaggaaantctaacganncatactntntactcngatgtctganntgagtcccgtatatatcgagacgctcganactcagaatagaagctatgagcacaatcanacgacantaaacttttcagtcggatgtatgaatgaatccccngtatatatcgagatgtcataantgatacnggaagtntgagaaaatctgacgatataacttttactcggtgtccgatgagatcatatatatcgagatgtanaaatgaaatataagcntcggaaatcaacgaacataaccttactcgatgtcgatgggcccgaatag

SEQ ID NO: 13723 - DNA, 137 bp, Glycine max
cttctcatccttagagtgtgcgccccatctgcgacagtacatcttgagataggttttgggacaagtcgtccctctatacttgtcgaagtccggcactttgaacttcggggggataacaacatcgggtactaagcaaa

SEQ ID NO: 13724 - DNA, 691 bp, Glycine max
  unsure (1)..(691): unsure at all n locations
tattgggcctttgagngccccngatactcagctnccatcatgcttctgtcagactntgatcacactggtgccagcttcatcctttgacatcttcaagtgagtaggtgcaggtgtntctttatggctggcattntccatcccanacttctttgacatgttctttgcatacttgctttgtgagaggaacatgaagtcttccatctgcttcacttggagtcccagaaaataagtcagctctccaacaagactcatttcanattcagatggcatcntgtgaacanaatgtcgaagcatctcattcgacatccctccaaacacaatgtcatcaacatatatcntgtgctatcatcaagtttcagcatctttgttgacanagagagtcttgtcaattcctcctttctataccctngctgagtangggaactctgtagcctttcataccaagctctnggagctngcttcaatccatagagagccttcttgagcctgatacatgatctggatgagtggatctacanatccttttgctgctcacataggctctttcatcaggtatcatttcagaacgcgctctcacantcatctggtcagcttgatttgnggatgcagctcaccaagtacatctgtggactcagctacacangggggaagtcatcnagctcacctcactggtgagcttgcacagctggct

SEQ ID NO: 13725 - DNA, 576 bp, Glycine max
  unsure (1)..(576): unsure at all n locations
gcccactgatcatgacagtatatgtccacacatttatacaatagcctntaaccaagagatgttgaaaagttcttgtgcattcttaagtcttccacttttacataatccatcaataagtgccgtgtatgtgtacttatttggctgaattccccattccttcattntcatgaatagtggcagtgccttggtcaaagtttcgtttttgcataaaccatctaataaggaagtgangggactacatcagcttggtgacctctgtgggtgcatctcttcataagacccanagcagaagtanntctccntgattacacanaccatcngatagagactggacgtgactctatcaggaaaccatattttatgcaacattcctcttaggagaatcatggnnctcatcacccctttactctacataanntcatantaantatagnggagctgganacatcanggattaaaatccgttgaatatagcgtgtatatttggttggatcttgcactcacccactaacatacccatcattaagtatatantgcacacatcnggtnttactcttcttcgcatacaagctatan

SEQ ID NO: 13726 - DNA, 463 bp, Glycine max
  unsure (1)..(463): unsure at all n locations
atggcccattagancattattcccttgannnncncnnnnnnngnnngnnnngctctagactggtcgtcacaaaatgataaaaggtctgctcctgctgaataactggggcgctcaggaagcattaagaacggatcaactgacacttccccacttactgctggggatgctttggtcataagtccataaactcctgacaggctcattatggccaacattactatcaggattatccacatcctttcactcctgcgactcgctacttgtgcgagagaataacgtctctccgaaagatgtcggatgacgtctgaaactctcaacactcaatattgtggtgagtctggcgagatgatcttttgacattgtaaaatcgatagtacgtatcatgatcaaaacaaacaggctaaatatctaccataaaaatctacgagcctagaacacacgtcacttttaaagatttaaatgc

SEQ ID NO: 13727 - DNA, 343 bp, Glycine max
  unsure (1)..(343): unsure at all n locations
ataataagtgcatgaaccatatcatggttgattctatatgaatatgaaataatttcaagtntatataaaanaaatgaatcatgcttctttngngtcaatgcanaatgatttctaactccgtctttntgactgaaaagacattaaccaattccatgtaacatcaatattggcttctgataatctgattagtttatgatggataagtggtgccccgcattcaacctcaaactgaanatcatcccaagatatataatanattgtacctanacaagtgacataaattgagaacgatccttgggcttccatatatacatggcgcctttacaataatattccttgtcta

SEQ ID NO: 13728 - DNA, 126 bp, Glycine max
  unsure (1)..(126): unsure at all n locations
atatattattatactattttcggggtttcttcttcttcttattattagtacttctaattatctaagtactattagaatgtaattaanaagatgatggatatgttcaaatactaattaacaaatcta

SEQ ID NO: 13729 - DNA, 245 bp, Glycine max
  unsure (1)..(245): unsure at all n locations
ttatgcaccatgtaatatatntaatcattngagaaaatttaactnttagannaaagtgtgatttactcaaaaagtcattagcggcgacatatcaacaattccttgattatatcatgcaatagaggtttggaatgttctcattnntctgtaatgatatcccattgcagctntcacgattcttttgtgtagtttaacatctctggctctgatgatgaatatgtcatgttaatcgtcatagagcacat

SEQ ID NO: 13730 - DNA, 322 bp, Glycine max
  unsure (1)..(322): unsure at all n locations
tactgggtatgtgtctactatcatnngtcatcgtttttcgtcattgaggtgccacttgagctgccaggttctccaccttngngcgtattcttcgaaagatctgtgcccnctttnttgcacatattntgtagttgcatcctatccgaagccattataccgacactgcctaacgaaggcaaccattatgtcctcccaagaatggactcgggaaggttccaagttggtgtaccangtaacaactaccccagtaagactttcatnggaggaatgtatcaataattcctcatcttttgcgtatgctcccatcttccgaaatacatct

SEQ ID NO: 13731 - DNA, 105 bp, Glycine max
gcacttacccaatactacgaccagcccttgagatgcttcacattcggggacttccaattagtaccaaccattgaagaaattgaggaaattctatgatgtcctctc

SEQ ID NO: 13732 - DNA, 262 bp, Glycine max
  unsure (1)..(262): unsure at all n locations
ctctctcccctcgcggagactctctctctctctctcctctctctcttctatnnttcgnntttagntntagtccctcttctctctctcttttattnnntcgtttttacaattccagttcagacttttagttnntatcaataaaattcattctctatttgataatggaaggctaagtccgcagcgttgtttcccttgggatcaacacagtctctttaggttctatattttactgtaatctgttagttnttctcttcactaatac

SEQ ID NO: 13733 - DNA, 543 bp, Glycine max
  unsure (1)..(543): unsure at all n locations
taactctctttcaaaccatgctatgtgctcgcgactggtccctctcttnccttcgcagctngagttcattggtgctaccccacagagctccgcgaaattggtccggccatactcttccttgcaagctctctttggcctcttgtcaaaggctctcgcggtagttgcattctcttcccgtaatccggcacactccttccggatgtgtgtagcggccaactngaacttctncttggcaagtttcgcctttcctaactcgctnttgagagctnggacttcttcgtcctcttncggtgcttcanaactctcttcgctgacgactnttaacttggcgagccaatctaaacctcgtacatgaactttcagccatttcatggtaccaccaatgatgccattacgaaatgccctaagtcctgatctttcttaacggngtnccatgccctatgatctttgatagccttgaatttgtgcgcgaatcctacaggaaagaactgctcttcgcgtctcctctgggtactagtgctatacagtgggatgtatatcacn

SEQ ID NO: 13734 - DNA, 146 bp, Glycine max
cccctttgaccttttctcggagtcactctttcagacaccgccctggagctaaattccatgtcacacccttcttgcccaatgctttgcaagctaaaggccgacgaaagctgaccgcgagttctggatacataaacttgagtaatgga

SEQ ID NO: 13735 - DNA, 774 bp, Glycine max
tgcagtgcatttgatccttgtgtacccgcgatcctctatagtcgacctcgcggcatgcaagccttttagattttgtttttgccaccggatagggttaacgtgggggccacaaaaagccaaattttttcttccttcttgtggcacttggggaaaactggggcgaataaaaaggttgaggaggaaggagaaacccatgctgtgaatggtatttcttgtccgggcccaattttccccccccccccccatattttttctttttcccataacaaactttttttttttcccccccccccctttttctccaaaggcctccctttattttccaccaaagtttttttccccccttttcctagaaaacacccccttttttcccacccccaaacttttcccccaataggttttttttccggaaagcctcgtgtaatttacccccattcagtgtgctgtgccccactgatcccccttataaatgataatttaatgggggcctaacccctccccgggggttacccctcctttcttttttaaaaaaaaacaaacacgactgttcttttcactgagaaaccccggggcgggccatttgacatttttgggctctgaaccttaagtgcagggcaaatttatgcggctgggtgaaatagaggaaaattgctatactcctgcctttacaaaagaaccacccaaggggcaattttaaagctggggttcggtctcctaatactctaccggatttcaatttttccctcagcccccccacccaggtaaagataaaat

SEQ ID NO: 13736 - DNA, 745 bp, Glycine max
  unsure (1)..(745): unsure at all n locations
cggagcgggttgtgaccctgtcgcgccgcggagatcttagtagacctgcatgcatgcaagctttgatactaattggttggagaaacctggggatgataacattaaatctatgaactcatagccattcccataggttacggtaccccctaccttaacctgaaaccttaagactcgatttatgagtcttatactcacttatataggggtcaattttggcattcctatttaatgggagactttaccttatacttatattcccaccattctcaccaaagtaatttatttatatgcatgtgcacatgcgattaacaaggtgttcacttattgaagtgtgttctagataaaataaaaaaaatgttggggaaaaatatcggtgcaccgaagtttgggagtgataaagaattatctctatagcctatgaggcctatttgaagtgctttaagtatggcttctcccagagagtgctctgaccccttattaaagcaatattacagtgtgtataaccaaggntgatagcctccaaagctggcacactttggtttcaggggagatgaaccccgccacaaccaatatcggcaggttcaantgtggagagaataaagcacctatgtggactttgaggagacaggtttggtgtacatgcactcggcaaaatgcttaaagaattgaatctggggggaaaggatgggggtacactaaaaaaagaaaaggaaatggggaacgaagataaaaaggtttcccgatg

SEQ ID NO: 13737 - DNA, 179 bp, Glycine max
cacaatagtacaaccctccattatttctcaatattatgcttatgtctctctattagtgaaatgtttctctgttgatttcacaatgcaataacccctttggctctcatggggttttatagcctaacatgctccaaaaaagtgcttggccttgtcaccctctgaataatggagcttgcact

SEQ ID NO: 13738 - DNA, 279 bp, Glycine max
gacaccaccgaaccacctcctcctgtctagcaaatgatacccttcttttatcatggacaaatgatccactataaacatatatatcaacaagatataaatcatcccagggacaatttggcactgcacaaaggagtaatcaaaatattcctcactagttctaatccaggaccagctatggaatagaatatcattaatcaccttgtcaaactgaaatgacaaattcctaaagacaatattgctcctccagttccatataatacaagtaacagcagctaatat

SEQ ID NO: 13739 - DNA, 316 bp, Glycine max
tgccagcctggggcctttttggactggctggggtttactaaatgcatgcgctagaagacagagtcacacctcctaataaagcctgacacccgagcacagatgcaacttctacaatcctgggaaccaaagcttctattccacactatacatatcaagttctatgtcacgcctttcatttcctcatcaacttactcatgtactgacttgagtgggaaagtctttcattttgcaggtgctctctcctattctcctaacaaagggtacctatagactgacgtgcgaaaacgtggagcctattcaggctgcgtatacctta

SEQ ID NO: 13740 - DNA, 329 bp, Glycine max
tgatgccagtgactgataccaagaggatgagaaagacaagaagttctggttatgttgggtgctatggtgccatgggaatggcaattgtggaaaggtgtggcgacagaaatctcacgtgacattttgggaaccctataggttagaatagagaaaacattttaaaaaaaagatttaaagcgccagaaaatataaagtgggagctacatattgaaaaaagagaaaaacattctaagacggtttttacaaaaccgtcttggtatgacagtcttctaaaacgatgttcacaaaactgtctttgttgaaaaatccatatttaccaaattgtcact

SEQ ID NO: 13741 - DNA, 703 bp, Glycine max
atcccaccgtctttgtggactatctgaccctggttacaattccaacgtattcattcattggttaatttcgggtgcggttaaaaatttgtggccattaaataaacggttgctaatctgtcaattttgttggggtttaaaactgtgggaatttttaaatatggaaatattttacgcttaaaaacggaaaccatccttttttctctcaatttcacccattcccaccttttttttttcaaataccatttgggccccggggcctgatccgtggatccccatatttttcgcgggttccctatacaccttcaaaaaaacccttaatttaatggatggcacttatttgcccaattaaaaatgggcactttgtgcgcttccccttacaccacccatatactccccccctattattatatcatattttttactcccaacaaatttcactttttttatgtgccccaccccaaagaagaaagtttttcccctttaacgtgtttaaacccccttccgcccctccagggcaaattcccccccttaatccgtgtgtgagccgctttccccgttgcttccaataactgggccgttttccaaaaattgaactccccccttcggaaaccctttgtgtaaccctgacccctcagaagtttcaatctccttaccccccccaataatgctcatgttttatactgaggattgttagtggcattct

SEQ ID NO: 13742 - DNA, 408 bp, Glycine max
agctttaaccagggagtgggtgaaattttataccgatgaagcaatcccttgaagaagttgttccccttagttagaaaataatggatttttttttttaaaattatggtaactttttatttattattatcatgatcgttcattagttagaaaataattattcaaattatagtttcaccagttagatagttttttttttggtgttttaattttgaaataactaatattattgagataaaaatgttaacaaaaattaaatttgaatttttcaataaattcatattgtgtataattaaaaaatattgatataatacaataatttataatagttctctatcttataaattttattttagttaaattgtataaatatgctcaactattgttctttctaatatagtgatatactaa

SEQ ID NO: 13743 - DNA, 430 bp, Glycine max
  unsure (1)..(430): unsure at all n locations
agcttaagctccttcaactgcacaaggctcttaatatttgaagagtatccttgtggaaccttcacccgacgaagacactgacagaaacttatcttctccttcttggacaaagtatggcaggctgggggcaagtaaattttcttcccatcagaccttggatgcaactgtgatcgtatgcccatatcagctagatcttgacgggtattcaagccatccttcgtcttgccttgaatgttaaggagcgtcccaatcacactgtcacaaacatttttctccacatgcataacatcaatacaatgtctaacgtcaagatcagaccagtttggaagatcaaagaaaatggacctctttttccacatgcaactcttacttttatccttcttttaggtcttcccaaaacaatattcaggtgtngaacccgctgatatac

SEQ ID NO: 13744 - DNA, 655 bp, Glycine max
  unsure (1)..(655): unsure at all n locations
agcttttataaatttgaaatttgaattattcggggtctaaactcttcaagtttccacaatctcataccgcatctttaatatctctttcttcaattttttccaccaacgtaccccttgtgaaatttgtccaaagttcatcccatctgaaaatttggtactctttgcctagcctcttcactaaatcttaattagatcaaggattcagggggaaatccaaccactggtattaagatatcaaatttaaagttttattaatttttatcagtagattaattttaaacattaattgtaattttttaaggtttatgccaatctcaaaccttgatcttgaactgagataatctctttctcaccataaactttctaagatgaaaaggataaataaaataaaatagggaaattaaaaaatactaataattataaagtaagtatacatgtccttaaggttagtgggttgtaccttgttatataacgtgatgagaaagatcctaaacccgtatacgatatactaaagtgctgctgatcgataaatgttagttattatatagttgcacgctgtttaatgcagctagtgatattacaaatgaatcanngantatatatatataatatatatattatgtatatatattatatatatattatatatattata

SEQ ID NO: 13745 - DNA, 470 bp, Glycine max
  unsure (1)..(470): unsure at all n locations
agctttacaattgacacaaggttttgattcttttaaacaaaatcaaattgcaattgctttggatcattgaagtattgaggtgtcgggtgtaattaaagtaaaccttaaaagcatcattgtaatttactcttttttctattaaattacaagaagggaaatttcgtgtatggttcgaaacattttctttggataagtcaaacctcaagtaatgaagttaaaggctgcattaactagctagccaagctcattcgcttattgaggttcacgataagttcaaatgtaagatcgatttgatccaaactcttaaaacaatttanaccccaattcactctgaggttcacaaacagtgcaaatacatgtttctttttggatagctgcgagcgagagagtgcaagctatgtttaagtgttaactctcaaatttcttcttcaatttttttttttttttgatacaggagaaagctacaaaaa

SEQ ID NO: 13746 - DNA, 487 bp, Glycine max
agcttcttactccacctttggttatgctcatcataattatgaaggagtacgcttactaaaggtgtgctttgggttcctgcaaagataaaacttggtaacagagagactcaacaagggcagaccttgggtttctacaaagataaaactcaacaacagaaaggctcaccaagtacggaccttgggtttgtttagcctcttggagattccacaagggatgtgtttgccctaggtatggtgagactcactaagggcagaccttgggtttgacgagcctttggagattagaccacggatgtgtcgatcttgaatattaacgaagctcaccaagggcgaaccttgggtttaacgagcctttggagaatcgactagggacatgttcatcttggattttggtgaagctcatcaagggcataccttatgttttgacgaccttttggagaattcaccagggatatgtcggtcttgtattttgctgaaactcaccaag

SEQ ID NO: 13747 - DNA, 152 bp, Glycine max
agcttgtcataccctaactaaggggttaactttttcttggcataaggggctttacactaaaaaaagggtacaagaaattgatgaagaaaaagggaggaaaaaaggaatataaaatgattaaaaaaaaataaaaattttcttagaaaaaattt

SEQ ID NO: 13748 - DNA, 465 bp, Glycine max
agcttattagaagggccataggtattttattgatttgtacagaaaattaaacagttgcataaaatttcttggaaaatatttttaatagtatagttaatattctaagtaaaaataaagcttctatacagtttttgcaattatattttggccaaaaatgcaattctagttagtttgatgatacttttttggggctccatccagtctagaaaattatttaaaaatcgtattaagatagtacttgactttcctttatattttaaaataattttttatggctgaaatataatttttgttcaactatttttatcaatcctcaatttaggtattcctagtttagaaatgagacttttaatcctcttattttacaaaattagtagttttggtcctccatccatatcaatgatttgactgttaaaaatacatggactgttataatttaattttttaatgaagtgaatatattta

SEQ ID NO: 13749 - DNA, 229 bp, Glycine max
gaaattgctggttttttttaccatatacccaatatgaaatttctgcttaaatgtatgtctttatgaaaatttgttaaggtgataattagaaggattaagccatatatagtttaagtgcaaggttctaaggccaaagtattatttggaaacaataattgtcttcatatcaatttgttacccttctccagtcttcctctccttagttgccgatttcatggccaccttacac

SEQ ID NO: 13750 - DNA, 335 bp, Glycine max
gtaccataagtctcaaagctcaaacatcagtaatatgaatgtgttgaaagaagagggagacggttctactacagaacaaaatcaagatgtatagaatgctgaaatgaaggtgactcctcaacaatatgcatcgctaatggcactattgcagcactagagctaaattcacaacaataaacatgtgaatcaaattggtacaatcactggttctagcaatgcaaacaaaggtaatgtcttatccattacttgtagtgtaagtaagacaggttcaagtgaatggatactcgacttaggagccactgatcacgttccaacttttcctcatttatttttct

SEQ ID NO: 13751 - DNA, 738 bp, Glycine max
  unsure (1)..(738): unsure at all n locations
cgcagtgctttaaacctgtagacccgcgatctctgagtgacctgcggcatgcagcttcattgcctccccgtcacctttctatttttagccccaagagactcagcataccggtgctctagtctgaggagagaaccgatattattctctccccgaatgcacgagaaaagccgaaggatgcatgacttttttaggagcgatatctctgaaaagaagaaagatacagaacgggtccttcgtgattgggctcaatacttgacgaccaatgcatgtggagatcgaagaaatggggaaaaataagtgggccatcatccacaaaggagcatggttgctgaatgactaaatcacaatattccggtgataacttttttatggccacaacgagccatgttcctacctgtaaaacaactttcacgagtgacccttttttaaaaacggctgaattattacgtccagcggttctaatttgacgaaaacaagaacctatttaactggttgcccacggacccaanccccaggcttataaaatgacccttggaaccatgccaaagatttcgtaactttgttaaacatcgaaccttttttttgttttacctgctggcggaatttataaaggtgcggccgtgctatgaaaaaacatacaaggtcgtgcgcaacccctaaaaaaaataatgtttgtgtcccgcacaacatggcctggactaaaccctcctcaattaactgtattaacaaaaaagaatg

SEQ ID NO: 13752 - DNA, 492 bp, Glycine max
  unsure (1)..(492): unsure at all n locations
agcttgtaggattatggggtacccatcacatgtggtactaagtggcggtcgggcgatggtgcaaaacaattctccacatccacaaatcacgtataaacccaccatcccctgttgcccacctccaactaagctcacgtactcccacgtagcccttatcctcgttcctctcaacgccgggtccccatcaatcctcccaagcttccacaaaatccaagtaattccacatccaatcatcaagaactaacaaaaccaagcaaaataggcaaaggcagaaaactctgcccacaacacaaaccaatatcacagctttttacatacaaataccccagtaacattctcttcgttccaattcgttaaccgttggatcgaactcgaaaatttactggaagtctctagcacataaatatacattatgaatgttgggatctgctagaaaacgtccatagccccatatgtactacactttccacaaccagcanatacataacattt

SEQ ID NO: 13753 - DNA, 462 bp, Glycine max
  unsure (1)..(462): unsure at all n locations
agcttagcactagatcggatggacctttttatgtctcggagaggatcaataacaattcctataggtcagacctcctagggggaggggatgatgcaatcctccctaggaagggccagtcactatagtcatgagcaagaggctccaagaggattgggctagagttgctaaagaagaccctagggttctcatgaacctcaggatagatttttgagcccatgggccaaggttgggtccacttatctttgtacatattagactaggttttcattatttttgggccttgtatttagggctccataatgtaggtaaggtactggcgcttcatgacttancctctttttcacctgaaattgcacagatttcatcattaaatccaatggaaatattctagagacaactttaacaatagaacaagatttatttacagaatcactacaaaataaccataaatttggggaacta

SEQ ID NO: 13754 - DNA, 134 bp, Glycine max
agcttgtgctcgtatcatagtttcattttttagcattctaaaagaaacactttgaaaatttatcatatatcattagcaacatgctttttttctgtactaaatactgcgtcatggtggtgaacaaacaccaaaac

SEQ ID NO: 13755 - DNA, 307 bp, Glycine max
agcttgaggataaagacttctccagctatttatcttctctctcaaagaggctctttaactttctagctttctcactctaagaagtggattcactcttgtctcggatggttgggaatgaaggctcatatccttatttatactactccacctccacaatgaatggtagagattacttgtatcatagggtgaagattaattctctagaatgctccacacattctaggagtctctacactcttctactccctttcatatcttcccatactcttccataaggttccagaaggtttcacacatctctagaata

SEQ ID NO: 13756 - DNA, 358 bp, Glycine max
agcttccccaccaccttaacatctctatttttatcaaactctcttataagaagcctgctctctatactgaaagtgtcaaccatttttcttctctccttgcttacctaaaagaagcaaagtgatgcagtactatataaggtgtgatatctgggaaaggaaagatttttcagattggatctttcttgattgggttcactcccgaccatccgattcatgtggcatccttatatatggtgaaaaatcattggttgttagttcacaatgtcctatgatcttgtatcatctctatcaaaatattccgttaataactattttatcacaacccgcaacttgatgcgttcgttgaaaatagcattac

SEQ ID NO: 13757 - DNA, 385 bp, Glycine max
agcttgaagcccttaattttatttttagtttgataagtttgccatgccaaacatgcttaatagatgtgacatttgtattgaatgttttcaaactgggcatgtgtgtgatatagtctaagtcttttacatttttagtgttgatcaaatatgaagtgaatgaagtattctagttctctaagtttcctaagaacttaattctacatgaaatttgactagaagcatcgaattaatagattgcctaacctagtaatcgagtgtccaagccagttttagaagaaggaagagtttgtagcataggataatcaattgtctcatttggtaatcaattacccaacttctagaaacaaagaaactctttgtgtgattctataatcgattaccatat

SEQ ID NO: 13758 - DNA, 310 bp, Glycine max
agcttgaagtgaagaagtgtggtaaggtgatacttcctacttttattcattgaccacagagtggtacctggaaatatgtcgcgggggtcatgagaccttggggacgacaggtggggtgctattgcccaaaaccaagcttgaccaatcccgacccaacccgggcatagtcagtcagtgagaacctgtgatgtacctaaacaggcgagctcctggcagtcaaccgattaaagaacaaagaccacaaagcaaggaggtttgtgtggtggctggccacctatggatcttgagtgatatttgggatatggcctct

SEQ ID NO: 13759 - DNA, 569 bp, Glycine max
cagcttataagccattttcactatgagtttattattacatttattaatcccaaagaaccctgaaacttcatttatatacaaaggcattggatacttattaccccccccatcgaagagaatgaatacaaaaatgttgaggttccatccaatcatttaactgcttcaaggagaaccaaaactagctagggagaaaccatagaagtttttttttccaaagaatttgattccttccaaacaatcgaggagtatactttagaaagtaaaatataaagttaaaatatataatcagttaaaaaattaacagtcgaaattatgataaatacatgcacacacatatataacaaattatataattgtttaaattaggttataataagatacatgcgtatataaaacaaatcataaatataattgtgtatacatttatcttatgaatttagtggtaaaatggttaaaattttttacatactatgatagaaaaagcaacaaatttattatatatttatttgtaaatgaataataaataataaatcgcgggtgtatttatatatatatatatatatatatat

SEQ ID NO: 13760 - DNA, 215 bp, Glycine max
  unsure (1)..(215): unsure at all n locations
ttttgtttgatgaggaagagctatatgactatttaaggatgaaatcaccatgattgcgatttaatacatggcaaggacctatntaaactatataatgtccaatccactgaaaaaaaaaaaaggatcagtaagggaaggatggagggtgagaccaanaacccatgataatatgacctgcaaaatgtctgtctcttgttcgcggggcctttgacatg

SEQ ID NO: 13761 - DNA, 534 bp, Glycine max
aaatcacaatattctataacccaaatggtcaggctagtttgcataaggttattgaagcaaacactattaccatttgttggcgcatgttctaaaaaaacaaaactaagcatataatgagtagctcactctatgattagttaaggctcgaattctcacaaaaggaaacgtatctgatcttctcttaaaagacattgtatctataagataatatttgtgaaaacaatacattaactagtattttaaccgtgaaatttatatccatttaaaggtgaactaaaaatatgtaaatccatgataaccaaattattgatacatgttaattaattaataataaaattgtataaatttaatttaaatcttgaaagtacatttttagttttattaatttcagtaataaaataatattttaataattttataagataaaatggaccctaattcttatagggattaattttaaataataagtaaaaaaatctcaattttggaaattcgaaatcttaaaccctaaatttcctaccctttgacaatggg

SEQ ID NO: 13762 - DNA, 387 bp, Glycine max
tctcttttttttggcaattgttttgccaatcaatagcaaattttatgggattttggttttcttattgttgtataaatgcacgttatgctattcaataaaaatacaaccttctacagttcaatatctttcttttattcttgctataaccctatacatctttctaaataaccaacaaaagttttataaccatttattcagtaacagattaatagagagaaaaagttccaagttagagtccacatggacacaaaaacaatcaattcagtattacatgttagagttcattcaataatctaccgaaatcaaatccttcatcaactattccgtgtaagttatgaccttatgactttttagggttctcaatagaaaacccatagaatattaaaa

SEQ ID NO: 13763 - DNA, 267 bp, Glycine max
actcttaattaaacataaccgagtactatactcacatacccccgacaaacttaatatgtgtgatcttcagggagctcaaacaccttgagtatgtttcctaataaacttgtatctggtagaacagagggcttttgagaagaactgtccactgaccctgatctggtatgtgacccacagagtgagctgcttacaacatgtatctttacacatacgagattgaactccaaattgttgatatctccctatgaacaataggtttatgtgctg

SEQ ID NO: 13764 - DNA, 152 bp, Glycine max
caaacctggtaaaattacccaccgttcggttgggactaagaactttattttgaataaccccttaaggggaaaagggcacaaattcaccttctttcccaaccatctttgatttatatttccaaatttttccgacaattcttcggatatatatc

SEQ ID NO: 13765 - DNA, 351 bp, Glycine max
agcttaatatatcgagacgatcaaaattgttcaacggaagctctcgtgaaattaaaatggtcataagttttaactcggatgtccgattcaggagcttcacatatcgagatgcacgaaattgaacaatggaagctctagagaaattctaatggtcataaattttcacacggaggtcctattcaggcgcttaatatatccagacgctcgaaattgaacaatggaagctctcgagatattcaaatggtcataacttttcactcggatgtgcgattcaggtgtatcacatattcagacgcttggaattgataacggaagctctagagaaattaaaatggcattactttttacacg

SEQ ID NO: 13766 - DNA, 366 bp, Glycine max
  unsure (1)..(366): unsure at all n locations
agcttttggtcagacatattctaaaactctcttataaacctggaagtgatggacattttcccaaggtataagaacccaagaccataggcatcaaagacgctagagatttaaataaccttgcatgggatgagttgttaggtattctcaaagtccatgaagtccaccttcagaacatagatcatctgcaaaagaaggatttccttacccttaagtatgaagaaactatctctagaagaaaagagaaaaagagcttatccaaagctctcaaattacagatgactgagtccgatggatcagacaactctgaatgatccacaaatgatgaagtgacttttatgttcagaanagtcaaatagatgatgaaga

SEQ ID NO: 13767 - DNA, 226 bp, Glycine max
agcttaaacaaggaacgacaatttcttggttcgtccgaaagcttaagaaattattctcacctgtaagattaccccactatgggaaaagttttcatatttgtatacacacttaatagaatctgaagagtaatatttcttggatttctgaaacaatcatggattctccattgcttcctggacagcttgctccacccggatcacctatcaagtaactattgggggggaa

SEQ ID NO: 13768 - DNA, 402 bp, Glycine max
agcttggcattgagtttgatcagaatgatgtcctgttcttttactataaagacatgtatgagaactcacgccttgcttccacctccaactatgatcaagaagacaactccaaccctaagcggatggcataaatcttgcgtctatcctagatatatcgcttgaacgactggcagatgtgtttcctaagataagaaggagatgatgagttctatcaacgccttattcatgatactcatcctcctcactctcggtttgtttgtggcttgcataagtactctaaagatgcaatgagaagtccattgtcactgtctgggcaaggtttcctggactcaaggagtgtccatattctccttatcaaaatccatgggttcatgttaacgcatggcaactgagcttttatga

SEQ ID NO: 13769 - DNA, 298 bp, Glycine max
agcttggcaccaagtaaacctcttttcttgaattatgtccaaagtatatttacgttggcataagaatatcccacttggattccttgcaacttctacaccaagaaaatacttcagggtccccaaatctttcatgtgaaagcacttgctgagatatactttaaatttttggattgtagtggagtcattcccacacacgatcaaatcatccacatacaccaaaactaccagttgcactccatgattaagaagagtaaagagcgagtggtcagaggatgattgttgaaacccaaaaatcgtg

SEQ ID NO: 13770 - DNA, 326 bp, Glycine max
  unsure (1)..(326): unsure at all n locations
agcttgctccagaacaaaatgtttgcttaaaggtaatggaagtgggtcaagaggttctggaggtgagaaccaaaacatgatgtcacccattgaggtaaaagcgtcaagctaatgacgttaaagaagtgctttctgggaggcaacccaattntaatttctgttatctttggttttcatgcattatatcatgtggaacttgctttataatctgtactttggagtatatcagcttatccttgattggtagatataacggtttcaatttgttgaggaagggactgaaaaaagacttattaaacattttttgataaacagtcctttcgcta

SEQ ID NO: 13771 - DNA, 416 bp, Glycine max
agcttatctcatggcagacaccctaatattatcagttgccaaccatcacagtttacttggtgcccacttaaaggggaattaaaccaggaatatacttaaagggcctaaaaaggtaaataatgctcaaaataggcaatcctagcttaaatcttaccctttccttgatgtcacccaaagtcggcaagtacaacttataaaattcctctctaaatgcaaccacaaacctaaataaagtttagaaaccagcaagaataagacaattaaaatatgtgatttgtataaatttaagggacaacaagatacatctactatattatagtattttcacttttaaaggactaaagacaaattattgaccataattgatatattaccatttgtatatcactaactccctcttacttagtttgtctctc

SEQ ID NO: 13772 - DNA, 454 bp, Glycine max
taattggttttaattaaaaataattttgttgacattggttggtattgggatgtttcccacgcagtgagcattcgaaatcgctgttgttgggaggcgaaggcaaccatgaccatgaacggccaccataccgttaacatcgctaacagtaacaggcaccccaacgacgatgaccaccacgccctccctccctcctccgaccatgatgatgacgaacaagaactcgtggatcccgatgatccttttgacattactcaaaccaagaacgtatcgcacgacacgcttcgccgttggagagtaatcattctatctctttgcattttctcctctattctattattaatcatcattcaatctgcatccctctcttccacattgttccactccgatcgcgctcattctttccaacatgaataaatcattgtacatttctctgtgtttaaatatacttacatgg

SEQ ID NO: 13773 - DNA, 407 bp, Glycine max
gcttgcatttggaattgggaaagccccactttcttattaaggattggtcctgccatctcaacaaacaaatcaaacataacaagacaattatagtgttgtttgaatacctcacccactcaagtgtatcacacaattatggcttttctctaatgaaacatttttgccttttaccactctaattccccttgagttcttagacaattcaagagattatggccacaacaaaaaacaattcaccaatatgtgtaaggtaaggctagagagacaaggaaaaggttaaccaagaaaaaagactaacaatgtttttaggcacaattaaaggaaataaaattcagaatttacgaattcaagttacaatcctttatacaaccaatatattaccttaaaagagattttttttaaaaaag

SEQ ID NO: 13774 - DNA, 250 bp, Glycine max
ctttgagaaagaatacttggaggaagcttggagaggttttgcaaaagaatactctatgaagcctatagaggcttttcaaaagtaatattcatggagcttgtagaggcttaaagaatactagtgttaggagcttatggggcttcgaaaaaaaaaaaagaatatcattgtagggtgcttggtctttgtggagaaagtctataggtgcacgtagtggatgtagcccatgttagggtgaaccatgtataatttc

SEQ ID NO: 13775 - DNA, 241 bp, Glycine max
acttgggccgccagatccctccaccttttgggcgtgttctttgaaagatctatccccctttctgcacatgttctgtagttgcatcctatccggaaccatatcaaaattgtactgatactgcctaacaaaggcaaccattatgtccttccaagaatggactcgggaaggttccaagttagtgtaccaggtaacagctaccccagtaagactttcttggaaggaatgtatcagcaattcctca

SEQ ID NO: 13776 - DNA, 367 bp, Glycine max
gcatggataaatatgcataatatactgctgaggaaagaaaagaagaaaactttgtatgcataagtattgtcttaaccaaaggcttatggcatcacaaccactggcatgataacttatggtgattattactatgagtcgcccacgaggggatgaccaaatactaatcatattacagcttttcaattgatctcaccatttcaaattatcagccacttttatttcatagctattgttactttaaaaaaataatgatgacttcactttaacagcttaactctcttgataacgaatattcagttaaaaaggactatgttataatagtaatcggtgtcattaaaaatagttaactctcatcttctctgtagat

SEQ ID NO: 13777 - DNA, 356 bp, Glycine max
agcttgagcatactagctttcatctagggttggtccattcatgcctctacctataatcacgccaagtagggtataaaactaacacttaatagttaacactgacttgagtttcagaagaagtactaagcaaagtttaagtttcacctcacactatggcagggaaggtttcagaaccaaaagatatgaactatgggccagtatgaaagcagttattggttcatagaaatgaagcatttaaggctgagcctctgaccaccatatatactcattcaacaagacatcaattaacttatcactcttctaaatagatcaaaagtccagttagaaagaaaatctggtagttttgattcttaata

SEQ ID NO: 13778 - DNA, 334 bp, Glycine max
agcttgagacttcaatatctacgcttttttttcttaaccattttgtggaaacttcagtcaacgtgaggggaatgttttcacttcttaaaccctcaccttgttgcattcggaagctaagcttgatatacatggtgtgacgtaaaaaattacctatctgccgttggacgactcaatgtgactgttgcatttactcttcggacatgatgctaacgggtgggccacatgatttaccttttgccaacatacgaccgccaaagtctacaaggatgtgggagattttatcaacgatgaggatctcacaccatccgagatcactttctactgaggtgtttgc

SEQ ID NO: 13779 - DNA, 204 bp, Glycine max
cggcttaaccccttgtcgcctgcttaaataaatgcccaggggaaaacgggggcaaaaaattgtcctattgtcccctttaaataaaatggggaaacttcccagggtggggggaacaaaaaactatttttattaaacttttggggaaagggcaggttttccctacaccccacaattgttaaattatttgttaaaccccggaaattt

SEQ ID NO: 13780 - DNA, 305 bp, Glycine max
ccgcaagcttggcctccctaagtataaaaagcttttgattaataaactccttagcaatatggctgatgagaaagttgattacacaaacttttttggaacgctttcaaatgttaaagcagacataaacattccagatgatgagctgttagccccacaaaaggctgtactgctatatattggtaaagagcgttacgaatcatggaccagatggttgaaagcttatatacatgacgtacagttatttgatggataaactttcgtgtaagttatccacttgcctaaaaaaaaggaacgtccactgacta

SEQ ID NO: 13781 - DNA, 368 bp, Glycine max
agcttgaaggcaaactggatgcgttggtcaacttggtaacccagctggccttgaatcaaaaatctgtacctgtcgcaagggtttggggtttgtgctcctctgctgaccaccatacagacctttgcccttccatgcagcaacctggagcaattgagcagcctgaagcttatgcagcaaatatatacaatagacctcctcaacctcagcagcaaaatcaaccacagcagagcaattatgacctttccagcaacagatacaaccctggatggaggaatcaccctaacctcagatggtccagccctcagcaacaacaacagcagcctgctcctttctttcaaaatgcttttggcccaagcagaccatacatt

SEQ ID NO: 13782 - DNA, 388 bp, Glycine max
agcttgacaagagttacctatcatatatatgcctatctccattaagatattgaacagattcatgcttctaaattttatcagtgacaaacaagtttagcaaaagaaagaggagcacttctttaacactttattaaattctgttattttgtgaattacacctaaatttcattacttactccatttagtggaactacatgcaatgctgcacttgataaataaaagaatgtgcttaaaagagtctcaacaggaagaacaaggatcctataatgtgatgcaatcctcccaagcagaaacccatcactagagccatggcttccggaagaatgtgttgacaagtgccctcaatacttaaaaggggggggggggggaataaagtttaaaaaatttt

SEQ ID NO: 13783 - DNA, 408 bp, Glycine max
aagggggcaatattccttccttaattggtattcacccaaaccaaaaataaattaagtgccttactattttgcaccacactttggatggaactcttcaactatctggatgacttaatccataattacagacctatatattatgctgataaatgatgatttcctttatatggttagttccaagtgacgtgctggaccttgtcgtttcagtcatgtaattaattatgtatgctcaaatcatcgtttcctttaatcaacaaacctgacaatatttgtgattctttttgtgtggctaatcagggaagcctcgaaagcacatacaaatcacttattggcatctcacgatctactttctgaaaagtagtttaagagaatggtagctacaataaactccacagttacaaacacatt

SEQ ID NO: 13784 - DNA, 422 bp, Glycine max
ctttatcttggttgcgatccactattttaccaaatgaagtggagttgcattatactccagcgtcacgaaaagtgtggtagtcacgttcataaaaagggagataatttgtgttggattaagtggcctcagaataatttgtgttggatcaagtggcctcagaataattagatgttaccttttttgagattttactaatattgttgtcgtcgtatgtaacatgtccactttacttgggggaaatggttgtaaacttggatacatctcccgtcatatgcttggaacgtccactgtcgatgtaccacttcttccttacagattcttctttgttgttctcatgagatattgtcatgagacacacgttgacttggtcttcatcatgaacttggaaataacctgttcctgaaaacactttttgaaaaaca

SEQ ID NO: 13785 - DNA, 286 bp, Glycine max
aaaacagaaaagttttcctcttgaagaaacttttctaacttagaaacttttcttcacactaaccatgatgatgcataatacaatacacatatcatatgtactaagatgcaataaccaagataacaaccaatacaaatgtcactcaagggagttaggcatgtaaaagtcaaaacttcttcacgcttttccttgagcttcaagctttagcctttaggttgttcaccatgttgctcatgtttctccccctatctctaacacttggtggatgtctggcctcttaacaaac

SEQ ID NO: 13786 - DNA, 303 bp, Glycine max
  unsure (1)..(303): unsure at all n locations
gtgaatgtgagccttttatccctttgagaggcttgtattttaaaatgttttaaaaatacttttaattaatatttgaatttttattcctttattagtatatatgtgaggggtagagggtgtcacaatagccataacacaactagaccaacatcattggtgagaagagtagcttgggtagtttattgagaatgtgaagcatctaagtgtaactganatcaatagttttggtagcttgagcattgggtttatgtggccttgtgctgggtatgggatgcacacagaaaaaaagctgagataaataaa

SEQ ID NO: 13787 - DNA, 389 bp, Glycine max
aactacccagtctataaatagaaacatgtgtaacacttgttgtaactttgatgaatgaaagtcttgtgagacatacttcaaagatccacttctctccctcttttattccttcaatttcgtgctcccccctctctctttctctccctctttcttttcctccattgaagcatcctcttcaagcttcttatccaaggcaattcttggtggtgaagctccttcttccttggcttattccctagtggatggtgcctcccctcccctcttctcctttgccttccgctgtatctcaatggtgaaaaatcaccattgaaggacctcattgaagctcaaagatccagcctccatagaagctccacaagcaagcttccatcacatatatcctcatatgt

SEQ ID NO: 13788 - DNA, 795 bp, Glycine max
  unsure (1)..(795): unsure at all n locations
tgagcganttaggacgtctcggacccccggggatcttaatagaccagccggcgggctgcatctttttagggggggtttttcagtttttttttttacgggagcctccccatgtttttaaaagaagacagttgatacacctgttggaaactttgatgaaagacaagtctgtgtggacataccttaaaggtcccccttctcctccctcttttattcctttccatttcggggctccccccctctctcatttctctccctcttttcttttcctcccattgaagccatccctcttcaaagctttctttatccaaggcaatttcttgggtggtgaaagctacattcttcctttggcttaattccctagtgggatggtgccctcccctccccctcttcttcttttgccttcccgttgtatctcaaatggtgaaaaaatcacccttggaaggaccttttttgaaagctccacagatccaagccttctttaaaggcttcccacaagcaggccttccctcacataatttcctcatatgtaggttccctgaccctaactatggtggtaaaatggggaattttataataaactcccacacctatctggagctcccctgcggttcctcgttatgtcacttgaaaaacccttggggccgtgcgtggtgttccccctcagccctttccccgcacataacagggagatttttttgtattttaaataatatcgcgcggttgggggtaaccccccctcttttttgaaaatctgcgactctttggtttaccaagggcctgttgtgaatcccccct

SEQ ID NO: 13789 - DNA, 757 bp, Glycine max
caccgctgtgaccttgtgcctgggacccctgaaacacctggagcattcaggctgggagggggcaagctgaggaagatgtggatgattttgtttaacaaatacggaagaaactgggattaaaccgttcaacgtcaacaaaataaatatccctttctggaaaaaacattaagcccccttttatctatagccatcagaatatggtatttctgatgaacatgcactgggcataaaacaaagaacaacaatgtaccgaatcaatcagtgcttgacgtatacgaatttcatattttggacgtgcttcctggggattattggacaaagcacacctgttttttttcttgtaattaaatgaacccaacgcgccatttgggttggtgggcatgaatgcaatcgatgcaactaaagcagggcttactgtctaaataaattaacatcagcttcgtgagaactttgtttaataaatggaaaagagggaactttcgtggttataaattaagggtggaacttttattgtctatcccatgaaattttgctgattggaatataatctgtggcaaatgaccggagaaggggaaccaaaaaggtcctcccctcaattttccggggtgttggacaacctttaaaccaaccttaccatatgcgggagtaaaaatgggaagggtatttcttaccctcacatgaaggttgccaatgcccagggggagaattaattttgttcaacaaatcttggtttgggtgtcaaaaaggtcactatgct

SEQ ID NO: 13790 - DNA, 279 bp, Glycine max
agcttggttcgttggagctacacgtgttttttacgaatacctgtcactttgacaagatattaaaacttgatagtttgccaacaatggacctaatcttagtggaagatacaaattattatgaaactccctctttatccactatttatctctttttgtgtttaagtgacctatgacatgaattcgactttattttggaatatacgtttctacagaatatcttgatcatcgtctgatcgtatgcattctatatatttcattcgggctgtcaagtcttcaaac

SEQ ID NO: 13791 - DNA, 418 bp, Glycine max
agctttatcctttgacattagcttattgtgccttctgtaacacacaacaacctttattgtgaaattgtaaaactctcatccccttgattttgtaaaacacgccaagtccttctatagttgcattattgtttgagaaatctaagaaacacattattttttgcatatttttttattggtcaaaatttattaaaaataatgaaattgattaaatgtgatagttataattcaaaatataagatagttatttaatttttgttggtcattatttaatctcatttttagttgagataaattagacaaacacttttagaatagataaccaggtgaatttaataatccaaggctgactaaaaccgccttccagtctcacgcagttgatgcatgtaaaatataataaattagcatatggtttcatgat

SEQ ID NO: 13792 - DNA, 493 bp, Glycine max
  unsure (1)..(493): unsure at all n locations
agcttgtcataccctaactaagggttttttttttcattgtcataaggggctttacactagaaaaggggtacaggaattgatggaggagaagggatggaaaaagggaatagaaaatgatgaaagagaataaagaatttcctaagaaaaagttttcagactttaggtgtgtattatagtgctttaagactcggtgtatcttttctcctcggcttgactccctttttatagccatttgagtggacttgggcttgacttcctttttatagttgctggaatagagttgggtctgatgtcaaaaatcttccttatttatatttttttatattttctggattttttttattttaatccttcattttcatatctgcaagccataaataagaaaaatatcaattcctatcatntaagttaaaaataattgttaaataaatatttttaaaaatatttttaatatattttattataaaaatggctcattttagtagttatcggg

SEQ ID NO: 13793 - DNA, 309 bp, Glycine max
agcgtgcatgcaaatccagataagtaagcttggaggaaaatgcacgaaaacacgtagagtttcccataaaactctgaacaaaatcaatatacagcaatgaagcatccataaagaccacaaaaatatataagcaaaagatcatgtgaaattacatgcaacgaaaaacagttatcaaaagaaaattcataaaagatgaaacctaattaggcgctaaatatccacatttttttattcaaaaactataaacggtgaatttcaaaaagaaagaaaattgaattgggaatgagaagaagaaaaagaaaggaaaaa

SEQ ID NO: 13794 - DNA, 453 bp, Glycine max
gcgaaggtgcaagtcgactttccacatccaccaattacacataaattcaccattcccagttgcccaccttaaactaagcttacgtacttccacgtagcccttatcctcgttcctctcaactccgggtccccatcaatccctcctagctttcacaacatttcaagcggattcaacaatctacacattatgtaactatcacaaaacccaagaagaacagtggccagaggcagaaaaactctgcccaaggcacaaccaataccacaactttgcttactcaaatacctccacaacattctcttcgtttcaattcgttcaccgagggatcgactttagatattttattggaagtccctattgcaatagtatgccttttgaccgatgggatctgcttcaaaatgtcctgaacccaatatggacaaatcttttttcaacccgccatgcctaaggtttttc

SEQ ID NO: 13795 - DNA, 365 bp, Glycine max
cttaagtcgacctgccgcatgcaagcttcgtcggctgatcccttatttaagaacatccgatttagacagccctttaggtttaaactaacttaaactgagtttcatacgccaatccctcatgtaagactaaactcagcttaagtagcttactaaagtttagcctaatttaccctaagctttgcccgcagatccctcctgtaagactaggcctaaactaaacagcattattgttatagcataattaaaaccaaaacttaacccgcagatccctcatgtaaggctaagcttcaatcattcttcaatcaagttctaaggcaacagtacattttccaatgctaaagtcacctaattgtgcacacaaatgg

SEQ ID NO: 13796 - DNA, 296 bp, Glycine max
atttttaatatctaacgcttattatttaggggtttaaaccaaaagatggatatttagatgccgaacatattataatggtggaaagaaaaacttctattttaacatgttccttggctatacagggtggggctcttggcaatctaaagaaaaaccaatgtatccttatagtttttaagtggcctaactccttataaaacaaggataacataatgggtaatttccttattaatgcattgtcaacattgcattttttgttattatacctggctatgaattcttttttattttttttttat

SEQ ID NO: 13797 - DNA, 800 bp, Glycine max
ccccttagacctgtggacccgggagctcaagtcgaccgccggctgccagccttctcttgggtccattccaggccaccttattaccttgtaccaaaacacatgtgaagggtatgctccttcattttacctaagcacatggaaccaatttctaactcaagaaatatctatcttagaacaatgctacccgaagaaagtatatcaattattagtatccatggcctaaacccctcacgcttccctgtttcatttttgtgaactaggtcaagggttacataagcttttggaagtacaaccccaaccaccatgcaggtatcatgatcaatcattggggttttcacactagctatgacccacccgcaagggtcaagtttaaacccaattgtgaaatcttcaattgtctaaattcattattctactattctttttccaccacaataacgttaattagtgagtattgccttggtctcttacatacccattgtatggcaaagtgtttaatttggactttctcttttacaagatgagtgagtctcaatccttatgcgttcatgggcttacgtccctttttcgaacaagatattcaacacaaactcattctcaattttttaccgatagggtttattaagaaaagtattttataacccattccataaccaacccttattcaaaccatttctaattcccttttatgggaatggtttttattcccaataccgggttttagatttaaacccacccaattaattttacaaaaggatgggatggtgggttaatttgaattttaaacccacacccctgcg

SEQ ID NO: 13798 - DNA, 651 bp, Glycine max
attttttggggtgcaggttgtaaaggtcgtgcaggaatggagggatacctatcaagatcgatgttagaaagatagactttaaaatgcggagcaaagcattgctcatatagacatataatgtctgttcggagaacactatccaggacgagttatatctctttggagaaacttgacaccctttggataaagtcaaatccttgtggacgagggacatcttttgattgtttataaacaggctccggttatcgaataccggatggctgtgactaattacacaaagcttctgtgggcaacaatgtgactcttcatttttagatgtgaatatcgacgtgcactgacacctggtatacgaataccacaacactgggatgcattacaacattgtgaagatattggaacgtcgaaatatacgttggagacttctctcaactcaggtggtgctgggaacaaaatcaccaattgggagattatggctaaggttaaactctttgcagacgttagtccaaactctgcgctattcaaggttcgacaacttttgaacctatggtgaatgatctttgttaatggtgaggcagctcctggaaggggaattttttgcaaacataacctgacccgatgtagccttcttttaatctgcattccctgattttg

SEQ ID NO: 13799 - DNA, 837 bp, Glycine max
  unsure (1)..(837): unsure at all n locations
agagatgcagagctcaaatcattcaaactcttttccttacgcataatgtatacagatgattccaactcatacacatagtgatgagacatgtagagccgcggagatctaaagaggcccgctgcaggctaccatgctggagggacacccacatttcctatttcctgcattgttgcgaaccaactgattgttcctacccctattctcaccactcccttcacaactaaataacataaaccaagtgcttcctctactaccaagggttgtgcctaaccttatcatgacacgcttaaatctgtattcatgagccaccgatcgatcccactgcaaaacatcatctcggctgccaaacacatccaacgttgtccacaaaactttacctttataccacgcgttatgttattaaatcagccccatcacgaacattattacctgttaattttgaacgcccccaaacacacaacttgtgggtcattcataccaccgtcttgtccattttgaacatccattggaagtccttcanacattattatggaaatacccccatttggtgtttgttcatcctagcactgaatcctaaatgttcaacatagacttacaaccactaaccggaatatatttataatacaagagcggtattatgctttttatttgtcagtccaaataactgctgaatagtaaaaagcttcaaccctatataatgcctcttccaaatttaaccaattaacgtttaaacctcaaatttttgttaaaatgaacattccccccggggattattaaacaatcctactcaaattatggttccaaataccaaccctttaggcttacggagaactgaac

SEQ ID NO: 13800 - DNA, 405 bp, Glycine max
agcttccttaagaagattcctaaagaagcttgagcttagctacacatacctttctaatagctaagctcacctccttgagatgagaagctagagcttagctacacaccccctataatagctaagctcacccccatgacaaaaaacatgaaaataaaaaaaaaagtccttattacaaagacaactcaaaatgccctgaaatacaaggctaaaaccctatactactagaatggccaaaatacaaggcctatacgaaggaaaaacctattctaatatttacaaagataagcgggctcatacttagcccatgggctcgaaatctaccctaaggctcatgagaaccctagggcctttccttggatctctagcctaatctacttggagtcttctaaccaatgcccttgcggg

SEQ ID NO: 13801 - DNA, 368 bp, Glycine max
agctttgagccaatatcctgactcaccatttaccttgacccaaggtgagaatgtcaatccttaccctcggaagcggaaagaatagaagggaaatttccaatcaaagaaaaggaaagaaggaagatttccaatcaaagagaaagccaaaaaagaaaagaaggaaaattccccaatcaaagagtgggagaaagcaaaaagaaaagaaagaaaattcccaatcaaagaatgggagaaagtaaaaaggaagaagaagaaggaaagaaagctcctgatcagggatcgaaagaaaacagaagaaatgtgcagaaaggtctttggaccggacaatatctgaacaatacagaattgtcaccaaatgaacaaaaaga

SEQ ID NO: 13802 - DNA, 350 bp, Glycine max
agcttgtgacaagttgatatccccaaaccaaaccttttatacacaatcctaagaaggtccccaatggccaatcttcacaaacacacaaccaccctttgcctcacaagaataacattccttaaagtggtgtcttccttcacaattgcagaattcaattcgtcacaaatcatatcaaaagtttctcttcccatcctaaaagcctttctaaactcttcttcaagaaaatcctctttgttgcatccatcccaccatgcccctgaacgatccttcacccacaactcttctctgtgagccctccacaccaaaatttacccctttagcactacccccaccaccctcttccttttttt

SEQ ID NO: 13803 - DNA, 354 bp, Glycine max
agcttataacactcacatattatgttcatttaattgagttaaacctctttgatgaaattaaatgacgttaatcaaatttgttaattaagataattttttttatgatattttggtccggagtactattaattagtgttataaataaactacatacaaaatttctatttgaaaatatgttttataatttttttagtaaaactaaaaataacaaattgttaatttatatatttagttattaaattttttaatattttatttttaaaaataatttacatgttttataaaatttctgtttataaataaaaagtcaattcttatatgacatattttgctcccactcctatgataggggat

SEQ ID NO: 13804 - DNA, 315 bp, Glycine max
cagcttataataaaaaattcttttgaagtgcttttcactgaaaaactattttttcgtaaaaaataagcacaaccaaacatgtcagaaccatgacatataattaaaattataaatatgccttctgatattcagctgcccaagctatttttaaacaagtttatttgatttatcatggcttattaaaggtaacaaaatttgggaagccttctctgctttccctgaggaagctaggctttgattcttttaaagttctgcttataagataattttctatattgtatttaatataataaaaataaatgctagcgtttacag

SEQ ID NO: 13805 - DNA, 340 bp, Glycine max
gggggaagcaaaggttgtctggttgctactttcccttgttcccaagactctaaccccatttttctgaaaaactattctcagcttatccctaatcataattttatatttatgcttaatttcaggcagctaaggtccctgttaaagagtatgcatatgatgaaaagaaggtggcaaacgtacaatctcacctggtactttccttttcctcatgcttaattaaacttttgtttaatatagtaccaactgcgaattatcttacaaaggattatctggataatcacgagaattggtggtcaacaatttctatttgaacagatggcaaagaagctatagatcatac

SEQ ID NO: 13806 - DNA, 307 bp, Glycine max
aatgacccccgtacgaagttaaagaatttctatgattaccctcagttgcctcctcttcgtcttcagcattttcaagttttcattctcttccaaacttatgtcctagcaaatttatcaataattactcaataaaaatattatttgacaaatacaaaaataataattttacttggaaaagacattaaattattgttttacaacaactacaaattttttaattggttcataaatcacaatcatattagatatattacaagaaattgttagtggggctgtgagagaagagataaaaagtatgagagtgtga

SEQ ID NO: 13807 - DNA, 450 bp, Glycine max
  unsure (1)..(450): unsure at all n locations
taaaaagggatgccccacattatttccatgacacaaatgcaaaaatgatgatttggaaactttatgcaaaactggtcatgcatgcacctatgtggacactcaagtgtcaaatttttatggtcatgtgatgctagggctcangattcatttcctctattttagtcaacccaacgtttccaaaatatgttcttttatcaatttgtgcattcatccgagtccattttgggcgtctgggaaaatcttcacagcattcacccttcaggtgtatacacatttttttcaaaactagttatgatcagtgaattttttttcaagaaaaattggaagtcattttttttaaaaacatgttggtttttcagctcgacaacctattttccttttttttccttttttttttttcttatacattgggtaattccttttcctgggttttttttccttttttttttt

SEQ ID NO: 13808 - DNA, 204 bp, Glycine max
aaaattataatgtttacctgagaagtgtcttgaacagaggaagtgcgaccccatctctcagagtcccaaaggatggagctattaaaagcaaaacttgaaatatgaattgggggagtgatagtatcagtttcattgttcatattcctaagatgccaaccaatgacttgtgatgaatcacatacaggtccttcgattttcactttc

SEQ ID NO: 13809 - DNA, 331 bp, Glycine max
atgcctattcaacattcattgaatcatttcatttaatttccgccccttctattctttctttccagaaatgaaacaaatttaagtaatatgcacacacacacacacacctaatcctatttaattccatcaatattgttagcaacaaccactcctactcctcttccaatcttcatagcaacctcataagtcataaccttacgcaacgcaatctctttagacaccaaaaaggcttataatctttcttgatataaactatgatataacaataacaataaaattacattatttgcattaatgaacaaactttactaacttaacaaattaccagact

SEQ ID NO: 13810 - DNA, 355 bp, Glycine max
ttaccaatcgtttaaggcatccaattactggcctataaaaaataacccccttccttgtcctaatcgaatacttgttgtatttatatagcattatggcgggctgggaatctcttcccaacggtttgatgaacctgaatctcccctgcatctgcacactgacaccttgtttataatattgtccatggtgtaaacgggggcaataaatattctcttttgtcactctaaaattcaaattgttaaattcatccccgtttgggtgtcacccaaactttttcttaataacactttatggaaattgctgcttatattctaactccccatcttgcatatttactgttaatttctcccatttctc

SEQ ID NO: 13811 - DNA, 488 bp, Glycine max
  unsure (1)..(488): unsure at all n locations
agcttttaactgaatttgcaacgttccttttgatntttaaatggtgtaatcgattacaatatattggtaatcgattactagtgtatcttaacgttgaaattcaaatttaagtgtgaagagtcacatcttttcataaaaggcattgtgtaatcgattacatgattatggtaatcgattaccagtgacaagttttgaataaaaagtcaagagatgtaactcttgacatgattttctcaaaattataactcttctaatggttttcttgaccagacatgaagagtctataaaagcaagaccttgacttgcattcaaatatcttttgagaacttttgaacttctttgacaacttttgagaaatcttaaacctttcctactcatcattcttcttcttcttctttctttggcacaaaagctttcttaagtttctgtttttcaaaccttgttcttctacagaaaacaaaaggggccaaatcttttcaatctcttct

SEQ ID NO: 13812 - DNA, 462 bp, Glycine max
agctggatagctgtcttttaactctttattcttaaagaaagtcatttggttagactaatcaagggattaatagtttggtcaaaggacttacattctttccatccgagggatcgggatttgagtatttttgtgagttgatgataatagttggactttgaactagaggataacgtttgtttgcataagggtgtgatttactgaaatcaatccaaacacttttgttctttgttgatttgccaatgtttattgcattccaagtgtttgtaaaaattacccgaaaaaatgtttcttgttcttatgctcttgaactttatgtttgtttgatttcttgctatatatattgttacaatcaaaatataattgttgttaccaaaaaggcataattattgagcattgctttttttttcagattacgtgagtacctatggatccgattggcaaactttttggtttatactattt

SEQ ID NO: 13813 - DNA, 418 bp, Glycine max
gctattaagcccaatcaaaaccctgtctgttccaaacccacacacaatcgcggcccacggtttcacaacggcacagcccgatgtaatggcagcgaacccgccaagcaggccgttacacacgtcaatcacgttccagtggccagccaataaccgcttgctgaacaacgtcgtcagagccgcagtgctcccagccaatgtcgtcgtgacagctgtcctccctatagcgctccattgaccataataccctccacttccataccccttggctattgtcagaaacgaaccagggttgaagccgtaccagccgaaccataacaaaaacgaaccaagcccaactaaagacgcgctgtggccacgtaaagcaaccgaccggccgaacggtcgaaccgggcgattctcgggcctttaattaaagccc

SEQ ID NO: 13814 - DNA, 224 bp, Glycine max
ccctgcggcataccacccttgtctcctgtcgttattatttgcccacggggtaaacgtgggctaataaaatgttcatattggcaactttaaaattaatacttgttaaacttaccacggatgggctggactaataatatattttaaataatcctttctgtgaaactgcctagttctttcatgtaaccccaccacattcaagattagggtgaaactgtcccaaattc

SEQ ID NO: 13815 - DNA, 316 bp, Glycine max
agcttcaagaaaaagatggcctcagcaaattccttatttccagaagggaattccatcaatagacctccaatctttaatggagagggttaccactactggaaaacccgaatgcaaatttttattgaggcaatagatctaaatatttgggaagccatagaaatagggccttatatacccaccacagtagaaagagttacaatagatggtagttcatcaagtgaaagcataactatagaaaaacctatagatagatggtctgaagaggatagaaaacgagttcaatacaacttaaaagcccaaaacataataacatctg

SEQ ID NO: 13816 - DNA, 365 bp, Glycine max
agcttctagacatcgttgttttgaaactattctagcttttcttgcattgcattgatctagtattcatcagacatagcattatctatgtgttttggctcaatctgggaaagtaacgttatatgcttgagagagttccttgtctagactttgtcctcaggatcaccaatgatttggtactttggatgatgtttcctcagcaagtatctagttggttctctaacttcttcaagttaatcatctattggtgagttggacgcaagtttgtcttgacttgatgtactagtagacctgacgatatattccattttcatctctacaaaggactcattcagctctgacatttgcggtactaggcttattggcat

SEQ ID NO: 13817 - DNA, 350 bp, Glycine max
ttttccacactttttggggtgggccattcttggaatgccttgaatttctcaaggtccacttggaccccatttctaccaactaccaaaccctagaaaactattttatctacacaaaaggtacacttctctatatttgcatagagggtgtttttcctaaagactgaaagaacatgtccgagatgtcctaagtgatcatctaggctcctactatacactaaaatatcatcaaaataaacaactacaaatctacctatgaaatcccttaagacatgatgcataagcctcataaaggtgcttggtgcattagtgagcccaaaaggcatcactatccattcatacaaaccaaactt

SEQ ID NO: 13818 - DNA, 467 bp, Glycine max
  unsure (1)..(467): unsure at all n locations
cagctttaaccccctatttatctcaagttttaattatgaacctttcatcctacatggggtnaaaaatgtaaaaaaatattttagaaacttagaatagaaattttaaagaattaaaaacatttggttcatttgcaatacgattatgaagaatggaaacattctttagtctttctagtatcctatttgccctcctagtattaaaaaacaatgattacaatgttggtgctttcagatttggcattgtggctttggtgtgttctaccttcgttgaagagcaaataactttccatgcagaacaaaaatggagaagttgccacatactcgagacagaactttatccaagtgatgagttccttcagtgggagatataaattatattgctctaactattttattacactaaaataaattgatgacataagaaccacaccgaagcttatatactattgagctttcttatttgatat

SEQ ID NO: 13819 - DNA, 295 bp, Glycine max
  unsure (1)..(295): unsure at all n locations
aaaaaaatgatnatttgccgttcttgaaaacttcaatacactgtactctatatctttcgatgtgacaacaattctcacttattgttgccgccaaaagagatcaatattttcagccatgcacaatggtatcattggacaagatggaaagtcatgaacttgaagatgctgataacttacattcagcaattgagtccaaagatttttcaactccaaagtccatcatttgccaaacaacaaaatgggttctcctgtgctcatgagaaagacacatgcagcccttcaaaaccccgagaat

SEQ ID NO: 13820 - DNA, 412 bp, Glycine max
tagcttgtagaatggctatacatgaaacatgtctgggtttggctgggttcaacgataaaagggatgccccacattattgcatgacacaaatgcaagaatgatgatatggaaattttatgccaactggtatgcatgcacctatgtggacgctgaagtgtcaaataattatggtcatctctattttaaatcaacccaatgtttccaaaatatgttgttttatcaatacgtgcattcatccgagtccatttagggcgtatgggaaaatctgtcacaacattcacccttcaggtgtatacacatattttcaaaaactatgtaagatcagtgaatgttttcaaagaaaagttggaagtcatctgttttcagaagcatgtgggtctttcagcttgacaactaaacattctttttttct

SEQ ID NO: 13821 - DNA, 360 bp, Glycine max
gagcttaacaaattgtaagtttttaaacaaaatgaaacatttaaggcgacaatataagatgcacactatattttatattactgctttgactaaaataaactgaatgaaacagcaatatgatgtccaactcattatcatgattcatgctgaaaaccttgaagcgggaaataacaattttgttcatggagtaaacataggccaaaccaagccaaattattctaccatacatagaaacacacgtccataatatattatatttcgtcaagttctagagatgtgcattagctagataaaagttgaaaagtatccttagcatatttagatgtacctctactgctgtgtcactaaatttttttatgc

SEQ ID NO: 13822 - DNA, 469 bp, Glycine max
agcttgaagagtaggtggatggacagtttaatcaattaaaagtttttttttttcatttattctgaatcactctcccctctcctaatttgttgtacttagtgacaatggagacaaacataatgtcttgtgaataccaatcccagtttcagcttttttttttttttttttttatttacaagactttctcaagactgtataaaatacaaggaattaagagttgtatttgataccctctggtacgtttgtgtcgtggtgcatatttagcaaaattctttttttctttttaatttttgatttgttttaaaaaagcatttataaattttagaaaactaaaagcagaaaaagaaactctaaaaaccccacgttattataaacctgtttttaaaatggtttttataatttaaatccacagtaaaaaataattaaaaaataatttatttttttaaagtaaaaattatgattttaaaaa

SEQ ID NO: 13823 - DNA, 441 bp, Glycine max
agcttggttcgaggtacttacccgttgaatatcgaataacgatgaagaacgaatgaagaacgtcgaagaacggttgaaatctttgcgaaattcctcacggaaaacgttacggaaacgtttcggaagcgcctcggcttagattttcttaacggaaacaatttttccaagcaaattcgaaagagagagaagtgcctaaggggctgaccccttccttcttgccttcctcccctatttatagcaaaataggggaggtggttgccgcccagctcgcccaggcgagcagggttgcttcctccagaagcaaccgccttctggaggaatattccggagggcccaagtgggcctgggtgctatttgcacccccatttttactaagtacaccccctctgctgttttttggtgattctttttttcgtaagtaccggaacttaccaattttgt

SEQ ID NO: 13824 - DNA, 404 bp, Glycine max
agctttaaaatttgaattaaaacgttcaataactgctggtaatcgattaccatatatgtgtaatcgattacacagtgcaaattttgaattcaaattttaatagctgttgtaaatcagttttggccactggtaatcgattaccaaagagtaaatctgttgaaaaaacctttttaacttagatttcttggccaaaccttttgcgacttcaattggaattcccttcttatttaatatacccttcctaagactttaaagatggtctggatcattcatcttgaatatctttgtcttgaataaatctttgagaagcatatgattcatgtaatcctttggcatcatcaaaacaattcaatttgatcctttgtctacatgaagttttggcttcaaaatttaaattcaaattc

SEQ ID NO: 13825 - DNA, 84 bp, Glycine max
atacatgagagatgtatgtgttggtctgggttcaacgaaaacatggatacgcctcatttgttgcaggagacatgtgcatgaatg

SEQ ID NO: 13826 - DNA, 532 bp, Glycine max
agcttttaagtggcagactctttcctagatctaatctttcaaggagaggggtgaacattcatgatactgcttgtcctttatgtggtgatgtgcaagaggaggtggggcatctatttttcaatagcaagaagatactatggctttggtgggagtccatgagctggattcaggctatgggacctctatcagtctctccagtggaccattttcttcagttttgtgatggttttggagctgagagaaatcatactacttgctgtggatggtgggttgcgttgacaagtactatatggaagcataggaacttcctcatattccagaacaaaactttctagccgcaaaacgtcatggaaaatgttatgttcctaatatggtctcggttaaaggctcgacaaaaaggttacaacatcagtttgaaccattggtcttccaacatctcggtatcctttggttaaacctgaatgggataacctttttagccggggtagctggggctttttggaaggcaacaccaacggtgcccttgtttttc

SEQ ID NO: 13827 - DNA, 238 bp, Glycine max
aactttgagggtgcgcaccccaccatctttttatagtggagtaccgataatgtgtctaccatcacgattatcgtctccctttccattattagggggaccacctgggccgccagatccctccaccttttgggcatgttctttgaaagaaccgtccccctttttgcacatgttactgaagttgcatgctattccggaaccatatccaaactgtactgattctgcctaacaaaggcaacca

SEQ ID NO: 13828 - DNA, 281 bp, Glycine max
tgcagcttattggattaagatgatcaaaaaaatttactgggacccaattggaaaaggtccaaaatttacccaaaccagaagcctatttaaccctaatgaaatacctttattgcaaaaaaaatatattttttaaataaaaaaattaagaatatggttagatgaatgtaacaaggggttacaccacctttccacccccctgaatataggaattttttaaaaaatttttatgccattttaatttataaataaaaatttatcggtttatatttttaaaaataaaa

SEQ ID NO: 13829 - DNA, 577 bp, Glycine max
  unsure (1)..(577): unsure at all n locations
actactcacatntcntccccgcttcgaactatcctcntctaattgtacatattacaacacaactgaacctcnnnacacagggaccacaccaggggtttgagtccttcgtaagtacccgcggacgctctctataaagaccagcgcgcatgcatgccagctcaaacggcaggggcataccttgtttcttagcggaacaaatctatctaccgagaaatgccccatttacaatgaaggcacgcattgtaactaaactatttacacgtacttcccaggtgtatttgttacttacatcacacacatctccttggctaaatacacatacatgcatactccaagcattttgggggaccaaaaattgcacaagcgcatatcttggtatttctaatacctatacatacacaaacctcatgatgaatcttgactatctacacaataaggtgctacatttcatgccctttatcaaagttttgcaacctaagccccatgccaattcaaacatatttttccttggtgaataaaagttgattcaaaatatatatatatctttgggatatgtgacttttatacaaaataaacg

SEQ ID NO: 13830 - DNA, 327 bp, Glycine max
caacaacagaataattatgacatttcaagccatagataccatccacgctgaaggaatcatccgaatctgagatggacaagtcctccacaacaacaacagcctatccctccttttcagaatgctgctgatccaagcaagccatatgtttcttctccaatgcagctacagcaacagcagttacaacaaagacaacaagtaactgacgctcctcctcaaccttccttataagagttatgggagcaaatgaccatccagaatatgcacattcaacaagagacaagagctttcattcagagtctgacaattagatggtgcagatagctactc

SEQ ID NO: 13831 - DNA, 480 bp, Glycine max
  unsure (1)..(480): unsure at all n locations
agacntttgacntgttgaacngcgcggatcctaagagtcggcctgctgcatgcaagctcataaatgagtggtctcacaatcctttgatttgttgatgacatcgtattatccgaagagaagtgccgatatattcactctgtgaacacgaggcgaaaaggaagagcttattctatcatgcagacgtttgaccacattagccattgatctgtgattcattaaatatagattcctggatgtttcggatgcgtgttgcatgataagacatggtgctcaatatggtgtatcagctatattgttctctgggttcatgtgcttgactgggtatcattcaaaggaaaggtgaatgatctcatgctcttttttaagcttgaggattctgaaacccgcatctgtgacatctgacaattcctcaaatgatctagattgtgggataggttgttataaacacttggagattcgtaggggataaccaatttatcg

SEQ ID NO: 13832 - DNA, 519 bp, Glycine max
  unsure (1)..(519): unsure at all n locations
cggangttgcttcgtgaacgncgacgcactatagaacactcccgctcaggtggtgatcatgtaacccatccgtatatatctgtttctttaggtgtagatatgagaatgtatgaatgccagatctcatatatatcacaatatagaattgcgacgctacgactacataatatcgtactcttctacatatactcaatatcggtccagatatgggatcctttcatgtcgacagctactataaagttcctcccgtgagttatatgcgctatcagacatacaaagacatcgtatttgagagagcgactgcacatctctatatatagatatatgcgtggcgaagaacgtgttgaaaatgcggttgggtggactaacgagaatattcattactagattgtcacaatacattgggctcattgcctcttctatgaacccggctacgcgcctgattttgatttaatactattgctgtgtgatccttgaacaaacctggggtgcattaccttgagtatgtatactgccccg

SEQ ID NO: 13833 - DNA, 375 bp, Glycine max
agcttccaagaatcaagattcaaggtactttcttccaagaatcaagatcaagattcaagattcaagaatcaagagaagacttaatcaagataagtatgaaaaagttttttcaaaaactgagtagcacatggatttttctcaaaatctatttaccaaagattttttactctctagtaatagattaccagattattgtaatcgattaccagtagaaaaaatggttttcaaaaagctttcaactgaatttacaacgctccaattgatttcaaaatgttgtaatcgattacaatgttctggtaatcgattacctgtgtgcttgaacgttgaaattcaaattcaaatgtgaagagtcacattctttcaacaaaaagcttt

SEQ ID NO: 13834 - DNA, 395 bp, Glycine max
  unsure (1)..(395): unsure at all n locations
acctatgatcatctgaatctttacactatcagcttagatacaaatccatattaggtcccaccacccaaaagtgccatagacatganagcatttcaaagggacaatgacaaagaataacacagtaaaatcaaattatttgtaacataaacctgngggagaattggtttcacaaatctttcccagtttttatgtttatcaagtacacatattgataggctcatgaaggccatgacagaaaaataaaggaaaataagccaaagtagttagagtagatatagaagtagttaggtttggtttaatattagttagttactgaattagtttggtggctagcttaaatagcagaagggaagtataagatcactcattctgcattgttacttagtgtacttacc

SEQ ID NO: 13835 - DNA, 388 bp, Glycine max
agcttctctttacctataagacaatatcattgtattgtgaacaatgactaacacgtacagaggaacatgagtcatgactcaagaaacaagaaaagcatttgttaagaaatacactaaacaaaagagagtccatcctttgtgatatacaaagcacttgcaagagattacaacttcattgtaaactcactctttgagtgtagtaaagaatatatgattctacatgaaacttttgtttgtgaaagctatgagtggcttactgacaaaataatacttgagtgttcttagattcagggggagtctaaggattgtgacagtagtggccttgataatacttatgagccataagtggcagaaaagaatacttggttgaatcaaattttattagtgg

SEQ ID NO: 13836 - DNA, 465 bp, Glycine max
  unsure (1)..(465): unsure at all n locations
tacgtgacactatgaaactcagctntaccgatcgttaagctgttatctcgcctaataagtgataatatgaatttcaaccgatcatttgcgttgtaatctcatttaatcactgttaaaacaaaatctaactgatcgttcacactgtaaccacgattaaaccaaaaaaaggcgaaataataataaaataatgaaaatatcttgaaaaaataataataaaataataaaaatatctttgaataaaataatcaaacaaatcaatcggacgtttntcattggaagtttccttgaatgaattgactaataaccaaagtgaaattaaagctaaaatcaactcacaaatcaagctttgtccgtaaaaaatcactaataaccatcttaaggtccaacgccttaaaacggtcctctttgctcttatcgcgtaacatggaccgttcaaaacataaaatcaacatgtaactttaccac

SEQ ID NO: 13837 - DNA, 270 bp, Glycine max
  unsure (1)..(270): unsure at all n locations
agctngtaatatgtctagtcaactatatgttctgtttctggtggcctgtggaagatgattgggttttttactgcattgtataatgaatgatcgaggccgtacccgaatcaaataaacattaaaaatacagtatttaggaagtgatcctaggtcgtctcccaacgagcaatggtcaaccaaatgttcataacagatagtaataaaacagtaacgaattggggggggggggtttatttattttttctaaaaggatttattgctacattttat

SEQ ID NO: 13838 - DNA, 259 bp, Glycine max
  unsure (1)..(259): unsure at all n locations
acacctaggagatcatgcatctgtatatatgttaagtaatctgatattntttcttcatgtgatagtgtggctgttgttttatgttaaaaactaatataaatcatggattttcatgaaatcttatcatttaattgcaaatattatatatatatatatatatatatatatatatatatatatatatatatatattattggcattaacacatttttaattaaattaacgtatatattattacatatgtttgcatgaaaaatg

SEQ ID NO: 13839 - DNA, 400 bp, Glycine max
agcttatgcgcatgtttccttacgaacgttcacttgcggaagacatcctattaaccgaaaaaatgcacccatatacaatcaaggcagctttgttacctagattatttacacgtacttccaaggtgtatttgttacttacatcacacacatctccttggctaaattcacatacatgcatactccaagcattttggggtaccaaaaattgcacatgtgcatatcttggtatttctaatacctatacatacacaaacttcatgatgaatcttgactatctacacaataaggtgctacatttcatgccctttttcaagtttttgctacctaaagccgcatgcaaattcaagcatattttcctttgctgactaaaattgtattcaaattatatatataatttttg

SEQ ID NO: 13840 - DNA, 451 bp, Glycine max
ctcagctatgttgcaacattataatagactccctcagcagcataaccaacaacaacagaataattatgacatttcaagcaatagatacaatccaggttgaaggaatcatccgaatctgagatggacaagtcctccacaacaacaacagcctatccctccttttcagaatgctgctgatccaagcaagccatatgttcctcctccaatgcagcaacagcaacagcagtcacaacaaagacaacaagtaactgaggctcctcctcaaccttccttaaaagagttagtgaggcaaatgaccatccagaatatgcaatttcagcaagagacaagagcttccattcagagtctgacaaattagatggggcagatagctactcagatgaaccaagctccgtcccagaattctgatagattaccttctcaatctatccagaatcccaaaaatgtgagt

SEQ ID NO: 13841 - DNA, 420 bp, Glycine max
agcttattaaattattaatcgtgattattgtatctattttttaaagaaaaatatttttaagataataaaagattttttactaaatgattctaaagtgaaatataaaattcatttttaattatgagttctttttagttaaacaaacaattttataatttttaatttaatagaaaattgttcaatatttaatacaaattacaatattaattttgataaacatatctattttaattataataaggttataattcataacataatagaataattttttataaaaatatttttggttcaataattagtttgcaagtaattttgataataataagaaataagaattgaaaaaataaaattttgagaaaaaatgaaaattgaaaaaagttaaagatttaaaaatgtggtagtaaataaaataaataa

SEQ ID NO: 13842 - DNA, 431 bp, Glycine max
gatggtgtcgagaagaaataacatgtttgtcatcatttaaaagggggagaatgtgaatgtatgtatacatgattttgatgatgtcaaagaagaatctaacaaggctacttcaaatgataagcatttgcttcaagaataattcaagattgcttcaacaaacaaatccttgtttcaagattcactaaagaccaagccttgccttataacaaagtgctttcaagacatgcaaggctctggtaatcgattaccacgaagtgtaatcgattacccgaagacagggttgagaaatagctgttgaaaaaggttttgaatttgaattttcaacatgtaatcgattaccatatgtctgtaatcgattaccagcaacgaaactttggagattcaaattcaaaagtcataacccttcagattataactgtgtgatcgataca

SEQ ID NO: 13843 - DNA, 300 bp, Glycine max
agcttagattattataattggtggatttttattacttatttaattatcatacgggtgtgctatgtttgatagagataaaagaaaggaaaatatttgcccaagtataaggaggttgacaatgaagaataaatatgagatcttgagcgtgaggggtgtttggaaaaaatcgttggtcattgagaaatttgtgattcaattcatggatccaagaatgagaggtgtgagtgctaatgattgctttcattgcgctgctttagtaactgagccgtcgtgtatgaacactaagtacagggatggtat

SEQ ID NO: 13844 - DNA, 326 bp, Glycine max
  unsure (1)..(326): unsure at all n locations
tcgctggttatcttcattctgttactaaggttatattcttcttctactntcttgatgaagcacactggtacacaaaattaatgattccgtccaatacaatgacattctatttctacatctctgttaaagttctataatatatggtcacttttttcactctattgtctttgtgaatactttattttacttaattagagcaatatgtcaatgaggaataactaatcttaatttgaatcgctaatacagctataacggcatctgtgaatatacttctcctcttgatattatggatgctattgaagcacactacactagtttgctgacat

SEQ ID NO: 13845 - DNA, 424 bp, Glycine max
  unsure (1)..(424): unsure at all n locations
agcttntagtgaaaggatgtgactcttcacatttgaatttgaatttcaacgttcaaaggcattggtaatcgattaccaaaacattgtaatcgattacagcttttttgaaatcaattggaacgttgtaaattcatttgaaagctttttcaaatccattttgctactggtaatcgattacaacaatctggtaatcaattatcagagagtataaactctttggtaaacatgttttgagaaaaatccatgtgctactcagcttttgaaaaaaccttttaatacttatcttgattaattcttctcttgattcttgaatcttgagtcttgaatcttgttcttgattattcatgttcttgattcttgaaaacttgaaacttgaaacttctcttgaatctttctcttgattcttgaattctttggcatcatc

SEQ ID NO: 13846 - DNA, 467 bp, Glycine max
  unsure (1)..(467): unsure at all n locations
tcacgtgctntagccacgatgcattcttgatgattntcttgatggcgggaacgagtacctgcttcagatgggaatggcttctgggcaccgcaccttccatatgggttccatgagtgcacctctctattgctcttcattctggttgcagtcgccgatgccgtttcaggtttctacaagacaaagattttgcttaagtcatgtgatctctaatcacattttttatttaacaattaataaaattaattntttttacaacattcaaaaactgtcacaaacttataattaaatacaatatttatcaaatgttggcataacttatgttaaagcctttntgtaatatttttaaattttaataacatgaactatatataacatttaataaaatatcacaaaaataaattaatcatatctatctataattngataatatctttntaatgtgatcaaagattttaacaatatgttta

SEQ ID NO: 13847 - DNA, 434 bp, Glycine max
  unsure (1)..(434): unsure at all n locations
agctntactggtgctgatgtctacctagtatatagagaacttactctaggagatgaagatcaagaagatctttttgatttcgatgcgggtccccttaaactgaccaacgatctcttgtttgaactgatacggtctatatgtaagatatatgtacatgaaagatgtatacgtgaatgtgcgtgttacactattcccttatgctttatgctgactttggaagtttcacttcaactacttccttctaaaggaatatatggacaagaatatttgagcgttatagagacgagggaaccctttgacattaatgtgatgcatttattattatcaaatttatgtatttttcatttgctaaagcatcagtcataaataaaaatgagatctatgctcattttcctattggttaatatttatgaaaactttcttccatgttcaat

SEQ ID NO: 13848 - DNA, 362 bp, Glycine max
  unsure (1)..(362): unsure at all n locations
tgtgcctcttcacgtctagaatatgaatgtagcatatattattctaagacccttaggtgctttgctgatggcttcttcctgttccaagcttcaattggagtcttgtcttttacagacttatttggacatctgttgagtatgtaaacagcagtgtagactgcttcagcccagaatgtgttaagtagtcccttttccttgagcatcgatctagccatctccataactgtgtgattctttctctcgggcactccattntgttgaggagaatatgcaattgtaagttgtctctcaatgccttcattctcacaaaatctttcatactcgcgagaggtgtactctttgccgcgatcacttcgtactac

SEQ ID NO: 13849 - DNA, 316 bp, Glycine max
agcttcttatccaaggcatattcttgttgtttaagctccttcttccttggcttataccctagtggatggtgcctaccctctcctattatactatgccttccgccgcatctccatggtgtaaaatcaccattgaaggacctcattgaagctcaaagatccagcctccatggaagctccacaagcaagcttccatcaagtggtaatcaaagcacaagagcttcaagtaggtgctccttaaacctccattaatatgtttgctataccttttcttgcattgatcgttcttcatatttctccatgtatctcctcacatgtc

SEQ ID NO: 13850 - DNA, 359 bp, Glycine max
  unsure (1)..(359): unsure at all n locations
cgctttanacaacaaacaaaacagaatcttactccattaagtgaggttggctacatcgatcacatgatgtcattcaacacggttaaaaatcaaagctctgggtatatcatttagcttgagatctcctctaacatcaacccataatgtcttttcttagtctcactctcctcatttgtacaggactaagaatcatgaaatctattcttctgagttacatctctcgtattcatcaaaaagaagaaaaaagacttgcaccacttgcggccttgtttgtacatgtttaaactacgggtgtgcacaaaaattgggtcagacctaatcagactataactaacccgacccaacctagtttcgtactc

SEQ ID NO: 13851 - DNA, 315 bp, Glycine max
agctagtgatggtcgctgttctctgtgttatgttgagactgacctgtacataatcgatagatcacaatcacaataatggctgcatacaacaactttgcagtgatctatctaatggatacagcatcatccaaagggagtatcaaacgcattatgattatgctagtcatacaactcaaacatgttggcgaactgcgtatatgataatgctctctgtaaacatgtgattactatactccatagtgctatcgacacctgataaaacttttaaatgactaactagaggggggcatatcatgagacttgaatacatcgatc

SEQ ID NO: 13852 - DNA, 284 bp, Glycine max
tgtttatgttattaggtgtcagaggcagcctaacaactttgcttacaattgcttcaccagcacaattctatatgaaaaactcacactacactacttattacaattgtttgtagcaccttccacaagtggtttaatggttattgcttgtttgtctttatgagaccacatgccttttcatttcatcaattatgaaacttaatattgtgttgttccatgcaagtggatcagcaaacgtgaagatgtgtatcttgtcattaaagcatttgcacgtagtggggagtgca

SEQ ID NO: 13853 - DNA, 253 bp, Glycine max
gatccgggctcactggaagcgttccagagcaagactatcttaatgtgacatggaagccatagagccttatggttgtaatcctaacattgcatgcttgggtttcaaagaaagttttcctaaatgtttctaaatccttgagattgattctctgggatcgtttgccaaattctgcgtcaattatcttgataatttcgttttcaaaattctaccgatttacaacattcaatggtttaaacgggtgatggacaaatcg

SEQ ID NO: 13854 - DNA, 187 bp, Glycine max
caaagacatagaagtcgatgagaagaagacattgtcatgttcgaccgcgtaaatgaaagcctagaagactttcaaagcacgaaaggagtgaagacagtgccacctcatatacgtagatgaaggtatagtcgccatttgaaagcagtgaagtgactgaacacattgttgtagttgaaaagtgaatgaa

SEQ ID NO: 13855 - DNA, 341 bp, Glycine max
gtcagctgggaaatggcaccgttttacagctaggcctgatggacaaaatgaggcttctgaaccacatggtgactccgatcacacagaaacctgagaatcgtacgtgatgatctcctgttcttacagaggacatgttatgctttctgtggagctctgcctgaccataagtcactttccagtcaatgaacaagtgattcccctgctacctaacttgcgaacccaagattttgatgggatgcttacaactcaattgttgagaaactcacaaactcttcatccgcccgtcatacccataggatacctaccttggtctttagacatcactttgtgattttgaaact

SEQ ID NO: 13856 - DNA, 361 bp, Glycine max
  unsure (1)..(361): unsure at all n locations
agctntgaacaacaatcattgaagctgtttgttgttctgtgtttgtttaggagtcttttgaaatttgcttgataacaaagtcaagtatggctgtatcaagtactttgcaatgttctatctaatggagacagcaacaaccaaagtgagtagtttccgtatcaaatagaagcttgccatcagactttaaaattttggggaactgtgtatatgaaaatgctcgctgtaaatatatgaatactatactcaataataagaaggaaacctcataaagcttttaaatgacttaatagtggggggtaaaaaaaaagaaaagaaaagatcgatagataaaatacattatcacattcataataagaactaa

SEQ ID NO: 13857 - DNA, 429 bp, Glycine max
  unsure (1)..(429): unsure at all n locations
actaagcttatacagtcttctgtagaagcaaacggataacaaaatgttatcacaaaattctatatgaagggttcgaattgttcacacctcttgaataggcgagagacaatcattgttcttctcaatgacaagtaattggcataaaaaatatttaaggaggaaacaagcaaaaatatgtttacaatcaaaaggggtagaaccagctcaccaaacaaaaggaattctttcatgtcaataaatatacacaggttgtgggggccagcaaaatatgataacatcatgatgccatataaactttgtttattccaaacttacatggagagcatgaatcaaagcattgnggaacaacaaacctctggaggtaaatggattcttgagcttttccatgagcaaccttcatatgcatgttgtgcagttgccctttagcac

SEQ ID NO: 13858 - DNA, 319 bp, Glycine max
agcttcattgcctaacaagccaacttatttctttgagccccaagagactcagcataaggatgcacaggtcaaagttgagtatgtgaaaagattgtatgaccaagtgaaggtgcaaattgcaaagaagaatgaaagttatactaagcaagccaacaagaaaaggaaggaagtggtacttgaacctggtgatgatcctggacatttgagggcaaatgttttccaagaaggagggaatgatgatcttgatattggccaaattcaagctaaaggcctaagtggaaaagggcgaacgttctagtggagatagataacgccccct

SEQ ID NO: 13859 - DNA, 372 bp, Glycine max
  unsure (1)..(372): unsure at all n locations
tctagaaggagatcaacttgatgttctatgcttcttgattgtggcagtccatgaggaatctccttgngaaagacatctttaaattcctgcaataagggttgaacactatgagaaacataaatagttaactgattagaattatcactctctctcttgtgtatcactcttttcctcgggtgtatcactcgtctttttcatattcctttgtggggcctcactattttctttctcttgttctctcttttctctcattctgatttggtcatcacacacttctctangggatagaggtttaagagtaaatgaggaagatntggctattcgtctgtagggctcttctttgttacggttcaacaaacgttgcatttgtgt

SEQ ID NO: 13860 - DNA, 307 bp, Glycine max
agcttcagcagcctagattacgccagtttaatttatttttttctaaatattttagcagccatatatattgccgctagccgaaaggtatttttggtgttgtgatcattgagtctgcaaatttgggtatcatcgtactcttttaacatgcataaaatatttttttaaaaatgcaatattaattttaaaggaggtgattttgttcaagacagtgaatatcactgtatacaaaactctctctaactcttcaccacaatccaagtcacatactcacatacgatggcttcttcatatattgttatccctatcc

SEQ ID NO: 13861 - DNA, 359 bp, Glycine max
  unsure (1)..(359): unsure at all n locations
gtgatttaaataaaactaanaaaaaggagaacaatcaccccatgattgcaccacatctctttgtctttgtcgctcacgagctgaagaagaagaacccatgttctatttcaatccttcacaggaattgaagaatccatgttggcatctctaacaaaatcaattcaatttgaaaagttaaatcgtattgcgagaggcgatcttgcactagccaaatattaatttgaagtacctagtttgtggcaagtaatatggaagtggccacacctaaattgagcccattaaaagagaagcacatgttgagaaatgtagtcaatatgagacatataagcgaatatcagattataaatattaacatttag

SEQ ID NO: 13862 - DNA, 364 bp, Glycine max
  unsure (1)..(364): unsure at all n locations
agcttcatgatgatgaatcaagtattattcaagtagttttgatgatgacaaaaagcccaaaagaacgatgtcaagattgagtcaacaagttcaagatcaagattaatttcaagattaaagaaaaggcatcaagaagaatcaagattcaagagaaggtgaaatcaagattcaagagaagaaaccaagaagcaacaagtcaagacttcacaagggaagtattgaaaaagatttttcaaaaaccaaacatagcacagttttgttttacaagaagagttttctcaaatttttctaagttacctgagtatttactctctggtaatcgattanccagtttttgcaatcaattaccaatgatagaatttga

SEQ ID NO: 13863 - DNA, 439 bp, Glycine max
  unsure (1)..(439): unsure at all n locations
cgtgacatttgtcagcatcagaagtatagtgctacctcttctggaggattgctgcaacctcttcctattccggaacaggtctgggaggatgtatcagttgattttatcacagggttgccttgttcgagaggctatgaagctattctggttgttgtggacaggctgaccaaatatagccattttgttccattgaaacacccttatactgccaagggaattgttgagattttcgtaagggaagtagtgaggctacatggagttccaaaatctctcgtgagtgatagagatcctttatttatgagtttgttttggaaggaattttttaagttacaggggacaatgctcaagatgagtacaacttaccttccgcanacggatggacagaccanagtcacaaataggtgtcttgaaacctatatgcgttgtntcattactgacc

SEQ ID NO: 13864 - DNA, 402 bp, Glycine max
  unsure (1)..(402): unsure at all n locations
agcttgcattntgctattgaagaaaaaatatttaaatatgcaatgataaaataatgataataaactcagcaaaatcatgttcggctgcaaaaagtaaaaacaaaaagaagttcaatccacatgtgttgaagtaaaggaactacatcagattcatagaatatgttcagaaattcaagtgttgtttgtgttatttctgcacacaggtataaagcaacaaagagttgttaaattccatgcttcaatatttgattaaatacaaaatagtatacaaccagtagagtttatgtttgaactactctcacaatacgatttcaaagaaatggaatgagagaaaaacaaaacatagaacaaaatacaaccttccaatgaaaggaaatgaagaaagtgagagaacaaaggagt

SEQ ID NO: 13865 - DNA, 210 bp, Glycine max
  unsure (1)..(210): unsure at all n locations
ttttttatcatatttctagtttgcttgcagttaatcttagttgngcgnccatatgaaaaagnttagagacattgaacaatattaagcttatgttctcaatgatcaagtcaataatatcaaggagggagcctctatgctttcttcatgaaatgacaactcattctgtaagtacaatggtcttcctaaaggcatggcacagaataatcacat

SEQ ID NO: 13866 - DNA, 430 bp, Glycine max
  unsure (1)..(430): unsure at all n locations
agctttaccatatatctctcagcatcacttaaaactgatctctgaagttatctatagccattaaataaagttatgactttctaacttttgtttgggcgatctactgcagatacattctctctggaccgggagtattttccccctctaccatgctgtcctcccctcaaataaatgaaagagaatgcgttacttacatttatcaataatcaatattctagtttcagttctagcccctacccaacagccccaaaataaataaataaatatgagatagaatcttcaattcattttttggtgaattttactcccaattntttcttcactttttgggaattttatccctatttntttactctttggcagaattcagtcccaacccccaactgttatgcttatgtcagcaagccatatatcagctcaacaactgagg

SEQ ID NO: 13867 - DNA, 473 bp, Glycine max
  unsure (1)..(473): unsure at all n locations
tcagaccaaagcaactcanaatctaggtatctaanatctctcaatttagtggatnttcaaggtttgagaagtgaaaatgagatggggtaattttggagcaaactctcatctcacacaagtctataacattaatctaaactcgctcaaactggttttacgacgaanactctaccgaattaaaatttgactcctcaacacccaatttaccctagaaatggctcttgccctcactttggtcattcattttcctcctttgcacagcccaagcttttcccacaatcctaaatgacatttcaaactaggattaactcacttcaacctccaattaccactacatccagaatttgcttttcaaacccttaaagcgtcacactnttccactcatatcactacattctcactntntagccctagggtaactctacccttcatctctatcagttntccataagccatntcagcatacaagcatc

SEQ ID NO: 13868 - DNA, 404 bp, Glycine max
agcttcttatccaaggctcatcttgttggtgaagctccttcttccatggcttattccctagtggatggcgcctcctcaaacctcttatcctttgacttccgctgcgtctccatggtggaaaatcaccattaaaggacctcattgaagctcaaagatccatcctccatagaagccccacaagcaagctaccatcacaattgatgaacgtgaattgttcaggcttgatacagttgtgggagaacgaaacgtcaaaattctcctggcgtcttcgttcttatcctcctgcaactgtgcatacgttactgcctgagccaaggacccaagttggagaacctgaacctcttgtcgaattgccggcttcagccttgatatgaagcagctcaacgcgaatggcgctggtaatc

SEQ ID NO: 13869 - DNA, 397 bp, Glycine max
  unsure (1)..(397): unsure at all n locations
accttgacttggtagaacctcttgtcggtttgatttgttcccatgcttgctaaagtgagacaaaagctggtgcaaatcaaaactctgatatctcatgggtcgaatggatgaatgcatgaaggaatgcatataacacagatgcaatctaggaatgcgggagtccggtgaattcgtccccttcttagacacaacgtctaggggtagcaaagtgccccaacgtacgttnttaagaaggcaacacggaccctccgttggtttgtttacacaagggatcaagacagaacccatatgcgatgcctatgcaaaagacacaatgcgagaatgtacacaatatgacaatattcactgaacataagcaaanaggtatatgatacttatgcatggcagtgtgaaaaat

SEQ ID NO: 13870 - DNA, 94 bp, Glycine max
agctttaagctgttcaattgcttcttagttttgcacataagggcaaacgtccgtgcggtggacatgcgacattcgtattccacagtatctgact

SEQ ID NO: 13871 - DNA, 211 bp, Glycine max
ctataccttggatcgcatgtgggcatcacccacattcttgttcttgatagattcagacttataacatcgctacctgacaggcattattgcctccaacaaccctcatggtgtgaaaggaagcagcgtatacaagatttgagaaaaccactacagcttctaattactttgccttaaggggacggctactacatgccagcagtccaagcataat

SEQ ID NO: 13872 - DNA, 580 bp, Glycine max
  unsure (1)..(580): unsure at all n locations
tcatacctcctctcncnntccagtccgcntacttccncnccntcttattactatctatcctactcacannaccagaccannccaccagcgtttgagacgctgtagaccctgcgaccacnataganagcccagctgcangcatgcaagctcgcattttgctatagaagaatactattcntaactcgcacacgatcaagaaacgataataaactcaccagaatcctgctcggctgcaaaaagtaaaaacacaaagaagttccatccacacgtgtcgaagtaaaggaactacatcagactcagagaatacgcccagaaatacaagtgatgtatgtggcattccggcacacaaggataaagcaacaaccagtcggtaaattccacgctccaacatttgactaaatactaaacacggtacaaccacgccagcctatgtgtgaaccactctcacaaaacgatcccacagaaatggaatgagagaataacaaaacatagaacaaacctcaccatccccacgaaaggaaatgaagaaagcgagagaacacacgagtgaggaacgacgaccaccctccagaggtggagc

SEQ ID NO: 13873 - DNA, 364 bp, Glycine max
  unsure (1)..(364): unsure at all n locations
agatactaagctttacctttcattntaacccttagaactttctggccaatattgtcatagataaagcaatgttgatgttcaaaggacactttaaatccctttttaatcaactgacctacacttagcaagttttggtcaatgttaggtacataaagaacatctgatattaatttggtacctgaacacgttgaaattgcaacagttccttttccttttactggaatatagccaccattcccaattctgacctttgagacattagttggcttcaaatccttgaataaagtcttatcatatgtcaggtggttcgtacaaccactatcaatcaaccaacttccacttgattcactactcaagaagcatg

SEQ ID NO: 13874 - DNA, 358 bp, Glycine max
agcttgtagaatggctagacatgatacatgttagggcttggtttggttcaagggtaaaagggatgccccacattatttccatgacacaaatgcaaaaatgatgatttggaaactttatgcaaaactggtcatgcatgcatctatgcggacactcaaatgtcaaatttttatggtcatgtgatgctagggttcaggattcatttcctctattttaatcaacccaatgtttccaaaatatgttcttttatcaatttgtgcattcatccgagtccatttcgggcgtctgggaaaatcttcacagcattcacccttcaggtgtatacacactcttttcaaaaactacgtatgaacagtgaat

SEQ ID NO: 13875 - DNA, 391 bp, Glycine max
tcctctgagtcacctgccgcatgcaagcttcatccgcaaattcctctcgttggtcttttctcggccgggactgcattgagacaaacatacaataactaggttatcataccctgattgctcgtgatagtacaacaactagccctatcctatcaagttctaagaatcagacaagtttccactgttgaatgaccctaacaaagcatgcatctacgtggtcaaggtaaaagcatggtagaatgaagtgcagatagcacaatgaacacacaaaacatcattaaataaatatacaggtatctacatcaagtacctagaaggaagatccaacagaggatttagcttttcataactgggaagcatcctttacaacatagagatgagctagatgaaagat

SEQ ID NO: 13876 - DNA, 424 bp, Glycine max
  unsure (1)..(424): unsure at all n locations
ctagattccaacttcttagtttcttgtgacattatanaatcgatataagaacgctctagctcgcttactatggattagtgctactaataatcatgaccatctgtcacaatgaaatattatgttaatgtgatttgctacatcttacttcatgccacatgcttatccaagactatattacgatgttgataatccataatatactaaaagaacaaaagtcagctatcttaccttatattgatcatgacactatgtaacacctaatacaattaatgaaatactacgtgtgtcattatcaataaggaatatgttcatctaaagattatcactataaatatgacatcatngtatacatcacatcaattattcagtaatgtaaggatcgaagttatatgtcttatacataagtatttcgaaatcatactat

SEQ ID NO: 13877 - DNA, 404 bp, Glycine max
agcttgatgggtcacacgcataaggttttgttttgaaatactgaaaaatggttaggacgatatatcataggactagaaagagtccataccatatttcaatgattcacatagtcattaagtttcagataaatgatgaatggctttgtatataggactaatgtcataaaaagaaattgactgatatttatatatccccccaaaaaatgggcaagagacattattctgcaagaaagattaattctacgcagtacacagaaattagggtctgttttgtcttaaaaacattttctacttttgttttctgttttcataaataattaaaaaacgtcaccttattttcactatgttttctggattcaaagatttctcaagacacaatgtaaacaacaaaatcctttgtttta

SEQ ID NO: 13878 - DNA, 437 bp, Glycine max
  unsure (1)..(437): unsure at all n locations
tctattgttgaaaggtacattgcagaagacaccattgaattttgttcagagtacattgaaaaagctaaacctgttgggcttcccgagtctcggcatgacgaaagagtaagaggtaagggttcaagaggactgcatgtcatcactccaagtgtagaagatttgcaacaaggtcacttatatgtgttgaataatagtaatgaagttnttccatacatagttcgtcatgaaaatttagtcaaacaaagtaatccaaaaatgtcgaagaactcagtgttgaaaaaacataacaaaactttcctagattggtttaaacacacaatcttggctgatgataatgcttctaaaatgttgagaaagctagcagatgggcctaaaagaaatgttataactcggcaaggatatgatataaacaagtattccttctatacaaaagcaca

SEQ ID NO: 13879 - DNA, 481 bp, Glycine max
  unsure (1)..(481): unsure at all n locations
ntgtgcatcttagacctcgatcctctgagtcacctgcggcatgcatgctngcattccacagaggagctcaccctctttagtaattttctgcaacaaaatccacgaataaaaggacccgtatgctctagaagatcgtcttccttacctagattatgaaccatgtcctaacttggatctataaaggtctctgctcgaacacatgtggcttgctgaaattgcctacatactttctctaaggatttaggcgtacctgaaattgctcatggtaccgtactgagattcataatacttacacatgctcaaacttcattaagaatcatgttgatccatacaatgatgggctacttatcgtgcccgtttcaatgatcttcatccgtaaacacctggcgcattcaagcatatcaaccattgctgtctaaagcagaattcaactaaccagccttgaatggcggtaatgtatttcccttcgaaacatgcaact

SEQ ID NO: 13880 - DNA, 237 bp, Glycine max
gaaatcaccttatctatactaataaaacataggtaagcagagttacttatataaatgtcttgtcaaatctttcggaccatagtttttctgaaaaacacatcttattttcaagctacttgcataagcaattgtgttctaaatgttctaaacacaatatgaattaagctccacttcatctctattaataaaaaaaagtaaggtggtaaataattattggcataaatatatataattata

SEQ ID NO: 13881 - DNA, 393 bp, Glycine max
agcttcattaaaagctggaagaggaaaattctacaggggtctgactctggatcctaacaggaattatcatcatcatcatcttctgcatcaacaacctcatcatcaaaatctgattctaaattcaagaaggcatgtaacaaaccaagaagaccaagaatctcatcctcaccaattccatatccaattccaacaacaaagggaacaacaatcctacacagctttagacacggaactcttaaacccactccaaccaccaaagaaacggtcttgccgcccgcctcttccgccgacaccaccttcctcgcttactttatccgaacatgcatgaaaaatgggagaaccacaacaccctcaccagcaccatcaacaagcagcagcaacaccctcgagagc

SEQ ID NO: 13882 - DNA, 191 bp, Glycine max
  unsure (1)..(191): unsure at all n locations
tctgtctccttnggaataggaataccactaacggcattgttctttgccttgacaaaatctccattgcaatctcttaagcacatacccaagccaaaggatttggaatctatgaagactgctgcatcaatggtatactttaaaaagtgttgttgaggaggagtccaagtgttggtattgctgatcgtgttggt

SEQ ID NO: 13883 - DNA, 381 bp, Glycine max
agcttattgactagcttgccattttgatatgcttggatgattttcatgactgtcttgattctttaactctctacaatgtgaatgttgcccattcctttcattccttgagattcattgagaaatatgttattgtttttgtgtttgtttgtttctcattaatgtctttggatttgttccttgctttgctttttgattttgcccagtagtgcaaaaggctaagtgtggggggacttgatgtgtcattattttcccctatttcttaaccctttttgtcactattttaattactgattagccttaattgtcaaattaattatgcagttttatcatttgggcctacttgactaattttgtgtttttaatttaaattcaggagaatta

SEQ ID NO: 13884 - DNA, 469 bp, Glycine max
  unsure (1)..(469): unsure at all n locations
tattgagagaagtgaggctgttggttcttgaaacaatgtttgctgtgtatagttaaaattgtggtttgacacaacaaactaaaataaagaaaggtataatgacgccttttgtcagccacagtttagaatatcagagaaaatcttggtagggaagaaccttggcatgatattgatccattatttgatttccgtaagatctataaaagcgaatcttcagtatataataaaacacacaatgtagagttagatcttgcaaatttagactatttaggactcagataaaatttatcttttaacagtgttataacaatagtgttagatcttgtttggataagttttttcatagacacttgaaaaaaatgaattaagtttctcacataaagttaaaattaactcatgtactctaattttttagaagattntattttttatatttttcaaaagtaagtatgtaagtaatttaacttat

SEQ ID NO: 13885 - DNA, 401 bp, Glycine max
agcttgctctaaatttacattgatgtttgtatttatttgaggaggttatatgccatttttgctttaagagtaatgtcccactggtaaaactaactttccaaatgtttgccttcgcaggaatggccccgaggaagcttgcctcaaagaggtccaggaaggacaaggcggccgaaggaactagttccgcccctgagtacgacagtcaccgctttatgagcgttgtacaccagcagcgcttcgaagccatcaagggatggtcgtttctccgggagcgacgtgtccagctcagggacgacgagtatactgatttccaggaggaaatagggcgccggcggtgggaaccactggttactcccatggtcaagtttgatccataaatagtccttgagttttatgccaat

SEQ ID NO: 13886 - DNA, 456 bp, Glycine max
  unsure (1)..(456): unsure at all n locations
tgttgcanagcagcagtagtcatgagtaaggtaagttttttctactttgttgaagacatttgacacatttgtgagaatcctgttatgtacttgtagttgtatctaaacaaaatacttacctaagagtgtgctttggatttccaaatgggtatgtcaagcacgaattattgcaagagtgaggtaacgtatctggagaaaaagtgaggtaagttcttcaaatttgcatcaacttgtttgtgctaatccttttaagcacttccatctaaacaaaagacttgacctaagagggtaatgagtttggtaaggataaatcatgtaatgcccggagtatacggaactgaagtaaaaatttgcaggagctaaacactagaaaatccaatatccaaactcatctatccaattggttcagagtagtcttatagtaaatcaaaagcattttgagttacttggctctct

SEQ ID NO: 13887 - DNA, 429 bp, Glycine max
agcttatgcgcatatttacttacgatcgttcacttgcacaagacattctattaactaagaaaaatgcacccatatacaatcaaggcagcttcgttacctagattatttacatgtacttccaaggagtgtttgttacttacatcacacacatctacttggctgaatttacatacatgcatactcaaagcattttggggtaccaaaaatcgcacatgtgcacatactcggatttctaatacctatacatacacaaacttaatgatgaatcttgattatctacacaataaggcgctacatttcatgccctttacaagattttgctacctaaagccgcatgctaattcaagtatatcttcctttgctgactaaaattgtatccaaattaaaaggtatatattttattgtaatgtattttctttacataacatg

SEQ ID NO: 13888 - DNA, 410 bp, Glycine max
  unsure (1)..(410): unsure at all n locations
gtgttcaanacaaaatctatacattccagttcactcatttatacaatttctcattcaaatcaatcacaacacttcattttcatacaaaatcaaaccactgaatcatattcaatcagttcaatgttcaaacatgcttttgtacaagctactactacaaaaaaaaatggaaatttaaataactgaaacataaagcataaaataaactaaaatagaataataataaactattcaaaattcaagacaagaagataaagatcttgtcaatcctcctgtgggtgatcctctgcatgctcagtaagatccaacaccggagcagctggtggaatttgaacaataggctgctctagctccaacgctggtgcggatggcagggtatcctcagggataggtgtaagggatggctctagaat

SEQ ID NO: 13889 - DNA, 319 bp, Glycine max
agcttcattaaaagctggaagaggacaatatatcaggcttctgactctggatcctaacacgaactatcatcatcttcatcttaggcataaacaacctcatcgtcaaaatctgattctatatgcaagaaggcatgttacaaaccattaagaccatgaatctcatcctcaccaataccatatcctattccaacagcatagggaacaacattcctacacagctctagacacggcactcttatacccactccaaccaccgaagaaacggtcttgtctgccgactcttccgccgccaccaccttccttggttacttcatcctaa

SEQ ID NO: 13890 - DNA, 458 bp, Glycine max
  unsure (1)..(458): unsure at all n locations
tcatcctcagattcctcttgttggactagactcggcttaatcagcttacataagtttagactaatttaacctaagcttcgtcctcagatccttcttgttggactagacatagattaaacaggattatcatcatagcatattaagaaaactaaaacttaattcgcagatccctcatttaagactaagttccaatcttgcttctatcaagttctaaggcaacagtacatttcccaatgctaaagtcacctaactaaacatacaaatgggtgatcaggccaagagcatgtagaaattaagcattgaaagaagcattgaacacataaaacacaattaattagatattaaagtaattacatcagttgttccttagaaattcccaataagaattttagtcagccttacagaanaaccctaacacanatgagattaagagcagagaataatggttccttacacaa

SEQ ID NO: 13891 - DNA, 350 bp, Glycine max
agcttgctgcctcatgaggaatgcttttctcttagatagcatgaaaaagcccttcgataatatgtatgtatgtaaatatatagcataaaatgccttgcaaaatgttgaataaaatgccttgcataatatgaatatatataacatgaagtgccttacaaagtgtttgaatggatagcgtagaagtgtttttcaaatatgtgtatttatgagtaggtagcaaaagaagccttccaaaaaatgtgtgtatatatataggatgtagcatgaaaaggtttgtcaaaaaatatatgtctgtcgtaaagtgcctttcaccaaatgtttatgtgtgcaaatgcatatgtgtcgtaaaa

SEQ ID NO: 13892 - DNA, 489 bp, Glycine max
  unsure (1)..(489): unsure at all n locations
ctcagcttatgatgaatcaagattgattcaaggagttntgangtattattagatgatgacaaacagctcagaagtcaagatcacttcatgataacaaagatgatgacattcaagattgagttcaagattgagtcaagaacacttcaaggatcaaaaganaatttgatttcaagaatcaagattcaagattcaagattcaagaataatcaagatcaagatccaagactcaaagattcaagaatcaagagaagacttaatcaagataagtattaaaaagtttttcaaaacattgagtagcacaagttttcacaaaatcattaccaaagatttttactctctggtaatcgattaccagattatagtaatcgattaccagtggttntaaaacgttaagattttcaaaattcaaaatgaagagtcacatctgttgatgtgtgtcgcaacctacccttcggcgggagggcgacgcgtgactcgcgggatgcgtgt

SEQ ID NO: 13893 - DNA, 380 bp, Glycine max
  unsure (1)..(380): unsure at all n locations
agcttctggtgggacatcttgacttgctttccaatctgacattcaccacagattctgccttcttctattttcagattgggaatgcctctaacagcacttttgtcaaggattttcttcatgcctcttaagtgcagatgtccaaacctttgatgccatattctgacttcatcttctttggaggatagacatgtagaggagtagctggtttcttggggtgtccataggtaacaattgtcctttgatctgctgcccttcattagaacttcactcttctcatttgtcaccaagcattctgactntgtgaagtttacattgaatccttcatcacacagctgactgatgctaatcaagtttgcagtcagtcccttcaccagcagtac

SEQ ID NO: 13894 - DNA, 292 bp, Glycine max
tcaacattcaatttcgagcgtctcgatatattacgggatttttaagacatccgagaaaaaagttattgtcgtttgaattggctcacagcttcaacattcaatttctagcgtctcgatatgctacgggactcaatcacacatcccagaaaaaagttattgtcgcttgaattggctcacagcttcaacattcaattgccagcgtctcgatatgttacggcactcactcagacattcgtgacaataggtattgtcgtttgaattagctaagaggctcaacattcaattgcgagcg

SEQ ID NO: 13895 - DNA, 360 bp, Glycine max
agcttctagaaggagattctcttgatgttctatgcttcttgaaagtggcagtccatgaggagtctccttgggaaagacatctttaaattcctgcaataagggctgaacactatgagaaacataaatagttcactgattagaactatcactctctctatcttggatatcactccatctctcaagtgtatcactcttcctttatgtatacctctgtgatgcctactattggctctctcttgatctctattttctctccttctgatttggatatcacacacttctctaagggatagaggattatgaataattatctggtcatggtgctggaaagaaatcttgttggtgaagccatcatgcatt

SEQ ID NO: 13896 - DNA, 435 bp, Glycine max
  unsure (1)..(435): unsure at all n locations
atcttgccttcaagttcaccatatctaacaacctcagtaaccgtgtgaaggttgtgcatcccagatacaatggcttcttagaatcagtttctaatttttcataataaggtgcatgcgcttgcgtaaaatcctctttcccaagatcgcgtaacatgtcttttatacgatctctcacttgtacatgaactgcctcagtccaagggattggtgacatttgtggtaactcaccatgccatatccattttgtataagtagaactgataccgtcacatatatgatgtgctctaatgtcatttaatggctgttgtctcccattcagacatttaacacatggactaagatattttccacccatttctactgcattatgtngcacaaatagcaagaattcttcaactctattctcatactcgtcacttattcatgctgctctca

SEQ ID NO: 13897 - DNA, 375 bp, Glycine max
agcttgagatgaggaagtgttgaagggtgaatttttctgcttttattgttgaccacagagtggtacctggagatatgtcgcaggggtcatgagaccttggggacgtcaggtggggtgctattgcccaaaaccaagcttgaccaatcccgacccaacccgggcatagtcggtcagtgagaacctgtgatgtacctaagcaggcgagctcctggcagtcaacagataaaaggaaaacaagaccacaaagcaaggaggcttgtggtggctggccagctgtgaattttgtgtaatatgtggattgtggcctctggtaatcgattaccaagggtgggtaatcgattacaaggcttaaaattgaagacaggaggctaagat

SEQ ID NO: 13898 - DNA, 417 bp, Glycine max
  unsure (1)..(417): unsure at all n locations
agtctgaagaccatcgaacttgtccaaaatctttcgaagaagagaggaattatcttcaactggtaggttgccttcatcatcagcgggttgagcaccctttntgacccaagagccatcatgctctttgcggtaaccaaaagaagcaatcacagcagcaccaattaaaaaggatctcttgattggaacgtaaggttcagaatcaagaggaatttgaaaattgcgaaaaaagagagtaacaaggtgtggatatggcaaaggagcatttaatcgcaatgccttatgcatgcgatatctgactaaatgtgcccagtcaagttgacacccggtatgaaaggcccacatgataacaagatcttcctcagaaacttgggcaagggtggaagatcgtggaagcaaaatctgcacaataagataatg

SEQ ID NO: 13899 - DNA, 426 bp, Glycine max
  unsure (1)..(426): unsure at all n locations
ctctgagcgacgcagctgcagcttcaacagttcttcacaaaattatatgatgtataaaactagcaagactacccatcatatctcccaaaaccccatacccacgaaatttaagagagaaagaagtccacccaaacctgaaatttcgaagtcccactcgtagccacgcacttcacgacaccaaaaacgccctcctttcacgatttggggcagaaatgatggccaaaggttgaagctttgtttggagcttcaatggagaatgaagaagaagagaatggcaacgtgagggagagagagagggctgtctgataagtgtggggctgagtgaagagagagaaagttgctttntaattttaaaaaggctttttcctcatttcttattattttattataactatgccacatgtccctatttgagtggagcaaaaa

SEQ ID NO: 13900 - DNA, 235 bp, Glycine max
gtcgaatagaagttcaagtccatagccatcaaagtctaaaaagagtatgatgaactaagggatgtcatttggccaccgatgaagccttggaacgagaaaccaagaaggcccgataggaagaacacgaccaacgcaaagttttgaggggctttatagggcaacaatagtgagctcaagctctgaagaggtgaaaggaattatcacgggtcaaaggcatgatctttgaaggacgagc

SEQ ID NO: 13901 - DNA, 409 bp, Glycine max
  unsure (1)..(409): unsure at all n locations
agcttgtaaaacttgcattctaccctcgtattctttaacatacttactgctttctctaatattgtttacagcatgaccggttactttcaacccctcttgaacaataaggtttaaaatgtgagcacaacatcgtatatgaaaaatacaccaccacttactaaacaatgcatgcaaaaaaagtctttacctcaaatagtcttgcattttatcattcgaagaaacaatatctagagttaatgaaaatattttctgctcaatcccccattcttccaaaaaaaccatatataactttagtcatctcacgccccaagtgtggaggaggaaaatgagaaaaattaagcattntactattcaactttcaatttgcatcaacataatgtgcagttattgaaatataaccctcagaagt

SEQ ID NO: 13902 - DNA, 471 bp, Glycine max
  unsure (1)..(471): unsure at all n locations
gacactatgaaactaagctntacagtactgcttatgccttatctctagtcggcgtatgtatctaacctcctaacagtcgttttagtggctgcacactacgacacttcacttagcctttctagtcagactcttcataggtagccctccccaaaacattggcaaccaactctaataagcggcaattaaggtaagctaagggtaacaacaattaaagtggctttccaacaaattgacttgacctttgtaaaaaatgtttgacgaagagaaagcaattaacccctccttattccatgtacctccaaaactaggacaagaactccactcacttcctttacttaaaacatccaaacaataatgtttaacatccctcccctctgcatcaatcaaaagcttccaaacatagcactatgggaatgagagggaattgtcctcctcatatttcacttcccttcaaaattcttaaactcccaa

SEQ ID NO: 13903 - DNA, 431 bp, Glycine max
agcttcatcaagacaaggggtgtctttcttcttcttgaaccttgatcttgatatctttggaagctaaacttcattgcatgttgagttgatgttcaaaatttcgtagctactgccttggctggaactatgtaatgtttttcttgaagttttaaggttaaaaataagttctttgggtatcaaaacttagggttagccttaaagttcacttaaattggagttgtctagcaaaagttatgaacaaaacaagttcaaggatattttgtaggattaaatctataagaaaattaaaattgtggttatggctgtatggactgtttttcttaaagatttgaattcaaaaatgaatttgttatgtgtgaaaatataaggtagcatgtaaaatttatgaataatcgattttcggaacacttataaattcgaaaacaagttta

SEQ ID NO: 13904 - DNA, 333 bp, Glycine max
ccctgatatatatctacatattattagtaattatgttcgatgtttgattatttgttgcgttattttatccgtaattattttcaaggaggttaatttagttaatagaggggtgtgggtagataaggatctagcttcttaaagaagcctcttgagaaaacttctcaaagaagccacgaggaagcttcttgaggaagcctcttagtgaagcttctcaaggaagctacatgtagcagtctcggtaaaaatgatttccagccttcgttacccgttggatcgtctacaattttggtctgcagcttcacaagacacttgtgcatgatctgaccgttggga

SEQ ID NO: 13905 - DNA, 396 bp, Glycine max
agcttcttatccaaggctcatcttgattgtgaagctccttcttccatggcttattccttaatggatggcgcctcctctcacctcttttcctttgtcttccgctgcatctccatggtggaaaatcaccattaaaggacctcattgaagctcaaagatccagcctccattgaaaccccaaaagcaagcttccatcaagtggtaatcagagcacaagagcttcaagtaggtgctccttaaacctccattaattgtttgctgtaccttctcttccattgatgtttcttcatttttttctccatgtatctcctcacatgtcttgtgctaaatgtttttaacatgattctttatagtttccaccgattaaacttgctatagaagctagatttgattttctat

SEQ ID NO: 13906 - DNA, 428 bp, Glycine max
  unsure (1)..(428): unsure at all n locations
ngtctaccaggtgtgcttgtattcccaatatcagctgactttggcaaaacaaaatcaaaataagaatgtctcttgctcttcacgcatggtagcaatatcaccattcctatcattaataatggagtgtgggtccttaacagtatggacaacctcagtgatggaacccatagctttcttcttatgactagctggtaaatgaaattaaatgattatatgtgaatgcagaatctcacacactactaaaaatggctcaacatattaccatcataacaaagtaatgatttacgtaatccattcggtcgtaatgccttttcattcatgccttctgtgtacttgctcacctcaacctgcattctgtagtaataactgtattaagcattaaacaaatttaatactgtacaacctttctccatgagagcacatatcta

SEQ ID NO: 13907 - DNA, 314 bp, Glycine max
agcttgtccgaactagcggacgaataatatcgcgttattaatgccagtcctccactcgctgaccgcaccgtgttcactgtgtgaatcattctttatgcgcgacttgagtgaccgctgacgctctaagcgccgtcccagactcattagccaatgaggccctgatagcctcaaacaccgctcttatcacctataccccagtgggattgcagttactggaatttagatatgagagttatctcgctaagcctgcgacatacatttgttctgctcctactaaacatcaactcacttatcactctgcctaaacgttcatg

SEQ ID NO: 13908 - DNA, 531 bp, Glycine max
  unsure (1)..(531): unsure at all n locations
tatgaccctttgaacgcggacctatgatactcagcttgatctgctacactagtggtgcatcactgttattgtgcatttacacctgcaaccattgactgaggacaagagaagagtaaatgcaagcacgttctgtgtgcaatacatctagtctgagaggaatgtagcatcttacatctctttataacgagcataaacacatgcgtatgtcactgcgatagatctgtggtgaatacgaactacaacattcgagtgtctggagtgcacgctagattgatccaaacggtaaacatgaatgcttgccatattgacatgcttcacagctaggtcatttagaatctacgtgaggtgagccatgaaccaactccttgcattgcatgttcagcacaactgcatgatgacaacggcctaacctttcgtgtcaagcctctgtactcgttacagtagctggatagactgctagctcctccttcagtgggtcaaatggaaaacctttacctctcattgtgatactgaagatgttcttgtcattcn

SEQ ID NO: 13909 - DNA, 231 bp, Glycine max
gggtacgtcggcacacatactcgaatttaacttttatcattggatgcattaagacactactaaaaaatctttttttacgaggccagtctaaaaccatttatatataaccaggatttggggtatagaaaaaattacaaaacatttttcaagcgatataaggaaccgcaaaacctttgttcaaaaggtataaaaaacgttatctgaaaacgagttttacaagattttccatag

SEQ ID NO: 13910 - DNA, 181 bp, Glycine max
gacatgaaaatgtgcatacagcattgaccgggttgtttcatgcccgagcgtcccataaggtccagaacgagagcgcacgatggaagatctaaagtacgcccccaggtgctaaacaatgattgcgaggctcgactttcgctctgatagtctcgcatcacatcacgactgagcaacggtatct

SEQ ID NO: 13911 - DNA, 427 bp, Glycine max
atacgaagatctgccgaacgatgacacttcttgcttttattgttgactgcttactgcgaactggagagacgtctgggagagtatgatagcatggcgacgtcaggctgtgtgctattgcccccccactttcttgaccaatcccgacctactccgggcgtgtgactgtttgtgagaacctgtgatgtacctatacaggcgagctcctgtgcttctctgatttccgaacgttacgacaatacggatgcttgagggtctgttttaagcttcataagtgaataaagatttagttgtcgcaacacttcttgtgtttgcgatgtacaaaactcacattgcctacaatgatgcagtccttgagtggggatgaaggggttgcctctctacggctccttgaatttggaattcatatgaggggtatctttctactccc

SEQ ID NO: 13912 - DNA, 434 bp, Glycine max
  unsure (1)..(434): unsure at all n locations
agcttcgcgcagatccctctnggaagactatgcctagactaaacaacattattataactgaaattctgataccaatgccagatgtcgtacaggatgtcacgacatcacgcttcagaacatgcagattatctgtgagtgtatgaacagattaaacaagtaaataacacaagagaattggtaacccagttcggtgcaacctcacctacatctgggggctaccaagccagggaggaaatccactaaaatagtgttagttcaaggtctaacagccactgtttacaaccttctcacctaaccactacccgtgcgacctctacctaagagccactcttagatatgagaacccctctcactccctctcaaacactctcccgtgtttacaattaaatcaaggacactccagagaatgctctctgaacaaaagagatcaactc

SEQ ID NO: 13913 - DNA, 380 bp, Glycine max
  unsure (1)..(380): unsure at all n locations
ntaggctgctcaattgctccaggttgctgcatggaaggttctatgtctgtatggtggtcagcagaggagcacaaaccacaaacccttgcgacaggtacatatttttgattcaaggccagctgggttaccaagttgaccaacgcatccagtttgccttcaagcttcttagtttcagatgatgcagatgggtttgtagctacctcatgcactcctctaatgactatggcatcatttctggcactaaactgctgggagttggaggccatcttctcaattaaatttctggcttcagcaggagtcatgtctccaagggctccaccactagcagcatctatcatacttctctccatattactgagtccttcataataatattggag

SEQ ID NO: 13914 - DNA, 408 bp, Glycine max
  unsure (1)..(408): unsure at all n locations
agcttcatgatgaatcaagattgattcttataagttntgatgataacaaaggtgatgacaaaaagctcaaaggtcaagaacacttcatgataacaaagatgatgatctcaagaatcaaagaatgacttcaaggttcaagaggaaatttgatttcaagaaacaagaatcaagtttcaagattcaagttccaagaatcaagatcaagattcaagactcaagattcaagaatcatgagaagacttaatcaagataagtatgaaatttttttttcaaaaaccgagtagcacatggatttttctcaaaacttgtttaccaaagagtttttactctctggtaatcgattaccagattgttgtaatcgattaccagtagcaaaaatgtttttgaaaaagatttcaactgaattta

SEQ ID NO: 13915 - DNA, 383 bp, Glycine max
  unsure (1)..(383): unsure at all n locations
tgtagccattagaagagaataagcatgtgattagaagtatgactganaatgttagtcagtttgtcagatcgattgtgaaggaatgcattaaccatatcctggtgagagtgtgatccttaaattntgagagaaatgactatcatttagtactgatttttgagtgaatctttgaagtatggactaaatgcatgaaattgaggatgataaaggccaagtttgattgtgatagccacttatccaaaaagttgaccatgtgcttgaatgaattatcccttgtacccaggatgagctgaatgaattattgattgactgaaccctgagcctatacagtgttatctcctgctaccatgacctacgttgtaggaaagcatcatccattggaa

SEQ ID NO: 13916 - DNA, 430 bp, Glycine max
  unsure (1)..(430): unsure at all n locations
agctgccaatcttgtgcagaagcttctcttgttactgcttcttgagaattttaagatatcttattggaactactaatcatggcctacggctcgagataagggtctgagtttaatcttgaacgctattgtgatgttcattggtatggtgataaagtactaaggaacatcactagctgtgcttgattgtccttgtacaatcactaatatcttggtcatctaagaaacaaagcacaattgcaccgtcaacctcaaaagctgagtatgtctcagcagctgtttgttgctgtcaaatcatcttgatcaagcaacaaatgttagattattcactagaataggctaaaatatgcatttggtgtgacaacacgagtgccataaaaccatcgaagaatccaatccaacattcaaggtccaagcacattgacatnaaaca

SEQ ID NO: 13917 - DNA, 313 bp, Glycine max
  unsure (1)..(313): unsure at all n locations
agcttgtctaggtaaatgataagaaccttgtttaacctttacaaaaaaggtagctattgtagttggaggactcagggtcatataaaaccccacaccaaaatcccatactttcaatcaattgaaccctaataataagcttaagaacttgcttgctaaaactgattcccttatgcactntgctgatgatgctaagggtgtaagcaggtcggattgggttggagtttggacttaccaatgctcgaaacacattatctagatacgggtgaaattttttttttaaaaaccgagcatcacatggatttttctcaaaact

SEQ ID NO: 13918 - DNA, 436 bp, Glycine max
  unsure (1)..(436): unsure at all n locations
ngatccttgaatctggattctggattctaganatcaactttcctcttgaatcttgaagtgttcttcaactttcctcttgaatcttgaagtgttcttgattctatcttgaacatcttgaactcattctttgattgaactttgagctttttgtcatcacctttgtcatcatctttgttatcatcaaaacatctttgaaccaatcttgattcatcatgaagctttgcttctacaccaagggcattggatagaagactccaagaagattgggccagagatgaaagagaaggccctaggattctcatgagccttanggtagattttgggcccatggactaagtatgaacctacttatctttgtacatatcagattaagggttcactatttctgggcttgtacttanggctccatagtgtaaggagggtaccctagtaatgt

SEQ ID NO: 13919 - DNA, 285 bp, Glycine max
agcttgtttgatcagtattgacgacaaatttgtgtcccaactaagaatccctgacacatagctatagcttcagcaccggctcacacctctctacagtaggccaattacttttgcactctacgcgcacggttctcgcaaaaaaattctatcggacggtcattctgatgtaatactgcatgcataccagcgccaaaagcataggtctcataatgaagggcagctggaaattagggagagctgacactgcagctgaagtcatgactatctgcaaatgaacaaatgtag

SEQ ID NO: 13920 - DNA, 450 bp, Glycine max
ggacacttaaaactaagctgtaaccgaagataaacgtacgctaaaagagctttgttgtttgtacaatgaactacaaaaaatatactccatgtgtatggttgatctttgtactaaccaagatttatgaacaacgattgacgttgacttctaagggtcacatgtaaaaaaaaaagatcacgggtcattacctatattattcgccttaagataggtgtatatatacaaagaaaatgaatgcgcgcagtaacatactgcatttccatgatgtatacaatgatatctgctatattacactcaaattacacaaaaactctttggatttgcttaaaaccatatgtgtgacacccacacccatatcgactatatatttagtattgagcatcgaaaccgagaattaccctcgattacataattacacatatgctctctctgagttatatacatattaca

SEQ ID NO: 13921 - DNA, 433 bp, Glycine max
  unsure (1)..(433): unsure at all n locations
agctntcaatcttgtccaaaagtttctcatgttactgcttctaaaagaattttaagatatcttattggaactactaatcatggcctacggtttgagaaaagggtctgagtttaatcttgaaggctattgtgatgttcatttttatggtgataaagtagaaaggaagagcaccagttgtgcttgttaatttcttggaaaatcactagtttcttggtcatctaagaaacaaagcacaattgccccgtcaacctcaaaagctgagtatgtctcagcagctgtttgttgctgtcaaatcatcttgatcaagcaacaaatgttagattattcactagaataggctaaaatatgcatttggtgtgacaacacgagtgccataaaaccatcgaagaatccaatccaacattcaaggtccaagcacattgacatataacac

SEQ ID NO: 13922 - DNA, 225 bp, Glycine max
  unsure (1)..(225): unsure at all n locations
ctagttccgctccggagtacgacagtcaccgctttatgagcgctgtacaccagcagcgcttcgaagccatcaagggatggtcgtttctccgggagcgacgcgtccagctcagggacgacgagtatactgattntcatgaggaaatanggcgccggcggtgggcaccactggttactcctatggccaagtttgatccagaaatagtccttgaatttatgccaatgc

SEQ ID NO: 13923 - DNA, 424 bp, Glycine max
  unsure (1)..(424): unsure at all n locations
agctntacatgtaacacttgtcactatgttattataagaaactgccttttccttctagcatctctcatgcatctcatgtttttgatttacttcatatggacatatggggcccgtgttcaaaaccatctatgcatggtcacaaatacttcttaacaattgtcgataatcattcacgatttacatgggtacatctcatgcataataaagctgaaacacgacccattatcatgaatttcattacgtccattgaaacccaatatgatagcaaagttaaaataataagaagtgacaatgggcctgagttcatgatgcatggcttctatgcttcaaagggaatagtgcatcaaaccatgtgtgtagaaacgcctgaacaaaacggcatagctgaacgaaaacatcaacacttacttaacgtcacacgtgc

SEQ ID NO: 13924 - DNA, 435 bp, Glycine max
  unsure (1)..(435): unsure at all n locations
atgtcattcanaagacactatgtcgacctaaatgaagactattcatgcattgnttatgtaattgtattcattatgcgatantaattgttgtaacccattactaaccaattaatattattaagtactcgtttggttaagcaaaaaaattggtggtccaacaaaaatcatttacgcgtgtagcatacatcattgtcataattgacaacacataatgacatgcatgcgtattaaagtttgagcgcgacaacacattgactgacttgactacacattctgaatgaaacgtaaacacgaaacatgttcacgcgtgtctatttttttgtaaacaaaatgaagcaatcgctcggtcacaaccatctatatatatagcagacacggctaataaatcacacattatcttgctttcaaatagtctcccaattgatacacaaagta

SEQ ID NO: 13925 - DNA, 431 bp, Glycine max
agcttaagtcttcgtggtgctcccctatctctacataatgttggcatgcattatattgcataatatgattgttgaagacaaacgagatacgtttagtggtaatgtcgatgttgataatggtcacgtagataatgacatttcaaatgtttgaagtatctcgtggtgctcctcttgactttgctacatacttgcaaacaagacgcattatgcatacaagaagaattcatcaacaacttcaagcatacttggtagagcatatttaggaacgtcacaacaataatgaaatttgatttttctttgacattaatgtgttgcattttttattatcaaatttatgtatttttcatttgtttaacatctagtcataaataaaaattaaatttatgctcattttcctatttgtaatatttatgaaaatttcttccatgttc

SEQ ID NO: 13926 - DNA, 472 bp, Glycine max
  unsure (1)..(472): unsure at all n locations
tcgagcagccaacgaacctgcatcacctgttacctctgtggctcaatctagtaatcttgtaacttttgtttcagtcctcctctattggatcttggattcttgattctggtgcctctgatcatatgacaagtaactgaactcttttttcttccttgactttttcgaacatcttgccttatgttactctcgcaaatagctctcaaattaaagtccaaggcatcaaacaaacacatcctcttccacaactttcattaaattttgtcttatttgttcttggttgtccttttcttgctatgggcaccatcagacattggccacttcactagttggacatcaaaaatgtcttcctacatggtgacttgcaagaagactatacatggatcagcccctggttttacagtttccggcgagtcataccttgtctatagactntgactntctctttatggctttgaagcaatctcccgtgtct

SEQ ID NO: 13927 - DNA, 374 bp, Glycine max
agcttgaaggtgtgtaacccaccattttttatatagaacactagtaatatgtctactatcattgttattatttctttctttgtcattaagggaaaacacttgggctgccagatccctccacctttgggaatattctttaaaagatccgtgccccctttttgcacatgttatgtagttgcatcctatccgaagacattatactgacactcctagtaagactttcttggaaggaatgtatcaccaattcctcatcttttgcgtatgcccccatcttccgacaatacatctttagatggttcttggggcaagtagtcccattgtacttgtcaaaggccagcaccttgaacttgggaggggtgatgatattgggtact

SEQ ID NO: 13928 - DNA, 358 bp, Glycine max
gtatcagttagatctttaagtgcagattttcaggataatgatagatctcatccagcgcaagttgttgcagcccagatacgcacactgctatttaaacatgaaggctgcacgagttttctaccaagtccgagattgaagagttattttgtgagttttgggacttgagtgttttgtgagccaccttgatgttactctaacatcaagtgttggacctgagtgtgtagagttgatctcttttgttcagagagcaatctctggtgtgtatttgaattaattgtaaacacggcagtgtgtttgagagggagtgagaggggattctcatatctaagagtggctcttatgtagaggttgcacgggt

SEQ ID NO: 13929 - DNA, 267 bp, Glycine max
  unsure (1)..(267): unsure at all n locations
agctntgcgagattcctcacggaaaacgttacggatacgtttcggaagcgcctcggcttagattttcttcacggaaacaatttttccaagcaaattctaaagagagagaagtgcctaaggggctgaaccccttccttcttgccttcttcccctatttatagcaaaataggggaggtggttgccgcccagctcgcccaggcgagctcatctcgcccaggcgagcagggttgctttctacacaagcgaccgccttctggaggaatattc

SEQ ID NO: 13930 - DNA, 462 bp, Glycine max
  unsure (1)..(462): unsure at all n locations
gcttactcgtggcttctttgagaagctttctcaagaggcttctttgagaagctagatccttatctatccacccctctattaactaaattaacttccttaaaaataattacggatgaaaataacgcaacaaataatcaaacatcaaacataattactaataatatatagatatatatatcagggtattacaacttcgacctctcagaataagaaaaggaagaagactaagggtgctgcagaagggacttctcagcaaaagaaacaaaataaagatgaggaatttacttgttacttctgcaagaagtcgggacacatgaagaaagagtgtcccaagtatgccgcatggcgtgtgaagaaaggaaaatttcttactctagtttgttcagaagttaattngacttttgtacctaaagatacttggtgggcaaattctagtgctactactcacataagtatgactat

SEQ ID NO: 13931 - DNA, 512 bp, Glycine max
  unsure (1)..(512): unsure at all n locations
nttagaccctgtttgacngcngcggattctatacagtctgcctgcatgcatgctatctagtccttccatgtgaaacgacttctatcgtgcaatctactgcgagattctggngatagcattgttagctaactacatacatgcatggacctacgaatatgacagcctaggtgctagtaggaacactgttgaaccgctataagatatgagcatcatccatggcgatgaagtagtagcatgacagcaccaacaacgctcgtgaattcttgtggaaaatgactagagatgcgcccatatagccatacagagcacaattgccccgtcaaccgtacaagctgtgtatgtctaaccagcttgtagatgctgccaaatcatcttgatcaagcgacgaatgttagattatccactacaggacgttcgcatatgcctatcgggggacaacccgagtgacataaagccatagcagaacccaatctctcatgctcagttcacgctccttgtgatagctcagcaat

SEQ ID NO: 13932 - DNA, 217 bp, Glycine max
ctcaagcttatgaagcgcagaggattgaatagattggaatttattttatgtcaatcttatacgaaatcagtatccatagaatggtaccctttcagaatattaatgtctggctgaggaaccactcgaatggtactttgcactattaatacctctggtactctatgcaatatatatatcattgttgctgaccgaatactacaaaacctattttaatatc

SEQ ID NO: 13933 - DNA, 380 bp, Glycine max
ttctagcatctcttatgcatctgatgtttatgatgtacataatatggacatatggggcccgagtacaaaaccatctatgcatggtcacaaatacttcttaacaactgtcgataatcattcacgatctacatgggtacatctcatgcatagtaaagctgaaacacgacccattatcatgaatttcattacgtccattgaaaccctatatgatagcacagctaaaataataagaggtgacaatgggcctgagttcatgatgcatggcttctatgcttcagagggaatagtgcatcaaaccatgtgtgtagaaacgcctgaacaaaacggtatagctgaacgagaacatcaacacttacttaacgtcacacgtgcacttttgt

SEQ ID NO: 13934 - DNA, 384 bp, Glycine max
agcttatccctagaggggatggaccttttatgttttggagaggatcaataacaatgcctataggttggacctcccagaagagtatggagtcagcaccacttttaacatttctgatttaactccttttgcaggtggagctgatattgaggaggaggaactaacaaatttgaggtcaaatcctcttcaaggggaaggggatgatgcaatcctccctaggaagggaccaatcactagaaccatgagcaagaggctccaagaagattgggctagagctgctgaagaaggccctagggttctcatgaaccttatggtagatttctgagcccatgggccaaggttgggtccaattatctttgtacataatatactaggatggcattatat

SEQ ID NO: 13935 - DNA, 463 bp, Glycine max
ggaacatgatgaaactcgttaactcaatgacactattattcactcaattcgctcaagtttcctttttccagtgtactaatgtttgaacccggcaagtgcactggattgtgcaagtagtttaaaacggtaagaatcgagtatcgaactctcgaggaacttgcgttacttcgtaaagctatattcagtgaataggtgtctagtatgaaaagagatgtgtcgactatgcacaagtatgtaaactaactattataaggaaaatcacgtgagtaatgatgtgtaaagacaagtagacaacaccttggtcttcctatttaggtgcctgatgttaaaaggatattctctacttaacaatgctcatgtgttctatggtgtctcctgaaatgctaaaccccgattcctcatgatagtctatcctaatcccgatcaatatcgtccttagattcctcttgttggactagactcg

SEQ ID NO: 13936 - DNA, 367 bp, Glycine max
agcttcatgcttaagtatgtatggcaaatcttcattactggggatcaacacatacaagtgagcttgtaacacatgttctagacttggagttatcacatgcagtcctcttgaacccttaccacccaccctgtcatcatgccgagactcacgaaggccaacaagtttagccttctcaatgtattctgaacaaaattcaatggcttcttctgcaatgtacctctcaacaatagatgcttctggacgatatagattctttgtatacccttttaagatcttcatgtagataaacaggaccacaacatttgatttctctgaacagatgcacaatcaagtgaatcatggtgtcaaagaaagtaggggaaaaata

SEQ ID NO: 13937 - DNA, 401 bp, Glycine max
  unsure (1)..(401): unsure at all n locations
nggattgacagcctattaatacgcacaattgttcaatgtgagaactaatgaatggcatgatgccaggattaagcacaggaaattccaattaagggagaaggtgcttgcttaaaattcctacctacgtctatttcgtacgaagcttcagtccagatggggtagaccatttgaggtgaacaaggtattcccttgtggagtactaaagctaaaaaagtcaaatggccacaccttcaaaataaatgattatcgggtcaaggcatacaaggaaggatcgcaacaagtgcatgctattgtgcacttttctgacccttgatcttatggccacacgtcaggtttaggacatcgaacaagtgttttccaggagataacctatgacttgtatcctttanaatttgggtcat

SEQ ID NO: 13938 - DNA, 424 bp, Glycine max
  unsure (1)..(424): unsure at all n locations
cggatcttaagcacctgcagctgcagctgaacatacactttttttttttgggaactggtcactacgaggcttgagcttaaatttttacttcattttctataaatctggaaaacaattataaaaaagaaccaagtgatttagataaaagaagataatatgaaaaatcacacaagttggcaggaaaatcagtgtctatgaaaaaaaagtgaaagggaagtgtgaaaacaagtgccaaaactagaggtttcttgagtcttattnttcttttagattttttactctactctagagccattttaggtttcccttcgagtcctagcttgcttttatgtgcttttcattgctttaattgctgaataatccttgaacatgtcttgttaaaactttatcggttgagctatcatttcattctttctggcgtttg

SEQ ID NO: 13939 - DNA, 244 bp, Glycine max
tgatataatgttgagaacccagagagagacacatcatgactaaccagtcacaccgctagcacagtaacccacttaacacccatctatatggtatctttattcctgatagggaattccagctttactcatattctacgtacttgaactgaaacactgtatcagaagaagaatctgcagggcgttgagattacccatgcattcgttctaacataagatatgctgacacaacaatatccgtcaatac

SEQ ID NO: 13940 - DNA, 209 bp, Glycine max
agtcacctgcggcatgcaagctttgaatataatcatgggaggacatttgttcttggttgttgaaatcttgagtatagactattctattatctttcttattatagagaatacatggtgaagatatataatttgccaggaacaggacatcaccattttgagagatgcacagaggcttgagtgttacacagggcagaggggcttgaggaagc

SEQ ID NO: 13941 - DNA, 360 bp, Glycine max
agtctcacgattgtcacgtgctcatgcatcaattgttagccgtggctatacgagacatctttccaaacaaagtcaggttagcgataactcgcctgtgctttttcttccatgctatatttagcaaagtcattgatccagtcatgtttgttgagttggaaaatgaggccacaattatactgtgccagttggagatgtattttccccctgctttctttgacatcatgattcacttgattgtgcatctggtcagagaaatcaaatgttgtggtcctgtttatctacagtggatgtacccggttgagcgatacatgacatatctacaacggtatacaacgaatctatatcgtaccatatcatcta

SEQ ID NO: 13942 - DNA, 371 bp, Glycine max
  unsure (1)..(371): unsure at all n locations
agcttgttaatgatgcattgtttttagtgtttacatggctctcanacttggacaaagatttcaagcttccttttaatcaatggtcaactaacatcagagaaggttttttgtgttaggtttcagtggctcttattaggagctgtaccagatctttgttttttgtagccatgctatggttcctattcaaactgcattagttttctttggaaccatgagtatggctctatctctgtatatttttagtacctctggtacttatataaatatattatatttttgctgataaaaaaaaaaacctaataggacaaagggaaaagtcatctgagcacatcatatataatactactgagttctgttgtgcaaaaaaaaaa

SEQ ID NO: 13943 - DNA, 179 bp, Glycine max
tgcctgtccgatgcagcagtaatgatggcccgagttatgttgtggaacggttacgaacccggaatgggtttaggcaaagacaacggcggcataactagcctgataaatgccaaaggaaatcgtgggaagtatggtttaggctataagcccactcaggcagatgtaaagagaagcatcgc

SEQ ID NO: 13944 - DNA, 526 bp, Glycine max
  unsure (1)..(526): unsure at all n locations
cagccactccccttacgatgaccccacaacagctgtngacntnnctcacnacaaaaaaggagaatgagcccgagacatcgaanccagancgacngcagctgcagctgctgacagcgagaagcagagttctttcctatgccaacaagcaagcagtgacacggatgcccatgttcactgcaccaaaatccaccctgagagatgacgagacaaacccttcacgaggacgaacagggaaggatgctctagagtcgatcatcaggaggcaagaaccaaacggaataggaaaaaacgcgcattgccgatgagaaaaacatgctcatcatacgatgccacaccagaagagcacccacccagactattcacaccaaaggcaacaaggtaacagggacacgacaagcctaccgagctctcagaggacaccactctcggacatcgcaaggcccgacgaaacgcaacagaccgacacaagccggagaggcgaggacaggaccttccacgagaacgagctggctcagtaaccacggcg

SEQ ID NO: 13945 - DNA, 411 bp, Glycine max
tctagagcaagtagttagattcgatagttatcatgaagtgatctcttgcataaccattctgagatagtccataagaggttctcattttaaggaacctttctgatgagcattatgaagtatcaacaaaataaccattttgatgtttgctaagaaagcatccatacatgatagattttgttgatgaagatcaaactaatattccattttgaagtagcacaacttcattaaacttaacacttcttcacaactctaagcattttgaagtagactgcttcataaatattaagtaaaggttcaaatgttggtgtgttagtgttttgtccatggtcaaactgtgtagtaactttactcttctatcttgatgcttctcatggacaaattcagcttttaacacatcttcatcttcttatg

SEQ ID NO: 13946 - DNA, 322 bp, Glycine max
agcttgagatgaggaagtgttgaagggttaatcttcctgcttttattgttgaccacagagtggtacctggagatatgtcgcgggggtcaggagaccttggggacgtcaggtggggtgctattgcccaaaaccaagcttgaccaatcccgacccaacccgggcatagtcggtcagtgagaacctgtgatgtacctaagcaggcgagctcctggcattcaacagataaaaggaaaacatgaccacatagcaaggaggcttgtggtggctggccagctgtgaatcttgagtaatatgtggattgtggcctctggtaatcgattac

SEQ ID NO: 13947 - DNA, 267 bp, Glycine max
  unsure (1)..(267): unsure at all n locations
cgcactactctctgtaagttgaagcttgatggtacgctatttctttatcttangctaagtgcatattgcaaaaatattctgtgttgcagaaagtgctaagcacagcctgccgcgctaagccccaaatgcttatgggatttacaacttcaagttgggcttatcacaaggttatgctaagcgctagggttttaaacttaaacgtcacgttggctcgctaagcgcaattgtgcgctaagcgcgccatacgaatttcagtttttaaaaatc

SEQ ID NO: 13948 - DNA, 191 bp, Glycine max
ggacgaatgccactcccgagttctatggccatcgttccatgagcactgagcaccagtagcgttttgaagccttcaggggatggtccttccgccgagagagacgtgttcggctcagggacgacgagtactcagatgtccaagaggatatagcgtaacggcgttggacgttgctggtcactgccatggccaat

SEQ ID NO: 13949 - DNA, 464 bp, Glycine max
cttccctcttagtttcttgaagacagagtattatctattttaatttccccaccaaattcctgatagaggcccatttaatgcctctacccatccctctaatgttgtaagaaaggatattcatctatgaatattcttattccccaactccatagcttctttcctgtcctgagactccatattagcaaagctgtgaatatcttcatcatgttctatatcagcctgtatgttctatattagcaaagctgtgaatagcttcttaccaggactagtaataataggttggggtgaatccacttgagaagcactactattgatttctaatgaaagtgaaccactttcaatgtgtcgatctaaggcttgcttgatttctgatttgtagcagacgttagagctttcaactcatgacagagtgggaaacaatgatgcaacaatgtagatgtagatgtacggcatccatcttacac

SEQ ID NO: 13950 - DNA, 353 bp, Glycine max
agcttatatattaaatgtttctgagtatttataagttaaattacataaattaatatataaatcatttacataaatcattttatgttatttatacacattgcgtaaatttatactaatatataaattatctaaaataattaaatattgaaatggtattaattttctaagtattataaaataatttacatattaaaaatttttaagtaatttttattaactaccttcaataatttatataaataatttacatattaaattatgtgactatattgattaatataattagaataaaaactattttttaaatgaggttttatagtttaaggttatgttagcttcttaaaagtaatatt

SEQ ID NO: 13951 - DNA, 319 bp, Glycine max
  unsure (1)..(319): unsure at all n locations
atttcctgttctgactcaaagaatactattttaaggactcctccacatgctaaaggtgtggcaatagggtcactaaagaagaaagtgatctcccaataggagaagcaagggcaacaaagaaggaggtcagaatttgaagaaccccattcgcttaaagacaaagctaccaagagaaattcaaggccaactgggaaaacaaacaaagttgtttttgggaggtttagagacttgaaagtgattaagaagtatgggtgggatatcctttgctttgtaagaagcanaatcgacagagttcgttgatgtccaagacctatttatc

SEQ ID NO: 13952 - DNA, 361 bp, Glycine max
agctatccatatgaatgtaatgtaatttttccttcaatttcaggtaaaaaggagataaattcgaaggtgcaaaagttgctatctcgctcagcctggaccgtgcgcttagcgagactcaaccgcttagcgaggcatcagctgcttaatgagtgagatgaatattgatgagaatttgccatgtcatcatgtgctcagcgcgtcatcagctcgttcagcgagaagattgtttctattgcgcttaacgcgagaatggcgctaagccaaatttcacttacgcgcgctaagcgtgccttcatggaaaaaaaaaaccctatttaagcctgaattgcaaagaaaaaaaagagaggtctgaatagactgc

SEQ ID NO: 13953 - DNA, 423 bp, Glycine max
  unsure (1)..(423): unsure at all n locations
tgggacgntgggaaaggggtgtggaagaaagaatgtattttgaatgtctgctttccaaggctacacgaataataagacttgaaacactcaagtgtctctgctctcgggagaagaagcctttttcacacaccgaaatagatatcagacgtcgcaacggtcagatcgtgaacatctgtcctgtgaaccaccagaccaaacttcgagaagatccaacggttaatgaatgcaagagggcacttttactgagacagctctaggaagcttccttgagaagcttttctcgataggcttctttgagaagcttccttgagaggcttctntgagaagcttccttgagaggcttccttcagaggcttctttgagaagctagaantttaactattcacacccttctaataacctcaccttgaaataaaacatgga

SEQ ID NO: 13954 - DNA, 542 bp, Glycine max
  unsure (1)..(542): unsure at all n locations
ccgccacacaccccacctgccncaggacacagaanttcgccactggaacancancttcaaaaagagantttatgacccgtagacacccancanaagagcagacnccngcangcaagcnngcanagacgaagagangacaggtgaatcttcctgcacacacacgtccaccacacgagaganacatcggaaatacgccgcgcaggacaagacaccgtggggacgacaggaggggagccaccgccacaaaccaagcgggaccaagcccaacccaacccgggcacacccggccagagacaaccagcgacgaaccaaagcacgcgagctccaggcagacaacagataacaaggaacacaagaccaccaagcacggcggctcgtggcggccggccaaccgcgaaacgcgcagcaaacgaggaacgacgcctccggaaagccacccaaacggacggcaaccaacaccggcccgaaacgccgacaaccgcaagcacccacacggacagacaccgcacacacacaacgcgcgaccaggaacacacaacccc

SEQ ID NO: 13955 - DNA, 197 bp, Glycine max
gccgacacacacagtggtacattcagatatgtatgggtaggcacgacacctagtagacactaggaggggtgctaacgcttacatccaatcttgacccatccatacctaaccccgccataggaagtcagtgagaacttgagacgtgcctagacgagggactgcctgccaatcatggtatttcagggattcaaaaccac

SEQ ID NO: 13956 - DNA, 442 bp, Glycine max
  unsure (1)..(442): unsure at all n locations
tcagaaaactatagaggataatgccacgacagccgtctttatacagtctgggaagcgaaaccagtgctacagcccgcaataaacttgggccaagacagaagcacgacggtgttcggtcggaggtatagtcctcaagcctacccttatggtttgccttcggacttcactccccgtaccgctctggacgaattgagccaagcccttaccttcgaggggaaactccctccttatgccgactatcctctgcaagaggatgatgaaggagaggcccatctatgccccctacttcccctcaaagatccggccccncatgaatngccccaaccaaacatagtccgccatgtcccgtcttcacccgcacccgttaaagaatccattccctttgcataagataagggacagattgatttacttgaagagaggctgagagcggtagaagttc

SEQ ID NO: 13957 - DNA, 396 bp, Glycine max
agcttgtcatcgtgaggcatcaggtgtgcttttaaatgaatagatgtgggtaggatagaataccctgaattggtaaagaaaaaatcataaactcatacattctaggcagacaaggcaagtcagttcctaacactattttattttgattttatcttttatctaaatcttttatctttcttatcttttatcttttcctttatcttctaattttatcttttcttatcttctatctttttctatttttttttattttaaatttattatctcttgcttgtaaattgggtttgcattaatctaagtacaaacaaagtccctgtggattcaacactcggacttccgagaactttactacttgtgacgatttggtacacttgccagtgagttaacaagtttttg

SEQ ID NO: 13958 - DNA, 484 bp, Glycine max
ttgagcacctgtgatgtgacaattcacaagtcagaattttatatttaagagagaatataacattcagaaatttatctcctaaaaattcaacagcaggaagaccaccacatattgtactgtattctgcaatcaaatggaataagaaaaatattccaacagaaagaaatgttggaccaatggcatgtaaagaaagttcttatataatgatcatctctacagagatgctgaacaggatcacacaacaccaaataatgaatttcgcatggaatcacaatattacatagtcaaatgttcagcaaaagtggacctgatttatttatttttctttatgtttctagagaaggaaggactagttgcaccaaaatgggggaatgggaaatgtggatgtatgggaccagtgaccaccacataaccctagctcctaataaagaacatgtgatatttcagctacaatcattacacctgacttatgttgtaatcttct

SEQ ID NO: 13959 - DNA, 244 bp, Glycine max
gcaatacagatgatacaccttgatttaacatacagtcatctcattcagcgaagcaccctgccaacaaagaattccatactgcgaccgctcgagatatggatgtcattctcacacttatgtggttaactattataggcaatggatgacaagttactattctttagtagtacattgtaattcattgagtgagtcataggtccttgtttgagatcgaatacaacgactaataccgaccatttgaatt

SEQ ID NO: 13960 - DNA, 370 bp, Glycine max
agcttgatctcgattatttcgaagttctttaacaagctctgaacaatatacttgcccttcatttaactgtctctgggcttggcggccacgcacaacaaagtactttcgacacctactatacgttgatttgaccaatgctgttatgggaatgatgcgacaatccttcaaagccttattgatacattctgagaggtgggctgtcatgtggccatatcgacgtgcttctctatcataagccatcatccattgctcctttgaaatgcgatcaatccatgtagctatggctgaactcaattcacgaaatttttctaaattttgatcaaaaatgcgcttgcaaggagtgctagctgcataacatcatatatcaata

SEQ ID NO: 13961 - DNA, 259 bp, Glycine max
  unsure (1)..(259): unsure at all n locations
tgttgaaattgccatggttggatgagttagacatacccattctgttntanggtnttgtgatgatgtttgtgatgtttgtatgttgaaattgcccatggaaaactgttagagatgaaatgtatagttaacctagggttggaaactgagaatgtggtgttatgagtggaaaaagagtgaggctttgagagttggaaggttaagtctgaattctgtggtaaatggaggttaaagtgagttaatactagcttgaaatgtcatt

SEQ ID NO: 13962 - DNA, 98 bp, Glycine max
ttctaaactctatacaagaatgaatctcttataccacttgttagacaaatggcctcagatatcttaaaaaagcgggggggctctttcccttacctatt

SEQ ID NO: 13963 - DNA, 435 bp, Glycine max
  unsure (1)..(435): unsure at all n locations
ntgatctatntaatgaagaaagaaaaatgctggaccagaatgtttgtttacaggtgaagggagttgatgagaaggttctaaaggagtgaaccaagattgatccaggataacaaagaactatgcgtcaagctaatgatgttaaatgtgcgcttactgggaggcaacccatccctttttaattntgtttttcttgcattctagttcagtaagattgcttgtgatcgtgtgttttcagcatgtttagtattgaaaaaggggggttcataagttttgtgaagagatggacaaaaaaataacttagaaaattttatgtggtccatgtgctaagcgcaacccttgcactaagcgccatttccctcacgcgctatgcgagttngttgtcgcgctaagcgccttgacccctgacattggctggatgggccgctaacaaggctt

SEQ ID NO: 13964 - DNA, 567 bp, Glycine max
  unsure (1)..(567): unsure at all n locations
cacacacacctcccaccactnactattcgtactccacatctgtttanataccacacacacncacnccgcggggnnancacagnntttgacctcgtcgnnacgccgnannactanaganagacngcctgcangcangcaagcancaaaaaggcgcccanaggatattttcttacgcaacagaacncacccaatgagtcagataccatcgatggaacaacagagaatcctgccaccccagctcatattcccgaattgctaagcgaaacccaacaccattctctagtacagcaacatctcgcaaaacacagagccctccctcctccatatgtaaacccagcagatgccaaatatcaccccttatagacgtaccaacccgcacacccttattccatataaaaacaaaacttggagcaagggagaaagacaattctgccttatattactaagacacaaattacctctacacccaacaaatacatacccagctcacacacaaaatcattgtgaaccaccgaaatgcatttgcaataaacgagggcagaagatttccataacttactcgactcg

SEQ ID NO: 13965 - DNA, 382 bp, Glycine max
  unsure (1)..(382): unsure at all n locations
cttctacattgtagtgatgtcaaagcccgtagttagctattatttaggtctacaactttgatgaagacaactattcctaattctatctttntactacttgttntggtgtccaatgtcgatgaacaatgtcaggaaagtcaatgtgatattcacatgaaagcatcaattaacacatccaacaatagatcacttaattaaatttaaagtatatcaaagagagaaaacaccaaacccaaatcatcaattcatggcagaaattaaagtatttttgggaatttacatctcatccaagaacttataaacacaaacctaagatcatacaatctacccctgacatattgtcattcatgcaaaggaagaaaaaaagggaacccattcccct

SEQ ID NO: 13966 - DNA, 435 bp, Glycine max
agctttgagtgtggttgataacgagaatattttatttatttcgatagccaattttgactaaaaatgattacaatttcttcattctattgttaattctaatgaaataatgaagaaattaatatctttgtaattttttatcaacagaagttgaaagaagaagattccaaatgttttggaggaaaattgatgcaaaaactggaatgtagctctttcttattatctatttaatgcaatcttgtttctatttctctttatgtgcctaatggtttgatatggtctggtcatttatatagcatgtaggggattatgcaataaaaaatagttattttctaaagaactgaaaaatggtatctaaatgaaatcattcctagaaatacattgatattcatttaacgcatttcatgcatctatattcgtaacgcgatttattatttt

SEQ ID NO: 13967 - DNA, 379 bp, Glycine max
atttaagatgacactatttgatataattatataattgaaagctatcaagtgacactctcgctcattctcgaattaaaattaaacacatgttatgttatggaactaaaaaatgttttttagaagagtgattctttaaagaaacagatattgcttttttttaggggtagatattgcatcttacaaaaatagaaaactgaatttaaaagaacaatttatataaatacataaaaaaactaaaaactgcctaattcatttttaaaaaaaaaaaatattttctctaaataaacttaaacaaacgggtctgtatcaagccacaaaccaaaatgagaatcaatgttggacgtaataatttaagcatgtgcagttcacaattcacact

SEQ ID NO: 13968 - DNA, 153 bp, Glycine max
  unsure (1)..(153): unsure at all n locations
agcttgattgtgaacctcattaccttatttgattccttattcacacgatgtacattgctctaacaaaatttcttgaattatatttgttggacaagtgatctcagaaattttaagaagcggggggggggggggctctttnttctccttctcttc

SEQ ID NO: 13969 - DNA, 394 bp, Glycine max
  unsure (1)..(394): unsure at all n locations
ctcagcttgtgtgagcttcatggaaatgagggaggaagaatactcttgagggagagagaaagctgtctgaaaaaaatgagggctgagtgaagagagagaaaagctctttggttttaaataaaaggatctcctttttttctattattttattcaagctctgccacatgtccctatttgattggagcaaaaagggcccactttctctttttgactgtgacccatactcagtcacaaaagtgagaaaaatctgacctttgaaacgctaaaatcctgcctcggtttgcgtgctgtttctctgattccagattctcgcgtttctctgcgtccgccggngccagttttcgaaagcaagcactatatatatcaaaacgcacagaataaaaccccgagcgtg

SEQ ID NO: 13970 - DNA, 425 bp, Glycine max
agctatgagagatatactgccccatgtatttcatcaacagtgggaataagaaagccatctttgattgtgatggcattcaaggccctgtaatctgtgcaaaatctccaagtgccatccttcttcttgacaagaatgattggagatgaaaatgggctcgtgctaggggcaataatcccttccttgagcatgtcagctatcattacttcaatctgatccttccggctgtgaggatacctatatggcttgacttttactgagccaacaccttcaaccaatgggattgaatgattgcgaattttgctagggggtaatcctgatggcacatcaaatactgttctataagtgtaaagtatcatggccagttctagttccatatcaaccgggatatctaataattgatcctgaggaccatccaaccttgagta

SEQ ID NO: 13971 - DNA, 485 bp, Glycine max
ctcagcttataaggccttgtatggtctgaaacatgctcccagagcttgtaacaagagaatagacacctttctcttgcaaattggattcatgagatgcactactgaatatggtgtgtatgttaaaggagaaagtctttcagataccctcatagtatgtttatatgtggatgatttactgataacaggaaaggattgcagtgctatctcgacattcaggcaagtgatgaagtctgagttcgaaatgtcagatcttggagaattatcatattttctgggcatagagttcaagaggacaaaggctggaatttttatgcaccaaagcaaatacacaattgatgtcctaaagaggtttcagatgcttgactgcaactcagtttcaactcctgttgaaactagtgctgtgctggatcaatctgagcttgataaattggtggataagactatcgtcacacaaatgggtggctgtttgatgtatatatgcaata

SEQ ID NO: 13972 - DNA, 365 bp, Glycine max
agcttagaatgtggtaggagaggttttattcttgggaaatgttgatcttatgtacctctaaggtgtatagtaacaaggaaaacactcttaaatcaaggttcaaacattacctaactcatattaatgcaagcactgtctatacgcaaatttgacttacaccttgacattctttacatgctttacaataataattgtaacatattctttgagattttaaatattatgggacaacattggttggaaagacatcatttaaaactagacaactgtaaaatgtctaggtctccttcatccatgtttgtatacacaaatcgagtaaagacgacaataatacgtcctataatctagcaagcacttagaattga

SEQ ID NO: 13973 - DNA, 366 bp, Glycine max
ctataaaactcagctttcctatgacatatgcattactgtgagagttttttattgtattgagactgccaaagagagcaaagaaagatatgtggggctcttgtaaaaatgaccctcataaaatacgatttggtttggtgttggtgacaactacccaacatttgaacatgggtactgactcagttggcttatatgtgccaccatacattagatgtgactttacaaaaattgatggaatgtgctcatctttctttgtgggtggcgctacgccaaatggcactaatgcctaactatttgttgctctgctttatacattatctttctaatcatgttttgaaatctatggtctgcagtcgaatacttttataa

SEQ ID NO: 13974 - DNA, 429 bp, Glycine max
agcttcagtaaaggctcctaatggaatttgtctcatgcaacagaattcattcaatgattcagataccattgatgtaacaacagagaatcttgttatttcaagcttatattcatgatttgctaagcgaaattcaacaccattttttagtacagtaacattttgcaaaatatagagctttccttcttccatatttaaactcagcagattccaaatatcttctcttatagatgtttcaatttgttcacctttattccatataaaaataaaacttggtgtaaggtagaaagacaattttgtcttatattaattaagacacaaataacctatacacacaaaaaattcatacccagctatcaaacaaaatcattttgaacctcctaattgcatttccattaacgtggtcaatggttttccatagcttactgactt

SEQ ID NO: 13975 - DNA, 415 bp, Glycine max
  unsure (1)..(415): unsure at all n locations
taagaatattntcctttattatatagattttatgaattttcatttatataattntaattaagttaacttcaaaagataagattgagaatctccttaattagttntgaaattagataagatttataaaagatgtaaattggtttagtagataaaattctagatttttgtaagtgccttattaataattaataattgattatctaatcgataataaatgaatttatcactgtatgtgggcaatcaattacaacaaaaagaattttaattgattattttgtgggataatcaattagtggagttggcaattgattgttcattctatattatcccaaaactagttntccataaatattatcaaagagcacttaatcaatcctaattgtacattntataaatagatntatcaatgtttaac

SEQ ID NO: 13976 - DNA, 277 bp, Glycine max
gctcgcacggatttctctgtcatgccgttaatgttgaacttagtgaggttaagttcaaccgagtatcaaagcatttatttatgaacgggtgtatacggaagcaacttactaaagcagtggatgacaatagacgcaatacctggcaagtacccatcaagcttatctacatgaacgagccacagtgtctatatcttatcacgggccaagcggtattgattgtattcgatcatatataaaacaggaaccggagaatgcgcttatagcgtaattttcattg

SEQ ID NO: 13977 - DNA, 467 bp, Glycine max
  unsure (1)..(467): unsure at all n locations
ggcttgcagtctttggtccatgccccaacacacttatctctttggaataaaacaccatcagggatccacaagtcaaagctattgcagaatgcagaacacatattatgaaaaagcaagaagaaccacccattgctccaaaaccactttgaaaagtctttagttcttacttttcaacactcaattaggcttcttccccagtaaaggcagttgaaatttcaagctctagttactttaatttactcaccagtagtataataatataataataacactagtaacaatagaaccaaacctgtggcatgaccagtcctgattctagtttgaagcatgatacccttttgatcatcaccctttaggatttcaaccactaacaaatcagaagctgcaatagatcatggcttagtctactcaacctttcaaacatggtagcaaaagggtgcaganattcaccttgaccataacttact

SEQ ID NO: 13978 - DNA, 399 bp, Glycine max
tgcatgctgctgcttgcaacaccacaccttattgtgtaccattttcacaccacgtgcatagctctaacgcctgatctctattcctattagttgcacgagtgatctctgtagtcttattaacccgggggtgtgggcgatgcatctttctaggactctttccaagttgttgaggcatgacatgaacgaatctccaaatatagaaaaatcatcaataaatacctctatgcatgttaataccatgtcaaaaaaagatggcattcatacacctttggaatgtggatggtgcattgaaaagtccaaggggaattctccgataggaaaaagactccgaatgggcaagtgaaggttgttttctcttgatcctctcgattaataagaatttgattataccctgagtat

SEQ ID NO: 13979 - DNA, 420 bp, Glycine max
  unsure (1)..(420): unsure at all n locations
taatcagttcanaactaagatattgttgaactggtaatcttttaacaggtcctgtaattgattactagagagaaaatgaacatggccttttgaaattntgaactggtggaataacaacacanatttatttgaattatgatatgtgtaatcgatgaccagaatactataatcgattaccagcaaagacattttagaaaaactctgagaagtcatgactctttagaaatataactatgtaatcgataaccaaaatcctgtaattgattatcagtgaaaaagtttcaaaaaatgttttgaaaagacacatctcttctaactgtttttcaacaggcacaatgagcctatatatatgtgtgtctttacttcgaanaagagagagagagagagattntctaagagaacttaattgtcaaattctct

SEQ ID NO: 13980 - DNA, 269 bp, Glycine max
aagcttctccccatttctattttaggttgagaagcgaagtgacaaacggttcaatcccttatgcacttctctgtctttctaatgtggttataaaaacctgctccgagaagaaaatcctagccgaggcgcctccgtaacgtttcgtaacgtttctgtgagtgattatctcgaaaggttctaccggtcttcgacgctctttattcggtcttcatcgatcttcgggcttcaacaggtaagcacctcgaattaagctcttccattcattctat

SEQ ID NO: 13981 - DNA, 461 bp, Glycine max
  unsure (1)..(461): unsure at all n locations
ctttaagatgtgctcgttggtataaacaacatctatatattggtagtagttcatgctcacgtaaccacaagctgcaataatgtgtgaacatggatagtgaagcgctgaataccttccgcattgacaatgatgaccattcaagttaactgcccacttttgtctgccacgttgcgttatagggttggagctctcctctacttcaaaccttgtggagtggatatcatacacgcgaacgatgtgcgtacaagcttgttcttgatttttcctcagttctttaacaagctttgaacaatatacttgtccttcatttaattgtctttgggcttggcgaccacgctcaacaaagtacttttgacacctactgtacgttgatttcaccaatgctgttatgggaatgttgcgacaatcctttnaaaccttatngatacattatgagagggtggttgtcatgtggtcatatc

SEQ ID NO: 13982 - DNA, 245 bp, Glycine max
agcttgtagaaccaagatcagtttatggtttcaaaccaacacaccattttattatcttaggccaaacttcttcttctagagctccattaattaagagttagattcctgagaggtgcagacacacctgcaagctacccctgcaagccaactgctaatagaacattgatgactttgtgtacactaggttatagctgaagctgcacatgtcataaacatatatgaatgatgctgtgaccacagctttt

SEQ ID NO: 13983 - DNA, 404 bp, Glycine max
  unsure (1)..(404): unsure at all n locations
tattacgtgttgatgattatatgtatatcaattgttaatataaattagaaattaatagttcanataagaaaattaaattgaaggaaattaatatattaagattcaacgataaatactttcaatgcacttttagtttaattatttattaactctctttaattgaaaataatatagttcgatttaatatgtacatgttttgtgccatgtaaatattaatattgtgtgatgtttatatgattcatgagatgtgataacatgtttcattgagattataacattgtgattgaaaataaatataaatgtttgattaatacttgatgtgatattacttgtgttgtgacttatgaattgtgaattatacaataattcgactggtgtttactttgagaaaaatgtttatgtgc

SEQ ID NO: 13984 - DNA, 400 bp, Glycine max
agcttctggtgggacatcttgacttgctctcaatctgacattcaccacagattctgccttcttctattatcagattgcgaatgcctctaacagcaccttggtcaatgattatcttcatgcctcttaagtgcacatgtcctaatctttgatgccatattctgactttatcttctttggaggatagacatgtggaggagatactggtttcttgacgtgctcataggtaacagctgtactttgatctgctgcccttcattacaacttgactgttctcatttgctccaagcattctgactttgcgatgttacattcgtattcttcataagacatctgactgatgctgacctagttcacataacttcacctcttcctcattcactattcactttttaattatcaa

SEQ ID NO: 13985 - DNA, 384 bp, Glycine max
tcccgtatccgtacttggaaggatctgattaccgcctttttaacgcagtatcagtacaattctgatatggctccggaccgtactcaactgcagaatatgttcaagacagagggtgaaacctttaaagaatatgcgcagcgatggagggatttggcggcacaagtagctcctcccatggttgagagagagatgatcaccatgatggtagacactctgccagtgttctactatgagaagctagtgggttacatgccgtccagctctgcggatctggtgtatgccggtgaaagaatagaggaggtattgtaactgtgatacaacaggcacaatgagcctatatatatgtgcgcctttactattcaaaacacagagacagagagattt

SEQ ID NO: 13986 - DNA, 311 bp, Glycine max
agcttgcctcaaagaggtccaggaaggattatgcggcctattgaactagttccgctcctgagtatgacagtcaccgttttatgagcgcggtacaccagcagcgcttcgaggccatcaagggatggtcgtttctccgggagcgacgcgtccagctcagggacgacgagtatactgatttccaggaggaaatagggcgtcggcggtggacatcactggttactcccatggccaagttcgatccacaaatattccttgagttttatgccaatgctaggccaacagagggcgcgcgtgacatgaagtcatgggta

SEQ ID NO: 13987 - DNA, 379 bp, Glycine max
  unsure (1)..(379): unsure at all n locations
ntgaaaaatgttgtttttcaccttctcgctaagccaatctgctggcttatggagcgtccgctaagcgcaacattcatgggctaaacgcgaggaagactctggaagaagatgagttgtacaggttcgctaagcgcaccacttcatctcactaagcgcaccgcttcagttcatccgctaagtgagaaaggcacttgctaagccaaaattcactaatgtgcgctaagcggtccataattgcgctaagcgcatgagcacgaacaaggccatctatttaagcctgaaattagattttagaggaagagtttggactgggattcagagctctgcatgtctagagtttctagagagagaaaggtccaagttctagaaaagtttgaga

SEQ ID NO: 13988 - DNA, 429 bp, Glycine max
agcttgactcatccatgcctttgaaatctttctctctgagtgaaaacacacgcctatttaccccaccgtagaatccaccaccatctccaccaccatccattagtccaccctttttcacaccacctttgagatcatttccactttcataactatcaaacaagaaatccctcctctctactccatcaaaaccactccttcttggctcagcttcactgtatccacttcttcttccagattccaacatattaacaccagaactcctagctgcagaaattgagcttctagcacctgacaacactgaatcaccaccatcctcagatccaaatagccctccacccctgaagctgcatagtgaccttgacctagacacccccccttgatgatccaccacccacatctctctattcctctcgtcaaacccaacaacac

SEQ ID NO: 13989 - DNA, 471 bp, Glycine max
  unsure (1)..(471): unsure at all n locations
tctacttatgtggcagggcgggcttccttcaccttcttgtctccaacgcgaactntgaccattgttcttccttcccgcgatgcttcttttcatgtccgcctgagtgggcttatagcctaaaccatacttcccacgatttccttgggtatttatcaggctagttatgccgccgttgttttttcccaaacccatcccgggttcataaccgttccccaacataactcgggccatcattaccgctgcatcggacagacaaggctgcccaaagagggagtccacggaggaaatgctgaccacctcaaaagactggaaagcagtttctaacgattcttctgcggcttccacataaggcatggaggatgggcagcttaccaagatatcttcctcgcctgacacgatgaccaagtgcccctccacttacgaattcagctnttggtggagtgtagaaggcacaactcccactgagtggat

SEQ ID NO: 13990 - DNA, 356 bp, Glycine max
agctgttaaatgggtgaaaggctcacattctctttcttctacatcacatccaaactggcccaaattaataaaaacgccgtctggactcaaagaaagacatataggcctgatacaattattatacaacctatgtcctaatgtcacatcctatcatatgcgaggccgttcccgtgtcctctagcatgacgatgtctatacccgtccacctattcatctgctaccccgtatcacaagtgcaaaaacgtcgcaagagccaatcacttcaacacacagggtgtgagttatcacattcctacctaatatagatacaggacaagttggtatgcatgttatataaatgcgataccgcttgctta

SEQ ID NO: 13991 - DNA, 451 bp, Glycine max
  unsure (1)..(451): unsure at all n locations
tggtatctaatgagagtatgcaagtttcatcctaagctcttcttgaaaaggatcgtaatgttgagattgtgatagataagatgatatcttctcttgcaacagttgttactcgagagcaagtattggatgattctattagtgggaaaatagtttatattgaggaaggcactatccatttaattgaaaagtataatcagattctttctgaaatttatcaacttgggcaatctttctctgaggtaggcttggatactaacgagcatgaatacgggaacatactcgctgatgctcgtggtgggttactggagctcaaaaaaaaggaaacagaattggttgaaaaactggctcatttataagatgagaatcagaaaatgggtgatgagcttgacaagggataggtgatgataaggacattaaatactgaacttggaaatctganaatagaactcga

SEQ ID NO: 13992 - DNA, 346 bp, Glycine max
  unsure (1)..(346): unsure at all n locations
agctttgagccaattgaaacgacaatactttttactcggatgccngattgagtcccggaatatatcgaaacagtcgaaattgagtgatggagctctgagccagtcctaacgacaataactgcctcactcggatgtctgattgaatcccgatctattccgagacgctttaatatgattgtggaagctctgagccaatctgtacgtaattatctttctactcggatgtctgattgagaccctgaatataatgatactctctaggctgaatcgtgaagctctgagccaattcaactacaataacttttgactcggatgtgtgatgagtctcgtcttatataaagacgcc

SEQ ID NO: 13993 - DNA, 419 bp, Glycine max
  unsure (1)..(419): unsure at all n locations
actttcgagcctcacgatatattacgggactctttcaaacatccgagaaaaaagttattatcgtttgaatntgctcagaggttcaacattcaatttcgagcgtctcgatatgttatgggactcaatcagatatccgagtaaaaagttattgtcgtctgaattggctcagagcttcaacattcaatttcgagcgtctcgatatatgacgggactcaatcagacatccgagtaaaaagttattgtcgtttcaattggctcagaggttcaacattcaatttcgagcgtctcgctatattacgggactcaatcagacatacgagtaaaaagatattgtcgcttgaataggctcanagcttcaacattcaattttgagggtctcgatatattacgggactcaatcagacatccgagtaaaacgt

SEQ ID NO: 13994 - DNA, 391 bp, Glycine max
agcttgttgaaatatctttgacttgatttgttaaatctaaaacctatattcaattgttggattatgcttaatgagttttgtatatttgacatgtgaatcaaaattctaatatatactttagattattattattatattatatctagtataagatatggcgattgcaatgaagtaaaaataatatatgttgatcaccatatgatattggatttggtgtacatgtgatgtattgagatatatatttgtttattttatattggatatagttgtagatgatttttttccacatattgaaaggttatacaaatatagattaaatatgtgaattataggatgttaacgtaatgtttattagatgtaacatgttttgatatatttgaagatgaaacta

SEQ ID NO: 13995 - DNA, 458 bp, Glycine max
  unsure (1)..(458): unsure at all n locations
tgcacagataacgaatctattttataagaatccccatgatcataggaacaattaggtctagtccatgaaacccaaggacttcatagttttaatctgcaagctcacggactagcatgtgaatccttaactattgtgttgtgaggaaacactaacaaaggagaggactcttcagttcacttactcaaataaataagccctaactcacactcgtgcctcccctcctttaatgcttccttgcgtcgtcctccttcaccctttaagtaatcgttgaagatagttgtaatgcctctgattattgatgtcttgacgactcacactctatcactcttcaaatggtggcatttccctccacttctcattggtcagtatcctccaccggtcagaatccttcgtaggtagtncattttgagacatcgacaactagttctgacactacttgactgctctcaatattattg

SEQ ID NO: 13996 - DNA, 390 bp, Glycine max
agcttattacacacctttgcttggttttattagcagtccccatcctccttctttcatattagcataaataagaaacattatatacaactacgagcgatttcactctctattaaacaacaagagaagctgagttccaacaatagtagcttcatctgtatggtcaccccggatacatttccataatcatcatcatcataggaataggattgatgttctagaagctgttcctcgatattaacatttaccaatccatttctttcataagttgcgctaatatcatctcttgttgtagagcatattggaacaagcacccaataggaatgttactggtagacacatcaatagtcttagtccaagaagacagcactttgtattcttgcatcacccata

SEQ ID NO: 13997 - DNA, 454 bp, Glycine max
  unsure (1)..(454): unsure at all n locations
aaagacaatctggacatttttctttgaaccagaaaagggaatgtggttggattggagtgcatgtangagagtaagggatgctgggtgaccatatcgttggtgccataatttgatggatgaattggaacaaatgaaggaggcagatgggttgggtgcagttgggttaaacttgtacacattgtcttcattcaatccttgcagaagaagctccctcgttcataggtcctttaccttcattcaatccttgcagaagaagctccctcgttcataggtcctttacctcaaaatgcctaaganaaaattcaatggaaactatgttagtttggcacagatgatagacggatattcatatttgggtgacatttggaacataaagaatatttganagccttaaaggagaaccattagtgggaatattggtggagccaatataagtaatangaagttgattacc

SEQ ID NO: 13998 - DNA, 403 bp, Glycine max
  unsure (1)..(403): unsure at all n locations
tggtaagaagccattaatgatgagatggattctttagaatctaacaagacatggcatttagtagacttgcctcctggttgcaaaccaattggttgtaaatggatcttgaaaaagaaactaaaacctgatggtactgtggataaatacaaagctcgccttgtagccaagggttttaggcaaatagagaatgtggatctcttcgacacctttttaccagtcactaaaataacatctattcgggtgctaatatttgttgctgatatccacagattaccggcacaccgagtggatgataaacctgcttttttaaagggtgaattggacaaggatctatatccgcaacatcgaggaggctgcgcgactattgcactatatctataggccaacacaaaaacatttgttn

SEQ ID NO: 13999 - DNA, 480 bp, Glycine max
  unsure (1)..(480): unsure at all n locations
ctcagcttaggaggaatacattcgcggtacaaatctgaaatgcatatcacattccttcgtttgttaggtttgaagtacccggctttttatgaaataaaagaaagtttttgtgtcaaaaaaatcatttaatatttctcanaaaagcacttctttgttgaattgttaactagtacgacacctgtgtggaagcatgggctagttgcaaattttaccttcttggtataattgtatccattatttttaattttgtagaattagaagtatataatgcaattagaagtaaatttaaccattttggtataggcacttgtacacataatggaattctcaaatttagaatttaaatcaaccaaatgtaccaatgacaacatgcaaaggataaaanaaattaattacctccaaaacaaccacagacattcaaagcatcccaagcatgcagttaggttagtatattaaattactacaattgcaaggaataat

SEQ ID NO: 14000 - DNA, 414 bp, Glycine max
agctttcccgtcggcaacaatggcggtattcacgtcataacagactccgtctgtaataagttttaaaagaaaccctgtttggtaaattgtttctaaaacaagccctgtgaagtaaatctgcccatttttgtcattaattaaagtttcatcatatcgaagcctttaaattatagctaggttaactaggccaaagcctgtctctagtattattcttcacaaatttcaatcatgcaaacatgaggagaatgctctttcctcggcagtttcatatagctcaaaagcttaaaagtctcaagttcactaaggataaagttggtttgtttgattgagtcgaccaaaagtgcacccaaagaaaagcatgtttatattttgtatgctgtttactcaacaaaggggtgtattaactatatgaag

SEQ ID NO: 14001 - DNA, 482 bp, Glycine max
  unsure (1)..(482): unsure at all n locations
ctcgggtcttcgtatgaaaggccagcaactactaacattcacttcatgcctgcattcccaaaaaaaaaaatgttacttaactgataacaatataagaaacaaattatatattatgttatattatatatatatatatatatatatatatatatatatatatatatatatatatatatatatatatacatgaaaaatactaatgatattctttttctaatacttattttgtgggtgagtcaaatttattaaaaatcactaatttagttatttaaaagtaagatccactaaaattgtttttttttactaaatttgaactagagaaaatgttatgaagaaaacgtcaactatgaagggatatcgatataaggtgtgtgtggatagaaggttataaacgtatgtttacataaatatcaccatccttgcttttactctcaatntacttttatctatgngaattatatagaaacacacacattgcattn

SEQ ID NO: 14002 - DNA, 173 bp, Glycine max
actaccggattatgctgagatgcatggaatagacgttgagcgcaggccgccggtgtataccacactcatgcgcacgtcggatgtacgactttgacccctttcgtctgtgacgactggcatcgattgttgtagtctctgaggccctccaacagaatttacttgttactcctatg

SEQ ID NO: 14003 - DNA, 453 bp, Glycine max
  unsure (1)..(453): unsure at all n locations
tggaatcgcgttttgggacctataatgaatctcctatgctgtccctacatatataagaacaggccaccatcctaattttacaacaacatattcatatatcattgaggcatttgacctgacacttggtgggcgctcgtctatacataaattactacacaatgggggcaagagcggcatgccccattgcttcagaagacaacatatgcctaatgccgtttgacacaaatactcaactcagcagatttatcatactagcaaaccagaactgccacacaaatatgagcacgttctcacaagttatagcacctatagatgaagaacatacaccactgggaagctcaatactcaacgattgtatacttacttgttgtagagagtataaacaccataatatgaaatgcatatgcgaccaanagtgactatgggggataaaacacacacttcgtatttctc

SEQ ID NO: 14004 - DNA, 598 bp, Glycine max
  unsure (1)..(598): unsure at all n locations
acccgccgcacancccncncntcnnttctcaaccaancaaaaatactctnnatnaagaaaaannnnnnnnaannnccaacgcannnnanananaaaacggactacgacctngtaggnacgtncnnnnnncnngnngaanccnagaggcgagccgcaggcccgcaagccacaagacaagaattattatggtactggagcacgcccaaatacacccagggaagcgggaccggcgctacaaaccgcgaaaaacgtgggccgagacagaaacacgacggggttcaatcggaggcagaagccgcaaacccagccgaaggacttgcctccggactgcactccccggactgcggcaaacgagaggagccaagcccccacctgagagggacaactcctttcacaagccgactggacgctacaagaagaagaggagggaaatgcccatataggccctcgacttaccctcaaggatccggcaccccatgagatgccccaaccaaacatagtccgncacgttccggcttcattcgaacccataaaggaactcgctcccattgcaaaagacaaggggagagaatgatttacttcgaagagagggctgaag

SEQ ID NO: 14005 - DNA, 290 bp, Glycine max
  unsure (1)..(290): unsure at all n locations
ggggatttctaatgaatagatgatgtaattaatttcatatctaactgattntgtttcttgtgttcaatgcttcttacagtgcttaaattttttatgctcttggtctgatcaaccatttgtgtgcctagttaggagattttaacattgggcaatgtattgttgccttataacatgaatgaagtagaattgaaacttagtcttacaacagggatctgcagattaagttttggttttaagtatgctgttacaataattgtgtttggtcgaagtctagtgcaacaagatggatc

SEQ ID NO: 14006 - DNA, 474 bp, Glycine max
  unsure (1)..(474): unsure at all n locations
gtgatacccttgagaccnttgaannnctgagatacctagagccggcctgcacgcatgcaagctatatgaaaggtgcttgctgtcgagattcggcatcaatagtgcagactcttcatgacaaaaactatctgcatcaagatgcttctgaaaaaccttttgcaaaaactgatgaggacgtggggtatactactaaaacatctcgaagaactattctctgctatgatgaagcatcctcacattgttgtcatcgataacgaggaaaataagacggttgatctgatcgcctcccttcatccctcctatgagaatagagtgagtactgtgaaagtatgcacggacgttctgacactcgataaggtgaagcctaggctttaaaatagagagctataactgagggttctaggagtggagataaccccttatgcnggggattcgataactagttcccgaaagtggagaaaagaagaagaatac

SEQ ID NO: 14007 - DNA, 353 bp, Glycine max
tgtatagttccccaatttatggttattctgtagtgatttttgtcaataaatcttgatttacggctaacactgtctctagaacatttacattggatgtaatgatgaaatctgtgcatattcaagtgaaaaagaggctaagttgtgaattaaaaaaagtagcaattgtgctaagctcaacagtcgggctaagcgcagcttcagcgcacttatgctaagcgcagtatgtgcacgctaagcgtagtatgtgccttcaactacgctaagcgcgagattggcgctaagctcaatttcacttactcacgctaagcgcgaatgtggcgctaagcagagcgtcgcgatttcagagcttattt

SEQ ID NO: 14008 - DNA, 97 bp, Glycine max
tcatcttggggtgaagctccttcttccatggcttattccctagtggatggcgccttctctcacctcttctcctttgtcttctgctgcatctccatgg

SEQ ID NO: 14009 - DNA, 199 bp, Glycine max
aacagcagcctacggcaatattttttgcattctaacttgcattttgacgcgtcttattgcttgcttaccagtaaatattgctattcttcagaatgttcgtttccattatgaagctttattgttgtaattgcttggttctgcgaaacttttgaagcaattcatatgtgaattcatgtttgatatgttgaattattgggtt

SEQ ID NO: 14010 - DNA, 247 bp, Glycine max
tcgattacacgcccaataagccttctggtaatcgattacaggatgttgtaatcgactacaggctgcctgttcatgtgtaatcaattacactggatggtaatcgattaccagagcctatcctaggctagtttctaagagaatatctatatttatgctcacatacatcctatatgacttaatgtcactactaatacactaaattcaatcattcacttactatatacacaagaaatcataaattctatca

SEQ ID NO: 14011 - DNA, 648 bp, Glycine max
  unsure (1)..(648): unsure at all n locations
tgatgcgacatgtgactatcactactnagcttcatcanatatanangaatatggtgtgtatannaatggtacatgatangctattcncacattcttaatgcaatattattcgtccggacgtacaagacactatnnttaanaatctgtaatatcaacccttanaaagtattatatattattttcactatcactatcaaggccactggcattggcgtggcatgttcacttgcttgagggcataaaccaagttcatgcactcggaatangaagagagcaattgacgttatgagccatctaattcttctaacagaatcggtgaagggattcaacctcatcattgtttgaaatagttcagttcatgagtaaaccatatatgaaatccacgatgcatgaactanggcctcaccgcgatatttatgcatggggtgggaatatgtgtaccttccnacgacacatcactgatcatgacgtacatatacagatgtaataattgtctgatcgttccataaagangatagctatgtaagtaaagcgacanactattatccaagttatgaatcaatcatatatgtcattatactantacttgtctgtgcattatcgaccgcacggcacctgctaagatattggactgctgatgtgaccacn

SEQ ID NO: 14012 - DNA, 410 bp, Glycine max
  unsure (1)..(410): unsure at all n locations
gctgcgagctcttcccatctctccacttaatatgttgtgctataattaatcctttcataatctccacgtaaacaaaagtcgtacttccttttactnntttagccgtaataattcttcaacctttaatcatgccgaattaacttagcttgtaattccttcttgtgtagacgccaacttacattcattcccatgttataaatatntcttctccaataataaataaaacaaaaattaagaacattctttccaatcactgcacattcaactntcccatctataaattaccacgctacattggaaccctaattaagtatagccaaatccacaatctctaaagtctaagcacagagaagaatgatcccttcctcttctttctctttattcactctcacaatcctcttgtgttcttt

SEQ ID NO: 14013 - DNA, 187 bp, Glycine max
ataaaataacctatcttgctttgttaattattggggaattcatctatatgcatgtcttaatactgtgattatgtatccacatattatttgttgaccttataatacatatctattcatcggagtaaggaatactcaagcatatcctttgtaatgaggggatgacataaaagtaaacaaaaatctaatc

SEQ ID NO: 14014 - DNA, 282 bp, Glycine max
  unsure (1)..(282): unsure at all n locations
atcacatgtggtactaagtggcggtctngcgatggtgcacaacaagctntccacatccacaatgcgcgcataaacncaccatccnctgttgcccaccttcaactgagctcacgtactcccacgtagcccatctcctcgtttctctcaacaccgggtccncatcaatcctctcaagcttccacaacatccaagcaaaacaacgttcaaacagcacaagctatcacagccaagcataacagagcataggcagataactctgctcaacacatcaaccaaaatcac

SEQ ID NO: 14015 - DNA, 265 bp, Glycine max
  unsure (1)..(265): unsure at all n locations
tatctctaacaatctccccccttnntggtgtgatgatgccaaacatgaatacaactntgagtgccattggagagtctggagattggattggagactcgatccttagtattatcttgaagaattcttaacacttaagaagagattaattcatcatcatcgtctatgtcaatatataacaatctntatacaatatagtgttcaacatgctatgcaatgcattcaatatgcaatatgcaatagcggtagtgtatatcttcttctcccc

SEQ ID NO: 14016 - DNA, 551 bp, Glycine max
  unsure (1)..(551): unsure at all n locations
agtgagtgtccaggagatcttatattcagattaatgtcaggttcctcattcatgtcgatggacanatgcttcttgaanatcagcaccagcggacactttacagatntctctntaagggctanagcaacatgtaaccaaccacttgntattcaagctgggtaggaggacctaactttgtggtgcatctnttttgtatnnnttttgttnggnggggagggggggtacataactgtatggtatattagtgtctcaacgaatgatatatcccctcagctattctcgttactgaatattgtttgctcctaaataatactgtcggacncgcaattgatctatattaactcattgcctgtctaaaagtggacaatattactttacaggtggatacttttgggatacgtcacgttatgtgtgcatattcctgctaaacaatgggattgaggagcacaatattganctatatcgctggcgacatattggatgacttatcctgtctcacatggcgggacctccgcggtgtgtagaaacacatatctatctaagttttcttt

SEQ ID NO: 14017 - DNA, 157 bp, Glycine max
ttgtttactcaatgggccagaacctatgagtactttcttttcccccatgagaatattggagtctacttttttgtagaacattgctatatgtcttgaattcaaattttgtgtccaagaactattgatatatattgtgcagacactctatgaattgttc

SEQ ID NO: 14018 - DNA, 293 bp, Glycine max
  unsure (1)..(293): unsure at all n locations
attattctctgagagaatgtctagcaaggcataaaccttctttttgtgtggtgggattatgaacctatacaaaacttatttgatattgaacttatgatagaggcttatgaccttcttataagtactttttaacttaattcattaatcttcaaggaacaacttatcaaagttctctggtatacttcatagtcaagcttatgaaaaactcttataaatatgtgctaattaagctatcacccanagcatcctttgtctattagctatatgcttattttatccctgcttactcatga

SEQ ID NO: 14019 - DNA, 101 bp, Glycine max
  unsure (1)..(101): unsure at all n locations
agtatctacatagcccgccattgactactacatacacactcaattngtgtgcanatacgaccactaggtataaaacaatatgcaccacttgatctaattat

SEQ ID NO: 14020 - DNA, 353 bp, Glycine max
  unsure (1)..(353): unsure at all n locations
atttcaagggttgagaagtganaatgagaatggtgtanacttggagcanactctcatctcacacaagtctatatcatcaatctaaactcgctccaactggttgtatgacaaaaaccctaccgaatcacaanttgactcctcaatacccaattttaccctagaaatggctcttgttgtcactgtggtcactcatattcctcattngcacagtctaagctntctcataagtcctaaatgacatctcaaactaggaataactctctntaacctccagataccactaaatgcagatgtggccttccaactctcanagcctctctcttttttcactcataacaccacattctcacttt

SEQ ID NO: 14021 - DNA, 605 bp, Glycine max
  unsure (1)..(605): unsure at all n locations
tgattcctatgagtagccttganactcagcttggcaaatcaacacantactntaactcgatgtctatgagtccgtaatatatttgattcacaaattgannatagaagctctgagcagattcaatcaacaataactatntactcgtatgtctaattgtgtcccgtgatatatcgagacggtctgaaatcagaatagaagctctgagcanaatcaaaccataataacttttcactcgtatgtacgaatgaatctcgtcatatatcgagatgctcataattgataacgaangctctcgtaaatttctacgacaagtgactttactctgatgtttaatgagtcttgtatatatcgagacgctcganattggaacaaagcgctcagcaattcaacgacataactttactcgatgtcgattggtccgtatatatgagacgtcgaattcaaaagagatctgagaaataaacacatactnttactgatgtcgatgatccgaattatgagactcgattgtacgaagcttgaaaataacacatactctctcgtgtcgatgatcgtatatggacgccaatgacaaagttggaattcacaatactttatcgtgcgat

SEQ ID NO: 14022 - DNA, 230 bp, Glycine max
  unsure (1)..(230): unsure at all n locations
ccgtgtcagagacgccagtggcttcagtaatgagaaagcctccgctggaagttctctgggagtattagaggatggcatggngttgtgggacgttgtcgtaagacctctgtctggtcagcggtgccataacaactctgcaagcaaaattaatcagcaattgaaatctatggaaataggaaggaaaaaaagagatagagatacctatgggacagatagaatgtgcccatctt

SEQ ID NO: 14023 - DNA, 149 bp, Glycine max
  unsure (1)..(149): unsure at all n locations
tgacactcgcctatgatctatacatagggtcaacatgtngagctatataatcttctgtaacccgattacgaaccttcacagcggaaatattatgtgttgatacataacaaggaacatccttaactgtgatataatacaacacgatgatg

SEQ ID NO: 14024 - DNA, 107 bp, Glycine max
ctgcgcttaaggatcagaatagaagcattatcctgctgaaacatggtggttcttcaaacaaagataaagagtatgttgctatgtgatgcccttgtaacacactaaca

SEQ ID NO: 14025 - DNA, 81 bp, Glycine max
ctacactactctagagttctctaggacgttctataatattctacacttttctagaaagctctagaatgttctagaacctct

SEQ ID NO: 14026 - DNA, 615 bp, Glycine max
  unsure (1)..(615): unsure at all n locations
atgtacttgtcgatcttaagcacctgggctgcagctgccagtgctttccanagaagatggacctatatgagatcaacattgaagaaaatagcaacagacatattctttcgttnggccaaaacggatccagaggcaagaaggcttncncacacctcagtactgaaagaacagcaacaacatattcaacagaaggaaggcatataatgcccacaatctttggcctatactctctacttgattcattcataaccccttcactangcatgacagtttccaaggactcanngtgcctgtacagtccctcttcacagtngacactatcgttacctgcagcagaatacagtatgccacccattctgacacataanagattcaagcattntgcaaaacttctaaaagatattgaggaaatggaacacatattattntcttacacaagtaactatccatcatgccttatcacttattntataccatgtatagatccaaatatcatcagttttgcantantaatatctgtaggagctagctatcacttagtgcgctccctccacacattattttcatccagatcaacccagactattanngatgactatctctcggcangatgtg

SEQ ID NO: 14027 - DNA, 617 bp, Glycine max
  unsure (1)..(617): unsure at all n locations
tatgcactgtgccttncntctaagcttggatggacataagtggaacanataganatagacgatccagtggtggtggacggacatgantattataatanggttaactcgaaggctnnttgttacatgtcactacaagctaacactttcaattaacgctattaagtattcacatagggatatcatagaaataaataccatttatcctaacggactctactaagtcttanatacagacaaacagtgaatgtcacttttttgtattaattaaagcaatcatatntaatatgatgaagtagataattaagtctcgacaaacactagtaatactttctttaatatattacttttgatactttaattctaatgaatgatagtagctattaaaaaacatcaatcttgatgggttcaattcttctttatgtaaataagagagaaangattaatgttaatcaactatcgaatacatatattataatttaccatccataaaatattaataattagagatatctatatttctgatgttattcacagatgatactttaacttctctgaaaggaaagacacatattagccgcatgtacattgttttttaacatgaaattgctgccaaaact

SEQ ID NO: 14028 - DNA, 170 bp, Glycine max
caatatataaaaatagtgttgacagttttaaaaataaatgtctgaaaatgatttgatattagactacttgagaagtttatttgtgttgcttctcatcaattatgattaggttattagatcttctaccttataaactgcttttttattataagcgtttaaatggctcttat

SEQ ID NO: 14029 - DNA, 350 bp, Glycine max
cggacttcactctccgtgccgctccggaagatgtgagccaagcccctaccttcgaggggcaacttcctccttatgtgcgataccccctgcaagaagacgacgaagaagatacccatctaggcccgctgcttcccctcaaggatccatcctcccatgaattacctcaaccaaacatagtccgccatgtcccatcttcacccgcacccgtatctgttcccttcatagaagattagggaaagaatgatgcgcttgaagagaggctaaaagcagtagagggcctcggcaattacccgttctcgggattagcggacctatgtctcgtgcctaacatcgtcatcccttccaagttc

SEQ ID NO: 14030 - DNA, 579 bp, Glycine max
  unsure (1)..(579): unsure at all n locations
tatcgtgtgagcttaactcagctntctataatggcgtgatgttagttntgcaacgtaaaatgaacanaagaatttatgatgacccgaggtcgactgtatggtctangaagcataatattctagagagcnacatatctttggaacanagactganctaagagttattntccgaataccaaatgaaatggtggatcattgaccgatgaagaacatatttggaatattggtctacttgtgtaatccaaccttagtatacaatgcctaaactggatgcttgagtcccacctaactgtgccatgactatttacancgtgtcccaatcatcatgtacacgtgctcgtggaatgattgaaattaacccgagacgacgcttgcacacgaattgtttgctcaatatcaaatcggctgcacatgaaagacatgtgagaataacctaactacttgatcttgccatganagatctcatctttcctgagaaaggtagcgatctctcgaggaatgatacgatctatattgattccatcagatcgagganaatgaagaagaagaatgaagaggttcgtcagattataagtaaat

SEQ ID NO: 14031 - DNA, 333 bp, Glycine max
  unsure (1)..(333): unsure at all n locations
tctaagagaaggacaganacttcatcctctactctanaatgctntgagtgcaatcaacctggacatctgagggttgattgtcccatcttcaagaaaaagatggagaagcctgaanagaataatcttagtgaaaagaaatngaagaaagcatacatcacatgggatgaaaacgatatggaatcgtctgaagattcagaaaatgaagagataaatctctgccttatggctaacagttatgaaagtgatgaagaggtgtctntgaggaatgagtggtacatatatagcggatgctcaaaacatatgactggagatgcatcaaagtttacacatatc

SEQ ID NO: 14032 - DNA, 648 bp, Glycine max
  unsure (1)..(648): unsure at all n locations
tagacgtgtgaactatcatctcangctgtgtgatgantcacgctatntntncgtacatgctaacgcactgactcttatcgcatctctatgctatgtgctacatagactcacatgccatntaccagtgcatgtgactgcacaatgaacatatgcacgcaactgaaacattctataaatgccactaccagctagagacatatgtgtaactntctacaacgcatctgatcacgtaccactatgtgtcagccaaatgcatatgcttgtgttactataacagttaatatgtcaacactaaagaaggcaccaccgttattagtaacaatacacaaacattgatgcgcaacaaggtcatatcctctacacatataggtcgatatgcctancacgaaataactttgtgccgaacatctgatcacatctcncgttcatgtccggattgatgatgacagcactatgtcgcatgtatactgaggagatatgtctcgtccgcanacgataacactgaggcactatctatctacgagnttggagttgtatgcaaatgtgaacactatatctacttacactacatgatcacgtcatctgagacgatatataaacacagaatgcattgtagcaagactcgccggtgtgaatgtagacaattct

SEQ ID NO: 14033 - DNA, 556 bp, Glycine max
  unsure (1)..(556): unsure at all n locations
ntaagcctgcacgcgacctcttagtcacctcggcctgcagcctctgccaantgacttacctgaattaattcctttgatagcccctttgatcctatgttcttctttctntngtttgaagctcattacaagcccttaagtgaaaaccatgatctcaccttaaccttaanngaatttggagctttggaatttgtttgggaatatgtatggnggaggcggggggccnnnctcttctttnnnatnactnnctctctcctctctcttccctcccctcatntctnccttctttctctctccttatctcccttcctccttctncctctactccatttacttttatctcccttcttgtcctccccccttctttctcccttctctcctctctacttccctctacctctttccttctactcctcctacatctctcctccttcccctctccttcattatacctctcttcctctcctctctttcctctctctaacacctcactcccactctcccactttcctctctcnctttcctctctctccctcctcccttcctctccttccactcc

SEQ ID NO: 14034 - DNA, 661 bp, Glycine max
  unsure (1)..(661): unsure at all n locations
gatgcactgtgagccttcagactangctcgcgactataccttcgaccaacacnggctgtgtntctgtctangccacgattcaanggcggctgctgtatcngctttctgttcctaactgtactgganggcggtgccgtggctttatcctctatggttntctggagttntaacatgacctccgagatggaagctcattgtatctttaacgccgatagagtggccttcatctgttcctgcacgccctcttcattatcacatattctggatcgagtattatangggtgccttggtgttctcttacttatgatgaaatctctatagagataaacaatggtgagtatgccactcaaacatgagtatgcatatggatgatcggagcacttggtattcacgccacgtttctatataacttaatgagtcacgagcttctaatttattaaangaacgaagcgttcatatagccacggttatacatagggtgtacaagagaacctaacgatcctnattatatggccatcaatctatatgtgctgcngaatgatagccatgatctctcggggagacacactctgcatgctgtgcttggtacaacgctgagctgactcataagtaggcactatctcctagcgtttgtgacgcaatacctctttgtctgcgttcg

SEQ ID NO: 14035 - DNA, 159 bp, Glycine max
  unsure (1)..(159): unsure at all n locations
catcttcttattccnttaacaagtntcattatgagtcttggttatgttcacgctggtcttgtactnggtgatatatgatntcagttttggattatnttatataacatggcgagttgcagttatattattaatatatttggtagactaccaactaaatta

SEQ ID NO: 14036 - DNA, 454 bp, Glycine max
  unsure (1)..(454): unsure at all n locations
ntatgacacttttcgcanactatgatactaagctgtgatntgaacagtangaaataatacgctcatcaatnttccctacttgattgctcgtatatgcacagatntataggagacacctcatctagcactgtattaattgctatgcattatttgtatgtcaactactcacatggaaaattgtagaagtcatcaatttgcttttttgcgatttataaacaattataccgagcatttatgtaactatcctaaactattataaaataataatttataacattataatgatcttaatctcacacaatagcaaatgctatgataagagttttaaatttatcttatgaactaaatatatgaatgtctntattataataaaatattttcacagatactcacttgctatttctgtttctgagaaaacttttaaaattatatgatctacatggtccaacaagtn

SEQ ID NO: 14037 - DNA, 115 bp, Glycine max
  unsure (1)..(115): unsure at all n locations
acagcagtcactanggtccgaanagagtgtgatgagctgagagaggtcaacatgactatagtcgaagcattagagcgggatacanaaagggcccgataggaagaatggagcgaga

SEQ ID NO: 14038 - DNA, 567 bp, Glycine max
  unsure (1)..(567): unsure at all n locations
tatggcactatgngtacactatgatactcagctggcttacacaccctgtatagcatagctacatgcatgccnantacatgannatgcttatttcacacacnccntctatagctaagctcacccccatgccanaatacatganaatacaaaaaagtccctactacanagactactcataatgcccttgaatacaaggctaanaccctatactagtagaatagccaaaaaacaaggccaaaagaagggaacatatataatgttacaaagaaagtgaacccaccttggtcatggcccataatctatctaaggtcatagaaccctaggcttcttaccactctaccaatctcttgagtcttattcatatcttgnnggangatggataataggacatgctgtactataaagagtngtgtacatctatagaacatgccattagtatngttagatgtcaatatatgatatgtgtgtaagctactaagtatacattaactagaaattgatttgtgctgatgaagttttgtggtagtgatattatcaagaagaaaatacgcttacaagggtatgtta

SEQ ID NO: 14039 - DNA, 656 bp, Glycine max
  unsure (1)..(656): unsure at all n locations
ntggcccatganncccnctgaccgngctcctgagtcacctgcggcatgcagctngggtgcnaaaattacatctatacanaggaattnttgatggtgcatcctccaacactccattaagattccttgngtgaggtgggacatagtctgcctacctaagagtaaaggtgggttagggatcacagaattgattaaattcaacgaggctttgctcgctaaataggggtgggagttggcaaataatcagaatcagttgtgggccacacttctattgtgtagatatggtggttggagggagttgatttctcatacgaactgcagtttatactctccttggtggaaagacctcatagctatcttcaagcagcagcaaagcaacacaatttgtaaaaatagctttatattgtccatatgtaaggacggtccatggaatacaaaccatgtacttattggcttgacaacanannaaacacttcattggaaatatatatgttatgcaataccatagactcgctcgacacgaatggagacatatgacataattatgatcntttctctcacacagactgtagaagaggactatagaccttctctctattgggacacataatatgaataatantacacatatgccttctcgcgcagagatgagagtcact

SEQ ID NO: 14040 - DNA, 499 bp, Glycine max
  unsure (1)..(499): unsure at all n locations
tatcggtagacaacatcatctagcttagaatcgacctctgtactgtcggccatatcattggaatatagtgtttatactacacttacaatgatttattttttattgaattatgacagtttaccctaaaaacctccatcgttggattacctatgacgttgattggatgtgatccacagtgtactatggcacatggagcatgacccatgtagttgctcaccacggactgtgaataatacatatagaccacatgtgggggtttgaccacctcacggatggtggaccttgacatttatcgaattggacacgaataatgataccggtctggttgtggtgacacacattagtgttactattataccagtggttgtaactgtctgaatatatgggtcaacttatatctactgttgttgactctactaatgattatcgcactaaccatcctaggnttgcttaatctcctgaaatggaatgcattagcaagggtctcttctggatttct

SEQ ID NO: 14041 - DNA, 332 bp, Glycine max
  unsure (1)..(332): unsure at all n locations
atagagtttatctcttttatcttagtgagagtgattctcctanattcttgagtgattcaagaacaccctggctgtatcanaggactntcacaacctntgtgtgttgccctcgccgganagagtgattctttccttcctttcatcttcaaccttgttctttcanaccacatccaanaaatccacatctgcccgaaattatctcgtggccataactcccattttacgcacacaaattaagtgattcttgagcctatattgaatttcaagacgagacctttcaccttgntgtggaatcacctcatttggagcactgtagcttgagttattgcatt

SEQ ID NO: 14042 - DNA, 342 bp, Glycine max
ctctccttttctctgactaacttcatctatcatcttactatccccgaagccaactcttttactctttattcacgtcaatctaaactttaaggaacctcaaaaagaaggcatctcacgtccgtgtgcctgtgtacgcctcgacacccacactattctcttttgctctcagacatccatgttatcatatcactcacgcctttagtttttaatactaactaaactcctaagtttatggacatgatgacaggtaaattgctgtgtcagataatgctatacgactgagcttctgataaatagagatatgtaggcagctatgatgcacactttttatatacacaggct

SEQ ID NO: 14043 - DNA, 623 bp, Glycine max
  unsure (1)..(623): unsure at all n locations
atatgccatgatgagcctgcacgngcatcttaagcacctgcngcatgcaactgtggtggtaatttaacggcatgcgggagctaatantctgctcatattctcattaagccaatcaatctgtctggcagcagcataggctgtgaatcgcgacttccaatataatagcgagctgaaaccttgttttgctatacatgattacagtcaattgtatattggttaccccacatctgtctgagaaatatggcgctgaccatattattagttactaagtaagtataaactcgatccttcgtcgtgagggctactaatgttgnatatatcatgtcttatgctacaagacacattatgtttaaattagacaggtgtggactctatatgattccggtaaacattctgcatttatatctgggtgtctaatctcatccagcgaagagtgtgcctgtgcatgcatccaatcttaatttttattgtacaaaagatcacagaatgttcttccgtagagtgagtgtggatttctacttctattcatatcaanagatgttatgggttaattactggtagagcttgataactaatatctctcgaacaaaatgtccttgcgctcttttcaaggcactattaat

SEQ ID NO: 14044 - DNA, 620 bp, Glycine max
  unsure (1)..(620): unsure at all n locations
tatggctttgagcaacataatactctgctttatattcgttgcgacctgcagttatatanatactcgaattaatcttgttgtatttatcatgctccatgtattanctgcacgcggtggtgaagatggtgttgtggaatgctttgacatgctagtganatcttcaattggtagaattgatgttgttggacctagtggtgatgtaaccaagtaacatgtcttctctctcactatatactcatataagtgtgaaatgggcgggaaatgtctatccttgtccattttttcatatcataaccacatatgaggctatagaatactttggnattctcttgcgtaattgacatctgtattcgtaaccttttcatacgttgacgaccgaacttcgtttgagttttatgaccatcaaggtctccattgttgttgtaagaacgtagaaccgaaaagctctttgtactgctctatacgtatgattgtgcatatgtattatgtcatatatctgtattatatcctcacaataaatcgtgcatcctagtattgaatntggaagcatgtaacactgctgagttagcaatccacactaattcttctggtttcactccgtangacgaggaattcgtctg

SEQ ID NO: 14045 - DNA, 521 bp, Glycine max
  unsure (1)..(521): unsure at all n locations
gcataatatatcgagacgctctatattgaacaatggaagctcttgagcaattcacatggtcataactnttcactctgangtcngattcacgcgcattgtatatagagaagctcgaaattgaacaatggaacctctagaacaatttaaatggtcataagctttcactacgaaggtccgatcaagcgcataatatatcgagacgctcgaaattgagcaatggaagctcttgagcaattaaatggtataacttttactcggaggtcgatccacgcgatcacatatcgagacactctatattgactatggaactctcgagcatcaaatggtctatctttcactctgaggcggatgaggtgctatatatcagatctcgaattgacatcgagctctcagaatcaaaggcatacttaactcgacgcgatgaggccgattttcaacctcaaatgacatgacctctacaactaatgccatatttactcgagtccatggacctatattcgaccttaatgaaactgacttag

SEQ ID NO: 14046 - DNA, 525 bp, Glycine max
  unsure (1)..(525): unsure at all n locations
acctagtaactcagcttgttctgaatcaganatctgcactctgtgcaagagtctgcggtctatgctcgggttggtgaacatatttctcctcgtgattnttatgttcataatatggaagacggactntgccctatgtcagttctaattattgtatgcaggccatctatgataacactcccaaccaatatagatgtttatgctggcacattgtctatggcaattggagatattggtgttcattataacattctcgatgccacgaaacatccatctgacgatcattctgtntatcatgctgagataattgactagattgtcgatgattatatgttcgatcttgagaatgtcttcatggacgaaacatcaattatatctatctgctacttgtcatctctatgcattgatattaactgagttgaatctatctgtgctgatttttgctcgactaattgacttgatctggtctgattcttgggtgggctcttggttattcataatcgcatcctaccatgggtgagtcatctt

SEQ ID NO: 14047 - DNA, 590 bp, Glycine max
  unsure (1)..(590): unsure at all n locations
tatgcattgagctctatctagctgatcataccactcgtatcatacagagccatntcaanaatattctcacagttattctntgtatgtggttctngaatggctatcacacgcctatatatatatgtgacttgagacacgaatntaataagaagttttggagaacaagaaggtcttatcctactaaaaagcagatcgtgttatcctcttacaaatcccttggtcaaatacttgtgattcaataangaattatctgagtgctcaaattgttcagtctatctatctcaagacagaatacttcgtttctattcttcattctgaaagggataatagacatatggtctctgtttgaaaaaatttaacacaacgatggttgtcctgagtgttagacttgaaaagaattacacattcgaacttcagcgggtgcttgcactgacgtngccaatgtgtggcgacatttaatctgatcgattactctcataactcttattagtatgatgcacatatcaactggcctgatcaattacgaatttgttcgagtttacttgaaacatagagattatggaatgtgattttataaaccctttaaattt

SEQ ID NO: 14048 - DNA, 182 bp, Glycine max
  unsure (1)..(182): unsure at all n locations
atgtatgtgttcttagaaagcaaaccatgcagaaagacantttttacgtcaagttgtcgaatgggccaattcttaacgagggctatagtgatgaataaccggatggtgcctggcttgatacaggagagaatgttcaatataatctactccattaactcgatgatatccctttgcaacaagcg

SEQ ID NO: 14049 - DNA, 618 bp, Glycine max
  unsure (1)..(618): unsure at all n locations
ttgtaccctgccgcgactctctgagtcacctgcggcatgcaagcttatcnncccaatttctatanatagggggagaagtgaagtagaaaatgggttcagcctcttangcacttctatctctnntcgaattgcttangannaattgttctgtgaagaanatccaagccgaggcgcttncgtaacgtttccgtgagtgatttcgcgaagggtttcgaccgttcttcgacgttcttcattcgttcttcattcgtcttcagtcttcaacgggtaagtacctcaaaccaagcctttcaattcattctatgtacccgtggtgggccacanttggtttcatgtatntntaattctcgtntcatttactttnntctacccctttngacgtgcttaagccatntatttaagtcattcctcgcttaacctaaannnataaataaatntcaccgatcgtttgaattgaccatccgtaaacttggtgaaatgaatncgatcgatcggtcgtccgcaaccacgtggagataaaaaagagggtaatatatatataataaaaatactttagtaaataaacgaaaacatcggcgttctcttgggatttatctattgatgctaatacaaaggact

SEQ ID NO: 14050 - DNA, 351 bp, Glycine max
ctacactggatattaaccgatgtaaaaagttgctttataactttactaaacttatcctcttatagaagactaccttattgtctaatactcaatacccatcaatcctcagatagcttaaacaaattatgttcattgtcccatttacataatcttgatctttgaaaaatgaagtggctagtgatagagatctacctgaaatggaatctaatagaatgagctaataagtagactaactgtgttaatactaaaataatgcttatatgtaccaaactgtatgacaaataaatgtattaacacgggggttctttaatattcactgcaatgaataagtctaatcactactcttttaaa

SEQ ID NO: 14051 - DNA, 108 bp, Glycine max
  unsure (1)..(108): unsure at all n locations
atctgatcatcatgctntgataaatgcacaanannaaanaaactagggcanatgaagagggtgagaatgagggagaagcccatgctgtgactgccattcctatacagc

SEQ ID NO: 14052 - DNA, 188 bp, Glycine max
accttattttcaagcagttaatttaggctgctcatcattacactctaagacactgggtcttaacagcataaaagaaacgattatattttctaactaagaaaggatccgtaaaaaagaaagagaaccctattaccgtaagtacgaactgccaaaaatgcaagcatattgccaactatacttgcttattt

SEQ ID NO: 14053 - DNA, 232 bp, Glycine max
  unsure (1)..(232): unsure at all n locations
atcacagattcagacatgtgtgtgtgtgtgtgtatatctgcttgtgtgtgtgtgtgtgtngagtcatcctctagagagaaatggagtttgataaagtctaagttaatcatctagtaactaagtaaaatattctctcaagcaaacacttgntattanaagagagataanagacacttagagaatacttaatataaccaataagaagagacgtagaaatactttcgattatatt

SEQ ID NO: 14054 - DNA, 241 bp, Glycine max
  unsure (1)..(241): unsure at all n locations
ctacttcttttcatactacatcctacgctngcttgctaatntntgtgcattgatgtgattcctttgccaattggaagggctcnatctcctctatatagtgtggtngttgatcttcacaatctaataagggatcgagaatctcctaagtggtgataacaacattgatgttgaaatctatgtctttccttatcttccttttcaccatgtgacgactcaactntgcaacttttacatacatcat

SEQ ID NO: 14055 - DNA, 645 bp, Glycine max
  unsure (1)..(645): unsure at all n locations
tatggcacattgaggcncttganactcagctctgagtcaagacatgtgcnnagatgcctaaatggtgacctngagttgtatgaattgatgctatatcgaaagcagtcaanaggatcatntcctagtggcagagcttgtagagcangtgannagttaaagctgctgcatactgatctctgtggaccaatgcagacagtttctcttggtggaagtaagtatttcttgctcataactaatgactacagtagaatgagttgggtctactttctaaaggctaagtctgaagcctttgaaaacttaagattttaanggctatggtgagaaaacaattggtttatgtgtgaaagccttagaacagatcgtggtggtgaatnttgtcaaatgaatcattacattttgtgnggacangggatangaagagattgactgcactatatctccagagcaaantggagtactgagagaaagacatgaactgtgagaatgacangaccatgctaaactagaggtgacannacactctgtgtgaagctgactactgatgacatctcatgtcttctacanggagtctgacatacacattgancatgagagaaaaacatctgagcattagagtttcgtgtcactatgcttgtgatgaacaan

SEQ ID NO: 14056 - DNA, 590 bp, Glycine max
  unsure (1)..(590): unsure at all n locations
tatcctcatcttgtggctgatgtatgttacaatataatgatcctgggttaccccgcaaggagacacacacagagacacaatcacacacacgtggagacaaacacacgcagacacataacacaaacactgacatacactcgcactcacacgcactcactcacacatatagagacagatanacactacaaggcactgtgcctctaacacactcttagactcactcacatagacacacagtctgagtcataaacgcacacatgctctgactcacttgcacacatgaactgacacacgcgcactcacacacagataaacactcacactcacgtattgatgcgatcaaatcacacgcctatatatagacacgcactctgtctcactcgcagagtctcacactcgtgatagaganacatacacacanacactctgtgtcgcatacacactcgcactaagacacacacngtanctaacacactcgcatacatagatgagacatcgccacttcacacgcacantatatagacgatctcntatcctctcgcgacctcacatctctgagtggcacgcacattatangatagacaacctct

SEQ ID NO: 14057 - DNA, 88 bp, Glycine max
attatggaattgtaatgcttgtgaattgacttatagttactgatatatgtgttatgttattgagacatggtgatattgaagtctactc

SEQ ID NO: 14058 - DNA, 282 bp, Glycine max
  unsure (1)..(282): unsure at all n locations
tacatgaagctgcctcggtaaacacactgcccagccttcgttaaccgatggatcttctcggnatataggttagtcacttcacaagacaattgtccatgatctaaccgctgggatctctgagaaaatatctggagtgtgctagaagcttccgttcccgagagcatctcttatataagcatctcagcctttgctttcttgtagcttaagaganatgccatttcttcttctttctttcttccaaatccatttctaaagttccaagtactttctccatcacccaca

SEQ ID NO: 14059 - DNA, 142 bp, Glycine max
  unsure (1)..(142): unsure at all n locations
aaatttaaccttttcacttcttcttgttattacatcgtatctnagtagtttcaagtacatctaattatacttgtngatgttcttttgctcatgaacagtatggcttgcagaagacaatgttgctaaaagatcatatgttata

SEQ ID NO: 14060 - DNA, 239 bp, Glycine max
  unsure (1)..(239): unsure at all n locations
ctgatgacgcannaattcatcacagtatntaatttgtcaatcgatgtcaacatacagtgagggcaccttctataagcttcatgacaggcttcatcggaccaaccccatttcttatagacgtcaactttctcctttcatgaagttnggctcctactnttaacaaccaatgctaaagcanaagtcngatttgaaggatcaaaccccanatcatttacttccttcaccaccttaagaatatc

SEQ ID NO: 14061 - DNA, 645 bp, Glycine max
  unsure (1)..(645): unsure at all n locations
cctgccttgagcaccattagtgaactatgatactcagcttagatctntacagaaatntatgtctccatatnntcagttctatgggtcatgttccattaataatacttcttattttaataatgctcttgcatttagaataaatgtaatatatggtcattcattntctacgttcccggtgggctactaagcgtgcctcgtaaaattataanatatacatgctatcgtttagctagctagatggtctaatacaatctacttgatatgataatataaatcaaacattcattngcacttcatgaatcttattttaatattcacattctagataatgtgtagtccatcgcatccataaggaaaaatatgcatcacaaatangganggnaaaactttactacttnnacatctcatatattnattaaacatacattgnnnttacactcaaactanttttttaagacgaaatgtagtatttcatttcattaatcatgtatggaaatacaatcatatctcagagccacatgaaatcttgtgtctagtagttatcagcacagatacttgctgtactagctacctcagtgtacatgaagaatgttgatgactaatgataactgaaatctatacanatcaatatctattgtngaatat

SEQ ID NO: 14062 - DNA, 534 bp, Glycine max
  unsure (1)..(534): unsure at all n locations
canagctnggagctaggtcatganatgaaggctttcgacgagtgagggcttttcagttcaatcttctacgatgacgaggaccagcagtccagcacaacaacacgacatcgatgaccaggaccaccacgatgcgagtagctcagcacccgaaccaaacttgaataaggcagagtgagtgagtagacagagtcgcgagagtcattttcgggggggtttcgtacgatgctattntcggttntcataaacccgcggattcngaacagactcgcgagtctacccanactcgctcgagtctgcgctanatcggacgagtctacttttcgttttgatttgcttcgattaactcgccgaccttatagaantcgtaaatgtcgaatttacgattaatgcgagttacaccatgaagtagtctttttgtcgattgatagatacggtcaatgatccgacagctgctgtgcaatataataatagaaataaaccagtctaactanacaacacatgcgctgacnaactgtacacaacaccagctccttt

SEQ ID NO: 14063 - DNA, 581 bp, Glycine max
  unsure (1)..(581): unsure at all n locations
ttatgcctgtgaacttcanactaagctgctcatcatctctagtctgggacctatatangaccttcaatcccatgtaagaatattatactgtgtggtgcacctctatcattctctacctctttgaaacggattcgtctcgaatctaaaattgtacctacaccacaggaagatagatcagccacattanacgtagcacttatgttaccgtattttcttggtccagcttgtaagcatcgccatntatcttttctagaactngaaagggctaatctctcttgcgtgctgctggattgtcttgacaagaaatcttctnttctacatgacacagatcaacctactgtcactaaatatgccactagtagagtccacatcataccacctattcaacaccaaacatacatcaattcaaatttatcaaatggcaacaagaaggtgcatgtagctatttcataataaagctttatccatatcactgacacacatctttcagtcataaggcacagtactacatttcaattcataaactgtatataaacttactatacattagacacatctatactacttcttccctatcttag

SEQ ID NO: 14064 - DNA, 551 bp, Glycine max
  unsure (1)..(551): unsure at all n locations
catacaaacaccacaatatatactagtttgctgaacctggaagaagntanatcaggactagagaactttagcttctaatattcaattcagatcgcatataaataatatcagtnttcctaatggatgctctgttgaataaaataagacagaagtattctcaagtagactgttggctactgctttctcaatatcattagataagactatcaaaaataatgtgtccacaaacgtctggcagaacccttacacgtaataaactttatatttcccttatcaaacgcaccaatatttcttctttatgcctcgtgatgcacacatgcattcacatgcagagtgatactctcttttatgtgacactactaaagaattgtcctcacacgcttataggacaacatccccccttattatttgtgtgctctctacatcccacacaaggcatttgatatgttgctcacctctgtcatcccacaagtgacaaacactggagatgcaaatatatatatcatcagattcctcgcctgaaaacacaataatgattaccaaaggtgcct

SEQ ID NO: 14065 - DNA, 239 bp, Glycine max
  unsure (1)..(239): unsure at all n locations
gagctagcagtccctctaaaggagccctcatatcctntagttccatcaaagaaggataaggagcgctacttcaagcgtttcttagagattttaagaggctggagataaccatgccatatgtggaagccttacaaccgatggtgctctataccagattcatgaaggacatcctcaccaagaaggggaattacattgacaatgagaacattatggtgggaggcaactacagtgtagtgata

SEQ ID NO: 14066 - DNA, 141 bp, Glycine max
  unsure (1)..(141): unsure at all n locations
ctatgtcttattgtaattagttaccttntcttgagaacaagcaaagctntaaatttgnnggagtttgataatngctangtataggtatatntngggattaaattatataacaaatagtcatttttcactcttatttctttc

SEQ ID NO: 14067 - DNA, 607 bp, Glycine max
  unsure (1)..(607): unsure at all n locations
ttgtgtgttgcacatctagcttcaccaaatnggctgcaatcgtgagaagtaaactcgcaaacggactctgaagctgtatctctatctgaggatcagtcatctatngtggggccgtggtgtaatgtcttaggtcttccaacattncagttgttatatatatatacaatagatatnggcatgaaaataggaagtagaacgtgagagaaacgagtatgtacctggcangcccttcatcatggcctataaggagcatatggttagtgtattctgcatctatacaggagcagcataacagcaccaaagcagaaggcgtggggattgtggctttctcttctttctagctctgaatcacccgagttcatgccttgctngttcagtatgaattggtgggagcgtgcaacatgtcttgtttttttttttggtggagcacatacagcacgaagatctactatgatgcatnggagtattttggtctttgaatcactgtataccacactcatatgatttaacttcttttactcattatggtgtgatggcattttcctcaacctggattgattaacatgaaatatggagacattttactggaccatcgtcttaatgtaat

SEQ ID NO: 14068 - DNA, 530 bp, Glycine max
  unsure (1)..(530): unsure at all n locations
catttgtatcattantatcatcatacttnttaatggtcaaaattgtcagtatgaaggaagagtcacttncatgatgtcaggcatataagggttcttgaattgatcaactgtctcctccaagtattaagtgatggggaaatagtttcttgacatacacttaagatagtggcttggacacactgaaagaacttgacttaatgtctctttctgaactatggtgtgtgtgacctattacactcttgatatgtgcatatcacgtcgataggtatgactctctcgctggatgagatgcatgttcaaatctaagcttgtntcttctacgactgggacacgtagtctatatttacagaatctcttgtttgtgatctgcggtgttcatagtttagaatattcctgtctactattgcataataatgctgagagaatagatctcnaccccggacgccctaattccattataatatacaatggttttttcgtcgatggtattggttaggaatgcttctactaatacagtcagacttagcctt

SEQ ID NO: 14069 - DNA, 639 bp, Glycine max
  unsure (1)..(639): unsure at all n locations
gaggctttggcgacttgaactagcttactctacgagtttctcaaaagctctcaggatgtttctaagaattttttagagctagctattataatagaacatgtgaacacttgtggcaacttgatgaatgagagtctggtganacacaactcanagttcaacttctctcgcttattcttccttcaatntcgtgctcccgcctctctctgtctctccctctatctgttcctccattgaagcatactctccaagcttcttatccaaggctcatcttggtggtgaagctccttcttccatggcttattccttaatggatgggcgcctctctcacctcttattatatggctacgctgcatcctcatgagggaaaacaccattgtaagaacctctttgagctcaaaagatcatcctcatataggcctccanngcagcttcataacccatggtaaatacgatccaagatagtatggagtntatgccagcgatcgcctacatatgacgaagtagagacatacactctgggcaggggctatggagccttcgngaggatgcataacaagtttgggcattcatggtctgaggaagggcacatggagttatccaatgcgagcaagctcggctcatatgagcataacactgtgg

SEQ ID NO: 14070 - DNA, 172 bp, Glycine max
gtgtggcactaaaccccgcgcgatgaaaggcgtgatgctctcgtctaatggcgctcctctcatggagtagccaagctgtcttatggcgagaacgggattatattaatacaaccccttgttccatcaagggaacagttggacatccttcgcatgaagatagcatcttgattct

SEQ ID NO: 14071 - DNA, 679 bp, Glycine max
  unsure (1)..(679): unsure at all n locations
tatgacacattggcgcactatagatctaagctggctgtgaagcttantggggatggatcatgagcttantgaggtccttcaatgttgatttttcaccatggagatgcagcggaagataaaggagaagaggtgagaggaggcgccatccactacggaataagccatggaagaaagagcttcaccaccaagagagtgccttgtataagaagcttggagaggaaacttcaatggatgacaagaaagagagagagaaagcgagaatggtggagcatgacatngaagaaggaacagaggcagagaagttgaactctgaagtgtgtctcacaagactctcattcatcatagatacaacangtggtacacatgccctctattatatgctaggtagctttctttgagaacttttcttgngaagcntcttttgtgaagcttctttgagaagctagagcttagntacacacaccccctctataactaagcgcattctcttgagaagatactagagaagctagactttactcacacaccctctatagtaagctacctcttgaatgagagctgagcctagctaacacacctctatatagctaactcacccatgctaaatcatganatcataatagtcctactacatactagtcaatgccctgatacanggtaaacctatctatagatggcg

SEQ ID NO: 14072 - DNA, 318 bp, Glycine max
  unsure (1)..(318): unsure at all n locations
tgtactatgctcgcattngacttatattcttagtataaatattanatacaagtatgaaagttaattagtgtnttgtatcacagcatcacacacgtacacatcttctcttntctacccaaattcagtccaattcttaaatatcaatatggtgcatccagaatcaagactgaaacctaaaaagaagatctattaatatagtactcanaagccataaagacataagtgcagacaattctttgcagggtgtaaatcaaccagcagatcttccaacctcatatgcagtcaatcaattccaacagacacaaattcagtaaaatc

SEQ ID NO: 14073 - DNA, 605 bp, Glycine max
  unsure (1)..(605): unsure at all n locations
ctgccatgttanctcctcggcnctcaagcgactgggctgcagctctgaacacngctggctcanaggtggatctttccatgatatgttatgcatnaaaccaaccttgtatgcctctagaacgagttgtgtggtgctattatagtgaatggatagagatagtatgcacactcaatacccattcgaaaccaaaaggttaaagaatagacatttngcataagaaccaacacatggaccttatataattccatgatgtgctatctggcttcaataccaattgaattacaacatccacaaccatgggtacaaagaattctctctctccacctataagcgttgaatatagagtggtagaagcacactcttgcaacccacctttagtttctatctaactgttctctctatgctaacaactagaacttaaacttcctccttcctaccccgatatgtagaaagacaacctaatgcgacgcatcagaccatactccacttcacgattcatattataggatggcgcactggagaaccctcataagccttcattaagaatcaaaatgatgtggcaaccctgctatagctacataaatatgccatcatattgcgaagtt

SEQ ID NO: 14074 - DNA, 148 bp, Glycine max
gatggtctgtaagtactaatataactgataatccttgtaaatgacgtacacaggaggtgtcttggtgaggtcttaacgaattctgacacatgttaaataggggaggcagcttctataaaaatcatgatgtctgacgtgattagatgta

SEQ ID NO: 14075 - DNA, 328 bp, Glycine max
  unsure (1)..(328): unsure at all n locations
ttatcttaacgcannaaatgtcatgctaatccctctgatgttagaacaaactcatgtaatctatttatgcacacgcgtacgtgtggaatatcctaccatttatatcaacatagaggccatccaacacattctacttgtcacacgcatatatgcatctgaagagaacatacattcttatgctcaaggcattgcgtcaaaattcacacctaatttatatcctaaacatttgctattacaaactacctacatatatttgagatatatatcatacacagtgttattgttcactcacnattatcatatgggcagctattacattatcacacac

SEQ ID NO: 14076 - DNA, 425 bp, Glycine max
  unsure (1)..(425): unsure at all n locations
gagcctagattatctgctattactattctttaccggttgtaatttattctttacttccttatataacactgtttagtgctacaaaatagatagtgttcagtttataaacttcttctgttgagctctacttcatgccaatcatagactatatctattaaactattacttgctcgctctcactccacaatgtgaccagggaaaagattcatatgatctcattcagcctgtgatgcacatgattgctctaactaacagacacatcatagattcttgaatagctgcaattttacttagactgtaaccatgtgcctagcgaaagatacaacaaactgtacaatgagtccactttacgttanataatgagcatgtcatcgactgtgctatgtcactcttacatgaaagagagaaactattattaatgatag

SEQ ID NO: 14077 - DNA, 600 bp, Glycine max
  unsure (1)..(600): unsure at all n locations
tatgtacttgttgncactntgaccgngcatcttgagtcacctgcggcatgcaagctggcctcanagangtccaggaaggatanngcggtcgaangaactagttccgctcctgagtatgacagtcaccgctttaggagcgctgtacaccagcaacgcttcgaggccatcaagggatggtcgtttcttcgggagcgacgcgtccagctcatggacgacgagtatactgtattccangaggagatatggcgccggcggtggacatcactggttacccacatggccaagctcgatccagaaatagtccttgatgtttatgcaatgctaggccacagangaaggcgtgcgcacatgacgcctgtgtatgagtcantggatctcgtacatgctattctatcggccactcgtggatattcgtagtgctctttatggcacgagtccattattgctatgatgaaccgcctgtggttcataagaggcctaccccctctatgttacgaagaggatatcgctgctgtgctgttgcatgcaatatgccccacttgccctgaccctatgatagntgtcttcacatctgcctctctattcacttcactgaangtt

SEQ ID NO: 14078 - DNA, 578 bp, Glycine max
  unsure (1)..(578): unsure at all n locations
cccttattgtcnggccctgcacgngcatctctgagtggcctgcaggatgcagctntggnacggttataacatntntatcanactntnttaataccttctaatatntntttaaagggtanntaacatttttatcanacttttgtaggactntctaatatttttttaaatgctattaacattttntaaaatattaacttctagcttctaattntttatttaattttatatttatcttcaatataattatcaaatttcttaattatcctttttaaacaaatcatgantttattatttcttttattaggttacacttggcaacaatttcatcagttaattntatcaaatacttttntaactttagctctcagttatgagctagctnntaagtttggaactaacttnttagctaactttcattaatttatctacataaccttgatataggacttgacantagatcattatttatgaatagatcatactttcaccatgatatgtatataaactggggcacntatggantattcttatcatctttatatgactgactagactacttaaactattatatctcagcn

SEQ ID NO: 14079 - DNA, 644 bp, Glycine max
  unsure (1)..(644): unsure at all n locations
atgcactctgccggatctctgagtcacctgaggctgcaagctanaggaagtgaacgaatagcatgggcagaaatgtctncgcattgattggtanatctngtcctcanattccctgaaaatgtaaagatccangtacattcaacatacctttgatcatanggaatagtaangttgacaatgccatgctagaattangagcttcntgtagtggtatgcctctgtctatttttaattctctatctctangcccctcgcaatcaactgatgtggtaattcatttagctaatagaagtagtgcctacccttgtggttcatagaagatgtttagttagaagtggtgaactgattntccctgttgatttttatatttngaatatggaagatggattttctaaggatcnagtncatcattctatgcagacctttatgaanactgctagaactaagatagatgtttatcanngcacattgctatgggaatntgtgacataaactgtcattntaatattctggatgctatganatacccatctgaagaatcttctgatttcgtgctgaataantgaccatgtgtgatgntacatgactgacttattctaatctgcagctctactctcatgcatgagctgaaatgtactgactan

SEQ ID NO: 14080 - DNA, 617 bp, Glycine max
  unsure (1)..(617): unsure at all n locations
atgtacctgacngcgctctcagagacacctgcggctgcaagctatgctganatattacaatagacctcctcanactcagcagcataatcaaccacaacagagccaatatgtcctctccagcaccagatacaaccctggatggaggaatcacnnctacctcagatggtncagccctaagcaacaacaacagcagcctggctcttcctttcataatgctgttggcccaagcagaccatacatttctccaccaatccaacaaacagcacaacctcagaaacagccatacagtgaggcccctncacaaccttccctcgaagaacttgtgaggcaaatgactatgcagaacatgcagtntcagcaagaagaccagagcctncattcagagcttaaccaatcagatgggacaatnggctaccncantgaatcaacaacagtcccagaattcttgacagctgccttctcagctgtccaaatccaaaaatgtagtgcatttattgaggtcggaaagcatgtaggacctcaccgagccttcatngatgcggaggaattagatgaatgatgatgctgggtgggttactctgaatgattataagcgaagatacctgtttgagccacct

SEQ ID NO: 14081 - DNA, 254 bp, Glycine max
  unsure (1)..(254): unsure at all n locations
gctctcgatatattcanatggtcttaatctttcacatgaatgtccgattcnggcgcataatatgtcgagaagctcgaaattgaacaacggaagctcttgagaanatcanatggtcataacttttcacacggatgtccgattcaggcttataatatatcgatacgctcgaaattaaacatcagaaactctcgcgaaatttacatggtcataactnttcacacggatgtccaattcaggcgcataatatgtcgaga

SEQ ID NO: 14082 - DNA, 431 bp, Glycine max
atcaatgcttaactgctgatgctcggtaagttgacaagattccagactccgtgacattctacctttttatatgcccgaatgactcgggagagtctgacttgattctcaagtatcacgtaattcacgttcattatttacccgaatgactccgggaaagttgacattgattgacaacttcgtgatattcgattactttggagccctaatggctcagtaacgttgcattgatttcagaatcttgttattcagcttatttgtatggacaatggctcggtaaagttgcatagttccaactcctcgtatcagcctccaaatccccattactccgcaagtcgcatgaattcaacatcagaattcgcgagatattgccgatgacccggaaatggttaattcaagtctttatagcttttgtccctagaccgaaaaacatt

SEQ ID NO: 14083 - DNA, 348 bp, Glycine max
  unsure (1)..(348): unsure at all n locations
gtctagtagtaggtatttggaaaatanaataaannataaaatggttacttaactagaattacttgtgcaaagaatccagtacctcgtactgcgtagattgagatgcacctctaagtaataagagtcaaatctcattntgatctctannaatatttttttaaaaattacctatctcttgtaaataaatgctgttaagtccctaaagcttaatcattattcaattttttatgagttgattcatctaagaataacattatatcatctaaataaactcatcagcttatacaagtatccatacaagcaactaaaaaatctagtgcatctatattgagcggcgtgtattactta

SEQ ID NO: 14084 - DNA, 448 bp, Glycine max
  unsure (1)..(448): unsure at all n locations
agcctggctcatctactgcatattgacctgcaaacacgaaggattctgttttctgtttctacaagccanggacagagtggacctgtaggggttggttaatgaggaattagaaatggaataaagagatttttaataaataaggtaacgttgggcccacacagacaagttacctcatttattatctcacctaccgagtgaggtgtgtacaagcagggtgggaacattgctggttataatgacaatactatgcaagtgcaagatcatttatgagtgattacacattatcaatcttattatgtcaagatgtgttgtgatgaaaagactaatgaaaagacgcacctatgatgtataatgaagagaacatgagttgtctagaccaccttgttttcttgtaatgaaagcaaattgtgagagactcatgctgtcataaagtaattaacaattattg

SEQ ID NO: 14085 - DNA, 530 bp, Glycine max
  unsure (1)..(530): unsure at all n locations
nggccacattgtgntcgtgcattttattctcgcttggttaacttttatacccncctcttgacgtgcttaagccattntacttaagtcatttctcgcttaacttaanaataaaatagatctccaccgaatgttngaattgtattatccattaacttcngntaannatcaattcgaccgttcggtcatgccgtaaccacgttggagatcataaagagggtataaataatataattatcanaaaaatatctttttagtgatatagagcaggaaatcaatcggaccgtttctctttgggatttctcattcttaatcgaattaataataactaaagtgaactaaggctaaatcactcgctagtcagctcgtccacaaatatgctttgaagttgcattttcattctactaagaaaatgatcattttaggccaacgcttatatgacacacttagtaaaagatacttgtagaagactactggatgattttattcaattgagatcgtagacaagaacccctttacacaaaagaaatatt

SEQ ID NO: 14086 - DNA, 426 bp, Glycine max
  unsure (1)..(426): unsure at all n locations
attgccatagagcttaactagcttccttttgcttacttttctaaagccttgtcttggattggcctgccatcgcaatggaaactactaaaggtccttttaccaacagttaaagttgataacgtgctacgccctacctacgtgataaggaatggcttaccctctccctacctgctaagcactgtgcctatgcatactccctaagccacttatactgtcttgcaatctcttgctacactgactcctacgtggatactatcatcggacatcgtgtggagcacctgtgacatcagactgcccatgtagatttgattctactccgagaaaaacattaccatctagtctactgtaataagatgtatgcatcgaatctactccgaacaagtgatctncaatgtctaatcaagaaactgtaaattagttactcga

SEQ ID NO: 14087 - DNA, 485 bp, Glycine max
  unsure (1)..(485): unsure at all n locations
attggatgactctcggatattcanatagtcataactnttcacaccgatgtccgattcgggcgcataatatgtcgagaggctcgaaatagaacaacgcacagctcttgagaaaatagacatggtattacttctcacacggaancgttcgtgaagtatatggcataactttacactgatgtcgattaggttatatatatcgaacgctcgaactaacatcggaactctcttaaagtcaatggtataatgttcacacggatgccgatgcggcgcataatatgtgagaggcttaaattgacaacggagctcttgaaaattcaatggtattactttccacagatgccactatgctatatattcaacgccaacttaacaacgatcttctaaatcaatgtataactttcacgtgtcgttagctctaaattaaggtaaattacacgagctgggaataatgttatcttctcgtgcatcagtcgtaataaaagtcc

SEQ ID NO: 14088 - DNA, 197 bp, Glycine max
cgacatatgatgcacacgaatcggacatccgtgtgaggagacatgagcatttgaatatctcgagagtatccgatgtttaacttcgagcgtatcgatatattataaccctgaatcggacctccgtctgaggagatatgaccatatgaatttgacgagagcatttcgtgatcaatttcgaatgtcactgtatgtgatgc

SEQ ID NO: 14089 - DNA, 547 bp, Glycine max
  unsure (1)..(547): unsure at all n locations
taaaatctagatgattnttttttttttttatctctgcanagattgcgtgacgtgagtaggatatacctatcaccattatggcttctcagttggcatttaaaacccaagaaacaatgcttgatccttaccatagtttccttacaccagaaatggtagaagcacttagnttcactcaagatttgttaaaaggggaaccctcaccactgttacaaatgacgattttgaggaaattgagaaatttgaggaanggtanaataaattgcttaatatagtatattattacctaatannatatttcttgctaagaagttggatgtctctctttactgtatagaaatgtttcctcacaagatatttctcatgctacctcactngctctgaatgaagacagaagaattgtgctnntcattaacaatcctaacttctatagggttgtaatatagactcgactcacggacttgatctaatctaatcgaatttatggttatgaactatangtgccgttaagatgtcgctcctcattgcctactaatagtgcttgctggct

SEQ ID NO: 14090 - DNA, 665 bp, Glycine max
  unsure (1)..(665): unsure at all n locations
tatgccgtatgngtgcactatagntactcaagctttaccaattctntctgtcttccnnactngcctngaacttactanntcatatcggngtaccttatttantgggcnnatagtagtagtagaccctataanggannacttcagtagaatccanactatngtcngnccaacatagtccatcatctccgagtcaacctttttgtagcaattgtagtaagagtgaacttgggattgtngatgtcagcattccacaacgagggaagatcatgagtaagagtgacatgantattcctacgtangggaccgggatatnnggataagtatacctcacatcgattntcanatgaagtggtctgaggaacactcttttcaccanaacatanntctctatttttaaacatgttgtggataaaanttttatttaaagtattatggtaaaaatgtanatagctcggttgtgntnggagggagtggagaaataanaaagtggtagcttctcatatgttngtactgactgtangtctgctacgtcaagcatattgactgtacaacagntagtcctanggttngatgtacaagtataattatgtgtactttctctanctatacataagctgggggaggcttnacgatgtgagatcntcatggtgatctcacgctatccc

SEQ ID NO: 14091 - DNA, 97 bp, Glycine max
  unsure (1)..(97): unsure at all n locations
tagtcgaagagaagttcaagtccatacccatcanagtcntgaaagagtatgatgaactaanggatgtcaatatggccaccgatgaagccttggaatg

SEQ ID NO: 14092 - DNA, 339 bp, Glycine max
  unsure (1)..(339): unsure at all n locations
agagtctaactagaaaatacatctatacgtntcttatggacatcaaggagcangcaccatacaacacgatatgacacgcataanagatattctctcacctcttttggcatgcaaatctcctaactagtactgtctatattgagactcctctcanttgcctcaccggatccacagaggaaattcatgaccgcatatgtatagtcccatatactacaanattagagacatgactctaaaatattagtagattgtagagaatgaaaccatatcacaagcgtgtttatatcttctataagatcatattaagatcgactcaactcttacactaagattgaactc

SEQ ID NO: 14093 - DNA, 671 bp, Glycine max
  unsure (1)..(671): unsure at all n locations
atatggcaccgttgagcgcactatnantactcaagcttaantgagttaaaantgagctatccngaanacttagctngacagagtggaaccattgtctgtttttacatgaatgggattcaggtctggctttaaccgtagtgagacctaaggaannatntaagaaaaactatttactnntaaanataattatatagtaggtcttttttgtcaacatccgagtatntcttcctaacatatgacgcctntntgctntataagaactaacanaaactannttttttttgtagtggacctanagttngagctntagtttagtngctntattcttagatcgggcctgatgggagtaatactatgtagtctagtgaaatgagactntgtatgactgacangaataanggctctatttgctataattacagactacaatatattcaggctaacctaatcantgaagtngaatggttggtgagttgatcctcaccacgnagaaactgactnggctacactntgcgaaggatatgtnggatactatataagtcagaactgctgatttgtgatgcaatgtcacggtgatngttctatgggctctgctatcactgcgacagtactctctaatgctgtggatagacatatcatgcaccaatacatgtactgattgatgtactggg

SEQ ID NO: 14094 - DNA, 220 bp, Glycine max
ctgcagctatggtagctcttgcttcaattaacgcgtacgaattgtgttgtgacactatgtatcgatcgactttattcatcataaattaatcttgaaagtttttatcataatcttgatatttaaaagtgagacgttctttcttgaagaacaagataaatgccacaaaaatccattgctagcttattcatgaaaacaccgcatgcaagaattcgacgacaat

SEQ ID NO: 14095 - DNA, 199 bp, Glycine max
ttataagaggactgttttctcttatacacatgatatccccaaatatagaggggaacatgcttgatgtcaagcacatataatattgtaataaatgtgctcaaatatgctcaaactggtaatgacctgaaacttcattaaagagaatctacatatttattattattaatgtagtacggaagaataatagaaaaattttttt

SEQ ID NO: 14096 - DNA, 654 bp, Glycine max
  unsure (1)..(654): unsure at all n locations
tactgccgtgagcacgnatgacgtgcactatgantactcaagcttacctgcgcggngangganacacatgcggcantggcggcgctngctgtaagattaatgagattacacagaacagcaggtacttnttttgtangcatttttaaatanatagataaaaaacctaaggctcttaatgggccgtgacgcgcgtgtctacgtggtgtgccgcgtacaactagaggtgtccttctatataaccgcgtccggtgacggcgccggcgactgacaccgcgtcgcaccggagtcgtacgcgcatgggtgtacggtgcgagtccgacacgggacactccggtgatgagccgcgtccgtgcttcatacgattcaatgcatcttcatctcatgataaggctacctatatatggcttttcatcttaagaaatgacagtataaacactattctcgatatatgatgtgatgtagcctgctctagtgtggtactattttgctcatatgttgcttcttcactacacacatgactatgcagttttgaactctgcttaaagttgcgtatatatgtcttgactagcgcacccatgcaatacatctgcatctcgcgatatcatttgaggactatctgcttattgtttgctctactcttttcnggnggctttt

SEQ ID NO: 14097 - DNA, 643 bp, Glycine max
  unsure (1)..(643): unsure at all n locations
atgtaccatgccgngctctctgagtcacctgcggcatgcaagctnntgattntgactngatgnngacctttcttaatagagggtgtntgatttgatccccatgtntactagaantgaaaaagtatgggttgaatcaatactctgatatcctatcatggaggaaatangatgaatgcatgaaggaatgcttatgctatgcatgacacaanatgcctttacngatacgagagcccgaaagatcatcttttcttacttgcaacattnggcagcatggtgccctatgtatgcatttaagaaggtgatacggaccttccaacttcccgtgagaaaaatacgagaccaaatgcaacgcatgcgtgatgatgcaatatagacataaacacgtaaancgcatgggtgatagcacanaccaggaacgtacaagtatggcaatatcatcaaacanacatacagcagagatgcacatgagcatgacattaaaaagatatgcatggcagtgtaaggaaacanacacgcagcatgtcactcatgccctatncangatcctaatggaggactaaaggcattagtgatgatccaggtggtgatctactntcatggttctagagaatcatcctttgtataacatgtgcggaggactact

SEQ ID NO: 14098 - DNA, 278 bp, Glycine max
  unsure (1)..(278): unsure at all n locations
gctgtacctgagctctatttcaattttgggggcatctggaggtcttattttanggtcactgacccattctaccactacaaacctaagaaactatatatctacacanaaggacacttctctatatttgcatagagggtgtnttcctaaggactaanagaactngcctgagatgtcctaagtgatcatctangctcctaatgtacactanaatatcatcaaaatanacaactacaaatctacctatganatcccttaagaacatgatgcataagcctcat

SEQ ID NO: 14099 - DNA, 594 bp, Glycine max
  unsure (1)..(594): unsure at all n locations
ttgtacttgcgcactctaagcacctgggctgcagctattcctgtgcttgtggtgccaaanangtattatangcaccanatcctaaatangtggtatgatgaatgttttgaatgtgcaacnctcttttgaaaatcactcgtgcacncagcatcttcatgaattgtgtacatanggactcattangtagnggttgtcttaattttaagttcaatactaacttangtactcatatgggacacctttatgttgtcatactttntggtangaataatcaacatgaaaatatagaaaaaggtatttnnttatgatacttttcttaatttttaaatagngatcaaggggttcccatgaaccctaagagaataaaggtcatttctgagtggccccactcaccaagtataagaaaaatatgtggcttcatgactaacanactttacaaaggttngtccatatnttctatcttgtacaccactcatgagtggtgaagaccactgtcttcatggagatgctangaatggtttctgacttatttatcacatacaacacactatacttgtttatcttttcagtgtaagagaagcaagtcanaactcg

SEQ ID NO: 14100 - DNA, 653 bp, Glycine max
  unsure (1)..(653): unsure at all n locations
tatgcgattangaacttcantactcatgctgtatcantacaccatactgtantcantaccagacgagttnttagaaaacattctcattgtcttatctntgtatctcgttcttacatggccatcacaggcttatatatatgtgacttgagacactaatntaacacgagttntcaagaacataaaggtcttatcctcttaanaagaagaatagtgttatcctcttacaaattccttggccaatacacttgtgagtcaataacgaattatttgagcgctcacattgttgaatctatctcttgcaagagagaattcttcttctcttcttcttattctgaaacgggataagagaccgacggtctcttgctgtgaaagaatctanacacnaatgaacgatngtnnctatgtgttagaacttgtaaanggaattacangatagtggactctcaacngggtgctngnnatgttcctttatcattngctgtggacctcacgtgccagcaccgtatcacaatgtgtaccttaaattgcagacattatactgccactcatgggacgtgtgccctattgttgttcacataaacttgccatcgtgtgatgtctagacaaacaagattctgaaatataagtgtagtgttaccatgacgtgatatact

SEQ ID NO: 14101 - DNA, 144 bp, Glycine max
  unsure (1)..(144): unsure at all n locations
gagagtctatgtaccggtggctgtatattacaacatttcactaagcctttctggtcagcctatctgtcaatggtaaccctntccaacacacagacatctattatcacaagaaaattcatacaanaataaatcagaactcacaga

SEQ ID NO: 14102 - DNA, 344 bp, Glycine max
  unsure (1)..(344): unsure at all n locations
aaatatttttattatggagaaatagaaatctattaactaatatgattatttattgactttattatcaaacttagtatagttctacattacaatattatttaatattacacatattttttattgttcattatacacgcatttaatcatttattctatatttggataagtctcaaacgaatanagtcattgttaaaacaaacaatagtgtaattaaactaatggacaaaaaattaatagactaattatttttgtttgagagatttttgcggagtattttattatttgagtgctttcattagtcttaatattttatatttaaaagcactatataaattttggtaata

SEQ ID NO: 14103 - DNA, 218 bp, Glycine max
  unsure (1)..(218): unsure at all n locations
gtctaaaccattaaagtatgtgttcttggagggtgacaccanacctatagtaatcagtaatgcactaacatangaagaagagaataggttggtggacatcctgaggaagcataaggaagcaatcagatggcatatatctgacttgaagggaatcagtccttcgtactgcatgcataagataatgatagaggacgaatacaagcctattcgacaacctc

SEQ ID NO: 14104 - DNA, 283 bp, Glycine max
  unsure (1)..(283): unsure at all n locations
ttctggaggaatcttctggagggcccaagtgggcctggttgctatntacanccccctntttactaaatagcacccccttttctaattttntgtaattctttttccgtaacgttacgaaactntacgaaattcgtaacgatacttattttccttctgcaaggttacgaatacttacgtattatgtatttactctnntttagctttcgaagaagttacagaaacttacggattgcgcaacaacacctcttttcgacttccgtcacattacggaatttcacggatc

SEQ ID NO: 14105 - DNA, 332 bp, Glycine max
  unsure (1)..(332): unsure at all n locations
cctacaggctcgttttattctcagacttctgcaaagcaatttaggaagcttttgttcatttttatactacaacctggaatgaaggctaaaactgttcgttgaattatgttaactcttatatactaacacatgctctgagatcttctattatntgttatnccaatttcttatgtatctattgtgtgaatatattgtagcatcaccgaaatcagctcatgctgaaactgacccagaagtgtggactgctcatttcttttgagattaagaatggttggcattacctaactatatatacttctgtccttataagtgaccattgaattgttctggct

SEQ ID NO: 14106 - DNA, 191 bp, Glycine max
  unsure (1)..(191): unsure at all n locations
caccagttctgagcanatcctatctctntgaacatccttctcctgaagctctctctgcaaatatgttatagtagccttcatttctttgtgatcggcatctaagaagtcagtttttaaactagcaaaccctttngcactcaacagcaatctatctgtcaggagtgtaatacatttctcagatatgccatcat

SEQ ID NO: 14107 - DNA, 110 bp, Glycine max
attaccatttctacaacagctatctttcaaaaaatcatcttcaatctggaacctggatcttgatttacctcatgtgacttcctgcaagaaattttttttttttttctaaa

SEQ ID NO: 14108 - DNA, 215 bp, Glycine max
  unsure (1)..(215): unsure at all n locations
gcctgtttccctttcctttttttgaagctcactacaangccttaagtgaaaaccatgatatcaccatatccttaaggaatgttggagctttggaattgttttgggaataagtgtggcggtntttgttcattgataacatgntttgtggcatgcttctgatatatttgagcctacttatgaaattgctatggtaatgtgacatgctgaatgatgtg

SEQ ID NO: 14109 - DNA, 273 bp, Glycine max
  unsure (1)..(273): unsure at all n locations
gagggagaganagagagagtggggagcacgatattgaaggaagaaaaagggagagaagttgaactttgagttgtgtctcacaagactctcattcatcagagttacaacaagtgttacacatgcttctatttatagactaggtagcttccttgaaaagctcttttgagaaaacttccttgagaagctacacccctctcataactaagctcacatccttgagaagcttccttaagaagattcctaaagaagctagagcttagctacacatacctc

SEQ ID NO: 14110 - DNA, 626 bp, Glycine max
  unsure (1)..(626): unsure at all n locations
atgtactttagtgcanctgttagtgatctgaggatgcctgttgcatgctgctattggaagagatgattatgacacacgttatagttaccctctctgatatatcaccaagtatgttgtgaagaaagaggtcgattatacaacctatcttgtagataacaccatatcataggtatacgagtaggagatccaacatataccatacgatgaagttttggtgcanatatattgtattaaataatgcgaaagatcaattaggcaagtttgaccctaaaatggataaggctatcttttggtgtctttgcataacaaatcatatagatttcaatgaaagaacattagtagctgaagaatctatacatatagcatttgattatactaacccgcctgaagtgagagaatgatataatgatgaatttgctaagcttgttggagacacctacactaatgataggactatgcttgacaccatggtgaagcaatgtctgcccagcttgaattacaatgaatacatcaaaatattgcacangggacgtttctggtaactgctggttgataataataggtgacactanacatttacacacatgagttgtgccgctgtgaaatctatgtgttgaaccacgaag

SEQ ID NO: 14111 - DNA, 206 bp, Glycine max
  unsure (1)..(206): unsure at all n locations
attactntaaggataacatctgagtgaattctgcanatncttatatanaaatttgctactcgaatntcatagcacccgcattggaggccacctangtgtngcananacactccatagatngcaatnntaattttattgtgaacatatgcactgtcatgttcaacaatntgtttgacagtgccatacatgccaacaagttaagcatg

SEQ ID NO: 14112 - DNA, 215 bp, Glycine max
  unsure (1)..(215): unsure at all n locations
accccttatcagctatggaggaatagagaagcaaatatgaaaatatcttataatgtggggtgtcttgcanaggttagcatctttgttaataagaaaagaaaaaatggaccacanattgtngatggtgtnntttgtggatattctttgtatagtaatacttaaagattctcgcgtattaattcaaaagtgtctgaaatttctaatgatactattat

SEQ ID NO: 14113 - DNA, 205 bp, Glycine max
cattacacctgtttagtgaatatagaatcttattgcttaaaatatattcttagattcttataataaaataattgctatttataaaaaatatattctcagtatcttattatctttagaagattaagcaaatgtaggctaataatggcatgcattattgtacaagaaaaatttcctgtgggtgtagtgtgtcaacaaaaatatgtag

SEQ ID NO: 14114 - DNA, 243 bp, Glycine max
  unsure (1)..(243): unsure at all n locations
atgataagagcaaagaaataatannattgganatctcttttgttagctcactanaaggtgatacttanaagcaaacactnttcaagtntcanaactgtatataaagaatgtatacttacagtattctntgtcaatacattaagtgaatcctcatgaaaccacaatcgactgcgcttcccaggtttctttgttgaactttcacgaattatctctcttcccatgtctcgtagtaatggatgcatt

SEQ ID NO: 14115 - DNA, 579 bp, Glycine max
  unsure (1)..(579): unsure at all n locations
tgatgtcactgtcnacctatgaagtgaactatgantactcaagctngantcactganactcgcnacctagcanagctagaaatcactcaattgctcaagtntctttcatccaatggactaacaacattacaacactngttcatttcgtctcagaatgttctcttataattcgattgtttacatgaaccgccttcagctntatatagacttcagagcttcaatccatngagagatcccaactcggtcgtgtctaatagctatagtgcttgacacgangtcgttactgtacagagagagtgnggccacnacacttttgcacatatcttcaaaatacaattgcagtgcacctatgctaagctatntatcgttgatcgaggaacgttacaccagacagaggatangatgcagacagacattaatctccttgttcatgcggagttatgactatgagtcttctggatgttagactgagacgagatgttatgttntatggacaatctaagatgctgcagtaactgacacaccagatgactttttgcaaagttaaccacttttgttgtttaaaatatgacctgctat

SEQ ID NO: 14116 - DNA, 209 bp, Glycine max
  unsure (1)..(209): unsure at all n locations
tataacttatcattgtctgatattatntaaaattactttcattagtaatataaaaaaaaagaaactcctaatggtgggtcgcccatgtatctatccccatttataataaaggtcactttacaggctatccacttaattaaaaagtccatcagactgctctatgctttgagtggaccaatagacccaccacaatcaatatacaacctacc

SEQ ID NO: 14117 - DNA, 624 bp, Glycine max
  unsure (1)..(624): unsure at all n locations
tatacttgcagcactgaaagcaccgaagctgcaagctgctgcccacaaccaatgccaaacaccacctttagcacaaactcatacaccaaccatggaaggaatnttgcagcananaagctggtagaaatcaccccaattctgatgaacctatgctaacttgctccatatctancttgataatcaatggtangaagaagcccaangcattccgttgagcattgtatgaccctganacataaagtgcaaggtctaatagatgcangctagctgaaatntgangagaattgcttgtaattatgacattcgcaggcgacaccattcatagggaatnttgaagggtgttgtagatgtctctaatgaactcgtacgaaatttcaagttggccattattgtaacaacagttgcantgctaatagtatggataaatntgacatccctttctcttatnctctcacaactacatcttntgctannttgacttcacttgaatgtgagtgcaagccattcgatggttngttgctcaagcgactgcgctctgagtntgacttncagtctgtcaatataagtactcgtctacacgttggcgngtgcatanacgatagtaagtcgaacaanaatgaaaat

SEQ ID NO: 14118 - DNA, 132 bp, Glycine max
  unsure (1)..(132): unsure at all n locations
ctgtaagctacaactctagaccttcttcgntctgacatcatntgggcagaagctagagagaatgcatcatatatatgaaatgatagagatcctgttgatggaagtggtgatattgcatgaactcatgtgtga

SEQ ID NO: 14119 - DNA, 257 bp, Glycine max
ctttattcaatgggagccaatgaactaacctagtataatttgtccttctgacatatccaatttgcataaggaagcgaattttactttctcaaatacattggctgaaaaattgtgctcgcactttgctggggtaagaaaaagaaatatgtgaactgatgagtttgtgatcctgattctgtatgcaagatccttttgctctgtgcttcggactcgacagataggctttataatgttaaccgtaactgttccatttgtga

SEQ ID NO: 14120 - DNA, 208 bp, Glycine max
  unsure (1)..(208): unsure at all n locations
cctacatataaacattcattntcttnttggtaaanactctttataaatgtctatataactccgcanaataacttgattatcttaagaaaaatgactaacggctaagattgtatattcgtttgtaagacaattaagagcccgtcattgtgcacacaaataacanatgtgtttgatntatataaaggctaataagattgtatattcgtct

SEQ ID NO: 14121 - DNA, 556 bp, Glycine max
  unsure (1)..(556): unsure at all n locations
tatgcattgacttcatctagctctagttgagtgtgaggcgtgaaggaaatgatagtgcatgctatgtttgctattcacgtatcctnacanagatgaaaagatgggtaactcgtacctgtaaatttttcatttgtaacctttgaagttgtggctggggaccttggctttaagtcacaagttacatggagcnagaaaggagaagtggnacaacattaaagagaggtcgatagatnttatcacatggtaagtggattagtttngaaacaacatgaagtcattccctagcaggcatggtcagacatacctaatgcttgtgttgaccataacctgaatagaagaaaacgtgaactatacatatttgttgatgagagaatggatatatgtgcatcatctgtgcagtngaaattatgcaattactcgatgtantngagatgggcaggaagtgtgataaganaatataagaagagaatgctttgcttcatnagactatgcagacttgaagcttatgtggaaggttatgatgttgtaagacttttgacaatcaaatgtgtttatg

SEQ ID NO: 14122 - DNA, 140 bp, Glycine max
  unsure (1)..(140): unsure at all n locations
ctcatggactcctctaacgacaatagcatcatctcttgcactgaatngatgggagctggaagccatcttctcaatcaaattcctagcctcagtaggagtcatatcaccaagggatccaccactgacagcatgaatcatac

SEQ ID NO: 14123 - DNA, 110 bp, Glycine max
acgcgaagattctcgaccgtacttcaagattcatcgttcgttctttcgtttcttcagtcttcaacgggtaagtacctcaaaccaagctattcaattcattctatgtacct

SEQ ID NO: 14124 - DNA, 322 bp, Glycine max
  unsure (1)..(322): unsure at all n locations
attgtgtcacatcaagttaatttcttatctatcanatttgacgaaaggaccaannatttggattntacaaaacctactaaatatctgtgtttgaaaataagaagactaaagttatacgttggtaaataaattaggcctaaatatatctattttcaaataaaggagnataaaatgtgaattttgataaataaaagaaccacaattaaatctaagccaacaaaataattaatttatacaanataattaaagatgttcagacgataatacacatatagaacaacattagttaagtttattcaattacaaatcaccatttaaaata

SEQ ID NO: 14125 - DNA, 642 bp, Glycine max
  unsure (1)..(642): unsure at all n locations
gatgcactatangtgcactatgantactcaagctngangatggtgctntantggaggananganagagggagaganagagagaggggngagcacattatngaagganataaacggagagaaagtgaactntgagttatgtctcacaagactctcattcatcatagttacaacaagtggtacacatgcttctatntatagactangtagcttccttgagaagctntcttgagaanacttcctagagaaacttctttgagagaacttccttgaanagctagagcttagctacacacacccatctataaactaagctcacctncttgagaagctagagcttanctacacacccatataatagctaagcttacccccatgacagnatacatgaaaatacanaaaaaaattcttgtacaaagactactcagaatgccctgaatacangctaaaaccntatctactataatgccaaatacanggccacacaacgaaaagacctatctatattacaagagagtgatcaccttgccatggctcaaattacctaggtcagagacgtnggctcatatacttaccatctctgagcttatcatacctgaggagatgtcaactaccaatacatctggtgtgtattgtnactactg

SEQ ID NO: 14126 - DNA, 484 bp, Glycine max
  unsure (1)..(484): unsure at all n locations
aaaacatntgtatagntagttttaccagcgggacgttactcttanaagcaaaatggcatataacctcctcccatatatacaaacatcaatgtagatntagagcaagcttatgcgcatatttccttacgaacgttctcttgcacaagacattctattaaccgataaatatgcacccatatacaatcaaggcagcttcgttacctagaatatttacacgtacttccaaggcgtatttgnacatacatacacacatctcttggctaatataccacatgctactcnagcattttgggaccaaaattgccatgtcacatcttgtagtttaataccatcatacacaactatgatgatcttgattctcacataggggcacttatgcctttcagattgatcaaaccctgcaatagatattcttgtgcaaatgatcaataaagtacatttggagattcttctacccccatttgtattttgaacattacacaat

SEQ ID NO: 14127 - DNA, 232 bp, Glycine max
  unsure (1)..(232): unsure at all n locations
ttgaatctgtgtcaactttactaatacttattttgatagcaattcttncataatatataactgactatatattgaatatggagaaactntntgatcanatgatcanaagatcactactagatgccagaaccagaataagtngaatcgtttcttggtattttctgtatcaattcattatttctgtagcaactatatgatgagtacgtgtagttaattatgaatttgcattact

SEQ ID NO: 14128 - DNA, 295 bp, Glycine max
  unsure (1)..(295): unsure at all n locations
gcattttactctcngtttgtttacttttcataccccctcttgccgtgcttaagccgttntacttaagtcatttctcgcttaacttanaaataaaataaatttccaccgaacgtttgaattatattatccgttaacttcggttaaaatcaatatcgaccgttcggtcgtgccgtaaccacgttggaaatcaaaaagaggtaaaaanataatataataatcanaaaatatcttntntagtaaaatatagcggagaatcaatcggacgtcttctctgtgggagttctcattcttaatt

SEQ ID NO: 14129 - DNA, 241 bp, Glycine max
  unsure (1)..(241): unsure at all n locations
tatgaattgtataaaccttacaattcaaaagactgcaagacttcttgcttgcaagaatgcttatgtgctgtttctatttttagagatgatagctgctacaagaagaagctgcctctctcatacggaagacgggatatagcagtaggggcatctgctttcattatagtgatgaannaatggtgttcattaagtcctccaaatccattcattgaagagaagaaatatataaaagatcaagata

SEQ ID NO: 14130 - DNA, 255 bp, Glycine max
tgagctcttcgagtgcatccgctgtctttcgaggcatgaagaatccagaagcagtggcaactcctccctcaagttcagcctttggggaatgggatgaataacaacttggatcttggcgcaatggaggcgctgtcctgagcatgtgcacaagaacaccaacttcagcatcttgtgaatttttcccattggcagtgatgttgaagtgatctctgcagcactcttcacattcgcattctgactgttatgcaaaaatag

SEQ ID NO: 14131 - DNA, 116 bp, Glycine max
  unsure (1)..(116): unsure at all n locations
tctcgctcgtgtcggatcgacccttgaggaagtctgtcttgtttttgtgcccnaacagccctcaaggtgttttgaaggcgatccatactcagacctgttggtgccgcaaaactgtg

SEQ ID NO: 14132 - DNA, 248 bp, Glycine max
  unsure (1)..(248): unsure at all n locations
actttcatattcttcaccaatccagccaatgtatgatatatgccctcaatntcaggatgtgacanacaaccaacaagatattcatgtacagctccatccacaataatccaactacttnctggttgcttcttgacccccttctctttcatttccagccgcagctccgagacatcactccattgattatcagatgcaagtgcattagccaacataacatagcctgcagaattatctgggtctacttcaac

SEQ ID NO: 14133 - DNA, 535 bp, Glycine max
  unsure (1)..(535): unsure at all n locations
tgtgacattgtgaccttcactactcagctagcgcgctgctgatcttatantgcagacctttctgatgatgaccgacgaacantanggtatcactctacacttatgtgccttcagtgagaagaaatgtatcttttccacttgtgaagatgtcaaagttggctatgaaatggtcnactgaaaacatccgttgtcatggttataactatgactacttgacatgctgtgcacacatcctgaaacttttgcatgaatatcgtaaatgccttagacacattgggtaatgctgatgttgacaccacggaattcagtgctgagatgtgttagtcacatcccgaaatagcttggaggaccttgctcgtatttattaaccgtatcgacatatgtntatttttattaaacttattttgcgcaangacagctcttatttgatgttctattacaatattcatgtagtgcacttaatttgcaactttaattctgtcgcctgcccacctctggcacgcaactatagtgacatatctctcttcatctcctg

SEQ ID NO: 14134 - DNA, 321 bp, Glycine max
  unsure (1)..(321): unsure at all n locations
tctgaattctgttctatgctcagaatcagaggttcatcgtgcttctgaggatgtgtnggtccagaaaaccaggcagccagggacaaagagacaagtcgaagttgatntagatttcacaagttttgtcgagaaaaaaatatccgatatcttttctcctcccaggaatcccanatcattacagctacctgagaatataccacctagcattacanaacttccagaggactgccactatgaaccagaggatcttgtcaatntatnntctttgccttatgtaaagggtatttattanagtatagaaatttagttcanatatctcta

SEQ ID NO: 14135 - DNA, 621 bp, Glycine max
  unsure (1)..(621): unsure at all n locations
tgattgcttttgagcatcatctcagctagcganttgantccntaacttatattgctcaaagtggagtatataanaagcatgaatatcatatattcttacccatgcatgntngcactatatgccttatatataggacacaacgtatatcaagtccttatattcctgtcattaagtatcacactaaataatgacatctgagtttgctgtttaatactataaataagatttactaagaatatattgcgaaactntaagaacatattcatgtatcattgggttggaaaatttatcattaaagatatatatatgtgatgtacattcgtgcctatatttaatggacacttgaatatctcaatctatgatattaaatgaaagcagtcgtcttatagagcgacacacgtacaattagtttgtggcatcgaggtaccttggttagcaatttgaaatcactggacgtttataaattatctctttaaagaaagcttttatacggtcttaagaccgctaaatctcacatatttatttttcttaaaaatatatanacatttctgaaacattgaatgttttacacatttcaagacatttatccaatattatttgtaaatgctcacccgtttgaat

SEQ ID NO: 14136 - DNA, 234 bp, Glycine max
  unsure (1)..(234): unsure at all n locations
tcctctcttctcttttctttacattatcttaatggtgggcatatatgtaacgacctacctcgtggctacaatatcaccactctanacctagagaantcattttntanatgaaaactccattaatntgctcatngaaaatgaaagcaattntttcttgatatacattcaccaaacaacgcaccattacttaagtgaatacatatatatatatgtgatttacatcctcaattcaac

SEQ ID NO: 14137 - DNA, 279 bp, Glycine max
aacaatacatcatcaacaacaatatttttttatctcttaacagttatgaagaattcaccttttaaaatgttgagtcttttataggtaatttaaggatgcttgtttataacttgaagttatatttagctgataatgatctttacacgtatatgctcagcaaacgcttgattttttttctttttatctttgctatatgaggagtcttttacgtgtcatatataggtgaacttggactcattagatgtctcttcttgcattaactttaagagctttatattt

SEQ ID NO: 14138 - DNA, 254 bp, Glycine max
  unsure (1)..(254): unsure at all n locations
gctcaattctaaagttnttaagtgatgtaggcaatngcctctgtcgattaataacactagttaaagaaaaagganatntaaccctctgctggctaaaagtgactacatattttaatgtttaatngtcagttaagacttaattaaaggcgtcaatgacatgcaagaagaattctattagtggaaaatggtacaattgannaaaataggataaaggattaaattgaaataaaaaaattaaataaagatattaaatg

SEQ ID NO: 14139 - DNA, 402 bp, Glycine max
ttgcgtgactcatctactatgttaacgctagcttgttaataggtggccattgttttattgtagataacgtgagacatgccctaatatgctcctagggtaaacctcttgaatcctggatactctattctgctggagccgacctattttgcttctgctaactattcacaccaatgggtttctcgctatatcaagagactaattaagaatttggatataaataccctcaaacgattatgtccagaggggagatgttatgaataccattctaatttgtgtcatctgaaacctggatgctagtggtgccaaacagaagctgcatgattaacttgattattctaaattgcgcaaaagttgtatatgtagataggaattaaagatatctgatctctttcgaattttgat

SEQ ID NO: 14140 - DNA, 322 bp, Glycine max
  unsure (1)..(322): unsure at all n locations
tgccattaacctanggagataaaacaaactanatgactgagtgtaactganattgttggaaccaanagtcaccctcaacagccaacaagtcagccaccattnggtctcccanaaggctgatgcctangttgccaattgngcccttattacaactagaactaaagcccttctagttgattaacccanaacatatttttggtcagccaactttacaaggattgggccattatttagacaaactaaacactctaatattgaaatagagtggtgtcatttagttcttcatttgggccatgatacaactcacaacattgggactttc

SEQ ID NO: 14141 - DNA, 261 bp, Glycine max
tttctgcgtagtataataagagacccgtggtgtaacttaactttctaaatttgcaacttaacaatatgtctggtgaattactaaaattttgggtcatgctattatgcctgatctattaatttcagagatgtttagacagactaattattggctcaggctcgtactttaaccgacgttatatctaaacatatcgctaaactcactaattacttgtaaaaatcaatctaactggagcttcacctcaacttaataaatattaaa

SEQ ID NO: 14142 - DNA, 211 bp, Glycine max
  unsure (1)..(211): unsure at all n locations
cctttgccttgatacttcatggaaatcaagttctaaaggacagtactcgtttccaccttatcgctttntttttttgcanagcattnntctatttcaacaaggaaatctttggcacgcttatgaatgccacgcttaatgatcataagactcatgcgatgtgagtgatcccacttctcatgaagtttcctctattgagaggtactagaatctg

SEQ ID NO: 14143 - DNA, 634 bp, Glycine max
  unsure (1)..(634): unsure at all n locations
tgtgccgatgagacncttganactcagctacctngngacangtngtnggcacgacanctctgaaagggaaactccgtggcttgcgctgtggcgcgacangacgagacgccgaacgcgcaacaatgcactactgctcttctgtcgaggtcgcggnggtgcgacngagatgcatgcaaacggaagaagtcacagtcaggtcacggtagatcgaaatttatagaaacggngaagcgggagctcgagtgcgagtgttcatgaattatcancgaaaaccttataaacctcaatgttaacgatgatggctcaagaaaaacgtccttgacattcanaatntcaacgacngtgttntcaaatacactgtcttaacttaccttgttgacaacctacaangacnacaaccccgtcaaacgtgtaatgtgtacgtgcatgacatgcacatanatggtacatattacggaattgcaccgtactctactacacggtatgccgaacatgtgatacgcgtctaaatgacttattatagtgcattctataattaacacttactannatatcaatgtagaatgtatgatgatacgactatttatgatcatctcttgcatattattatattaatatcatacatctattaaac

SEQ ID NO: 14144 - DNA, 544 bp, Glycine max
  unsure (1)..(544): unsure at all n locations
ngaagctccttcttccatgttttattctctagaggatggcgcctcctntcacctcttctcctgtgtcttccgctgcatctccagagaggaagatcaccattaaatgaccttattgaagctcacagatccagcctccatagaagccccacaagcaagctttcatcaagggagcttcaccaccaacatgagtcttgatacgaagctcgataggatgcttcattggacgacaagaaagacggagagaaatagagagacgggagctcgaaattgatggaagaaacacggagagaatctgaactatgagttggtctcacaagactctcattcatcacactacaacaagtgttactcatgctctatttatagactatgagctccttgacaagcttcctgagatactnttcgagagcctctttagaaactctctgagagcttaactaactaccacaccctctcatactaagtcacctcctgagaagttcttagacgattcatagagctaagctagctccatccttcttatagctagccctcttgatgaaag

SEQ ID NO: 14145 - DNA, 319 bp, Glycine max
aaaggactaaaaattatttttaattggtatagaacaaaactttggtaaaaaggtccttttaatattacagccagccatggggacaagccattcttatggccaactatccaaggaaaatgactgaaccaactgctgtggtcttttgaaaactcgtatggcgcggcattgagaaaattttttaaaccgataaccacagcaaggtgttgaattatgacaacaattaacatataataccactctttgctctttataaacctttgcacttatttaaaaacagcgaactttatattaaagtataaaattttactcacctcaacgg

SEQ ID NO: 14146 - DNA, 395 bp, Glycine max
  unsure (1)..(395): unsure at all n locations
tctcgaatcactcttacgtagtagtaccactagaactattagttattaccttacttggtgatacatacttagctcaagtgaaaatcttacttgcaacgtccctgcatgagaatagcagcctagttaacttgatgaacaanaaacaaaggacagaattaaaatcagttagaactataatatgattaatatttaaaaggcattgcattaaagtgtaaaatggaccaacagtcgtagagtntgatgcttcgatctctctctttactttgttaagttataatatgtagctctcaacatgtagacataaatntattaaataaaatgttcaacactttatgatggcaattcaagtgacaatattacaataacgactgcttcgtatcaatttatgcacacat

SEQ ID NO: 14147 - DNA, 497 bp, Glycine max
  unsure (1)..(497): unsure at all n locations
cgtcggtggcacttgaactagctgactactactactgtttctctctctgatatgttaagcttctatatctatcttatcgatactgatatcggagagatcaattccctttgaaatatccctgctttaataacataacataaatacatcttcatgcaagatttgctcaccattatgtgggtggctggttagatttaaaaataactacttcaatcaacgaattttcacanaagggtangattatggaccagttgaatccgttaaactagttgattcaaactggttagaacattctgatatatacagtgcaactgttgatgcgaactgatagaataggttataagcattcatgtcaaatgattttaaacaaatacttaaatgattctgaacacttagatctacgtcacatatgatcacatatgcttacanacatatgcctgctcaagcaataaatatctaataagtctcaatgatgtgtgagcgattagaacacatacatt

SEQ ID NO: 14148 - DNA, 221 bp, Glycine max
  unsure (1)..(221): unsure at all n locations
gcttgtagaagctcttatatactgtcccgtaatctgtcaccataagctangctgtaaccncttcatcatgaactntnttgtactatctatcaattctctctctcacacacacacacacatatatatatacatctcccagcaaactaaggctgaggatgctttntgtgtgcatattttcatactcaaacatttcaagttcaacaaagagctaattatatctg

SEQ ID NO: 14149 - DNA, 471 bp, Glycine max
tatcctggcttaggacctaacaactgcctgtcactcgataaaaacaggcataatttgtgttgctgtttaacatccacactctcaaagaattttaaataactcataatttgttaagctaacaacataagagatctaattggaatcctatactgggaaggtaaaacttaatacccctatgataggatatattttgctccaccttgcgcatctgtatctatgaatggtaaatatatctgcctgcatcacctagaaatggatacgaaaaaggcttttaatcgcacactttactctcttggattatcatattttgatcatacaagaaagtttcactgtctttatcgcgtgtaaacaactttttatagctaaggtcttcctgaaacattgtctagatagaacaacttatgcagctgcctgtacatttgtatataatataatgtttctatagttatcaatgttgtgtccgttcgaagg

SEQ ID NO: 14150 - DNA, 254 bp, Glycine max
  unsure (1)..(254): unsure at all n locations
tctgtacctgtagcaaggggtttgtggttgtgctcctctgctgaccaccatacagaccttggcccttccatgcagcaacctggagcaatngagcagcctgaagcttatgctgcanatatttacaatagacctcctcaacctcangcagcaaatcaaccacagcagaacaattatgacctttccagcaacagatacaaccctggatggaggaatcaccctaacctcagatggtccagccctcagcaacaacaata

SEQ ID NO: 14151 - DNA, 337 bp, Glycine max
tgagtggcatgtgtattggttgtaacttcattgttgcatcagtacatctgatatttgttgtggattggcatcatcatagcgtgtgtgaaggaaatcttttaagttagagaaaactacttcagagtcaaaaatctctatcttaatcacttacaaagctggtgtaattgattacaacgagctgtctaaagcttaaagaagtaagtctcgtatcagcttaatcaattatggtagtacttatattgataacactgctggttgagatatgactgactcttcaggagttctatttaatcaattaccgatgtattattaattactctctattattatagtgtct

SEQ ID NO: 14152 - DNA, 150 bp, Glycine max
gacatccacagtgaaatggaagtgattattactgaaatctgtgtctcccactgatatcagtactatactgactccctgactcagagtcaatccccttttatgatgtagcttgctgcattcaattgcagttctaactaacaattgagttaa

SEQ ID NO: 14153 - DNA, 513 bp, Glycine max
agctttagtgcaaacaacatctatgatttttatatagatgcccaaacaaaatacaggattatgaatacactccaacacatgaccatggtagtcacgacataccagacatcctatgactgttcggaaaaaacaattatagatatcttggttgcaggattttctggccaattaaaaggatggtgggataattatctcactaatgaagaaaaataaaaaatatatagtgttgttaaaacggatctcaatggaaaagtctttacaaatgacgataatgaagagatccctgacgctattaacacctttatttttacaatagtccaacacttcattggcgacccgtcactttggaaagataggtcggcagaattattatttcatcttaagtgtagaactttagcggactttaagtggtatagagacaccttcctgactagagtttacatgagagaagatagtgaacaacctttctggaaagaaaaaattctagtcagcctttctagatcattaagagat

SEQ ID NO: 14154 - DNA, 846 bp, Glycine max
ccactcctctcctaacttagacctaacactccaaataacctctttcaccttcaaccaaactaaaaaacattaaccaacacgaacgtaacctcgcatcaatcgtcataaccccactttgaaaacccccctcacaaagaagcccaaaccaaagcgcggggggcctctattgggcaaaaaacacaaggagagggcctccacaaacaaattttcagaaaccctccggtgaaaatacacagggggaaagaacacccgggggacctccctcatagcgccaaaaccatcccacatactagctcaaggccaaaccccaaaaaggcttgaatccaacaaccaatggggggaccgggccccccccaaaccctcaaagaaccccgttaaaaaggccaaaaacccctcaaccgcatcccccggaaatgaaaaaaaatagaacaaaattactctacccaaatcccaaaccataaatctaaaaaaaaggaccaaaccattggaaagccagctccccctgaaaccgggtccccacccgaccaaataaacggcggacagacccactccatccaaatggcaaatcccccacctctaaacccaaagaggcggcgaaaatcaaccaccccccaccccaaaccccaaaacctagcttacagtaccaggggttccaccaaccccctacactcacccaagaaacgataacaacgcatctaacccccacacagataaaacacatcgaaacaaccatcccaagacaacaaccgacccgaacactcactctcacgcacccacttaaaccaaacaacccaaccgcacgcaacgacaccaaccacacgacacctaaccaacctacccatcacg

SEQ ID NO: 14155 - DNA, 365 bp, Glycine max
agctttaacaaccatatgatgaaacactttgttatcttgtactggtttggttgtgtttggcactccttaaattatgacaaatgatgtagttccatgtagagcttgtaggccttggaccttcttcattaatggagtccttttcttctagaagatcaatggcagtggaatggagaaggaggaaaggtcattgaagatgccacttcaaggagaagatgagtcaagaacaagttcaccaccataggaaaccatggataagagcttgaaggtaggagaagatgagtagagggagagggagagagggggccacaaaatttatgcctcatatgaggtctgaaaattgaaggataatttcctcaatgatcaaa

SEQ ID NO: 14156 - DNA, 340 bp, Glycine max
aatataatgctctcttcttcaatactggttggattcgaggaaactttttattacccaaagatgtgaaatcggaatattctatatgtcggttgcaacatcgaagctgaaaaacttcttgcatgcatgaatggcgagaacaaatggacatgtgagcaagctcgaggtggaaaataaaacatatcaaggacaggtgtgaaatgtatcaaataatcgatgggtatatgatctgatttcccccgtaattatattcataagaagttgagtgaggataaatgcactgtgtgcatctatttggttgggcataacattttatattataataacactaatctattttttg

SEQ ID NO: 14157 - DNA, 575 bp, Glycine max
agctttgagccaaaatcctgactcaccttttttttttacccagggtgagaatgtcaatccttaccctcggaagcaaaaaagaatagaggggaaatttccaatcaaagaaaaagagaaggaaaatttccaatgaaagcaaaaaaagaaaagaaggaaaattccccaatcaaagagtgcgagaaagcaaaaaaagaaaagaaggaaaattccccaatcaaagagtgggagaaagcaaaaagaaaagaaaggaaaattctcaatcaaagaatgggagaaagtaaaaaaggaagaagaagaaggaaagaaagctcctgatcaaggatcgaaagaaaacagaagaaatgtgcagagaggtctttggaccggacaatatctgaacaatacagaattgccaccaaatgaacgaaaaaagaaggaaagggaaccacgacctaaaatagtcttcttcctttgattaccaaccaaaatcccgtgcgctagcgacctttttttctcgccccgcccctaacaaaaaaaaaaccgaaaaagaaaaagcctaataaatcaaaagcccaaaacacacaaaagcccgaaaa

SEQ ID NO: 14158 - DNA, 437 bp, Glycine max
gatcactgggagctttactcagactaatgaatagtgtttttacttctctatgtcactttggctgggccgggtatttccttttttgagtgatgtgagtcaactccttgagactcaatgagataggcactaagatgcagtaattcgattttgagatatatcaagggttctctaggaaaggcattgatttatgataacgaagaacatgcggacattgttggttatgcggatttagactgggcaagttctgttagtgaaagaaaatatactgtgcgtcgtgtcctttatgttttggagttatcagatgactcattcgtggtgccgaaactatcttgagtttcgacctcaaatattatgtgggacatacaaagtgtttgtcgctcacttcatcttattctgacgaggctttagcctttatatatcatgtaatggtgatatct

SEQ ID NO: 14159 - DNA, 444 bp, Glycine max
agcttctcccctattttgctataaatatggtaagaagtgaagaagaaaagggttcagccccttaggcacttctctctctttcgaatttgctgaggaaaattagttccgtgaagaaaatctaagccaaggcgcttccgtaacgtttccgcgagtaattacgcgaagattctcgaccgttcttcaagattcatcgttcgttcttcgttttcttcagtcttcaacgggtaagtacctcaaaccaagcttttcaattcattatatgtacccgtggtggtccacattgtgtttcatgtatttttttctcgttttcatttactttttatacccccttttgacatgcttaagccatttatttaagtcgtttctcgcctaatctaaaaataaaataaaattccaccgatcgtttgaattgtgtcatccgctaattttggttaaatgaattcc

SEQ ID NO: 14160 - DNA, 489 bp, Glycine max
gcgacactatttatactcacgctttgatctaccaccaccgctgccaccatcatcttagttttctattatttttaatattactagcactttgttttctagctgtgtatttggctatattattatgacatttgaacaatttagtatttcttttatttgcatgatatgactgaacaattatgaattatgctatatgagtatgtggctttttatatatatatatttgatctattcatgtttcttgcttcatgattggcttatattcttcaatgaatgtcttgtgaatgattagtagtgtatgtatgttttatacttgttacgcactatggctttttgttgatgccaaagggggagagaaatagggattaaatcaagaactcacattagtaatttacttaatttcaagtgaagcataaactcaaaaacaacgggggagaatggaaaattaagtgagtggtcgactatgaaaaagtgtgtgaatgtgtttcttga

SEQ ID NO: 14161 - DNA, 391 bp, Glycine max
agcttaaaaattcacttacgagcctctcttatattacgggactcaatcaaacatccgagaaaaaagttattgtcgtttgaattttctcagaggttcaacattcaatttcgatcgtctcgatatattacgggactcaatcagatatctgagtaaaacgttattgtcgtttgaattggctcataggttcaacattcaatttcgagcgtctcgctatattacgggactcaatcagacatccgagtaaaaagttattgccaattgaattgactcagggcttctacatttaatttcgagggtctcgatatattacgggaatcaatcagacatccgcgtaaaaagttattgtcgtttgaggtggctcacaagttcaacattcaatttccagcgtgtt

SEQ ID NO: 14162 - DNA, 482 bp, Glycine max
  unsure (1)..(482): unsure at all n locations
gaatgcactattcaatggagttgacaagaacatcttcttacttatcaacacttgcacagtggccaaagatgcatgggagatcctgaaaatcactcatgaaggaacctccaaagtgaagatttccagattgcaactcttggctacaaaattcgaaaatctgaagatgaaggaggaagagtgtattcatgacttccacatgaacattcttgagattgccaatgcctgcactgccttgggagagaggataacagatgaaaagctggtgagaaagatcctcagatccttgcctaagagatttgacatgaaagtcactgcaatagaggaggcccaagacatttgcaacatgagagtagatgaactcattggttctcttcaaacctttgagctangactctcggttagggctgacaagaagagcaagaatatggctttcgtgtccaatgatgaatgagaagaagatgagtatgacctgtatactgatg

SEQ ID NO: 14163 - DNA, 468 bp, Glycine max
  unsure (1)..(468): unsure at all n locations
gggtagggctgtagttgtcagcatagatcacaagaacattcttagttagagaaatatttttatgcgcatcatctcatttattagaaagagccgacgctttctaacacaagatgacacttttaattgcttacattgactgcttgttatcttaggatctattgcattgatgatattatttatgagtatcaatgtttgtttacacaatgcctgagtcttgaacaaaactttgactaatccccaagttccctatgttcgatactcgaatcactctgttttaatttaaaatacttgacgatccggtgcgcttgccagtaacacacgcgaccccacttctgtgtttcanaaagaaaagaaaagaagaagaagtgaaccgtgagtggggcggaacaatttgctaactgtaaagtcatcctagttggcattatctccaagtctctggcgcatggaaaacgacctcaaattaatact

SEQ ID NO: 14164 - DNA, 223 bp, Glycine max
ttatccaaggctcatcttggtggtgaagctacttcttttttgcttattccctaggggatggcgcctactcttacctctcaaactttggcttccgcgtaattttcatggtgggaaagcaccatctaaaggacctcattttatctcaagatccaccccccataatagctgtatcccaaacctttctggggttgtatacaatacacatggggggtaggattgcatt

SEQ ID NO: 14165 - DNA, 511 bp, Glycine max
agcttgatgcctgtacaatcttattcttttatttctaggccttgttcagtttgatgctgtgaggacactggacaccaattttcttgtatgtttcttaaggcctgtttagtttaaggaaatgattttgttttcattagtaattaattacaaaaaacaggaaataaagtgaaaataaagtgacacttgtagttatttgtgaaaacagaaaatgagataaaaacatttcctgagaccaaacaggcccttagaataagcatacatcttaaactagattatcttgtcttacatgaattaatatggtcttgcaggttttacattattccttggattcctaattgatcgtacccaccattatcttcaaaagcttattaatttaaggagtaatgcgggagcttcaaaagaagaattggaaaaccttataaaagaaactgtccaacttaaagaaaaggatgagaaagcttccaggagaattaacagctaaaggaagaactttcacatctgtccaaaagtt

SEQ ID NO: 14166 - DNA, 375 bp, Glycine max
tttgttgaagcaatcttgaatgatacttgaatcttatgcttatcatttgaagcagcacttgttagattcttctatgacatcatcaaaatgatgtatgcgtacattcacacttgcaagcatatttgttgtgataaaagattgatagaaacttcgttgactaagactaaccatattcgcatggattgatcacaatttacagggaaaattgaccatatcttatgagagagaaggacatgaatatggccgcatgactaccaacctctctgggagtataaataatgtattgaaggaatgtcgtatcataccgttaacagagttggtcaaatcaacttataataagggttcaaagggcttaatctatacatgttgccaatc

SEQ ID NO: 14167 - DNA, 582 bp, Glycine max
cagcttctatccaaagggacttaccttttattaattccttagatagcccttttgagccttgattcccttttcttgttttgaagctcactacaagccttaagtgaaaaaccaagatatcaccatatccttaaggaattttggagctttgaaatagtattgggaataagtatggggggtttttgtatcattggacaacttgttttgttggctatgcttcatgatgtatttcgggccatacttgatgtacattgtatattggttaaacggtggacatgtagaatgaaatgttgtttctcaaaggctatagaataaaaaaatatatattcgaaaaaataaattaatcaaaaaattcgaaaaaagaaaaagaaaagccataaagttgagtgattaagacctaaatggcacaagaatgaggaaactcttgggtctactcttcatgtccaataattaccgttacatccttgtagtctctcaaacttttttcttaagatgcacttaatcccctttggctcctctattcctttgggatttaaccactaataccatatttatcccaaccctggccttgcccccattacaacc

SEQ ID NO: 14168 - DNA, 325 bp, Glycine max
ctttcacaaatgccttcacaaataatcatcacacagtttattactaacaaaaccacccatcatatctcccaaaaccccatacccacgaaatttaagagagaaagaagtccacccaaacctgaaatttcgaagtcccactcgtagccacgcactttacgactccaaaaatgctctcctttcacgatatggggcagaaatggtggccaaaggttgaagcttcaatggagaatgaagaagaagaaagctacgtgagagagggagagaaaaggcttctgaatttctgctttggctgagtgaggagagagaaaagctttttggttttaaa

SEQ ID NO: 14169 - DNA, 395 bp, Glycine max
gagccttcttccctattgtgttccagatttttttttttattccctgatgatggggttgatctcgcaaggataccttccattacctggaattgttgggtgaaggaagttccctgactataaatatagctcgtgctcgttctttgaatgtgcgcgtgttctctcgcgaaaagtgcggacccttcttgaggaggggtcttcattttttcctatattgcgactctccttgtgaatttccctatacctgggttttgccatttgccatgatcacaatgaggtgcaccgagtgcaatattgtttgttgtgctacgggctaataaggatgactaatccctttcttgttgcttaaaccatttgaatgagccttgatctatttgattgacggactagatacaccc

SEQ ID NO: 14170 - DNA, 393 bp, Glycine max
ttctcccccaattttctataaatagggggagaagtgttttttataagggttcatccccttacgcacttctctctctctcgaaatagctgaggaaaattagacccgtgaagaaaatacaagccgaggcgcttgcgtgacgtttccgtgagagatttcacgaaggttttcgaccgtgcttcgacgttcttcattcgatcttcatcgatcttcagtcttcaacgggtgagtgcctcataccaagctttgtaagtcattctatgtacccgtggtggaccatatttgggtacatgtatctcaattcgcgttttcgtttactctttatgccgacttttgacgtgcttaaaccatttatttacgtcatttctcgccttatctacaagtgaaatatatttt

SEQ ID NO: 14171 - DNA, 454 bp, Glycine max
cctgcaagcttggtcattctgcacccttgtactattttagcggcgggcccgatgatacgcggagataccttacgggtatccgcacccttttgtcatccagaggcggcgggcccgatgacaagcagagaccaggtttggtcattctgcacccttgtatcatccagaggcggcgggcccgatgatacgcggagataccttacggttatccgcacccttttgtcatccagaggcggcgggcccgatgacaagcagagaccaagtttggtcattctgcacccttgtatcatccagaggcggcgggcccgatgatacgcggagataccttacggttatccgcacccttttgtcatccagaggcggcgggcccgatgacaagcagagaccaagtttggtcattctgcacccttgtatcatccagaggcggcgggcccgatgatacgcggagataccttac

SEQ ID NO: 14172 - DNA, 282 bp, Glycine max
ttgcctgtccgatgcagcagtaatgatggcccgatgttatttttgggaacagttacgaacccggaatgggtttatgcaaagacaacagcggcctaactagcctgattaatgccaaaggaaatcgtgggaagtatgggttaggctataagcccactcaagcgggtataaagagaagcatctcgggaaggaagagcggtagtcaaagctcgcggtggagacaagaaagtgaaggaagcccgacctgccacataagtaagagcttgttgagcacgggtctgggga

SEQ ID NO: 14173 - DNA, 565 bp, Glycine max
ctgcagctttacttccaggaatttctcttgttaattccttcatctgacttagcatcaaactttcctaagttttcttttccattgtttaatacaaagcatttgcaaccaaaaacatgaaggtgtgaaatgttatgttttctaccattaaacagttcatatggagttttctttaaaatgggtcttattaaagccctattcatgatataacatgtagtattaacagcttcagcccaaaaatattttggaagaggagtgtcatttaataaggttctagcaatttcttccaaagatctatttttcctttcaacaactccattttgttgaggggttctaggtgcaaaaaagttatgttcaatgtcatgcttatcacaaaatagttcaaattctttattttcaaattcaccccatgatcactcttaatagatataattttgagatttttcttgttgtgaatcattttttcaagattcctaaatgcttcaaaagcatcattcttatgagtgataaatagtgtccaagtgtatctagaatattccatcactataacaagggcgtagtaactttc

SEQ ID NO: 14174 - DNA, 294 bp, Glycine max
tctctagaggaagtatggacacttcattattcagaaagtttgggaaaggagatctgttgattgtacaaatatatgtagaagacataatctttggcgctaccataaaaatgatgtgcaagggtttttctcagctaaataaaagtgcatatgaaatgagcttgtacggagagctaaagttctttctgggagcttataatcatgctaaaagaggatgtcatattctttcattaagagaaatatacaaagccccttcttaagaggtttcgaatggatgaagctaaacatatggctact

SEQ ID NO: 14175 - DNA, 356 bp, Glycine max
agcttaaagtatgcccgagtcattcatttttatgagatgttgttgaagtattggcaatcacaatttccattccttggattacggggttgaaccaagctcaagcttttacaaaaaggttcatcaagtcaagttgaaatatggaagtaatcgtcctgcacaattggggcaaaaaatgaatcgagtcacatcactgattcgtctactgccaaacatatttacgattgttgatgttcttgttactttcagcttcaccttgacaaagatgtcatggaccatgttgaaaatctaaattgattcaaccccatatactgcctcaaaattcgcaatacttccactgtgcattatttacatgcctc

SEQ ID NO: 14176 - DNA, 851 bp, Glycine max
  unsure (1)..(851): unsure at all n locations
accaacaggacaacgaatggaaactcaacttagaccgatacagcagcagttcaaagaaataagacataaatgacatccacagncaacggannnnggcggtgatgatgcgctgcacaccggnannttgtgaacccaccccctngccggcnggaggggggggggggggaaggtttttttttataggggaaacaacaacacagcaggctagcaaattaacaaggggaaaggacgtattatggcgaggggaagaaaaagggaggcaacggccaatatggaaacagaaacggaaatctaatggcatcaaaaggaggaggcttaatatccatgcttctaaacaaaaacaggtgaacaaaggcaaagcgcgagaaaaaaaaaggttaaacacctatgggacaaccacggggtaggacaacgacaaaaaagaaaatggacaggaatcaagggctgaaaaaatggtgaaaaaagagaggcgagccaaagcatacaaaacgggggggaaagttaaaaggcaagaaaacatccggggggggcgggaaaaagaaaagggaaacatgattggaatgaactcccaaaccacgaaaaaaagcaaggcctatcgactgacacaaagccggcattaggaagcaaaactgggggtccaaccctaataaaaacaaaccgcttggaaaaaagaaagcgccccctaaggggaaacataagtacaacgtgggggaaagaactaaaaagcggcatgtggggaaaagcgacaataaaaaaagaggagggagggggcacaaaaaaacagcaaaagaaacccagcttaggcgctcctataaatcacaaaaaacggaagaagggccccccacacccac

SEQ ID NO: 14177 - DNA, 562 bp, Glycine max
  unsure (1)..(562): unsure at all n locations
agcttggagaaaaacttgaagatgttttgccttttacatgcccaactcctttgagtggcatttgtattagttgttatattgaatgttgcatcttactccatatcatatcgtttgtgcatcatgcatcatcatgattgagtgagaagaaagtttctaaagttataaaatttcttcagaaggcaaaactctctattttaattgattatagccttatcgtaatcaattagacaagttatcttaagcttgcaaagttatgtctcgtatcggtttaatcggttacagccatatcgtaattgattacatagttgtttatgagacaatgactaatttattcaggagtctctgctttaatcaattaccgtgtgatataattgattacttctctttctataagtgtgtcaaaagtaaacaagaacactttaatcgattacattgagtatntaatcgattacattgttcttgagccatttccaagttttggaaagaacaccttaatcgattaaaaagataatctaatcgattacttcattgaattaattgattcccttgtagatgtaatcaa

SEQ ID NO: 14178 - DNA, 72 bp, Glycine max
ggatgcttcaatggatgaaaagaaagaaagataaatataataaaagggggggggggccacttggggtctttt

SEQ ID NO: 14179 - DNA, 1012 bp, Glycine max
  unsure (1)..(1012): unsure at all n locations
gccgcgcgcgacgacgacgacaccgcancggacccgccacggcagcagacacacgcggcaccgaaccgacaagcaacaaacgacaacgcancggacacgccccgncccgnccacgagnttagtacccagtgcagacaccgcgacncttgagaagaaacccccgcgccagcaaagcaggccacccaagacgagggccaagcgagtttatgttgcccnccccccacaaaccacccgggcagcgaaaaggaagaagacnggaacagccccaacaggggcccgggcggccaaaacgcaccccccaagacaaacacaagcaccccccgctggcccaaattaaggaggagaccctgaaacccacaaacaagaccacaacgcccaccgaaactccggaaccgacggcgaggctggccacaccgagaaggacacgaaaacccgcacagaagtaccggaagcacctcccccactgcggcccaccagaacgggtgaacggaagatagacggggaggggcccctaacaccacacccccgaagggacccggcaaggacgcgggaaacccacagggaggggccaaaccgaaggggggcacacgacggccaagggaaacaaaaaaacggggcgcaacgcaaacaactaggaagggcgcccgggaacaaaaaacgagggaagagacggagggcacacacgagcaacggcaagcgaacagaggaacacaacgggcggggaccaacgacgaaaacacacccgcggaggggacaacgcccacgacggcacgcgagaaaacccgcacgcgcgcggacacacgaaaacacgggcacaaaaacaccgaagccgccccagacccccaccagacagcgcacgccgaaaacacgccgcccgaagacacgacgggcgaacagggacggccggcccgcgcacggcggaaacgcgccgcacacagcagccaaccgacacgacgcggccacaacagaacaggcaccgaccgcgcaaggcacgcgaacagctccgcaaccg

SEQ ID NO: 14180 - DNA, 364 bp, Glycine max
accctgcaagcctttttgagggacgtgtttttgttcctcaactagtttaatgccagccgggcattactagatctctcaaccaaacctgcccaaactggaaaaaattaaaaagaattatgaaactacagttctatgcagaactcaatatcattacgaaaattagttagattgtgttacaaattaaaggcaagtcagatactttagttgatttaactgccttactgtctgtgtttctttgtcagaagcaaattgtttagagttgggatgaaccttccataaagatggtggaatataattttccaaaagctaacggtggctaaaaaaatatgcatgggatgtaccactgaagcaattcttttgtgaa

SEQ ID NO: 14181 - DNA, 446 bp, Glycine max
agctgtacctatctttttactatcttttttttatatccctaaaaaagtggtgcaaaagattgtattcattcagagaaatttcctttggggaggtcatcatgaggccaacaagattccttgggtgaagtgggacacagtttgcctttctaaaaataaagggggccttgggattaaagatttgtctaaatttaatgaggctctacttgacaaatgggggcgggagctggctaataattataaccaactttgggcaagaatcttaatctccaaatatggtggctggaaggagttgatctctggtggaaagagcaaattttcctctcataggtggcaagacctaaaggttgtctttcagcagcagcctcaagtggaggggggctgtggtcccaaaattaattttggaggataagggctgggggataattaactctccagccaaaattcta

SEQ ID NO: 14182 - DNA, 252 bp, Glycine max
aaagctcatgaagctggctccagaaaaacgcttttttttctttattaaccgctggatcttctcaaaatttggtctgcaactgtacaaaacactttttcatgatgtgaccgtagggatctatcaagagaagtctggagcgtgctagaagcctctctatgaagctactggaggaagcttattaatgaagcttctttagaaaaccacatgaaactgcctctgtagaaacgcttcccaggcttcgttaaccgttgg

SEQ ID NO: 14183 - DNA, 366 bp, Glycine max
agcttcttcagaaacgtggcatttgtgctcaatacacaatgtccggtacaccacaacaaaatggtgtattagaaaggcgtaatagaactttaatggatatgattaggagtatgttaatcaatttgactttacctgtatctttgtggatgtatgccttgaaaactgccatgtatttgttgaatagggttcctagtaaggcagttccaaagacacctttgaactttggacaaataggacacctagtataaggcacctgcatgtttggggttgtcaagcaaaaataaagatttataatccgcaagaaagaaaattggatgcaagaacaatcagtggatatttcattggtgtcgcaacatgcccttttgc

SEQ ID NO: 14184 - DNA, 425 bp, Glycine max
tgagctcattgttgttgcccacaaagctcctcggaattatctctgccatgctcttccttgcgagccctcttggtttcttgttcaagggctcttgcggtagctacattttcttctcgtaactcggcacactctttccggacgtctgtagcgactaacttgaatttttctttggtgagtcttgcctttcctagctctatttttagagctcggacttcttcatcctcttctggaacttcgaagttctcctcgttgataactttcaacttggagagccaatctaaccctcgtgtatgaactttcagccattcatgataaccaccgatgatgtcattaccgatgcccctaagttctttatctttccttaaacggctttttcacgccttgtggactcttttgcaaacttgaaactttaggtgcccaaattt

SEQ ID NO: 14185 - DNA, 503 bp, Glycine max
  unsure (1)..(503): unsure at all n locations
agcttgtatgttagacctcgatcggtatttttcngttcgacgccgactgtcatttttttcgatcaatatcggtgaataatatttttttgccgaggtgggctaatgttttcctggccgaataaatgggaacatgccagtttcggccgaaacgaaacatcggttgagctcgcacgaaaaaacctagccgacttacattgtaagttttttatgcaacaccgaaaaaaacaaaatttcccctgccgtaagaaaaaacattatcggccagcgagcgcgggacttgaaattcaagctccaaaaactaacccaaggcaacaagggggttgaggagtatttcaaggaaatggatgtgctcatgattcaagcaaatattgaagaagatgaggaggtaactatggctcgatttcttaatgggttgactaatgatatccgtgatattgttgagctgcacgagtttgttggaatggatgatttgcttcacaaagcaatccaagttgagcaacaat

SEQ ID NO: 14186 - DNA, 498 bp, Glycine max
tactcacgcttctgaataggacctccgtgagaaaggttatgaccatttttttttctcgagagctttcgttgttcaatttcgtgcagctcgatatgtgatacaccagaatcggacattcgagtgaaaagttatgaccatatgaatttcttcatagcttccgttgttcaatttcgtgcatgtcgatatgtgaagcacctgaatcggacatccgagttaaaacttatgaccatattaatttcccgagagcctccgttgttcaatttctagcgtctcgatatattaagcgcctgaataggacctccgtgtgaaaagttatgaccatttgaatttctcaagagcttccgttgttcgatttcgagcatctcgatatgtgatacaccagaatcggacatccgagtgaaaacgtatgaccatctgtatatcttcatagcttccgttgtgaatttcgtgcatctcgatatgagaagcgcctgaattggacatccgagtgaaaagtta

SEQ ID NO: 14187 - DNA, 962 bp, Glycine max
  unsure (1)..(962): unsure at all n locations
cacgcgaccgccgcggaaacctnacacaaccaactccacacgacggcacgcacgagcacgtacgcagaacaacgcacaaccaccccaccgcccccnnccccccccaccccattagacacgtagaacancccgatcattaaagaaacccccccgcaggcaacccagcctcacgcccagagggaagaaatcttttatttctccccccgaaaaccccacgggaggccagaggacccattcggcggaagccgaagccgcaccccaaagcccaaaatggaacaaccccggagaaccccccacacccccaagggaattttgggagccatgggaaattggctcggggaaaaacatgcgcggggcagggaccgcgcaccccaaagcccccttcgaagacgccgcccaaagcaccacacaccacccacacactgagcgcaacacgcccccgcaacactggacaccccaaagaacaaacgaaaccgcaccgcgacccgcaaaccacaacccaacagctatacaacgccccaaccacccacacgaaccctcacaaaaaacccgcacaccacccgggaagcacagacacccccgacggagacagacagaacggccgccccaccaacacacgaaccagcaacgaagcaacaacacacaaagcacacaagaacaccccgcccccaacgcaaccacggcggccagaaaccgagcaccccacgaaccagagacgaaaccaaccacccgacacacgaccaaacgcacaccgacccccgctcacacagcaaaccgcgacccagccaaacacacagcacaacagcacgcacctaccgggaatccaacacacgacccagacgaggaacccaccgaacccggacccccaccgcaacccgcacgcccgaacgacccgcacacaaacacacgccacgacgcaaagacacgaacagaacaacagcaaagaaaacaccacaccgccg

SEQ ID NO: 14188 - DNA, 553 bp, Glycine max
  unsure (1)..(553): unsure at all n locations
gactcttagaatactcacgcttgaccggatgtaagatacattttcttcaacctttgtaattattagaataggtttttccttcttttgggtcttgtattttgaccattctagcagtatagggttttagccttgtatttcagagcattttgagtagtctttgtagtagggacctttttttttttgtattttcatgtattttgtcaaggaggtgagcttagtttttagatgggtgtgtgtagctaagctctagcttctcaaggaggtgagcctagtttttagatgggtgtgtatagctaagctctagcttctcaaggaagttttctcaaagaagcttctcaaggaatttttcttaagaaagcttctcaaggaagctacctagtctataaatagaagcatgtgtaacacttgttggaactttgatgaatgaaagtcttgtgagaaatactttaaggtccacttttttnctatttataccttcaatttctgctcccccctcttttttttcttcctattttttttctccataaaagaatacttttaagcttctattcaa

SEQ ID NO: 14189 - DNA, 497 bp, Glycine max
gggagtagtaatcccataccagaccctaaactatcggtatttcatgtgaaagaatcactaaaaccaatcatttggacacccgcacgaactacccatttaatatatgtagtcaaaatagacaatcgtgaacaatcatcataaacaatcaaaatagacaatcatcataaataatcatgaacaataattagcaaacgcaagcacttcactcaacaaaaaattaatcaatcatgaaagataactatcaaacacaatcatttttcttaatcaaaggaaacaatcatcataaacaagcataattaacagccattaaagccaatttattataaacaatcaaaattgttacgaatctaagctatttatgtctatgagtcctaaatctcttctaatatcaaagaaaatttctttggggaaaaagtctgtaaacaaattaactaactgattctttgtggcaccaaattctagcacacaatctcccttttgaacatgatctctcaaaa

SEQ ID NO: 14190 - DNA, 277 bp, Glycine max
ttgcgtagccgctcttggagctgagagaagcctttttttttatacctaagattactaactaggaagaatattttaggtcctaaaggtgcaggctgcaaattggcgcccgtatacctctaagtgttatgcccataataatatcggtatcaaacccatcatggagagaattgtcattgcgattattactccaaccacaaggaataccttctgagcgagccaatccatgctggaaaagggaaaacttctgatataaatggagaacaaggggaagtaacgc

SEQ ID NO: 14191 - DNA, 497 bp, Glycine max
ttacttgagctgagcctagtcttacatgagggatttgcggacgaaactcagtttaagttagtctaaacctaagaaggtgtctaaatcgggcctagtcttacatgagggatctgcggacgaagcttggatattcggcctgacgagggatcgatggtttagtaatttatactacagcatagaacacaagagcacgattgattagagaaatatatttctatgcatcaacttgtttgttagaaagacccaacaattctaccttctgctgtcattttatttaccttgcattttatagtttttagcataaaagtgtagtttaaaatatgtttgaaattatcacttattcatgttatctcaacaatgcttcaattctaaacttatttcaggctaacattagttccctgtgtttgatactcagaatcatccgctttaattttaaatacttgacgatccagtgcgctttccggaaacccccattgaaatttccttgagacataaat

SEQ ID NO: 14192 - DNA, 299 bp, Glycine max
  unsure (1)..(299): unsure at all n locations
ccttgcctatgcgagctangcggcaacctcctcccccgtattgtttaaaaatggcttctggggcagccgtaatgctttcgtaaaatatttgaaaactctgggtaagcatatttcacttaggattggtaaaacggaaaagaaaaaagaggaaaataaaactcaaaatgctcccatatcttttccgtcaagtacgaaaggggggtgaacttattaatttgggggtgcatccggaaactcccttaagaagcctgtggcaagctgggcggcaagctcctccccattttggctttttaaaagac

SEQ ID NO: 14193 - DNA, 479 bp, Glycine max
ccggagaccaagcgcaagagagacagcagacccaccgaaaagaaagaaaacgggcggcaaaaaaaaaccaaggaagcgtaacaacaaggcgaaaaagggcaccaaaagacggccgaaaaaaagaaccccccaccctggcccccaacgaagaaccagggaaaaacagaaaaaaaacgtgcagacagggaaaccgtcaccaaacggcaggatgaaccggaaacacccagaggaacaacacccggaccggccgaccaaaaaaacacgcccacgggagaaaaccgggggcaaaaaaaaggcacaacactgagcacagccaaaaaaaaaccagggagacaagcaacccaccgaattgaacaaacgagaaaaacaacatcccgaacaaacagcatagggagaaaagaccaaggaaacccacagcacaaccacaacgacgcgaagacacaggaaaacaaccgccacgaaaaggccgggcgaccccg

SEQ ID NO: 14194 - DNA, 413 bp, Glycine max
aatggtatgatgccgatagtaaaacagatccgacacccgcaacaaccgttgtaacaagatttttaaggcttattggaatatacacgaaaaatgaaacattgtcggacgatattccccaaaagaaaggatcatagcgtttatccatgggggacaactcaagagggagccataatattaaaaataaatactacatgaattaagataaatcccatatactcagagacttaaatctttgtatttctatatacagtaccaaaatatcataccttgatactaatcaaatcatacaagagatatctagcgacgaatatataacatattatatttcagcagttcctatgttctcattaactaattgctacgttacgcacactatatctgagacgtagagtgtttgtgaatacactcatccg

SEQ ID NO: 14195 - DNA, 362 bp, Glycine max
ttatcgaaggagtcataaataaacgattgtcaaagttctctataagctatgatcattaactgtgaagcattctagcttaagcaataatacaattggagaattctcatgttccataaaacagagtttgatttcaatcaccgtacgtatctatctatcatagaatcaacaattctaatcataacatgaaagcaagtacccgcgactgctccaacagcgccaaaagcaccagattttacgtctataacactggcatcgtactccacgccaccgtcttcggtcagattggagcctctgccggcgtttgagcagggatcgtccttcagcactcggatggcggctacgacacgcgtttaacgcgtttc

SEQ ID NO: 14196 - DNA, 1141 bp, Glycine max
  unsure (1)..(1141): unsure at all n locations
gcgaacacgacacaacagagacgaacttttccanncaacacaggaancgagacgcagtagcgagcaancggccacgtgcactggcagcggaaaanagangatcgagaagcncnaannagacnncnnacncgcnnncnnnncncgaggttttgatggatgtcgntangnacnancnnccnnnnatatangaaaacnncccgccaggnnnaagagnggagnnnaaagaggacggaagagncagcatgtagtgaattataattataaacgcggacgagaagacnacgcagagggaaacgaggaagagaagaagggaggngagacagaacaagccgacaggaaagagaaggagaggaaaagagaaaagaacgggaaaccgaagaggaaaacgacaggggaaaaagaccagcgaggcacgaggagaaaaccatgggccgacaggagagcgacaagaggggagaaaaaaccaaggaggagggaagaagagcagaagaaacaagagcggggccgcggaagggaagaaagaacgaaaagaagggcggaaggaggggagaaccgacaacaaagacgccaaaagaggaacaaagaagaaggaacagaaaccaaacggagggaggagggggagggcacaaaacatcaaaaaaaaaaaccaaagggaaaggaaaaacagagcgggaggggcgaaagagaaacaggaggagcaagcagaaccgggccggcaaagcaaaaagacgagcggaggagaaaacagagagagagaacaacacagcaaaagaaagaggcggggtagaaggagaataggaggggaaagaagaagcgggaacgcaacaaagaagagagaggaagagaacgaaggacaaagagggaggaaggaaaaacaggggggaaaagagaaagagagagaaacaagaaaaaaaagaagacaggagccaaggcactacgagacacaacggacagaaaagagagaagagaagagtacgacaagaaactacaagacgcagagagcgaagaacgagaagagatgcacaaggggcgcggtggaagagaagacggaagaggcagaaaaagacgaccaggggcgggacangacagagagatacagacgagaccagaaatngcgagaagaaacggaacgcgcgacacg

SEQ ID NO: 14197 - DNA, 365 bp, Glycine max
cttggcagccagctcgcccaggcgagcaaggttgttttctctataagcaacagccttcttgaggaatattctttagggcccaaatgggactggttgctatttgcaccccccatttttactaaatgcacgcccttctatttttttggtaattccttcttcgtgacgatgcgaatctttacgaattttgtgacgatacttattatccttccgcaaggttaccaatccttatggattatgtattcactctttaatagacttcgaagaaattacagaaactcaccgattgcgcaaaaacaccatttttacattttcgacacgattcggaatttcacggatcgcgcatgcctgcttccttttgatttctg

SEQ ID NO: 14198 - DNA, 860 bp, Glycine max
  unsure (1)..(860): unsure at all n locations
gccaccgaccagccaccganctcaacccatcgcaangcancgcacgcgcctccacgcaagcccgagcaccgaaccacagctacacgaacncnccnccccnnnnnnncccaagtgcatgcctgcaccncccccnatatntaacccccccggcagaagccagccaaagagaagggggccttatattttaaacaggcaagaggacaaacgaggctggggcacgcattagccaaaagaagagagtcaaaaaatcaaacgccgtgaaaaaaacgggaaaatcgcaggggacgggcaagataaaacccgatgggccaccccgaggaaagaaaccaatttcaccgcgaaatgggagccgaaagaaaaacttttggaaaaaacgggcaccgggagcgcacaagagaacaaaccaccggaaagagaagcaggaattagcgaacccggagctaacacaaaacccgaccaggggggacacccaccaataagcagaaccgggccaaaaagcccggaaccaccggcggaaccaccccggcagacccccgaacacaacagagggcacccagggagcggggacacaaaattgcgaagaaaaccaagccccaagagagaaatagccggagaaaccccgcaccaaagaagaaggtggccggggcagaaacccaagacagatacacgagaaaaaaccacaccccacccgacaaaaagatgcccggcgagaacagataccacgggggaaacaacacccgaaccccgagaaaacccccgcaccacgcggagaaggcgtacgggacaaacggcacgacaaccgacggaaagaacaaaccaaaagctggcgaaaaaactcaaacaccccccacgagggcggg

SEQ ID NO: 14199 - DNA, 822 bp, Glycine max
  unsure (1)..(822): unsure at all n locations
ccacacccaacgcagagacatacaaatcaatcaacgtaacaaccgcgaacagcccagaaacacaacacagccacactcacggnaagaannnnnngcgatgatcatgcctgcaanccngnaattatgaaacnnaacctgctcaaaagacaacgggggaggagaaagggatgttgcaaaaccaatatacagaaaaagaagaccaagggaaaaaaccacccaaagaagccagcaccgaaagggccccaagaagcaccgcccaaaaaaggcccagaaagaacaaggcgcccaaagaaaccaaaacgcccccgaagaacacaatcaccgcataagaacgccgggcaccaacaacggggccaaaccaacaagggaagggcgatacccccggaagcgaaacctccagcctcaggacgacgaagaaacccaaaatcaagaaggaaaaagggacctgaagaaggcaccaacggaaccaccaaaggccagacagaaacagaaaagaacccgagatagaagccaagaatggccaaacaagaaggcaggcgtgaaagaaaaaccgggcaaagggacaacgaacccaacaaagccgaaccaaaaaaaaccacagggaaaaacacagcgcagaaaaaggcaacgaaacaaaaaaggcccaaccaggacccccccacaaggggaaaacaaaagaaccaacgacaccaaacacacgatcagaagcatcgaacgaaccgacagaaaacaacgaacaatccacacccgagaaagacatgcaacccacacctcgcaacgcacgaaccatcaacagacaacacccgccacaaacggaacacg

SEQ ID NO: 14200 - DNA, 256 bp, Glycine max
agcttggttcgaggtacttacccgttgattattttataacgatgaagaacgaatgaagaacgtcgaagaacggttgaaatctttgcgaaattcctcacggaaaacgttacggaaacgtttcggaagcgcctcggcttagattttcttcacggaaacaatttttccaagcaaattcgaaagagagagaagtgcctaaggggctgaaccccttccttcttgccttcctcccctatttatagcaaaataggggaggtgg

SEQ ID NO: 14201 - DNA, 446 bp, Glycine max
tcgattacacacatacagttatcgattaccagtatttctttttcaaaaaatattctcaacagtcacatctttttatgtggttcttgaatggctatcaaaggcctatatatatatgtgacttgagacacgaattttataagagtttttggagaacaaaaaggtcttatcctattaaaaagcaaatcgtgttatcctcttacaaattccttggccgaattacatgtgattcaataaggaattatttgagtgctcaaattgttcagactatctctttcaagagagatttcttcttttcttcttcttcattctgaaaagggattaagagaccgaaggtctcctgttgcgaaagaattcttcacacaaaggaagggttgtccttgtgtgtttggaacttggaaaaggaatttacatgatagtggaacttttaatcgggatgcttggggact

SEQ ID NO: 14202 - DNA, 504 bp, Glycine max
agctttgatctgcctctatattttcaatcttttcatcctccctccagataatgagtttctggtggagagtagatggcacagccccaactccatggatccattcccttcctaatagcaagttaaaattagccttggactgtatcaccaggaatagagttggtcgaactatactgcctacaacaacatctacttgaatggctcccaaagaatagccagttttgccctcataattcgaaagcacaatgttgtgggcagatagatcagtgtcatgtttcccaatcttgtagagcatagatcgaggcattaagttaacagccgctcctccatctatgagcactttgttgattccaacattctcaacttttgccctgatgaaaagagggttgagatgacttttcattcgaaaatctggcttttcgaaaaggctaattgtcttccacacagcattggtctaacatagagcatactggctttgggtaagcatataaaatgatcaacctccct

SEQ ID NO: 14203 - DNA, 220 bp, Glycine max
tgagtgactaaggggggtccacggatggcggagttcctacttgatccaacgatggcaaaaatgatggtggcttcagaaaattacaagcgctcatatgatattatttctatggctgctatgatctactgttggaaactcaatattttactgcccaaaagatgaacatgtacatgccgactacgcatggatgctttttcacactggaaatgttcgagaccat

SEQ ID NO: 14204 - DNA, 435 bp, Glycine max
agcttgctgaccattgacagattacttttattgaagcattcaagtggacatcagaggcagagacaacatttgttccattgcagaaagtcatgacttcagcccccgtgttagctcttcctaatttcgagctgcccttcattctggaaactgatgcttccgacactggtattggagcagtattacctcaaaatggccacccaatagcatttttctccaagaaacttgcacctagagtgcaaaagaaatctgcctactttagagagatgttagcaattgctgaagctatagctaagtttagacactacttgctgggacacaaatttattatcagaactgatcaaaaaagcttgagatcattgatggaaccacccctacagacacctgaacaacaagagtggttacacaggtttttgggatatgatttgtgattgatac

SEQ ID NO: 14205 - DNA, 409 bp, Glycine max
cggaccttgaatttaagcttaggctgctcaattgctccatgttgctgcatggaagggctttgtctgtattgtggtcaacagaggagcacaaaccacaaacctttgcgacaggtacaaatttatgatttaaggctagctgggttaccaagttaaccaatgcatccagattgccttcaagctttttattttcaaatgatgcaaatgggtttgttgctacctcatgcactcctctaatgactatggcatcatttctggtgctaaactgctgggagatggaggccatcttctcaattaaatttttggcttcagcaggagtcatgtcttcaagggctccaccactggcagcatctatcatacttctctccatattactgagtccttcataaaaatattggagaaaaagctgttc

SEQ ID NO: 14206 - DNA, 881 bp, Glycine max
  unsure (1)..(881): unsure at all n locations
agaagaagaacaaagagaaaaaatagagataaaagaaaagaagaaagaagaaaaaaagacnnncnnnaaaaagataacatgagcccggatntnaaagacacgaggagaagnnggtaaaaggggggaagtttattgaaaaaaaaaagaggaaaaaaatagggggggagaacccgaagaagagagaaaatgaagaaaaatgaaagaagaaaaaaaaacggaatggaggaaaagaaggaaggggggaaaagaacagagagggaaaaaatacgaggngggggagaaaggaaaggaagaaaatgaaaaaagaagaaaagggggaagaaggaaaaggagaaaataaagagcatggaagaagaaaaaaaaagaaagaacgggaaaaaacaaagggagaaaaaagcggaaaggaaaaaaagaaagacagaaaagacggagggagtaggagaaaagaatgaagaagaaaggaaaggaaaagagaaaaaagaaaaaggaaaagacaaggagggacatggacgaaagaagagaggcgaaaaaagagagaaaaagaaaaaaaaaaaaacaagagaagaaaaagaaggaaaaaggagggagaagaagaaaaaaggagggagaaaaaaagaaagaaaggaaggaaagaaaacgcgaaagaggaaaaaaagagaaacagaaaggaaaaaaaaagaaaaaaagagagaagtgagaaaaagggaagagggaaaaaaagaaaaagaaaagagaggagggaggcaagaggaagaaggagaggaggagacggaaaagaaggaaaagaagagaaggaagaggggggcgggagatctgagaacaagagggagggagagaaagaaccggaaggagaagaaaggcgaggagaaggatgaggagag

SEQ ID NO: 14207 - DNA, 928 bp, Glycine max
  unsure (1)..(928): unsure at all n locations
gccgccgaaaaggaatacaaaagaaataaaaagaaactgcgaacaacacgaaaagaaagcgaaaagagaagaaaataaaaagnntaataaaaatagaganactgagcatcggagnccagcntatgggagaanaaccacccggganagaaaagagaagcgacaaagaagggggaaaaaatgttttatataaaaaacaaaaaaagaaagagagggggaaggcgaataataagaaaagagacaaagaagtagaacccaaaaagacaagaaaagggaaaaaaggaaaaacaacccgggacagatgtggagaagggaagaagaaaagaaacagaaggggggagagagggaacacgacagggaagaaaggaaaaacacaaacaacaaaagaaaaagaacaagaagacagagggaaagaaaaaaaaacaaggagaacgagaaaagagggaaaagaaataataaggaggggaagaaaaaaacaaaaaataagaaaaagaagagagggaaaagagaaacaaagagaagggaaagaggggaaaaaaaaacacagggaaagaagaaaggaaagaagaaaaacatggaggaggagaaaaagcaaaaaaaagaggaaaggaaaaagaacaaaaaaaaaaaagagggaaaaaaagacgaaaaaaaaaaaagagagaaggaaagcaaaagaagagaaagaaaaaagaaaacgagggaagaaagaacgaagagaagaaaggagaaaaaggacagaaggaaaagaaagaaagagagagaagaagaaacgagagacaggaagaggaaaaaaaaagaaggaaaaaaacggaaagaaggggaaaaaacaaaaaaaaggagaaaaagggaaaagaagaagagaaaaaaaagaaaagaaagaagaggaaaacaacaggaggaaaaagaggggaaagcaagagaaagaaag

SEQ ID NO: 14208 - DNA, 389 bp, Glycine max
agcttcaggctattcaattgcttcagtttgctttttcttaatggcaaaggtctgtgtggtggtcggcagaagagcacaagaaaatgataatcttcccaaagaatggaaaacttcaagaaatcatcctcttgacaatatcatcggtgatatctcaaaaggggtaacaactagacactctctcaaagatttatgcaataatatggcatttgtttcattaatagaacctaaaaactttaaggaagctattatagatgaccattggatagtagctatgcaagaagaattaaatcaatttgaaagaaatgatgtatgggaattaatagaaaaacctttagattatccaatcataggaactaagtgggtttttagaaataaaattggatgaaaat

SEQ ID NO: 14209 - DNA, 588 bp, Glycine max
tgccaactatcttcttctcagccttggcctaatttcgtgtccctgtatgattatcacaaagaaaggacaagcttcagagaaacagagcttcaagtcgaatcttcaaaattgatgcaacattgcaacagcagaaagcgcttgaaggtgaagacaaagacgccatcacgacagactggccaagagctttgtgcacacacaactatttccaacatagatctggtttttgcatacacactttaccaaagaaccaactttgatgttgagaggaagtgaggtcgtgtgcgcttctcaaagtgtgagagggtgcgagagagaaaggaagtcaagcatgagagttaggccttaacagagtggcaaaggtagcatatcggtggcagccaaagtgagaggacacgagagtgaaaaaggaaaactcgtctcattcaaagatggtttttgaaaactaatgttgaattcttccctttcaaagattattttttgaaaactgatgttaaactcatgcctttgacatcggtgcatgaaaaaaacgatgttaaatgtgatttcaagatgatttgtgaaattgccgtaaaaagtattttttaaaaa

SEQ ID NO: 14210 - DNA, 495 bp, Glycine max
agcttggtggagttccctgagaatcttttatttcgatatcgaacgatacatcagagacaaggaatacccgcctgaggcctctgacaatgataagagtacattatgaaggttggcggtcgatttcctcctgagttgaaatatcttatgcaagaaggaccatgatgtgatgctgctttagtgtgtagatgcaagagaggtcgagcaaatgctaatagaggtgcatgaaggatcctctggtatgcatgccaatggacatgccatggcctgaaagattcagtgagcgggtattactggctcactatggagagcgaccgctgtaacaccctgatatatatatctacatattattagtaattatgtttgatgtttgattatatttgttgcgatattttatccgtaattattttcaaggaggttaatatagttaatagaagggtgcgggtagataaggatttagcttctcaaagaagcctcttgagaaagattctcaagaag

SEQ ID NO: 14211 - DNA, 535 bp, Glycine max
tgtaggattatggggttcccatcacatgtggtactagtctgcggtcgggcgatggtgcacaacaagtttttttccacatccacaatgcgcgcataaacccaccatcccctgttgcccacctccaactgagctcacgtactcccacgtagcccatatcctcgtttttctcaacaccgggtccccatcaatcctcccaagcttccacaacatccaagcaaaacaacattcaaacagcacaagctatcacagccaagcaaaacagagcaaaggcagaaaactctgctcaacacatcaaccaaaatcacagcttttctcacttaaagaccacagtaacaataccttcgatccaattcgttaaccgttggatcgactccaaacttttactggaaggctatagtgcataagcctacattgtgaccgttgggatctactagcaaacatccagaactcattctatactactctttccccagccaaccacacacaagcattttctgcaccaagctaaaatcctgctgccctattttgacacaaa

SEQ ID NO: 14212 - DNA, 552 bp, Glycine max
agcttgatgcctgtacaatcttatacttttatttctaggccttgttcagtttgatgctgtgaggacactggacaccaattttcttgtatgtttcttagggcctgtttagtttaaggaaatgattttgttttcattagtaattaattacaaaaaacaggaaataaagtgaaaataaagtgacacttgtagttatttgtgaaaacagaaaatgagataaaaacatttcctgagaccaaacaggcccttagaataagcatacatcttaaactagattatcttgtcttacatgaattaatatggtcttgcaggttttacattattccttggattcctaattgatcgtacccaccattatcttcaaaagcttattaatttaaggagtaatgcgggagcttcaaaagaagaattggaaaaccttaaaaaagaaactgtccaacttaaagaaaaggatgagaaagcatccaaggagattaaacagctaaaggaagaactttcacatctgtccaaaagtttggaaaagataaaattgggatctgaagagaaagataagaa

SEQ ID NO: 14213 - DNA, 300 bp, Glycine max
atcatttgagcagccttggagattttttttgacattatcaaaatcatgtatacatacatttacacttgcaagcatatttttttaatcaaaatttaaaaaaactccgtcaacttaatctatccatatctacatggattgatcgcatttcaaacgtggaaatgaccatagcttatgatagagaatgacgtctatatggccacatgacatccaacctctcaaaatgtataaataaggttatgaaggatcgcctcaacatagcgtaacaggcgtggtcaaatcaacatataataggtgtcgaaa

SEQ ID NO: 14214 - DNA, 460 bp, Glycine max
tagttggacatctgttgagtatgtgaacagcagtgtagactgcttcagcccagaatgtgttaggtagccccttctccttgagcatcgatctagccatttccataattgcgcaattctttctctctgacacttcattttgttgaggaaaatatgtgactataagttgtcgctcaatgccttcatcctcacaaaatctttcaaactcgcgagaggtgtactctttgccgagatcacttcttaatacttttatccgttatccactttgatcttccgcagggccttgaactttttgaatactccaaagacctctaatttttcttttatagaatatacccctgtcattctacagaactcatcaatgaagagtatgaagtccctgttgttctcatgcgatggcatactcattgggccataaacggacgtatgtatcagcttcaatagatctttcgctcttcatgct

SEQ ID NO: 14215 - DNA, 143 bp, Glycine max
tttatcagataaacacatgttttgttttattcagaaaaatagagtgtatctcttttatcttaatgatagcgattctcctaaattcttgagtgattcaagaacaccctggctgtatcaaaggactttcacaacccttgtgtgtt

SEQ ID NO: 14216 - DNA, 366 bp, Glycine max
ggaaaaaggaaaagcctccaaagaaaaaaatacgttaaccgacccaaccgcacactttagaagggaaaactgacggtcaacaaaaacagctaaaagaactcaatgaacttcaagatcaccttactcaagagaagggtgatctctagaaagaaagtgcacaagctcacaaagataatatgaactctaaaaatagcaaacatgatcttcggatatagtgtgaaaatcacaaaaattctgggaaaatcttaaaagataagcttttaaagaaagaagccttaaaggggcaaccccaagatggtatttaacctaataaggagactgatactctaaagaccacccctatccaaatttggtggaggatctgaa

SEQ ID NO: 14217 - DNA, 325 bp, Glycine max
atactcacgctctactatgcagagaatatccaaggaaaataccttcatctttcttatcatcaaattttcctaagttatcttttccattattcaatacaaaacatttacaaccaaagatatgaagatgtgagatatttggttttctgccattgaacaattcatatggagttttctttaagatgggtcttattaaagccctatttaaaatgtagcatgcagtgttaacggcttcagcccaaaaatattttggaagaggtgtatcatttaataaagttctagcaatctcttccaaagatctatttttcctttcaacaacaccattttg

SEQ ID NO: 14218 - DNA, 739 bp, Glycine max
  unsure (1)..(739): unsure at all n locations
ctagtcncctgatgaaaccgggaccctctagagtcgaccccgcaggcatgcacagcnnnnnncgcagggaaagaggcgagaatttttcttctttcaaagaggcaagggcccaaggggggggggccacattggaagagcccgccaaccacacaccggggaagaaaacagggaaagccacctgggaaaacccagggcgcaggagcaaggaagaaggcctccaacagggcgacaaaaaaccacggccgggaaggaggaaacaccgcccccgacgacaggagcaatcacagaacgggcgaacatcaacaaaccccccacaaaaaacgcccgcaaacccctatgcgccaaacaagaaagccaatgcgcgacatgaagacccgaaagagcccacaaaccgggaaaacaccaacccgaagaacgcagaggggcccaaccaccacctgcacaaaaaagaaccggacacaagccaaaacgacggacacacagtcccaccatggagcacacaggagcaccacgacaaacaaccaacccgcccacgaacaaacacccccgcacctagcgcagagcgccgaggaaccgcacacagcaccaagccaacgcacgacgcaaccgcacgctcaacaaccaacactatccagcaacacccacgctcgaaccaaaagcaaaacccacgcaccaactaagaaacagtgccggcggcgaccgcccatgacgcgaggacccccaaccagcaacccaggcc

SEQ ID NO: 14219 - DNA, 145 bp, Glycine max
tgaaccaggagcggcagcttcctccggcgaagaaatcctggaaaaacacagcgtttggaatgatttcgggaatatcaaaaaactattgggaaatgctggagaaaacactattgcccaccccatttttatccgcatgaacattgtt

SEQ ID NO: 14220 - DNA, 365 bp, Glycine max
agcttcgagaaaaaaacatattgtgattatttagagtgagagtgacacctagaccgtgagcgagagtgagatcgagagtgaggctaacactgagattgggttcaccgtgagcgagattgatcgagagctagacgaccatgagcgcgagtgacaccatgagcgacagtgacgacattggtttcaacaccatgagagtgagagtgagagtgacaaagggctcgtgagggagacgaagaatgagggagaagagtgaagtgtcacaagcgcgaaaagtattataaataggacaatacaacggcgatttttgttttctaaaaaccaatattaaccaactcatgtgaacatcgggtttctaaaaaatcaat

SEQ ID NO: 14221 - DNA, 1110 bp, Glycine max
  unsure (1)..(1110): unsure at all n locations
tgtgggacctgaagaaccttcgtagacnacgnccactanttgtgttataatccacccccctcgttgttgccgtaagccacctcatcgagagggaggtgagtcgagtgctcactacgnctttatccacatacgagagcgactctcgtgggggtgagatgttcttttgtatgtgaccctacattcggaaacatcgctgtgcttacatttccatctccaccacctttgtttaacctataagtggcccttctcgatttactaatattatattatgagagacttccctgtcgtaacactaagcgcgtagtcccctaaccatttctctgagaggttgtgtgcgccgtatttcattagtgtaataacatttgtcgccactgggtcatctatggatacgtaaaagagaactactcgcatcattggcccatcattgttcaaccccaacccgcacttcagaaactgtgataaactttcatggtgttttgcacgggaattgttaccctgccattactcggattaacctgccgtagggtgtcgaatatataccattgtgtattattgtcgtcgcaatcagatacttttatgtgttatctatgtgcgtaccacacggcgcgctatatgaccagtatacgattcgaaatcgcgcaccgtatgctattggctcttagcgctgttgcgttacctgacacttattcagacaaactcctgtatgaccacggcttggttttgcttccaagaatttctactcgagtcgtatataatctcactcttacatcagtggtgtctgtagcagttcacganggtaccgtctcttttcatcgtatatacgtcatgtgagtgcgcagagccatctaaatgctgtcctatcatcacgatatcaacataactccactatgttgtggacttgggctaaggaactgatgtctctgcggcagtcattctgaatacttagttgcgccctcgatatattatataaatctactgggtcgtctttgtggtgcgtagactgttctacgcaatgtcaatcttattgcgtgttttctgcaactcctattcgtcacactgtattagatacatgcaactcctgctaccactgacgatcgcggattgagatcg

SEQ ID NO: 14222 - DNA, 913 bp, Glycine max
  unsure (1)..(913): unsure at all n locations
caaagaaaccggaagaagacagtgacgaaaagataatagtagaacgaaggaacaangctacaagaagggaaaaaggaagaaagaaaggagaacangccccnnngggccaggagttgatgcatgcacancnncnnnnttgggaaaaaaacccgganaannngaaannaagagaaaggagaaaatggtattttatataaaaangnngagagggggaggggggagaataagaaagaagagaagcaaaagggagataagaaaaaaaaagaggatgaaaaaaaatgggtgaaaagaaacaaaaaggagtagacgaaagaagggaaacagaaggaggggcgtaagaaaagatagaatgataagataggggaagaaagagggtatcaaagaagaaagagatacaaatagaaaaaaccagaagaaataaggaatataggcataaaaaataagaaatagggacgaaaagaaaaaggaaaaaagaaggaaaaaaatagagaaaaagaaaaaaggaagaaagcaagagaaaataaaaaaagggaggaaggtgaagaaaggaaaaaaagaaaaaaggggaaaagagaaagggggaaaaaaatagaaattaattaaagaaaaaaagggggagaacaaaaagaaagagggaaaggaaaaaagaagaaaagagaagtagaaaaaaaaaaaggggaaagaaaaagaaagaggcaaagaaaaaggaaaaaagaggaaaaagaaagggaagaagaaagaaaaaggaagaagaagggaaaaaaaggaaggaggggaaaaagaagaagaaaaaagaagaagaggagggaaaagaaaaaagaaaaaaaaagaaaagaaaagaaaaaaaaaggaggaaactagagaagaagagagaagggggaaacgaaaaaaaagaaaaaggaaagagaaggag

SEQ ID NO: 14223 - DNA, 752 bp, Glycine max
  unsure (1)..(752): unsure at all n locations
gattgttgacacgtgtaaccccngananttggaaaacacacctcgaccggatgtgaaatacatgtgggagacgctgtttcatctttgactccatttcattgaagcgcgtggtcacttgtcaaatccaagactcatacctcccaccatcataagattttaaaccatctgacccttgccaatttctttgaatgaagaggagaatcctttatcacggtgtctattatacccatatttttagcgcccttcgtttcccctgatgctttctgccccataatttttgcaagaggtgctttgatctaaacaactatagcgatccatctcctggatggatcataacgttcaaaaacaacatggttttgaaggggtattggggaaaagaatcattgcgaatatcacgcgtatgggaaaaaattgcaattcttttttatgcacttccctcctgattgttctattagattgaacctcttattgaatggacattagagaattaagaagctttttaaacggggggagggtctagacttattgggcaaaaaagaaccacgtgggttctggaaactgtccactataccaaagcatctgtcgtggttcacaagccacgtaaccgggggggggctaacataccttgggtctattggatggtgtgtcactttccaactggttaatgagttgataaaactctcctcgttatcatctatggaagtaacatatacacactttcttgtgatagactcttatggttaccgataccg

SEQ ID NO: 14224 - DNA, 406 bp, Glycine max
agcttagctcatggttcagtgtatggtttccttgagcctcagtctatacacatgcaaaggatagacattaagaatgtcaacattacattgaagcatgggtcaaggaatcacaacgacaagtgttcttaggagcttacttgaatcagtaagttaaatttatgtagtacattataaaaatgttagcattataagtacctaattataattgtcaactttatggcacattcgcaacttgttgttttgtgtccaccagacagtattgttgtttggttttgttctttgcgtaagaagtctgatattagcatcaaagctgcagttaacaagtaattatttaatttataattaatttagtgttttaaaaattgtataatatgcaaaaaggattttgatgttatatgtggttatg

SEQ ID NO: 14225 - DNA, 550 bp, Glycine max
tacctgccaaaaattctaaactgttttgtcaaatgttttatcaaactaactaactaacttccactaatatatagagtcactacttagaaagaagggatggaccttgattaggtccatctaatatacctaattaaactaattacacaaaactagacccaaactcgcagcccaattattgaagtgcagaggttttgacttccaaggtcatattgacccttgaagtggtagaattggccaaatcttatttgtgacaaaattgaatatctttttcttagctttctagagactactaacatactccatttggagttttgtagtgtcctatatgccatgcacaagacagataggtcaagtaagcgcaaaattcaaaaattagctacaattctcaattaagctcaatcatttgcctaagactaaaactgaatgaaagtggggaaatatgagtcaaagaaatgtttattgagctcataagaatagtaaaatttatacttgaaatgctcattcaaattccccaactttatttttgtctcctggaaaaactaaaagaaga

SEQ ID NO: 14226 - DNA, 1080 bp, Glycine max
  unsure (1)..(1080): unsure at all n locations
accgccaccccacacgatacgaaccaacacataaccaatgcgacggcacagacacacgaatcaaacggcaaacaaacgaaaacacaaaggacaccaaacnncnnnagncagagatgatcccctgacaacaccnccggtannnaaaaaacccacccgaggacacaacccangggaggaagggagggaagatatttttctatcgancagccgcacagaaaaggggagaaggacagcaaatagaaagaatgagtggcccacccaacgcagctgcgtacaaacaaggaagcagacgaaaaagagcgcgcggcaccggagagacccacacacgaggcggagaacgacaaataacgagaacccacacgaaacaaccgcaacagcgaagaacgacggcgagaagacacagacagaaaagaaagacaacaccaagacagctgcatcaaccgacagcaagataccagaacagcaccggaacaacacgcagacaacacacacccaccgaaaacaaggaggcacgataggaaccgcaaaacaggaccgagaagggcacagacccaagggggggagggggaaacgatccgaaaacaaacccccctaccccaaatacaacgacgcgaacgaaaagagaagggggacgccgccgaacccaacaggacaaactaacagaggagaaaaacactaaaaccgccaccccccaacgaaacgaaagcacaccgccacaggacgcgaaccacacacgagaaaacgcacacaatacgaaggaaggcgaaatagaaacgaagaacaagaacgataacacaaaagcgacgcccgcaaaggacaaaagagaaaaacggaggcacacaacgagacgaggagcaggatcacaagaagacccgagaaacaccccaggagaccaacagaacacaacaaacgcggaagaaaggatgcaagcaacaaacacaacagaactaagagacaccagaaaaacctaaacgagaaaggagagaggcccaaaaagacaagagcgaacggcagccccgaaacagagacaggaaccaaccaaacgcaaggagtacgaggcgcggaaacaccaacaccacg

SEQ ID NO: 14227 - DNA, 299 bp, Glycine max
ttttttttccattacccttctaaaaaggtggggaaccaaccccccaaggagaaataagtgcaagggaagagtaatagaccagaccaacccacacaaatgaaatgggccctccgcaacaagtcatccataatatcaaataaatcatcttcatcattggggaatttaccaagagccataggcatagggagtcttctattcaactacttcaaccatttcccaacacctcaacattttcatagttgctcaagtttcccaaaaaaggctccatactcaatgcctggataggaaaataagaaatt

SEQ ID NO: 14228 - DNA, 413 bp, Glycine max
agctttaactcggatgtccgattcggtttcttttatatctagacacttgatattgaataacagaagctctcgagaaattccaatggtcataacttttcacacggatgtccgattcgggcgcataatatgtcgagacgctcgaaattgaacaacggaagctctcgagaaattccaatggtcataacttttgactcggaggaccgattcatgcgcataatatatcgagacgctcgaaattgaacaacggaggctcccgagaaattcaaatggtcataacttttaaactcagaggtccgattcaggcgcataatatatcgagacgctcgaaattgaacaacgcaagctctctaaaaattcaaatggtcataacttttcacttggaggcgccattcaagcgcatcttatatcgagac

SEQ ID NO: 14229 - DNA, 344 bp, Glycine max
tgccgcaaatgcaaacggcaataacgttttactcggatgttcttttgagtcacgtaatacatcgaaacgctcgaaattgaaaacagaagctctgtgcaaattcaaacgacaatacattttaactcggatgtccgattgagtcccgtaatatatcaagacactcgaaattgagaataaaagctctgaacaaattcaaacgacaataactttttactcggatgtccgattgggtcccgtaaaattatctagacactcgaatttgagaatggaagagctgatgcaaattcaaacgacaattactttttactcggaatgaccgatggagtcccgagcgcttgatatat

SEQ ID NO: 14230 - DNA, 709 bp, Glycine max
ttccaacaagcagagggacgctacttgaattaacatttctaacatggtaatctccactgaataataatggcgcttatcgcgatccgcccgacatagaacaacttgtctactcttcttacttaaagaaactagcggtttacttatgtttatgcattttacacttttttgctgctttgctaagggaagtagtagggacgaatcttcattttctaactgagcacgcaccttctagggtttacccaatgaacatatcaggggctccaagaaattttattatacagaagcctactctggtagattatacaagggcctgtcccccaaataagtacgttctttataaagaccaaaaggctggcttgactatgtattggacccgctttttgaataactgctagcataggtgagctcagtactacgaggcaccatgtttggttaacacgaactttcaacttcctaattttgcctttctgggttaaatactcaggagacccagcccatacatcctgggatttgggtatgcaaaaaagattggtaaagacaattctttgtgtggtcaataaaacacgtcttcgtaacaacattcataccatattttgtaaacccgcacttatgaatacaactaattggagggggtcacgttttttcatagcttcgcgcctttcccccacggatcgctctacgcgtattaattactcaccccaccccttcg

SEQ ID NO: 14231 - DNA, 838 bp, Glycine max
  unsure (1)..(838): unsure at all n locations
ccccccccagccccaaaccactcaaactctaagaccgaactcgacacgatccaaccaaaccctcaatatacacagaaggatnnaaagtttgaccgtgaacgcaccattaaacaaaccgccaccaggacaaccgagacgaggcagcagcctttttggtacaaagcgagcacggaacagaacgagaagacgcaatagatcgcaccggcataaagagacacacaagcggtggaaaatgggcccgggcaaggaacaagaacggaggtccaggaccaaacagaagggacacaaaacgactcgatggaagcacaggaaaaaaatcaagcagcccctaacgcctgggggcggcctgcaccccggacaacgaaagacggaaggacaacaagaacaacgaagacaagccccaaacaagagggaggagcgaccgctcgccgcaacggctacaataaccacccaaaagggaggggaacaccggctgaccaaaatttgccgcacaaacaacacaaatggagggatgaaaagactaccggacgacaaggcaaataacctccaggaaaagaaagacgcaccggacaagaaaaaaaagcgactcaacaggaggtccaaagcggaacaccctccggcacaaatagaaaggaacaaaaacaacggaggggggaaaaaacaaccaactcaatcaatagatcggacacggccaacactggccgaggcaacccgaccaatctaacaaaaacaaatccaaaggcgaaaaaaaataaaaggccgaagggaaactacccaccacaccaaaggagaggagaagaaagaaacgccagggcgcgaaaccccagggaacaaaacc

SEQ ID NO: 14232 - DNA, 522 bp, Glycine max
  unsure (1)..(522): unsure at all n locations
agcttgtgcaaaataaatcactcctatttttatctctaacatgcattggatgttgggctcgtcctttgtcacgggaagccggaaagtccatatcaccttcttaattgtacacatggggcactgcgcccccaaaggcgcgagtaagaaaaaataattttccgggctctcgtgttccgaaaatgcattcatatcatgcatcgcataagcatctcttcataacatcataatggacatatcctgcatttgtccgttatcatattccagcctcacattttgcatgagtcatggcatcatcatgcatatgcgttcaacaaactttttgatctgcaaaattgcataccatttgttttcatccttgcgttttcctctacaaaacaaaaacaaaaagggngaagcgtgaaacttcacactacatttcttagttgcatgtgttaagcaccatgacccaccattgtgggatcataaccccttttttaaaaaaaaacccaccccaaccaaacgaataattgacatggaccctat

SEQ ID NO: 14233 - DNA, 385 bp, Glycine max
tttaccaagaaatgctactcttaaaacaaaaatggcatacaacctcctccaataaacacaaatatcaatgtaaatttagagcaaactcatgcacatacttccttgcgaacattcactcgcacaagatattcttctaactaagaaaaatgcacccatgcacaatcaaagcaccttcgttacctagattatttatatgtacttccaaggtgtatttgctacctacatcacatgcacttccttggctaaatgtacatacatccatactcaaagcatcttggctaccaaaaattgcacacgtgcacattctggtatttctaatacctatgcatatacaaaacttgtgatgaaacttggctatctacacaataaggtgctacattttatg

SEQ ID NO: 14234 - DNA, 579 bp, Glycine max
agcttgttaaagcggaagaaaagttttttgtatgtaagccaaattaaagtgaaagtacacaaaacaagtagggaccactaagggtgcatagaatgaattgaaagattccatttccggaacttaccggttgaagactaaagaatcacgaagaacgaacgaagaacggtgaagaacgatgaagaattttcacagaatcgtttaccgaagcgttacggaagcacttcgactcgatttttcttcatgaaaatgtgttttttgcccaaaatagccgaaatgcatagccaaggggtctggaatatttttgaaacagccccctcccctatttatagggaaaaagagaggtgcttgccgcccagaggcttcttgaggaagatttctaagcgcaccctaattactaagttcacccacttttttgtactttacggaaaagttacggaagtggttcggatttgattttcaatctttttttctcttccctctctccaatgttaagagaaatatgcttacccaacgttttctgaaaattttacggaagccacggaagccccggaaaccatttttaacaacgtggaggagctt

SEQ ID NO: 14235 - DNA, 423 bp, Glycine max
tgaagaaaaaatggttaaaagccaaacttcaatgcttttattttcctatttcctttctaaattggtgttgaaccaaccccccaaggagaaataggtgcaagggaagagtaatagaccagaccaacccacaaaaatgaaatggtccctccgcaacaagtcatccataatatcaaataaatcattttcatcattggtaaatttaccaagagctatagtcatagtgattcttctattcaactacttcaaccatttcccaacacctcaacattttcatagttgctcaggtttctcatagatagcttctatactttaatgcttgtataggaaagtaagatattgaagtttttgggctttatgtggaatactctgtcatgggttatggaagctgctgctatcatggccataggcatgacacatggcaca

SEQ ID NO: 14236 - DNA, 863 bp, Glycine max
  unsure (1)..(863): unsure at all n locations
cggacggacaaccaaagtgcaaacgaaggaaagaaacgataaaaggaaagaacggaaggaagaaagagaaaatggaaancnncccccnnnncaagatatgcatgatgcaccccccnnnnnnaaacaacanccanggaaanaaggaaggagggggaaaggaggattattttgtgagaagggaaaaaaggggaaggaaaaagggaaagcaccaccaaagcaaagaaaaaagaaaaagaacgaggaaggaagaagacgaaagagaaagagaaagaacgaagaagaagaaaaaaaaaaaggaagggaaacaagaaggaagaacaacggggaaggaagaagaagagaagagaagagaaaaaaaagaaaagggaaaagaacagaacaaaagaaagaaaaaaaggacggaaagaagagaaaaagaagaaaaaggagaaagagaagggaaacgaaggggaaaagaaaagaacaaggagaacgggagagggaagaaagagagaagaacgaaagaaggaaaaaagaaaacagaaacaacaaggagacgaagaagaggagagaagaagaggaaaaaaaaggaaggagaagaaaaaaagacaaaaagaagaagaggaagaaaaaagacagcgacagaaaaaacgacaaaaaaaacaaaagagaaagaaagagaagggggaaagaaaaagcaagagaaaaaaaagagaaaaaagaagggggaaaagaaaaaacgagaagaaggaggaagagaaaagacggagaagaagaacaggagaaaagaaaaagggaaaggagaacaccggaagaaagaaaaaaaaaaacgaagaaacaagagaagaaacgaaagaagagaaggaaaacaacgaaggaacgag

SEQ ID NO: 14237 - DNA, 816 bp, Glycine max
  unsure (1)..(816): unsure at all n locations
caaacaccgagaaaaaaacaaaaaaaaaaccgaagaaaaaagcaaggacaaaaaaaaagnnggggaaaagaggatgagcactgagcacacgctgtaaaaaaacccccgcgaagaaagacaaacaacggggggggaacattttaataaganacaaagagaaagagggaaagaaaaggagaacacacaaaaacaaaggaagagggaaggaaaaaaaggaggcaaaacccaggacgagcaaaaccagagaaaaaaacagaaccgagagaaacagcaagcagcaagggaaacagcaaaagagagaaaagggagaccgaaaaaggatacaacaaaagcggaacgaaaagaccaagccagagagagaagcacacaaagaacaaacgaaaaaaagagcagcccagacacgaaggagaaagaccaagacaaacaagcaaaaaccggaacaaaaaaccacgggaaagagcaccaaaaaggggggaagaaaccaaccaaacaacaagggaaccaaaccaaacgagaaaaaaacaacgccaggcaaaaacaaacagaaaacacacggaaacaaaaccaagaagaaaaaaaaaaggaccaaaacaaggaaaacaaaacacaaggaaaacacaaaaaaaaaggaaaaacgccacgacacaaaaagaaccagccaaaaaagaaaaagcagacaacaccaaggacaaaaaaacggaaggacacacaacacaacacataacaccaaaaagaaaaagaaccaaagaagcgcaaaggggacaacggaaaagaacggggaagacaaaaaaaaagaaaagcaaacaaacacccacg

SEQ ID NO: 14238 - DNA, 813 bp, Glycine max
  unsure (1)..(813): unsure at all n locations
cccccccacccgaccgaccacccacacaccaaaccgccgacccaagcacccgacgcaccaaaccgaatgcacgcccnnccccccncnnccccggagccatgagacccggccnntnnaaaagaccccccgcagcgcgccagcaactaaggagagaaaacgactgtcctttctctacccgaggaaggaggccggaggcccacaagaaaaaacaagagacccagaaggcgcccccccaaaacaaaacggcacccaaaagaggcaggcgcagaaaaaaagaacccccccaagccgcaaaaccgtaggcctcaagggggccccccaacgccaaaacacgggcccccctaaaaggccaacctggcgaaggaaaaagaaaagcgggagcccaataatacaagggggacgcaccccgctaagccgtacaagaagaacgcacaagaaggacccaaaaaaccacaataacctgaagccaccctcggggaaagatacaatgccgaaaaagaaagggaaagcggtacaagactcgaaaaagccaaccgaaaagccgtcggagcccgaaagaagagaggaagcaagggtggcagggcacaaggaaaacctggggcaaaagaacacccaagcccattggacaaccacaaaaaggaggaagcccgcccacaagaccaaaagaagccctgggagggaaggaaccacaaagaccaaaaacggggggaagaccaaaagaaccccccaaagggaaaaaaacaaccgggggggaaaaagggaaaaaaccaccccgcaggaaagcccccaaagggaagaaaccccgaacccccg

SEQ ID NO: 14239 - DNA, 337 bp, Glycine max
atggtcttagccactcatttctgcttgaggctattttctccaatctgaagtccaatacaccactagaagccaacatcactctattgcctaaaagttgagaatctaaaccattggttctcgtcccccatgtgaagggttccagaacactcaatggttattgggctcactcaatgctagaattactacatggttgtgcttggatgttgggactgtaactcacctgcatccaagccctatttatgaataagacacccaccacaacactgaatagactctttccatatgatgttaacctactggctcacatatagatgtttgagtgcctttgcaagtagta

SEQ ID NO: 14240 - DNA, 558 bp, Glycine max
gcatgcaagcttctaactttagaaacaatcttcctatctttacatgatgatgatgcatgatgtacatatgaaaatatagagactaagatgcaaccatcaatacaaatgtcacccaaagagttaggcatgtaaaaagagaacttcttcaagcttcaaagcttagtcttcatgttgctcccctatctctaatacatggtttccttaattgttcatctggtgaaggaaattgaattgtgtgatctcatttatatatggtggatgtacccggttaagctttacaagaagatcttaatagagtatacaaagaatttacattatcctgaagcatccattgttgaaagatacattgcagaaaaagatatggaattttgtttagagtacattgaaaatgccaaaccagataggctttcggagtctcgatatgatgagtgggaggcaagggtttgcgagggctacatgttataacttttgggtctaaaggaaatacaacaagcttatttgtatatactaaataatagtaatgaagttctggcatacttagttcattaggaagctttt

SEQ ID NO: 14241 - DNA, 440 bp, Glycine max
  unsure (1)..(440): unsure at all n locations
tttcatatgtcattacatcacagctcagattctaaatattctataaatggaatcttaatctctgtaaatggaatttcatccacaaattttatatttataaaatatatctaaaaatgcttatattctcagtcttgaatccataccactgatcactattttccatccatataaatagatacatggatcatgaacaattataaggaaggcttggagaacacctctaagaattcatcagtatctgaagcatccacaatcacaataaccagtaataggggaaaataattgcaaagacctcattaatgaattgcttgaacagaagcatangctggcttgtcatttggaattcattcaaaaacactatcaataatataaccctttcttgcttgacactaaaatattgggatagaaaaatacttttattaaaaaagcttgggtatttt

SEQ ID NO: 14242 - DNA, 212 bp, Glycine max
acataacccaccaccccttgcaaaagggggattttgattatagcaagctgggtttactaagttgagcaaagcatcaagggtttcttcaagctttttatttccacttatgaagatgaatccgcggccacctcatggactcctctaagaacaataacatcatttcttgcactgaattgttgggagttggaagccatcttctcaattaaattcct

SEQ ID NO: 14243 - DNA, 328 bp, Glycine max
gacactatataatactcccgcttttagaaaatgtcgatgccgagtgtgtactatattttttttttgtagcagttgtacgaaacctgtgtcgcactcaaattcccgtatgctggaaagtcatttatggtacaaaatagcattgcgcgcaacttgaatgtttcatttcgatacccatcaaacatgaaaacccccttgtacaacaacttgctcgagtctttaatcaagggactgagataagcatcgatgtcatttcctgggtgtcttgggcttgatatcatgatatacaacattatgtattttcgcttcatgcacaatcaaagatgcaagt

SEQ ID NO: 14244 - DNA, 869 bp, Glycine max
  unsure (1)..(869): unsure at all n locations
cccgcgcacaccacacagatccanaccgcccgaacgcacacaanacgccacacaaacaggaacgcgaacaaacagagaaccacccncgccccccccnnncccccgatgatgctgcaatgcacanccnccnnnnagngganangncaccnggnngnnngnannnnngcaagaggagggagttnatattattgaccatcagcgcagcacgggagggaaaaacaagatacgcacgcccgacaacaaatgactaaaaacagaggcagggagggggcactaaaacacgaaaagagcaaaacgagcacaaaagccggaacccaaacaacaagggctgaataaggagcaccccaagccaacatagccacggaagtgaaacaccgcaaagacagaggaatccaacagcaggagcaccaaaccacgacactaatgtgtcccacaacacgccacggggaacacccaccgaaagaccagcaccaaaaaaaacagagaatagtggaggaccgacgagcaacatcacacgcccaacatcatacaaatcggcacaaaacccacaactatcacacactactaacaaagcgctggccgcccctcaaataccaaaaacccagaagtgcgacgccagccgcaagaaaaaaaaggagaacggagaaacacacccaaaccccagggaggagaacagacaagggcctaaacaaggcacccaaagaggcaaggggggaccaaaagagccaccacccaaacccccaccgggaacaaaccccaaaggcaaagcccgaggaagaaaacggggaggccaaaaccaacctggaacggaaaaaaaccccaaaaaaggggggaggcaaaccgcaccccgacaaacacagcaaccaccg

SEQ ID NO: 14245 - DNA, 351 bp, Glycine max
tgacagtattacaaatctcaatatatgttgccaagtgctattatggatcttcatttggtaaaccatgaaacaaattgctctatattaaatgtatcagcgaaggtgggtaagttaagttttgtgcctaaacctctggccgcgcaacacttgagaaatataaccgcactggagtacttgagtaatctttcaaggtcactcgttaaggttgctctttagccatgactttggcttcaaattttgctgtttgagattccttggatgtaggtgaattagaagatgataactcagaaaagtgagccttttcaaggattgatgctactattctatcgtgcaaaagctttctttttctct

SEQ ID NO: 14246 - DNA, 686 bp, Glycine max
  unsure (1)..(686): unsure at all n locations
cccccgccgcaacaggcaaacaacagaggtggcaggaccacgacaaacaaggagagaggcggaanaccccnnnnnnnnaacaactcgagacaccccnnnaannaaagcccggagnagnagaaagggaaagaaatttttaatgtnaaagagaggaggaggaagaagagatgagagtaagacaaataaaaaataaatgggaaaaaggagtaggagagcaaggcaataaagaaagaggaaggacagcacgggcgcaaccaaaggaaagaagggagagaacaacgcaactaggcaaggaaaagaaagaggagcccaacaaagagagggaagacacggaaggccgccaagacaaacaaggcaagacagagaagaaaacagcgcgaccaccgggtagaaaccgacagcaaagaaggagctatcgccaagaggaagacagggaaaccaccagcggaaagaaacaacaaaaagggaaggaggaagggggcgacagagaaacagggcgcgcaggaaaacaaggcgaagggaagcgcaaaaagaaaaaaagagctgcccacggggaggaacagagagggaagaaccgaaaagaaaaagggggggaagacaaaaggaccgccaacgggaaggaaaaaaaggggagagaggggaaaacgccaccaaagaaaaagaaaaaaagaaggagcaccagcgcc

SEQ ID NO: 14247 - DNA, 116 bp, Glycine max
tccttatcatgggggattgaagtgcatgactataccactttctattcacgcgcatctatcctctgtatatcgtagttcaatccgcatatgcatcttgaccctacctctgtgaagat

SEQ ID NO: 14248 - DNA, 576 bp, Glycine max
agcttatataatccaagtggatcaaaatcacctttgaaaatttcattgtacaagaggcaaactatagatttgcaagcatgaagaagaatgaatcaaaatttatgcagggagggggcatcatgcatgaatgatgaatagcaataaagcttacatgtctcaaccacaggggtttgaatcacagtatccaaatctgaatatatccagggagggaacaccaagcatgaatcaggaatcatgatagcaataatacaaactttcagttctttaattttctctctgactccgtgattctaaaagacctataccaaacacatccaagatccagagaatagtgtataactgccatgtgtcatgagccttccgtatttatagatatgtttacagacaaaaatactattatattctattaatatagcattgtccatgccagaaattcatctttagtgtgtgagtgctctccatgtcatcaaccaaagatataagacacgtgactatgtggataagcttattgaataacttagctaaaagcattagcataatatacaatggcaaacattaaaagaagttacaattcta

SEQ ID NO: 14249 - DNA, 440 bp, Glycine max
taggggcaggtacgagtaggtgctaggcccatgataaatctactatcatcttgcgtctggctcaagacattaaagaagcgcttatatgagacaacctagtatctctacttctgttctttaaaattcatgcttttatttatctattttcttgaattttatttgaatgtgcctagtttatttgtgaccatatgagttaacgaaatgataaacatggctaggaatagcttaaagttttgcaaaaaaaaaaaaaagagaaaagaaatttgcttaaaagaaattaattgaaagaaaaagcttaaagaaaaaaaaataaaaagccaacatgcttttgaaagaaaatgaccaccagttttctttggaaaattcacaggtcagtacattgaaagaattttgaaaaaaaaatgtgtgcgccttaagggtggattgttagtcgatgaata

SEQ ID NO: 14250 - DNA, 606 bp, Glycine max
  unsure (1)..(606): unsure at all n locations
agcttggagaggatgcttaatggattttttaaagagggagagaaagagagagggggggagcacgcaattgaaggaagaaaaagagagagaagttgaactttgagttgtgtctcacaagactctcattcatcaaagttacaacaagtgttacacatatttctatttatagactaggtagcttccttgagaagcttttttgagaaaacttccttgagaagcttctttgagaaaaattccttgagaagctagagcttagctacacacacccctctcataactaagctcacctccttgagaagcttccttaagaagattcctaaagaagctagagcttagctacagatacctctctaatagctaagttcacctccttgagatgagaagctagagcttagctacacaccccctataatagctaagctcacccccatgacaaaatacatgaaaatacaaaaaaaatccctactacaaagactactcaaaatgcctcgaaatacaaggctaaaancatatactactagaatgaccaaaatacagggcccanacgaaggaaaacctattctaatattacaaagataagcaggctcatacttagcccatgggctc

SEQ ID NO: 14251 - DNA, 505 bp, Glycine max
  unsure (1)..(505): unsure at all n locations
aatctttgttttattagcttaagtggatatgaccgttgtatggattaaagccttccaatttttcatttactcaaagcttgttttcttgtgctatgtgtcagcttgtggtggagagtgaaatagacaaaagtctagttttttttttcttttttctgagcaacattcatcttgtctccattacttgtacgaaaatgattttgtagagaatatactaattttgcttttgttcttgctttataaacacaaatttgaaatctaaatggggagataaataaaaaatgtgagggaatacaaaggacaaaagattttcaagaaaaatcatattcagtcaaagcataacatatatccattttgttggacaaaattgaagaaattttagtgcaagtggaaattagagtgtaagtttattatatacatttggacacgggtctagcatgattgatgctagttttaccaaatatttntttgatgcatatttccttttagcgtgttggatcatgtattt

SEQ ID NO: 14252 - DNA, 502 bp, Glycine max
  unsure (1)..(502): unsure at all n locations
agctttaagaaaagggcaaactccctcttttattgatttcaggcttaaataggtggttttgtttgtgcttgcgcgcttaacacaactctgaatcactcagcgcgcattagtggatttcggctaagcacgtgcttttctcgctcagcggatggactgaagcggtgcgcttagcgggatgacgctttgctcagtgaacatccacagctcatccttcttccagattcttcctcgcgctcaactgaggagtgttgcgctcagcagatggctcgctaagccaaaagattggcttagcgagaggatgaaaatcaagacttcacaaacttgcctaagaaacctgaaattgagaggaaatgattattaaacacacaaaatggaaatactaagtatttattacctatctttaacaaaaagtaattacaacactacagaataaccataaattggaggagatttgataccatntacacaagtttatacacaaaagttagtcgtattcatcgac

SEQ ID NO: 14253 - DNA, 485 bp, Glycine max
tgtagaacatactaaacttttaaaaaaacattaaattaacattgttaagatttatatcatataaataagtcaattcagaatttaaatttaagaaataagactgcttttataggctattccaactaacctgtaaacttttgtgggaaatggcttcggcccgtttgtcaaatgtctgcgtgggcagcgttgcacacatggacagatgccatggtaggttacctaaggtctaagacaaacagaaaacgtagcacaccgacgcattaatccctaatcaaattgggacttgtgacccacttatgtggcacattttcaaacactcaaacttctacatttaatttaaaagggcaaaaggcaacaacttaaaacactgttcattcttatttcaatgtcaacgtaataatgaataaaattgagggagcattaacatataaaagaaatagcttaataaaatggattttttattttaattctttaaagaatttttt

SEQ ID NO: 14254 - DNA, 493 bp, Glycine max
  unsure (1)..(493): unsure at all n locations
agcttgccctaacctttggaatgagctttttaaatagccaaaacaactccctctagttcagttgtaaagaaagaaagatacccacatataaaacatatcctcctaagaaagcaccagagcaataatgaaataacctaccatagcgaagggaaccatgaaatgattttaccagccttgggtgcatgaatattgatgttaaaagctttgatgacctgaaactcactcaaagaggatctcatacagcttaaagtaagataaccggcccacaagcaaaatatgagcaaacataaggatcattgcttgctgctatgagacaaaaagattatgaaagcaggcttgattgtggcaacttaagattgcccaaaccacaaagataaagctagcaagaacaacatctttagtttgcaggcgaacaactaatttgccaacaaccaggataagatccataggagaagcangattaaaaccatgaccagttaagttatagatgata

SEQ ID NO: 14255 - DNA, 365 bp, Glycine max
  unsure (1)..(365): unsure at all n locations
gaaagcattgattngatattgcttgcctcatcatgtggtttatgatgtttacaattaaatgatcctttgctaccctgcaatgagacacacacagatacacaaacacacacacattgagacaaacacacgcggacacaaacacaggacacacacacacgtaaagatgcacacacacacacacacagagtcacacacacattaagacacagacaaagacgcaaacacactgagccacagacacacacagagacccacacacaaagacacacacactgagtcatagacacacacatacacaaacacactcacaaacatggacagacacacacacacacataaatgagacaaacgcacacgcacacaga

SEQ ID NO: 14256 - DNA, 415 bp, Glycine max
  unsure (1)..(415): unsure at all n locations
gacccgcacgcatgcaagcttattgaaatctagaggaacttcttaatgnngttgtcaacaaacacttcaaaaagtgcctggattacctgggaaagagtatgctcacccaaagaaaaaggtggccttgggattaaaaatctctacctttttaatataagcctcttatctaaatggaggcggagatttctccaataccactttgtagataggtcccctcttattacattcagatatggttgttctttctctgatctatcccatctggcccacaaaattggtttgcttctaacatgattcgcaatgtcggcgatggctcccaaatgaaattctggtatgctctttgggttggtgactcatgcttctcacacttggtctctcgattgtctcagagagtgacacggctttcttgtacagt

SEQ ID NO: 14257 - DNA, 503 bp, Glycine max
atgtaagcgtgggatctttgatccctttcgatatttttttatgagtcactcccaaatatctctctgtgtggcccgtttttaggtgcttgttggttgccacgtttgttaggtctagacaatcactagtcttatctactttagattttgatgaataacaaaaagtataaattaataatattctaatgactttttgacaagtggcctggttctatttcttaaaagacttaagaatatgttgtattgtcctagaaggattactttgttaactatctatccagcgtccaacacgctaaaactaaacggcgaccactctctatgacaattagtgttatacactatgttattggttatatcacgcgtccaaccaataagtaactcatacatcttttgaaatgatcagcattaacaaaaagtctgtggtaaccataaaaaggaagtacacatattccatcctatacaaatttattttgtctctctttattttgaaatgctaatatttgaat

SEQ ID NO: 14258 - DNA, 406 bp, Glycine max
gggggagctcacaaattggcggcccacaacaagagagaagttgaactttgagctgtggcgcacaacactctcattcatcgaagttacatcaagggttacacatatttctatttatagactaagtagcttccttgagaagcttttttgagaaaactttcttgacaagctattttgagaaaaatttcttgagaagctaaagcttatctacacacacccctctcataactaagctcaacttcttgagaagcttccttaataagattcctaatgaagctagagcttatctacagatacctttataatagctaagttcaccttcttgggaagagaaactagagcttacctacacaccccccataatagctaagcccacccccatgacaaatccatgaaaatacaaaaaaaa

SEQ ID NO: 14259 - DNA, 481 bp, Glycine max
gcatgcaagcttagagaggaagcttcatggatgattatagtgagagagagggggggaggcgtgggaattgaatgagattagggagagaagttaaactttgaactgtgtcttacgagttactcaactatcaaagatatgacaagcgacacgcgtgacactatttattacctatcacctgggaagcttccttgagaagctttgttgggagcactcccttgagaagctacgaagagaacaatttcttgagaagctgaaggttacctactcgcacccctctcataactaagctcacctccttgagaagcttccttaagaagattcctaaagaagctagagcctagctacacatacctctctaatagctaagtgcacctccttgagatgagaagctagagcttatctactccccctctataatagctaagctcacccccctgacgaaatacatgaaaatacaaaaaaaatcccctactacaaagac

SEQ ID NO: 14260 - DNA, 281 bp, Glycine max
catcaaagtgaaacgcatgaatgctagtctaaccaaactgcctaacttggaagacacattaggaagaatacatacaaacacctttcccaggcctgggtgcatggaggaaccaaaaccaccgtgcccttttctagcaacataccaggctcccaaatatgcacaggagaattcacgtgttcacggataaacaaacgatgctgagaacaaccggcccaaaagaaaagaccacaccttcgacagagaaggtgaaacataaaaacggattggaaaaatgtgaatga

SEQ ID NO: 14261 - DNA, 293 bp, Glycine max
cggattgatacagacccactaatggtggatctcttcctaatacaactcgaaaggggtcattaccaaaccttccttaacaaaagggacgaaccaaaaatgagcccaacgaagcattcaaacccaattttgtggatggccaaatacaacacaccttcaatacatgtgtaatggcttattaagatactcagactgcccatccgatagcggatgagaagaagacctcatggacaatattgtgccctgagatacaaataaatgatgaaaaaatgaactaatgaggactctgtatatat

SEQ ID NO: 14262 - DNA, 275 bp, Glycine max
agatattgttgcaatgacatttccgcatggcatccctacatcaaagtatgtgaaatcatacgcacattgtagttaggaatgaaaaaataactataaagagcaccacctgttaggtgccatactccacacgtgcatgttcattcacctaaattgacctcaaccttattcccccacatgtggacctcatattttaagcccatgttattaccacattaaaaagggagtgcattgattatccaaacgaaattatttttctagtcttttatactacactg

SEQ ID NO: 14263 - DNA, 464 bp, Glycine max
  unsure (1)..(464): unsure at all n locations
aaagggaaagtcttttttttattgattcggcttaaataggggtgggtngagctgcgcgcccacacaatctgaatcactcagcgcgcacagtggatttcggctaagcacggcntttatngctagaggaggacgaagcgggcgcnaacgggatgacgctttgctcaggaacacccagctcatccttttcagatcttcctcgcgctcaactgagagtgtgcgctcacagatggctcgctagccaaaagatggcttacgagaggatgaaaataagacttcacaacttgcctagaaacctgaattggaggaaatgattattaaaccacacaaaatggaaaactaatatttattcctatctttacaaaagtattacacactacgaataccataattggggagattgataccattacaccagtttatcacaaagttatcgtatcatcgctaacactccccaatttacaggt

SEQ ID NO: 14264 - DNA, 262 bp, Glycine max
tgtagaacatactaaacttttaaaaaaacattaaattttcattgtaaagatttatatcatataaataagtcaattcagaatttaaatttaagaaataagactgcttttataggctattccaactaacctgtaaacttttgtgggaaatggcttcggcccgtttgtcaaatgtctgcgtgggcagcgttgcacacatggacagatgccatggtaggttacctaaggtctaagacaaacagaaaacgtagcacaccgacgcatt

SEQ ID NO: 14265 - DNA, 851 bp, Glycine max
  unsure (1)..(851): unsure at all n locations
accaccgccgcatcgaaccatgcaccaaggacaaaacaaccaagaacgagccacaaaagcacgcacaanacnncaaaannnnnaaaactagcatcgtgcaccncnccnnntnaaaaagacgccggaagnagggangaggaaagaggggggggatattttcgcgggagagcggaccacgggggggaaacaggagaaggtcgagacggacaacagaagccggggaaaaaaagagaggggcaaaagcccaaaaccagaagggccaaacacgcgcccaacacaggcagaagcgggaaaagaaaacccgggaggtcccaaaaaaagcaaaagggcgaaagtcaacacagagaagggaaacacgagcgcagcacaaagagggacgcggaggacggcacacagggaaacccgaaggataagaaaaaggacagaacggggaaaccgaaagcccagggagggggaagacacacagggacgccaaagaaaaaagaaggggaagacggccgaaagacaaaggggaaaacggagcaccacaaaggaccaaggaagggagaacaaaaaggaggacgcgcagaaaggaagaacgggaaagccccgaggaaaaccaaaagggggaaacaccacacccggagggaccatgcaagggacggaaaaaagagggacgcccaaaaaaaaacaccggaaacgcccgggggaaaaaaaaggggcaaaagccgcacaccgggagcgcgaaaggagggaaagaacaacgaaacgacgaaagagacaacggggagcggccggaaaaacaaaagggaagaaacgtacgcacgaaggacacaaacggaggggagaaaccaagagcggcgcaaagagcc

SEQ ID NO: 14266 - DNA, 336 bp, Glycine max
gagatgaggaagtgttgaagggtgaaacttcctgcttttattgttgaccacagagtggtacctggagatatgtcgcgggggtcaggagaccttggggacgtcaggtggggtgctattgcccaaaaccaagcttgaccaatcccgacccaacccgggcatagtcggtcagtgagaacctgtgatgtacctaagcaggcgagctcctggcagtcaacagataaaaggaaaacaagaccacaaagcaaggaggcttgtggtggctggccagctgtgaattatgtgtaatatgtggattgtggcctctggtaatcgattaccaagggtgggtaatcgatt

SEQ ID NO: 14267 - DNA, 901 bp, Glycine max
  unsure (1)..(901): unsure at all n locations
catccggaccacaacgtcaaacgcaatccataaccgaaccncgacgagcacggaaaagcaacccgacgggaaccaatcggaggcacagacggcaaaagcgccacgcccccccccagtgatgcctgcatagcacgcccccnnnaaaaacccccccagagcagcngcaagcgacgagagcggaaacaaattattatttgggaggcgcccagggggggagcaaaaggaggagaacgacaacgcaaccgcagaaacagaccccgcgggagacgaagagaccgcccaagaggagaacaaggcggcgggaaaggagaacgcctgataacggctgagcaaaaacagagacggggcggggggaaacacagacaggcacggatggcagccacaagaaagggcccctcacgcacccccacccaaggcataggccccaggtctcgcaaacggaccagcaggaagacaacaacaagcccaacctcaagacccacaacagaaccatacaccggcaaagaccaaaaccggaaaagcagtgaaggggcgaagcccaccaacggccaaaggagaaaacgggcaacgggcgcaacaacaatgacagcgccgctaccgcaaggaggggccacaagagccgacaggatcaccacctcaaagcgaaaagcgtaggaagaacccggggcccccccaacgcacaagggagggagcgggaacccatcgcaagaccacaaaaccgacacggccgaacgaagccacccataaagcgccccacaaaaaggaacacggcaaggcgcccaagaaagaggaccaaggaaacaacaacccacgcaagaaatgaattganaggaagggaagaaacaaaacccaaaccacggggcgaaggcgccccaacggcgaacaacacaacgaaaggaag

SEQ ID NO: 14268 - DNA, 421 bp, Glycine max
tgtacgaatataagaaacatcttcttcgaccttggtgtttcttgactccatctcattgaagcgcatgtccacttgtaattccaaagtatcaaacctttcaccaacaaaagtttgaagacgatcgaacctatccaaaatcttttgaagaagagaggaatcttctccaccatgtccttcttcatcaataggtcgagcaccctttttcacccaagagccatcatgctctttttgataatcaaaggatgcaatgacagccgcgcctattagaaaggatctcttgattggaacataaggttcataatcaagaaggatgttaaagtgttgaaggaagagggtgactagatgtggatatggcaatggagaatttaattgcaatgccttatgcatgcgatatcgaacttagtgtgcccaatcaatttgt

SEQ ID NO: 14269 - DNA, 766 bp, Glycine max
  unsure (1)..(766): unsure at all n locations
nccacctaaaccggaatgnacgntgccccncagatgnngaacagagcgatgncagcttctactgagttctattttaaaantttttcataantttagnncccactcctcacacaacgggggggggnnnnnggggaaaggnananggcangnnngnnnnaaaaagnnnnnnannaaaaaaaaaggaanngaggnnaaaaggaccannnnaaaannnnnaaanccccaagagatatgtttgaactccaaacaggatttccaccccagccggcacgtcaaaacaaaccccttcaaaacataactccgagagtcaacacaagtaaagaaacctcaaagcgcggcatacagaagcgtaggccacaaggcaaaaccgtaaacaggtcatgtggtgatgaggggaggggcatgttctcgcactcactttgaaaccacttaggatgaggacaaccgcgcttacccgcgcagtggcgagacgaaagggaaacgaccacgctcaatccaccgaagtaaaggggaaacaatccaccacggcgggaggagccctctcccacaggacgccgtaaaaacccctatgcagggcgatcccaaaaacacacacaacccccgcggggaaggggccattcggtaaatgaaccacaaaccccccaaaacctttcgcccaaccgggaccaagggaccaaaaacccacctgttcccaaaaaaaaaacgcacaaaccgcctgcgactgtgctccaaaaaccacccctcccacaaaaccaatggggccgcc

SEQ ID NO: 14270 - DNA, 484 bp, Glycine max
ttgggctcaagaactttaggtatttatgtgtattattaatgaaaatttatacattaggcttgatttttttttttcaatttacgcaaaaatgaaagaaaaagtcacactctataaactttatttttttcaatattaatacattgttattgcggatatatcattagcggaaaaggaattctaataccacatttaattgactttgactaatttttttatgtgatcaaataatttttttagcgaaaaactcatatctatatatatatatatatatatatataagtcttgttacttttcgcgtgatttttaatcaaactttggggataattttccctccgattcagccaaaaaaaaaaaaaaactggcaccatattttattaggtggcaacttgttctaaatggggtggcttatgcaaaaggaaatggaatttttttctttaacatcatttttgtttttgtcaattaaccaattttttatactaatgtt

SEQ ID NO: 14271 - DNA, 742 bp, Glycine max
cagttacttcagtgcacggcattcttaagtcgacctgcagctgcagcttgtcggcttactatcatatgtgatttattaacactggtaatgggactactattattatgatcattttcttctccatcattggaggtgccacttgagctgccaagtctctccatctttaggcgtattctttgaaagatttgtgcccctttttacccatgttctttagttcgcatcctatccggagccatatcagaattgtactgatattgcctaacgaaagctaccattaggtgcttccaagaatggactagagaagggctccaaggtagtgtaccaggagacagctaccctaatacgactttgttggaagaaatgcatcaaaaaggtctcgattcttgccctgccccgttttttgacttacatctttacaaggatctggggctagtcatctttttgccttgacaaaccctggccctatatctagagaggcgtaactaggccgttaatgaatacgccctagcctcaatcccacgaaagaacccgctcccttgagaggcttatggatcctgactaaccatgcactttttatttgttcgcaaagtttgaaaaccaaccatcgcctacctttgggtggtaacatgtctctcacatgactggccaaaacgaatcatatccatgtgtaattgtttgttagttagtctccacttaccttataatctgctattacttccatcttccgacacatttacttccg

SEQ ID NO: 14272 - DNA, 778 bp, Glycine max
  unsure (1)..(778): unsure at all n locations
tgaatggcctcatggacgtgcacttttgtatactcaacctccctcgtcaacgggtagcatgggggtgctgggccaccttgcttgcttgtatcanaaagatgtgcccggcgcatgggctcgtggtctgtgctcctctgtggaccaccatggagacctttgatcattcatggaccttcctgaagctcatcgacaccctgtaccttatgtcgccactatctaccttacaccatcttcatctcagctgcagaacccaccgaattgaatgcctatgaccgttacgccagctacacaaccgtggacggaagaaccacactgatctgatatggtccatcccgcatcaacaccaacaggaaggctgatgcctcctatacaaatggtgatgggccgtgcatgaccattcattccttcaccaatggaacaacagtaacaaaccgagaaacaatcaacattcgatggccctcctcaagcttccctcgaaaaaaatgtgttgcaaatgactttgcttaacatgctgcttcagcaagagacaaaaccttcaattcaaagcttaacattatgattgcaacaatggctactcaatggagtcaccaccggtccggaagtcttgacgagctgtccttttaaggctgttccaaaaatcccgaaatggaattggccgttcaattacgtctggaaagcattgtcaaggacctcaaccccgtggccccttcattattttcaatggagcctggctaaactctctctttcttcaggaaaggggcgtggacataaattatcc

SEQ ID NO: 14273 - DNA, 505 bp, Glycine max
agcttatgaaagcttgaaaaaggagtttttttctggaaaatggaaaagtttccaaagaaaaagatactttaatgaaggattttcacattttagaaggtaaaattgaagttcaacaaaaatagttaaaagaactcaatgaacttcaagatcaccttactcaagagaagtgtgatctctagaaagaatgtgcacaagctcacaaagataatatgaactttaaaaatagtaaacatgatctttggatatagtgtgaaaatcacaaaaattctgtgaaattcttaaatgataagcttttaaagaatgaagtcttagagggtcaacctcaagatgttatttaacttaataaggagattgatactttaaagacaacctctatccaaatttgttggaggatctgaaaattttgacgaattgttaagatatagcagatgtcctatagacaattttggtcattggtatgaaggagaaaaatatgttcatgataaggatactgttggttgttatt

SEQ ID NO: 14274 - DNA, 742 bp, Glycine max
  unsure (1)..(742): unsure at all n locations
ttatggagctgctgaacgtccactatttattactacgctctcctatgcagagaatatccaaggaaaataccttcatctgtcttatcatcaaattttcctaagttatcttttccattattcaatacaaaacatttacaaccaaagatatgaagatgtgagatatttggttttctgccattgaacaattcatatggagttttctttaagatgggtcttattaaagccctatttaaaatgtagcatgcagtgttaacggcttcagcccaaaaatattttggaagaggtgtatcatttaataaagttctagcaatctcttccaaagatctatttttcctttcaacaacaccattttgttgaggggttcttggtgcagaaaagttatgctcaatcccatgcttatcacaaaataattcaaattctttattttcaaactcacccncatgatcactcctaatagatataatcttgagatttttcttattttgaatgatttttgcaagttttctacatgcttggaatgcataattttatgagtgataaaagagtcatgtgttctagaataatcttaactttacaagagctagtacttcctccaaactatgattttgaaggacaaacaaatcttaggtgtaattgtagggtggacagttgacccatgttttagaattgaagaactctacctggttccctttgaaagcatacattgccatcttttaaattttaatttggcaaccaacacctg

SEQ ID NO: 14275 - DNA, 58 bp, Glycine max
tgaagccgtggggggcaccggggcgagggaaaaggctgtgataggagcatttggacat

SEQ ID NO: 14276 - DNA, 422 bp, Glycine max
gtatgactattgatgccgattctgtttttttttgcagtgcatcagacaacaatcccattctagcatccatgccttactttggagtgattgaacaaatctgggagcttgattatattgaatttagagtgcctatgtttaagtgtaagtgggtcaatgccaatacgggtgtacgccaagatgaattgggatttaccttagtagacctcaataaggtggcttacatggatgaacctttcattatggcccaacaagcaagacaggtgttttacatcgaagatccttgcgattcatgatattcgttggttctacaaggaagaccaagtggtttaatgacacacatgatggttccatgcttgacatttgtgagacaccacctttttcaacaagaatgccttatattaatgagttacactttgttgatg

SEQ ID NO: 14277 - DNA, 534 bp, Glycine max
  unsure (1)..(534): unsure at all n locations
ttcctctcccaggaagacaatttgtgnttgtctgacattcctacttggggcttatggtattactacccttctatgcagttgttgggacacatttttatatgaagttgacaaaattaagaatgaatgagttgaataatttcaggggcttgatctgcatatttctgaaattgagcaattgtgcgcaaaattcccatcaacaattgtattgcttgatcacttgggatttcctcatgaacttttatatcaaggaagcaaagcatgcataaaattttcattaattacatttttgctatacagctgattcttttttttaatcagacagcaaacataaaattcacagatttgtaactcttgtacatgcttattctttttttactgtaaagaagccatgcatcttattagcaatgagatctctttgcctttatcagatntagagtggatcatggggaggacagctacacaactctttcaaaaccaattgactccggtcaagagttgagagccgggatgctgtttgattgtattaaaagtttt

SEQ ID NO: 14278 - DNA, 499 bp, Glycine max
  unsure (1)..(499): unsure at all n locations
agtgaaatcaggtgcagccatttgcctagagttcttcagaggtggaggttaaaccatgttctcagtatgaaaattagtagtcgaatgctcaaaatcagaatgttcagaatcaccagcaacagaatgctcaggatgcacgctatgcctaagtaatctatgaaaggttctatctattttaggatcaaagggttgcaaatcacttggactgcccctagtcatgcattatatgcagcaaatcatgtggttctcaaaaagcaccaagggagggttaaaactacaactatagtcaaatgatatccaaatgagctgaaattttgtgagcgacaccctaaaatcatgaaaagatagcacaaaaatttccagacaaaaattcaaagtctaactatgaaaactgcctaatgaaagtttagaaaaattagacaattatactttaaaaaataaaaatanaaacttagtaaatggctgatttttcaaagttgaaaactacaaatggactgga

SEQ ID NO: 14279 - DNA, 384 bp, Glycine max
  unsure (1)..(384): unsure at all n locations
agcttgagatgatgaagtgttgaaggtttaatccntctgcttttattgctgaccacagagtggtacctggagatatgtcgcgggggtcaagagaccttggggacgtcaggtggggtgctattgcccaaaaccaagcttgaccaatcccgacccaacccgggcatagtcggtcagtgagaacctgtgatgtacctaagcaggcgagctcctggcagtcaacagataaaaggaaaacaagaccacaaagcaaggaggcttgtggtggctggccagctgtgaaacttgattgatatgtgagatatggtctctggtaatcgattaccaagggtgggtaatcgattacaaggcttaaaaatgaagacagggggctaagatggtctctgg

SEQ ID NO: 14280 - DNA, 553 bp, Glycine max
gatgcttggaatagtttatcctttgaagataactatttccatgatctgatttttaccaactccatcaccttttcatggcctttactgccattattaaagataatggagtttctatgaagccaaataatccaactcattgtgcaccacacaacttcccatctttgatttgcaattgatccaactctcagtatatagtgctatagatagtgatcctgcggttggttatgttgagctcccatgactcccaaccatctaaaacacaaagaccacacttcctgtgaaaaagtgcaaccgaggaagagatgttgtacactttccaaatgctgagagcacaaggggcacaaatagttgttgtttggtcgtgccacttttctctttagcaagttcctttttgtttggattctgtccaaaagcattctccaagaaaatgctgccacgttggatggtattttttactttcatactcgagatagtgtcttagactggtatctgatcctacctctgtaaagaagcactgaatatgcatccctcacagaaaaaaactccatgtcat

SEQ ID NO: 14281 - DNA, 643 bp, Glycine max
  unsure (1)..(643): unsure at all n locations
agctntgagccaaaatcctgacttacctattaccttgacccagcgtgagaatgtcaatccttaccctcggaagcaaaaaagaaaagaaggaaaatttccaatcaaagagaaagcaaaaagaaaagaaggaaaatttccaatcaaagagaaagcaaaaagaaaagaaagaaaattcccgatcaaagaatgggagaaagtaaaaaaaggaagaagaagaaggaaagaaagctcctgatcaaggatcgaaagaaaacagaagaaatgtgcagaaaggtctttggaccggacaatatctgaacaatacagaattgtcaccaaatgaacgaaaaaaaggaaaggaaaccatgacctaaagtggttttctccctttaattgccaaccaagatattgtgtgctagcgacttttttgccccgcactanaccaaaacagaaaaggaaaaaagccagaaaaagggccaaaaaaagaagaggtcaaaagccaaaaaacccaccaaaagaacccgtttccaagggaagtcctattgatccatgatcacgcatgtaatctttgatttgataggaaatgatttgcaaatccagtcatgacatatctatgggtcggaatttggaaacaacactaacctgggcgagatttgtacccttt

SEQ ID NO: 14282 - DNA, 715 bp, Glycine max
  unsure (1)..(715): unsure at all n locations
tacatgagcctgttgtacaagcccttcggtaggataactaagcgttgcttngaggatctatcccgtggaggggcgagaatttattataatccaatgagaaccttngaggaacggttgaaacctttgcgaaaatcttaccggaaaacctactggaacgtttcggaagcggttcgggttaaatttttttcacggaaacgatttttcccagccaattcgaaagagaaagaatgcccaaagggcctgaccccttttcttcttccttcctccccctattatttccaaaatgggggagggggttgccgtccagttcgcccggcgagcccaggtgctttcttccaaacaacagccttttgggggaatattctggagggcccaatgggcctgggagccctctccacccaatttaactaaaccctccacgcttctttcatcggttgatctttcttgaagacttaaaaccttactctccgatatccggtgtcattgtctctccttatgccggccggcctatatccttagcgtctttctatgtcctgcggtattaagaaatttctcttactgattcgtacatccctgacatcccgttggtctgtgggcccgcataaatcttcattctctctctttcaattgttgctacgtttcttctactgatcacatacccactcctctgtcatgtattctagtcctcttttctttctgtgtgtgcactactttc

SEQ ID NO: 14283 - DNA, 858 bp, Glycine max
  unsure (1)..(858): unsure at all n locations
cacaccacacgcagacgcacgaccacagaaacgcacctaaacgtaccgcaacggcacgccaccggacgccgcagaacgcatgcgaacaacggacacccnnccnnnnnnnnaagatgaaccatgcagcaccncccgnntnnaaaaagaccacccgccgggccgcaagccgagagagagagaagagagccattttattgaaaacaaaaaggaacgcgggcaaccgaacataagcacgacccacgggaaaggagagaaacacaggacagcccaaggaacccaggaagaaagaaacacggcacgaaacaacaagacgcccgaaagagatagcgcaagacccccaacaaagaggtcacacaggacacaccaccacccgagagcaaggaatacagcaaggccccgcagatcaccctgagagcaccagagggagaggagccacacaaggcacacagaaggggcacaccgacgacagtaacaaagccgggccagagcaaagagagatngcggaaacccaacaaacgcatgccaaacacaacaaaaacaaagggagaggcgagcacaaaaagaccaaggccaggaacaagccaagggcaccggggggaagcaaacaaagccacggaaaaaaacgaggcagcggcggacagaaacggcgaaaaagccacaaaagaaacaagcggcccgcacgaacccaaaaagagagcaaatgagaccgacggagaaccaagagagggacgcccaaccaccgggacccaaaaaagaggaaaaaaaggcgcacagggcaccgcacaaaaaaacaccaacccccaccggaaccgggcagaggcgacccaacagaaaaacaaaagacagggggaaggcccg

SEQ ID NO: 14284 - DNA, 356 bp, Glycine max
gataaacatggaaggttaaacagaaaaaattgatttattaaaaaacaatgtggaaaattttggagagaaaaagagggaaaaggggtgaacctttgggtgaggttttcttcttgaagatattcatgttcatgatgttggcgctgatctcggagaatgggaaaaccctatttgaagaatacgatgcagatagttgaaactataaaggaggcactgtgcaacgtgtgaagggtgctgtgttgtgtttgtgacaaataaagagaagaggaaagatgcgcctcggtgagcgtgctatgtgtacacgtaaccaacggtcgtctttcaagtagccgttatagctttcattgagtcaaaaatgc

SEQ ID NO: 14285 - DNA, 539 bp, Glycine max
  unsure (1)..(539): unsure at all n locations
cgccgcatgcaagcttgttcccaccagtactaagatagtcattataatcattngcccaccctttgtgtccagttttcttcttaattgatccggaacatgcttgaagcacaagcatccaaacacccttaggtgcttgagacaaggcttacttccactccaagtttcttcaggtgtcacattctctagcctctttgttgaacatctgttgagcagataggctgctgttgacactgcctcaccccaaaactcctttggcaagtgaaaattccttagcatacacctggtcatgttgactatggttctattgagtatctcaaatacaccattgtggtgtggtgcatatggaggtgtgatcttatgaatattaccctcatcctcatanaatttcttgaatacatgtgatgtgtattcactaccaccatctgatctgagtctttgaatcctatttctactttgtgtgactcccatcaccttgaatcttttggaggagagaaacacttcactcttcctgcttaacaagtagatccacacccttcttg

SEQ ID NO: 14286 - DNA, 248 bp, Glycine max
ctcacacgctttatttggaggtatgttgtgggctattaaccctgccttaaggagatatatcaagttaacaccaaaatcccaaaataagccacaattatcaattgagctcaatcacttgcctacgatcaaaactgagattaaggggggacaataggaggtcaagagatttaaaataagctcagaagaatataaaaatacttaactacaaatgctcaatcacatttatgattatagagaaagataattta

SEQ ID NO: 14287 - DNA, 930 bp, Glycine max
  unsure (1)..(930): unsure at all n locations
ccccacccccaccaacanagcccctacncgcgccccacccaccccggccgctaccagganctcaaacgcgcccaccccccnncnncccccactgagccactgagccccccccntngnagaaaccgccccacgcaacgcgcnnccccgggcagggagacaaaatttttttccaagaagcccccccaagcggcggaaggaagcacgacccccccacgccgaacgcgggagacagagaaacangaagaacacaaccacaagaacgaccgcgcggcccaatcccagcggcaagagcgcgcccaccaccgaaaacggagcaacccgcgcccacaaaacacccacacaagaaaacagcacccgcccaagacccactcaggccaagagcctcaccgaaggcaggaggaagcctcggaagcacccacggcgcgaaacacacaaacggaaaggcgccccccacgcaaccaacagctgacctaggcccttccggactgccatacccccacaggcagaaaaaaatccaccagatgagaggaccgtcacgtgacagcgccaaagaacccaaccccaccaggagaagacacccacaacgcaaggcttcccccaagaggggcagcagaaccaccaaagacatcaaaggagggggcccccggagaccgcccctaacaacaactgattaaccacgcgacccccaccggggcaacagcagaatacccccgggaccgccccacaaggaccggaacgaaagggggtaaacaagaagaaacaaaagcgccaaccgagaaaccagcgcaaaaaagagagacgcgaccgccaacggcgcaaacgcccgagcccccggcccaaaccaccaaaggggggaaggaactcgacccacaaacacagcgacccgccaacaacagcggcaccacaccaaacccccgaaccacccacccg

SEQ ID NO: 14288 - DNA, 342 bp, Glycine max
  unsure (1)..(342): unsure at all n locations
gcgacactatttaatactcacgctcgcctcaaagagatctaggaaggataaagcagctgatttgttctctgagcaccagcagcgcttcgaggccatcaatggatggtcatttctctgggagtgacgcgtccagctcagggacgaatagtataccgacttccaggagaagatagttcgccggcgttgggcatcactggttacccccatggccaagttcgacccagacatagtcctcgaattttatgcttatgcttggcctacaaacgagggcgtgcgagatatgcgatcctgngtgaggggtcagtgaatcccgttcgatgcgggtgctctcagtcagtgcct

SEQ ID NO: 14289 - DNA, 824 bp, Glycine max
  unsure (1)..(824): unsure at all n locations
gcacacgcagcaccaccntcaagcaactgatgctactcgactagcgacctcgtcacctaacgtaacacggagccgcaacgatagaaaaaggaaatgcggcgatcntnnnnncncnnnnnnnnncagtgatcactgcacgacagggcacctttanaaanacccgccggcaggcaggcagccaggaagaaaaacagagctgtttgaaatcaaaacggcgaacaggaagcgggaggaccgagaaaggcgcgaaacataccgagacgctgagaaaggaacaacggaagcgaatgagcaagccaaaggggcagaaaacgtcactcggaggtcgggtacaggcacagaaagatggagacacacgaaaatgaacaacggaagctctcgagaacatgaaaaggacataacatctcacccggaggacggaccaagcgcataaatatccagacgcgagaaaagaacaacggaagctctgaagaaaagaaatgcgcaaacagcaacacggaggcacaaaaagcgcaaaacaacgacaccctgaaaaaaacaaggaaggcccggaaaacaaacgggacaactataacacggaggccgagccagcgcacaaaaaaaagagcccaaagaaacaacagaaccccggaaatcaaggggaaacgaaaacagggggcaaaccagggctaaaaaacaaaaagccaaaagaacaaggaagccccgccaaaaaaacggaaaaatatgcacccgagcgggaaaaagcgcctacataacaaacccccaaaaagaaaaagaggcccggaaaaaaaaggaccaacgtacacagagggggaacagaccac

SEQ ID NO: 14290 - DNA, 345 bp, Glycine max
  unsure (1)..(345): unsure at all n locations
ttntggagtagaaacatgggaccaactcattttattttttaaagtcgtatctagtcaaggtctgagagaccgtacaagtttcctagcgatttctaattatgtgggtcattaagtctatcatatgctgacaatagctgagaagcccgtgaatttcttcgggggcggagtaggtgtctgccatcgccttggccttggctaacaatcggggaagttcttgactcctgttcaaggtaagagcaaaccgatccatccacatggttgcctcttggtgtaaagagtcgatcaccctttctctagcctctttttccgcgtatacttgggcatactcgttcgcgaacctatgct

SEQ ID NO: 14291 - DNA, 931 bp, Glycine max
  unsure (1)..(931): unsure at all n locations
cccccacccggcgaagcacacaccacacacacggaccgcacggcgcccggggcacaacgcaccccacgcagaaaacagagaccggcccccccagttgacgcgtgcacgcccccnnatagacaagccccggcaaagcnaacggaaagagagaggagacggttattgttaacacccggaagcacaccggacccgacgagagcaaaaaacaggcccagaacgagaaagagaagggaagacacccaagcaataagagcgcggggccacgaaaaaacagacaacaccgcgcaagcacgaccgcccacaagagaaagagagctccgcgacgcaataacaagggagccaccgaaaaagagaagtgggacgaagaagacaagcgcagaaaaccagaaagaagagggacgagcgggggaaaaggatgacagaaaggagccacccgaatgaccaacacaacagggagagcgggggacacccggagaggagagaacacgacccgcgagaacaaagcgctaaccagagggaccaggggcgcgaggaaaggagcggagaaacaagcaacgaagagaacaaccctacaggggaacgccgagcaaagagaagggaccccacggcgccaaaagaagaaacccaagagaggcccaaagacaaccacaacgagcggaaacgaggaaacagcccacgacaagggcgggaaaccacggggcgcagccggacgaaacggagaagcacggaccaaggggaaacacggaccgggccgcgaaaacacaacatcggcggagaagagcggaacgggagggacaccaaagccaggagaagagacgccaaacaacggggacagcccaacaaagaaaggacgaaaaacaccgaagagccgggcaggaccacacggcggaggaagacgaggcaacacaaaaccgaaagagaacgcgccacg

SEQ ID NO: 14292 - DNA, 527 bp, Glycine max
ttgagggtgcgcagcccaccattttccatagtggtgttctctataatgtgtctaccatcacgattatcgtctccctttccattattgggggtaccacctgggccgccagatccctccaccttttgggcgtgttctttgaaagatccgtccccctttttgcacatgttctgttgttgcatcctattcagaaccatatcaaaattgtactgatactgcctaacacaggcaaccattgggtccttccaagaatggactcgggaaggttcctaagttagtataccaggcgacagttgtcctagtaagactttctcaggaaaaatgtatcagcagtttctcatcttttgcgtatgcccccatcttccgacagtacatctttagatggttcttggagcgagtagtccccttgtacttgtcaaggtccagcaccttgaacttgggaatgaccatgttttgggatttatgaacaacttttctaggttagcaaaggcataatcttcacctccttcaatggccctgagccttttctt

SEQ ID NO: 14293 - DNA, 938 bp, Glycine max
  unsure (1)..(938): unsure at all n locations
acccgacccganggagaacacatcctacaaccacgccaacgaangnaaaagcgacgaataaggctgcgaacagacaagacgaggaacattacaggcaccacccnnnncncncccagttgtcgtcgatgcacaaccnccnntttggnaaaaanccccccgangnannnnannnnagagagaggagggcgcaatttttttaaaaccaggggggagaaccggggggaaaaacaaagcaggcgagacccccggcccgcncacagaagaaaggaacagagggccaccgaggacggaggccggggggggccgggcaacagagagacaagaggggaaaagcgagaaaaggacgcgggggaacgcaagacccaggggggggagagcgaagacaagggctaaaaaaggaaaaaaggagggacgacaaggggcacacgggaaacagaaaaccacggggggggaaaggagaaaccaacggggaaaaagagggaaggaaggcaagaaggcgcccaggagagggagaaagaacagacagcggaaggagctacaaaagagcaaaggcacgaaacgcaggcggatgaaaagaacggacacaaagacaagaaccgcgagaaaacggggggaaagaaagaggaagagaacgacgcgaaggggcgaccgccgaacgacagacacgagcaaaggaaacgggagggagcaaaagaagaagaaaaaagagggcacgaagagagaggcaagaaccacggcgcgcgcagaaagagagcgaggaggaacaaaagggccgaacgacaggaagggacggcaagaaggaagaaaggaaagaaagaaagggcagcaagcaccgcgagtagcggagggagcgacccaaggcagggcgaaaagaaagaaaggaacacgaagcaggaaacgacggaacggaacgagagcaagggaagaaaggaacggag

SEQ ID NO: 14294 - DNA, 348 bp, Glycine max
cccttgagatgaggaagtgttgaagggtgaaacttccttgatcattgttgaccacaaagtggtacctggagatatgtcgcgggggtcacgagaccttggggacgtcaagtggggtgctattgcccaaaaccaagcttgaccaataccgaccccacccgggcatattcagtcagtgagaacctgtgatgtacctaagcatgcgagctcctggcattctacagatatacggagaacaagaccaccaagcaaggaggcttgtggtggctggccaactgtgaatattgtgtaatatgtggatggtggcctctggtaatcgattacaacgcttaaaattgaggacaggaggct

SEQ ID NO: 14295 - DNA, 550 bp, Glycine max
agcttcttagtttcagatgatgcagattgtttttatctacctcatgcactcctctaatgactatggcatcatttctggcactaaactgctgggagttggaggccatcttctcaattaaatttttggcttcagcaggagtcatgtctccaagggctccaccactggcagcatctatcatacttctctccatattactgagtccttcataaaaatattggagaagaagctgttctgaaatctgatggtgggggcaactggcacatagtttcttaaatctctcccagtactcatacaggctctctccactgagttgtctaatacctgagatatccttcctgatggctgtggtcctggaagcagggaaaattttttctaagaatactctcttaaggtcatcccagctcgtgatggaccttggagcaaggtaatacagccagtcctttgccactccctctaatgaatgaggaaaagccttcagaaatatgtgatcctcttggacatctggggatttcatggtagagcagacaatgtgaaattctttcaaatgttt

SEQ ID NO: 14296 - DNA, 326 bp, Glycine max
ccaagacagaaacacgacgggtttcaatcagaggtatagtcctcaagcctacccttatggtttgcctccgaacttcactccccgtaccgctccagacgatttgagccaagcccctaccttcaaggggcagctccctcctcatgccgactattctctgcaagaagatgatgaaggagatgcccatttaggccctctacttcccctcaaggatccagccccccatgagttaccccaaccaaacatagttcgccacgttctgtttccattcacacccgttaaagaactcgttccctttgtaaaagacaagggaaatattgatttaattg

SEQ ID NO: 14297 - DNA, 482 bp, Glycine max
  unsure (1)..(482): unsure at all n locations
agcttgcagaaatagctcattcattcttttttttggtaatntattagcttgtaactttaacaccctattttattatatggaatttggaaaatataatttaaaatgagtaatattttttcttgatttccaatcatggggataagactgcatacatcttaccctctcattcacagttgttgtaatggaaaccttgtttgtctcatatatatatatatatatcaatatatatcatactgttctcgtgtattggaaacctcttcttattgctttacatttggcttttatagattctttgactctgagatttattacctaaaaatgtggcatttttgctacaactattagctatattttcttttagtttactgcctacgtattgtgccaattttcaatgccgtttttcatttcatggcagagttcccttgctgatcttcctctgaagaactactacagatatgtagtaccatcaatggtatatatta

SEQ ID NO: 14298 - DNA, 421 bp, Glycine max
atgtgttgagcccacagagtcatgtcttctttttactggtcgacttgggtaaagtccaatgacttgatgacacatatgttagggtatcaatatacaactaccaattatttcgtcaggtggatgagcctggttggaaaagtgaagaggtgatttggggaatgttagtagcaaaggcaatggagaaggggattgctcaaaattaagaggacaattagagagaccacattgttgtgagaaagagcccactattattaatcttatgccccccccttacaacatgcagtctgcaaattgctataaaggaggggtattaacatccgttacacaagacaaatcaaatgcaatgccaccttccaaatgacttatgattcaactagcaccaacaccaccaattttagcatgcctgtaaatttcacgtttg

SEQ ID NO: 14299 - DNA, 563 bp, Glycine max
ccttaagtcccctgccgcatgaagcttttaccaagagatttactcttgtttatttattaccagcggcatgttttgttttcaaaaagctttcaactaaatttacaacattccaatcaatttcaaaatggtgtaatcgattacaatatattggtaatcgattaccagtgagtttgaacgttgaaattcaaattcaaatgtgaagagtcacatcctttcacaaaaatgctttgtgtaatcgcttacaatgatttggtaattgattaccagtgataagttttaaacaaaaatcaaaagatgtaactcttccaatggttttcaagtttttctaaaggttataactcttctaatggttttcttgaccagacatgaagagtctatataagcaagtccttaacttgcattttaaagaacgagtattacaatcctttacaaatcttgaatctctttgaacatcttcttctttttcttcctttgccaaaagctttctaaagttttctggttttctaaaacttgaaaaaaaagggtgctattcatctttttcattcccttctccctttgccaaa

SEQ ID NO: 14300 - DNA, 460 bp, Glycine max
cgacctttaatactacctttcattctttggaagttcatatttgattggctcttcttttgaccttcattgcttcctttcctttttcctttagaatcttgtccataaatatgcatttgttataaagattctgcaatatcatctagaatatcctttcttggaggaatagcattagactcatcaaaggaaacatgaatagattcttcaatagtcatagttctcttatatattctataagctttactatgcaaggaataaccaaggaaaattcattcatctgacttagcatcaaactttcctaagttttcttttccattgtttaatacaaagcatttgcaggcaaaaacatgaaggtgtgaaatgttaggttttctaccattaaatagttcatatggagttttctttaaaatgggtcttgtttaagccctattcatgatatagcatgcagtattaacggcttcaa

SEQ ID NO: 14301 - DNA, 478 bp, Glycine max
  unsure (1)..(478): unsure at all n locations
agcttgccggtgacttattgaattcntttattgtcacgctgccattaaatggttagctgccagctgaatatttcaaatcttctcaaacaatttatttcaaattcaaatgaaaatctacaaaaggaacctcgtatttgggaactcaggaatcaagtgtgatcataatccaattatttgtgtggttcttttctaaattttgtatacaactatgaattttctccatcctcctatggaaacaaaataaaataatttgtacaactgagttggctatggctcaacagaaactaaatgggcttgagaagcagaaagaggaaatgatgaagttgaattccccacaataccttctccaatggattcaaggtatgacttgacatgatgacttactatcataggcacttaattattataatcataaatttttttatcattgttatgacctgctcggttcccaaatatatattgtacaatgattttggag

SEQ ID NO: 14302 - DNA, 442 bp, Glycine max
  unsure (1)..(442): unsure at all n locations
cgtaagccattcaacatttttttcatattttggattgattttattgcttgnntctatttcatgcagaggcttttcaagaaagaaaacaagaaattgcaaccactactagaggtaatgtttcaatcaaccttataatataattatatggattttgagtgtctcgtctatttttgttagcatttttaagttgttaacattttatgtaaggaaagccatattgtagcaaagagtaaagtatatttagcttgaaagaaatttctatattatatgcttgtgatgcatgctcttagtaagattactttcatgataaatcctcctacatttgatataagaaattataaacaagagtagttttgacctctctgatttaatgctttgactgacctttttgcatttgtccagtcaaggcaaggaggatgcaaactccaaacttaaaaacccg

SEQ ID NO: 14303 - DNA, 445 bp, Glycine max
  unsure (1)..(445): unsure at all n locations
agctttctcgctgcaaaaaacagatttaggtggttctctaggnttgcgctaaagggggtgttcgtcattggaagtgcggtaaacagactttggggctgatttaaggattgcctttgtggataactgggcggtgggtaaggaagaagtttgttattggctgagtaatgacattgttgggttggtgggaaacttggctgtataggaatggcagtcacagcatgggcttctccttcatcctcaccctcttcatttgccccagttttctcattcgtccaagcaggatgactaaatttgcctcttttaaaacccacatcgatcctttcactggcaaaaaccaaaatccgcaaaagctttgaaggtgcgtagcccaccatttttcatagtagaatactggtaatgtgtctactatcattggcatcgttttttcgtcattgaagtgccactt

SEQ ID NO: 14304 - DNA, 452 bp, Glycine max
gtacgaatataagaaacatcttcttcgaccttggtgattctcgtctccatctcattgaagcgcatgtccacttgtaattccaaagtatcaaacctttcaccaacaaaagtttgaagacgatcgaacctatccaaaatcttttgaagaagagaggaatcttctccaccatgtgcttcttcatcaataggtcgagcaccctttttcacccaagagccatcatgctctttttgataatcaaaggatgcaatgacagccgcgcctattagaaaggatctcttgattggaacataaggttcataatcaagagggatgttaaagtgttgaaggaagagggtgactatatgtggatatggcaatggagaatataattgcaatgccttatgcatgcgatatcgaactaagtgtgcccaatcaatttgttggcctttatgagaagcccacataacaataag

SEQ ID NO: 14305 - DNA, 540 bp, Glycine max
  unsure (1)..(540): unsure at all n locations
agcttattgttagacattatttttttttatgaaatncatttttaaacattgatttcttattttattattaaaatgggttaatcctttgactttacagatagttgaattctcatgtaattgtattcaattatcatatatatcaaataagaaagaaagatgtgtaagatttcctttatatcttcaatatggaaaagatatataaatatgggttcattatgagtacataagcatatttaagaattattaaattaataattaaaatatattaaagtgggagagtcatcaaaccatctgcataaagctgtatcaccaaaagattttcttctaacggattttgatctattttgttgtctcttttctgctaaaaatggttcctctttcatatttctaccctaaacattntatatcacaccatccctcaattttctaatgctatggagtaaaaattatcctgtggttttttagagagaaaacanaattatcanatagatgtaaattttaatagaattcaattccagggggggagctgctcgagcacta

SEQ ID NO: 14306 - DNA, 461 bp, Glycine max
tcaaaaggagagagagaagtgccaatatataaaactttgcaagcaacgatcacaaaacaaatactacattaaaatcaaattgatctttttctgttaggagaggggcaagggggtcataaaattacaagaatttaaatcagaaaagttacgcttggctctgtgcttactaatggtaggcaagtcctttgcattctcaagaaatttgaaacctccaaggctacagcttgtactcacctacagttcagatagatgcacaaggttacaacaattcacatcatcaaggataaattactaacatcttttttttttatctgcaaattactaacattgttaaagagatcaactataagtacaaagttgagacaaaaagtgccaacatattattaaaaaaaaatgcataaggtgaaaaaagttttacttatattagccttttcaaaatacaagataatgattcctctgat

SEQ ID NO: 14307 - DNA, 1030 bp, Glycine max
  unsure (1)..(1030): unsure at all n locations
cacccgccgccaagcgacacaatcacaccactaaccgacggaagggaccacacgacgcaacacaggaacgaaggcagcccccccccccncnncccagtatgacgcatggcacncccccnnaaagaaaccagccggcggcaagcnngccgaaaaggggagacaaccatctatattggtaaaggaccagccagaaaaaaggaacacccctacgaaaaaagcacgggaaacccggaaaaaaacaaacnnnacaaagagagggaagaganccccaccaagaacaagcgaaaccaagggggaaagagaaccgcaaagcaaacnnaacacccaancaacncgacaggaagggggggacaaggcaaaacccccgcggcgggccccactanaaaagacgagagcgaaagcaaagaaaaagaaccagccctcggccggccggggaggaaggaaaacacgcgcgcctaaatcgcccgaacaaaggaggcgcggacaaaggaaaccgccgcacccctgaagagagaataaccgaaagagacgcggcgagcccaaggcgacaagcgaaaaagcccaagaagagctggtaagagccacaggcccaccgcaaagggcccaaaagcgaagaggccggcaggcaagagcagggagaaagagcccccggcggaacgtccctcaggaagaaccaaccccagaaaaaggaggaacccaccgaaagggaagaaacccaacaccgaggaaggccgggaaaacaacaatcacaaaaacaatcggacggagggagggaaccaccaaaatgtcgtgacaaacaaaggcagggaaagagagcgagccaaccggccggacccacaacgaaacaaacggccccagaagggcaaataaccgcgcccaacaagaccaggcgggaaacaaaacagccccgacaacgacaacacacggaaggggcaccgcaacgcaccgcggcttggaaagagcccggcaacacgagagggagcggacgacgaacaacgccacacgacagcagagagcgcgcggaagaacg

SEQ ID NO: 14308 - DNA, 386 bp, Glycine max
cactttttaatactcaccgcttcttacaaagcatacaacttcctggatgtggatgattactccatacagagggatctcagtatttgtaacgttggcactttgagatggtgtcactcttccatcttttttttttctcccatcttatcttttgtaacaaaaatttcaaattgttaatttagattttattatttatcttatcgacaattaacaacatttctaattatcataattaaatcctatttttattcaagtcacatcgaaaatattactgggataatcttttaatttagttatctttgaaaaaactttagccacttctttttcttttttacagcagactttttataatttctcgaattgaactaaaattaaaaacacagaaaact

SEQ ID NO: 14309 - DNA, 559 bp, Glycine max
atgagaaaaacttaatgcattttatattcttattttcttcttctataaatacttattaagaagtttataaaaaaatagtctttaactaatttatatttgtgatattcgaaagatgcttatactttcttgctttattactacatgtaattaattcgttaaatttggtcgatgaactaacccataatatatatttgtcgtctcatttttaattaatttcacattaattttgtttttgtatgagataaataaataaaagtgtgtgacatactcataattgtaaatcagatggatctatcaaactaaacaaagttattttgagctttaatcgaattaagttcgagctaaaaattaagtaagatgcatatcaaactcaagtcgatctttcaaccaaatcaattcttatatagttgacttggactcatttctaccatcaacattaatctagaatgtagcatttaatcattttattattcttggggaattaatttattttatatccttatttttttaaaaaatataataattcataacaaataacttttaaatatttacaaataaa

SEQ ID NO: 14310 - DNA, 379 bp, Glycine max
tgcttcgcggaaccttccacaaagaatgagaccattttcttgttcgaagcttgcaaagcagtagtacttgtaatagtgactcctcaagttcaacccttcctgcatggctccaacagtacaaaaatgagaataaaggaatcaactataatgatcaggtcttcattattattatcacaatcagacacgttgataagaacatgatggatttcattcttgttatattttattctgtgggatcatgtcatgtgtgcattaaaattagagaaattcaggctacaaaatttaaggattttgacactattactattactgagaaaatcctctctctatcttttatgtgtttactccctttttatgtggctcaaactcattattcaaa

SEQ ID NO: 14311 - DNA, 866 bp, Glycine max
  unsure (1)..(866): unsure at all n locations
caccgccacccaacgccaccgtaattatacaacaacaaatgcaccgacatggagtcgatacaatagaagaaaggaaaagcaaggaaccaagngcncnnnnnnnnnnaaacacacaccgagaccncgccacnntnnaaananaccngnaggcangcaagcnngccggggacggaaagaaanctttttattggcacgccgccaccaaaaggggagccgccacccgaaaaaccacaacccccaaacaaagacaccaaacacgaaggaaaagcaccaaaagaaccacggancgcggaacccaagaaacaggcgcgaacacaaacccaanaaagggggggggcgctnccaaaagaagcaaacaacgaagagaaggccccaaccccccaggggaacaaaaaaaaaaaacgcggacaaccgagaaggcgaggcccaacaaaaacaaaaggggcgcgagaagcagaaaaaggaaatgatgaaggtgaaatccccacaaaaccccccccaaaggagacaagggcgacccggatgaggacccacaagcaaaaggcccaaacaaaaaaacaaacagagagccaccacagggaagaacccgccggaccccaaaaacaaaaggacaacgaagccgggagggcagaaaacgaaaaacgaggaccgaaaaaggcggatccgccaagcccgcgcccagagaacacaacggacgaagggcgaacgaaccaaaggaagaaccgacaacagaacgacaaaagaacggaacgaccgacggacgaagccacaccagcacgcacccaaagaaaaaacaaaaacacggagcccgcaacaacggaagcgacaacacgcgagaaggcaacacaacaaagccaccgccgacg

SEQ ID NO: 14312 - DNA, 156 bp, Glycine max
aactaatgttgccaaccacaaaaggaaaatgccttgtaacacacatgatattgagccttaaaattcagccataaacacttatagtagccatgcaaaatcattccccaatagtgaaccgagcgtctttgtaaagacaaataacacactattggggat

SEQ ID NO: 14313 - DNA, 631 bp, Glycine max
  unsure (1)..(631): unsure at all n locations
accgcagcttgcaganaccccttntaggaacnnccgcgcaccacanagaaagaagaacgcccaataaagaccacgccgacgacgggggggggacaaaaaagagaacacccccccccgccgagagggcgaaggcaccggcccgaaaacgggaaaaaccgggacgacgaaacaaacacagcgagccaccgaaaaaccgagcgacgacacggggcgcccaagcagccccaaaaaacaaaaccccccgccgaagaaaaacagagaggcgaccgccggacagaaacccaacccaaaacaacccaaggcacaaagggcagggaggaacaaggaaaggcagcgccagnccaccgcaaccgaaaaagaggaggagccggcgccaaaccaagggaggcaagagaccccaaaagggacgccgacccgagaaaggaaacagcacccaagaaccgcaagagcacanacgacggaccgggggcagagaaacnaccaacaaggcccccaagggaaaacaacgaaaaaacgggcgcgggncaaaagcaccacccccccacaaaagaggaaaacccagaagaacccccaaaggaacaacgggccccggggaccaacacggaacccccaaagacggcaaaccacgccc

SEQ ID NO: 14314 - DNA, 431 bp, Glycine max
tcgtccgcatatccctcttgaagactggctttttttttaagcattattatcacaacatattcaaaaaaccaaaaccccacaatccatccctggtaatgtaattatttagtccttcttctatcaagttctaaggcaacaatacatttcccaatgctgaagtcacctaacagtacacacaaatgggtgatcataccaagagcatgctgttattaagcattgaaagaagcattgatcacacaaaacacaattaattcgatattaaagataatttcatcaattgttccttaaaaatacccaactagggtgtttagccagccatacatggaaccctaatgcaaatgagacataaagtacagagcacttgttgcttacacaagaacggggaacccttctactcttttggcacctcacaatcacgctagcactcttaa

SEQ ID NO: 14315 - DNA, 800 bp, Glycine max
  unsure (1)..(800): unsure at all n locations
ncggtatttttctctttgananccnncnaatgggaaacgcccgcggcaagcaagcnacacattgaggaagaagattttaatagttttacccaccgagaacggaagagggcaatgtttgtttatgaaggccaaaaaaggcgaagcaaacaattagggggcgtataacctaactgggccggcccttttttacacggcgctcgattataccaaatattacttgcattcctaaccccatattgcgggcattaaattagctggtaacatattaaggctttaaacctcggttctacgcccccaaaaaaaccacaggactgtgcccattggaactgagggcgggaggagaaatttaccccactagcacccttttcaggcgggccacccataacttaaggcttcccaaaacctaaaaggggggtgcccctgcacaagcaaagccttatatatgggcgcataccacttcttatccggccacctagagcattttccctcaatggaaaggacgcgaatctcggggtcgaactattcattaggctgacacccacatacacctcccctattgcaccccgcctccaccgggaagtaccacttgacacactacaaaccccttctaacccttgaattgttatgaactcggtagccacaaaccacacctcgcacttctctctgttccagatctagagaaaaaaacctctccttgcccaataaatctcacatatcaggtagacgacatctttactttgcctaaaccatgctcaatctcaaatagacgttcacacgaaagaaatcgcacaagaaacacg

SEQ ID NO: 14316 - DNA, 386 bp, Glycine max
ttggttcgaggtacttacccgtggaggagcgaagttcctcgtttaacgaaggaagaacgccgaagaacggttgtaacctttgcgaaattcttcacggaaaacgttacggaaacgtttcggaagcgtcttggcttagattttcttcacggaaacgatttttccaagcaaattcgatagagagagaagtgccaaaggggctgaacccttatcttcttcacttcctcccctatttatagcaaaataggggaggtggttgccgcccagctcgcccaggcgagccaggttgcttcctccagaagcaacagccttctggaggaatattctggagggcccaagtgggcctgggtgctatttgcacccccatttttactaagtacacccccctc

SEQ ID NO: 14317 - DNA, 1021 bp, Glycine max
  unsure (1)..(1021): unsure at all n locations
acgcacacccgcacacaaagacacccgaacccaacgcacacgcactacggacacacacccgaagcacgacaaacaacgcacgtgcaccacacccacccccnnnnncccgctatcatcactgcacaccccccnnttagnaaaacgccccccacgaangcnaacagggacagggcgggcagagttttatttacgcccaaagcgcacaaagagccacgaccaaggcacaacaaggcggcccgaagagacaaaacacgactccccggagaccccagcgaggaaacccaagaaacgaaccccgacaaaccgcacggacacggcaaaggcgagacaacccacaacaacaggggactcggagaacaaagacacaacccacgccaaggcccgcctagacaccagccaacagcagctagaacgaaaagagccacgcgacccgagcaggcacacacgcacgccaaacacgaaaaccacgcaccccgcccgaaaccaaacaccgaccaacggacaaccaacgcacaccaccagccaggagggagcacccaaccacgaacaaaccacccacaaaacgaacaccccacgaaaagccaaaaacgaccgcgcccaaaaaacacgccccccagtgaggacggcaacaccccacaaaacaaacaaacgcgaacgggcccaccgcccaaaaaaccaaacaaccacccacaccccaacgccacagcgagaagccaagcttcacacacgccacaagagaccacacgccacacctcacagaaaacaacaacgacccgccacaaagccacaccgcagaaccccatccagacaagccgaggcgcccccaacgagccggcgacgacccacacgcaccacaggcacacaccaccacaagaacaacaaacgggcagacccccgcccaccgatataggcgatagaacacctccacacacactccgatccacagacacacgcagagggatgagacacgcacagccacgcacccgccaccaatatcacacaaccacacacaagcgtggcg

SEQ ID NO: 14318 - DNA, 547 bp, Glycine max
tgcctctctctctctctctttcactcatacgttttctactatagcatatatttgctatactctccttacacatattcttacttaagcatcatagtcatttgttttccaggtcccccttcctatcaaaggcacctctccaagccgacgtgtgaagttcgagaccccactcaaccacatccatcctgacgtgtcacggttccagattttggtaagcacatagagtgtgatttattttttatattgcctccttataaatagtaatgcaatgaaacacaattcgtattgatacttatgatttagcattaatcattaattgtagccatgcataaataattttttttaattcatagagtgtgtttggtaagacaaatatcacaagaaaggggattaaattgtgatttaaaaaactttagaacctttttgatgaaaaaaaagttaccgtttgaaaaataactttttaaaatagataagaaatttttcacataaacacattcagacaatgaacacaaattttacaaaacaaaagagttttcaaacaatcaaattc

SEQ ID NO: 14319 - DNA, 448 bp, Glycine max
agcttgcttctacaataactaaaaagattttaattgtatgacaaaatgaaattttcttaatataaggagtgtttattagggtgaaaataggccacgcagacaattaggtggcttatagcctagctgggcctgacctttttaatagggctcttgctaaatacatcttcttctttgctatcttaaccccattttttgtcattaaatttgttattaccatttatatccttttcaccttgtttctacacccccaatagaagcatggttctctacctcgaaaactgattggggaggagaattttgcccatttgcaccttttttggttgtgttccccttacttagcccttacaatactcataaattggattccaggtctcatgaatgccttttattgggttattctacttcttataagggctacaaatgtattttccttattggaaagatgttt

SEQ ID NO: 14320 - DNA, 408 bp, Glycine max
ttgaaccatattttcagaatgttcaaaatcagaatgttcaaaattataatgctcaaaatcaggatgttcaaaattaccaaccacagaatgctcagactcaccaataacagaatgctcaggatgctcaaaaggtacaaaatgttcagggtaatcaagatgcacactatgccttactaatctatgaaatgtcctatctatttcaggatcaaagggttgtaagtcacttggggtgcctctagtcatgcactatatgcagtagttcatgtgtttctcagacagggcaaaaaaagtgggttaaaactacaactatactcaaacaatattcaaaatgagctgaaattttgtgagcaataccctcaaatcatgagaagatagcacacaaaagttttagacaaaaattcaaagtct

SEQ ID NO: 14321 - DNA, 605 bp, Glycine max
ccttagagcacccgcggctgcagcttgaagctagtgatgagtttttataatataaaaaaaatttaaagtcctcaactctgacttcgctattgtcccaccaagttcgagtgttaattattggtctggttgtagtcgaatatgagagcgatgtcctctttggctaagtttttttaacttagtcattaagggaattgaatagttagtgatgagtccaaatggttaagaatttagagcgacatcttatcaattgttatggtcatttagacacatttaaagctttcacacatcttcaagaaaggcatgatgattgtgtcctttgaaattcaaaacatcattgggatacccaagggttttgtctattcccagtcgttgatctatctcctcaaggaaggatcttatgcgtccttttggccactagaagtttccaaaagactatagaaagattgagaaagcttttcttctctcactcttctgcttttgtgctttcttctccggccaaattccatattcttcggtcatctctttctcctcatcctatttttacagtcaccctattgcctttcaggtacacactttctacccttcctcttctattcattatgtct

SEQ ID NO: 14322 - DNA, 508 bp, Glycine max
  unsure (1)..(508): unsure at all n locations
gcttctacaatagtgaggtgtcaattcgctatgatgaatctaactngtttttgggnttaaaacaatttttggagcaaaaatgaaatcaaatagagaaaagtattattgagatgaaatccatagaattcttcatatgaaactcattcctaatcaatctcctagttcaatgcaaccaagatccatactacaatgactaatcctaattccatacttaaataggatcacattaactatgagaatttataaaaaaaatatagattacatacttgaattctacttcaatttctcaacaacggtgaattttagctcatttggatcatgaaggatccaaatagaacctcaaaagagtaacaatggaggaaaatatagagagaaagacgtgatagagagttagagattctatttctgaaattgtcaaatgaactaaaagtcactacaaatgatgttacacgctctttaaatagagctaagattacattatttgtttgtgcctcaaaggattttcact

SEQ ID NO: 14323 - DNA, 472 bp, Glycine max
agcttataaataaaaatgatggcatgtgtttttctcccatcttattatgttgaaaagctattgaagatgtttaattattttgatgtgaaacatgtttctactccttatgactcatccattaagttaaagaaaaatttgagtaaactaattttttttcatataaatattatcaaattattggtttttgtagcatttgacaaacttctctaggcctgcctgacattgcttatgcagttagtagattgggaagtaattgagaggtttagtgatgcaaattgaaattttgattttgatgaaacaaaattgacaagtgattatatctttactttagctggttgtgcagtatcatgaaaatctactagaaaaatatttcacatgaaagccaaaattattgctttatatactgccactagtgaggctgaatttcttaaaaatttattatgcgatttgtcatttgtaaataagcatatac

SEQ ID NO: 14324 - DNA, 501 bp, Glycine max
ccgatatccctttgtagactggcttactttaatgcattatcatcacaacatattcaaaaaaccaaaaccccacaatccatccctggtaatgtagttatttagtccttcttctatcaagttctaaggcaacaatacatttcccaatgctaaagtcacctaacagtacacacaaatgggtgatcagaccaagagcatgcagtaattaagcattgaaagaagcattgaacacacaaaacacaattaattagatattaaagataattacatcaattgttccttagaaatccccaactagggtgtttagccagccatacatggaaccctaatgcaaatgagacatatagtgcacagcagttgttgcttacacaagaaaggggatccctcctcctctttttggcacctcacaatcacgaaagcactctctaatctctcaaagtgatgaaacctaccttccttgcttagctgctgcctccagagcactatctcgaattctgtgcaaag

SEQ ID NO: 14325 - DNA, 448 bp, Glycine max
agcttatctatgaaaaaatcagaagggttcttttttaatgccattctttctgaacaaaattggtgtcaagttcctcccttagtgtcctaatcagctgagagaatttgtggaagccgagtggaccgtactatcagatctctcattgagaggcaaatgagctgtcttgcaaacttaagagtgtttgtatgtatgtcttaaaattggttgaacgccaatccagcgttcagttgtattggaaagtgagacaatagaaatacacactattatcatcatggtgtgttaagttgatgttgaatgtgggattagttagacaaaactggtgtccatacgttgtgtttgtgttaccgtccaaccaaacataaccaacgtttttttaagaaagcttcaagatgttgctttggtggtggaggcctaaaaattgtgttggatgcccaagaatgtgtgaaat

SEQ ID NO: 14326 - DNA, 566 bp, Glycine max
agaaatttagtaaaattttgataaaatttaaaggatttgaagagagaaaatatgatattattttttactttagatggaatttaatgatgtggttagttttgagtaaaagaaattaaaaaaaaattaattgattcaatctgtaaaaatatgtatacaatgataatttaaatttttaaataaagcaaattccaaactaaaaacgtaatcaaacataaattaaaacaaagctaatattacactcataacttacaaattctattttaataacttaatcttcttatgtcaaaattccaaacttgactccttatctcttcaagttcactggttgaagaacatcgctaattattgtttacaacattttcatcttaatttgggattagattttaaataacactttttgtttaattataatagtggatgaaacagatttaatgaagagtaattttttaaatggacgaacgtgataaaaggtatagtgtagcatcattactaaatgggcccaataaaattatctattatttatcaacccatttgagataataaaaaaccttggccttttctttttc

SEQ ID NO: 14327 - DNA, 470 bp, Glycine max
acagctttttttgaaatactacttgaagtagtatttttaacaatgtgagcttttagcttatagcttttcaaattttcttccaattttattatcgatacatttattcattcttctaatttatcttttttaaataaatcataattttattatttttctatcattatacagctctcagttacttgaacaagtagttttatcgaatacttataatttggtaagctagtttttcaacaactatagcttctagctattagctagtttcattgaacataggctatgttcaccaaaactaggtggaaaagtagctgataactggaaagctaactttataaattataattgatcgggaaaactagctgttgaagtaacttaaaagtataagatggaccgaaattaatataaaaatgatttatttaaaaaggtacctaacaattgggtaaatatattgtggatattatgggagaaaattt

SEQ ID NO: 14328 - DNA, 475 bp, Glycine max
tctaactgaatcattacataattcaactgtcatatttttctggcagctggcataactaacctgagagcttactcaacatgtttgtacttggttacacaaaatgtatcctaaattactgactaactacatacaccatcaacatcttatgacaaagaaaattattggtaaaggtcatgaatttggcgatctctatgttcttgatgcagaaagtattcctaaatgtcctaaaaataattataaaaattatggaaaaatataattaaaatgaaacacttcaaaacacaaggtatatttccttgacatggtgattttttgcatcgaatgtattcatccaaatctacttgctagaagaatgcagattttttttcataaaactcttgaggagttgcaaaaagaaagagttaaaatattccatgttacgaaatgaaacaattttcaagttttgatgaatgtgaaattgaaaaacaatttcaat

SEQ ID NO: 14329 - DNA, 486 bp, Glycine max
  unsure (1)..(486): unsure at all n locations
agctttcaaaaagcttgccgctttttatatttatcaactgccctaactctcttagactggtgatccctaagctcttgaccttgactggatagaacctctttntaagtgaaggcttttgactagaccccatgttttactaaagtgaaacaaaacccagtgcgaatcaaaactccgacatctattatgggtggaaatggatgaatgcatgaagaaatgcatatgacacaaatgctatttatgaatacaggagcctgggaaattgtctcctttttagatacaacgtcttgtggtagcaaagtgcccaacgtatgtatttaagaatgtgacacggaccctccgttggtttgttaaagagaggggatctagacagaatccgtgtgtgacgcatatgcgaaaggcgcaacatagtatgacaatattcacaaaatataaaagggtacatgaaacttatgcttgccagtgaaaatatggcacgcaacatgtttg

SEQ ID NO: 14330 - DNA, 353 bp, Glycine max
ttcatttaatcatcattaaaagttaatcagtggtgcaactagctaccccctgttaaaataattgaccatgtgtatatgttttatgtgtcctagtatagcaaacaacaggaatggtgaaaatggatataagagcattcctcttttgcataagagcattgagtgcagtctatgacaatgactttccctttgaagctataagaatttggagcttttcaagatcaaagttgggtagtgcattgagcgcagtctgtggcaatgaatttccctttcaagaatttaggtgcaaataatgataaacacataacctatgcaccctaccatttaagttcaatgaatttccctttgagaattta

SEQ ID NO: 14331 - DNA, 267 bp, Glycine max
atatcagtattaaaattttatgaatgataattttacgaaatattattataacaaatacatctaataatttttagttaaagagccggattagagtttttatgttagatttaatcaaaattaattataatatatatatatatattggtaactcattggcaagtgtaccaaatcgtcacaagtagtaaagttctcgaaaggtcgagtgttggattcacagggactatgtttgtatttagactcatggaggccccatttacaagcaggaga

SEQ ID NO: 14332 - DNA, 313 bp, Glycine max
tctaagtgcttagagtcaatagtagtccctacttcatgtcttcgcaaggaaatcccaaatggttgaataaagatgggattgtggtgaacatgaagagatgcaaggctcaagagacaagataataagggtagggataaaatgttacttttgatcattagttatgtgctcaccacattataaaaatatagcttcgctgctgatgtcataatctacatgttataatggaagcttgccaactcacctgttttcccttgctcagttagaatttgaaacaggattttcttatttttcatatggagctcaacagtgagag

SEQ ID NO: 14333 - DNA, 947 bp, Glycine max
  unsure (1)..(947): unsure at all n locations
ccacccacgcccagccgantccntcgcaancgactctcatccgcgctcagactccacacaaacgcccgccacacgccccgcatctcnagcnaatgctnnnnnancnnnnnnnnnnncctggccaccacactgagaaccccgcngnntnntntnanagaaaccccccgccggcccaccacaccnacaaaggaaccacagaggcgcgacatggtttgttattctgaccaccccaacaccaccgacgaagccgaaacaggggcgacggaccacaaaaacgcggaacgcccaccaacccccaacccaccagaaagcccgcaagacaaacgcaacgccaaaacaccccccgaggcggcccaccaaccaccaggcgggggcaccagggcggaccaaaaacaaccgaacgggggcgaaggggcccaccccacccactcacaacacaacccaggccaaaggccagccccgacaacccccccatggtgagaaaccaagcacaaaagagccccaaaaagccccccaaacaggccaaacacgcgaaggcacagcgccaaacgcaccacgggaagcaagaaacccaaggagagtgcacctacctcgatggaaaggcgccgacaccaaaatggaaaccaaaaacccactatggcggcccaggaatagaaaaaccccacaaacccccgagggcaccgcaccgaaaagaggggggaaccccaacccacgcccccagccccaacccccaccgaaagaacaccacccccaacagcgcgacccccacaccgaaccaacacacgcgccccaccgacgcgcccaacgccccgcgaccacgccaccgacaaaaacacaccaacgcggacgcccacaacacacaagcggaacgacggaacaccacacccacgaccccacgagccgcacgcggccgcacacccccacacccaacacccaaccacacgccg

SEQ ID NO: 14334 - DNA, 344 bp, Glycine max
ttacaatcatctgtctactgactaacatcctacatgagttcacactcttattctttgtttgtctaacatacatattcgctcaaattcatgaaaagaaacacaaatctcatcttcagcatgcattcaatttaaaacaaggcatacatccatttttcaaaataaataaactattttactgcaacaccaacaaaagttaagttaaactgctctagatgcttcagaatgagcaactacactactcatgcacaaaactaacaagaagtaaatgatgtactagaaccataattatactaatagatcaaaaagcacacaaaatcaataggaatttaaagatcctatgattg

SEQ ID NO: 14335 - DNA, 429 bp, Glycine max
agcatatatgctataaaagatcatatatgcttccgctcaaaggcccccacaaattacaaaatctgtaattcaataatatcacgtgacaccaaataacctgagcatgtgcacaggaacaacaaacaaaatacacaggtgctacagcatagcatatcatgataacaactagaatatcatacttggataacaacatggtggctgaaaacagtagcctttcgcctagctatccacccacgtgtacatgactgaataatgatggctgatttattctttagttgaagcaacaagagacccttccaccaccgttgcaatttcacaaccgaaaacaagaataggtccagttgaaaactacgaaagccaaatggtcttgaaatgcaactaataggagcaactgcgtgtgacttggaacctacatcaccaaaacatgag

SEQ ID NO: 14336 - DNA, 437 bp, Glycine max
gcatgcctttagaaactaaattggcgagatatgtttttttgtcggggattggaaaaacggtggaaactgtcatttggaaacactaccggagcttggatcttcattggtgcctaatgacaactggtcacaattaaaaatagccaatgctatcttatctgctgcacacacaaatatttctgaaacaaacaagttcatggtgttaaatgtaacccagatgaccgctcagagaaaagatgggcattcatctatctattatctcggtcgtagtgcgggccatgtgcatcatcatcgccaagattgcagccattggtgtctacctggtgtacctgatacgtggaatgagctgctttatgcactgttgcttaaacatgaaactgctcacagaggggaactgtaacacgcatcaatatgatttgctgagaaattgttaaattctg

SEQ ID NO: 14337 - DNA, 246 bp, Glycine max
cggccataggaacacaaaaaaacgacaatctccccaaaaaacggaaaaccgcaagaaaccatgcccgggacaacaacagcggcgagaacccaaaagggggaacaacaagacactctcgcaaaaaaataagcaaaaataaggcgaaagcaacagtaatagaacccaaaaactccaaggaagcgagtatagaagaccaccggaaagcagccaagcaagaagaaagaaaccaagcgcgccagaaaagag

SEQ ID NO: 14338 - DNA, 610 bp, Glycine max
  unsure (1)..(610): unsure at all n locations
tttgcggatttagttttcacggacgaacggatcttatatttatgaaaagaggcaaatttaatcatcttgcttggacgaatgagaaaactggggcaaatgaagagggtgagaatgagggagagacccatgttgtgactgccattcctatacggccaagtttcccagtagcccaacaatgtcattactcagccaataacaacccttctccttacctaccacccagttatccacaaaggtcatccctaagtcaaccacaaaacccaccttccacacaaccaatgctaaacaccacctttagcacgaaccaaagcaccaaccaaggaaggaattttgcagcaaaaagcctgtagaattcaccctgttggaccttgtggcctcaataatcttaagagggatatgcttagaatgcagaagaagcaacaataatcaatttaataatgttctataaacatgcaaggcaaaattgattgcaataacataaatgagataagggaagagagaatgcaaacacaantttatactgggtcggccactttccgtgcctacatccagtactcaagcaacccacttgagatttcactatctttgtaaatccatacaaagtctgaac

SEQ ID NO: 14339 - DNA, 650 bp, Glycine max
  unsure (1)..(650): unsure at all n locations
agttgctactgtganncnnncnttgtaaaaccggcgcacgcacnngaacctatttgtgggaatgtaatagttttcagggggaaagagaaggtttttttttttaaaccccctccaggtatatttcatttaagaaaatataatgttattttcctgttttaaaatatagattagggtattcccccttaagatgttaaattcaataataaagaggaaaattccctatttaaatggggaaagtaatgaattaaagaaaatcttatcttaaatggaaaagtttatggaaaataaaagacgatactcttattatgattaagaaaacgaaaaatttccaaaggtttttgccggacattctgacatactaattgcccaaatgacaaaaagaagaagggaccacaactaaatagttttttcttttatataaccaaattccggggcttagaacttttttcttccccgcctttctagaaaaaaagaaaaaaatagcctcaaatttattagctatacaccataagcgaataagaaactactaaaaaccctttctgggaagtctattttcatgacaccctgttatattttgtaatagaataatttgacagcaatcataattattatggttgtaataggataaaacttacttggtagatttaccn

SEQ ID NO: 14340 - DNA, 176 bp, Glycine max
ataaatactgaaactatttattataattttgaagtttgaaaaaaaatacctgaaatcaaattattcatcttataaaaggcttcaaaaattcacacaattttgtagctcttttccattcctcattagatggacaacatttgatttttctgtcacgaatagtgaaacttgcaaaagca

SEQ ID NO: 14341 - DNA, 839 bp, Glycine max
  unsure (1)..(839): unsure at all n locations
gcccgccccccgcgaccagcctaaacgccccactccacaccccacccgaccacgacaccagcatccgagcaccacaaatacaacnnaccanccnnnaccaaccatgactcgatgcacccgcccgnnaagagacccgccgcagcaagcnaaaaanacaagacgagcctctctatatattacgggacacaaccaaacacgcgagaaagaaggtatagcccgcccgcatacacccaaagggagaaccttgcaattaagagcggctctcatacccagcgcactaaaaccgaaaccaagagacgaacacacaagcccgaggactcgcggaaaaggaaaaaatgccacttgggggccacaactcaattaccagccgcctaacaacaatgggaagaaagcgcatcccccaacgcacggccaacaacggtctgcaacaagggccgagacaagcgatggcatagccgcttctggaagagaacaaaacgctttcttcaaagaggcagagaagaaacacaaaaaccaccatctccgaacagcaggacaatagagcccggggcccttcaagcacccaatggagggactgcgcgggaaacgaacgacggcacaaaaagaaggggcaaggggcaccccacaaggaggagggaagtcaaaccggcaagaaaaacccggaacaaaaaaggaaaaaggagaaggcgcccataaagccgactaaaacgaaggaacaccccggaaaaaaaaggcaccagcccctaagaaggaatgcacgggggaaagaacaccgagcgaacccgcaaagaaagggcgcccaccgcccacaacaagagctacggggcaaaaacccaacc

SEQ ID NO: 14342 - DNA, 518 bp, Glycine max
tggatcatatgacacatatgccctagatcgagggtgtgtatcactactagaattaatagatttaacatcatacagttaacatcggttattggaacaactgatgttaacaaacacaaggtggcattttcataaataagtttgggtaactaacagcggtttttaaaaaagaccgatgttaaccgtacgctttctttataaaacccaaaggccaaaaaccctttttcccccgcgcgctctgttgactgacaaacaaaagctttctcttctccctctgcgttcatcactaccatgactgtgagcatcaacccaaggtacgtgttaactgcgtgttttccatggccatgcttgcgatgacaatgttgttcttgttgaagtttcaggctaagttcgttgtttacatgcaccatgcactatatctctaattgtgaaacacccgacagtacgtcgcacgagtaactcacgcaggttctttgtcattgactttttttgggaataatagtaaagcacttgcattcagt

SEQ ID NO: 14343 - DNA, 318 bp, Glycine max
ccggcatgcaaaggtttatagcttttaaatgctttttttcattgaactttgcaaatttaagttcggttaaaaataagtttaatgtaacttgatttatatttggattttgcttacgttcaacaggaaaacaagagaggaatgattttgggataaatatcagtttgattgtataaatcacgttcaactcaactcaaaaaaatagcatgttaaacaagcggggcagtttttatgacgggcggatcttaaaaaatgagatattaaaaacaaccgttttcactgaatcactttattgttggaaacagattagacagggataaa

SEQ ID NO: 14344 - DNA, 408 bp, Glycine max
  unsure (1)..(408): unsure at all n locations
tagctttcgagaatntaaaattgtcataacttttcactcggatgtcttattcaagcacatcatatatggagacgcccgaaattgaacaacggaagctcttgagaaattgaaattgtcataacttttcactcggatgtccgattcaggcacatcacatatcgagacgctcaaaattgaacaacggaagctctcgagaaattcaaatggtcataacttatcactcggatgtccgattcaggcgcatcatatatcgagacgctcgaaattgaacaacggaagctcctaagaaatttaaatggtcataaattttcactcggatgtccgattcaggcgcattatatatcgagacgctcaaaaatgaaccatggaagctctcgagaaattaaattgtcataacttttcactcgg

SEQ ID NO: 14345 - DNA, 328 bp, Glycine max
  unsure (1)..(328): unsure at all n locations
agcttcccgagattcctcacggaaaacgttactgaaacgtttttgaagcgcctcggcttagattttcttcacggaaacaatttttccaagcatattcgaaagagagagaagtgcctaaggggctggaccctttccttcttgctttcctcccctatttatagcaaaataggggaggtgngtgccgcccagctcgcccaggcgagctcagctcgcccaggcgagcagggttgcttcctccagaagcaaccgtcttctggaggaatcttctggagggcccaaatgggcctgggtgctatttgcacccccatttttactaagtacacccccc

SEQ ID NO: 14346 - DNA, 407 bp, Glycine max
agcttcccccatcaacgttaggccctatatgtatccccattaccataaaacagagattgaaaggcaaatttcggccatgctcgaggcaaatctcatacaacccagccacagcccattttcctccccaattcttctcgtcaagaacaaagatggctcatggaggtgttgtgtggactatcgcgccttgaatgctgtcacggtcaaggaccgtttccccatgccgacaatcgatgaacttttggacgatctggggcaggcgtcgtgcttctccaagctcgatttgcgttagagatttcatcaaatccgcatggccgacgaagatattcataaaacggctttttgaactcatctgggccattatgagttccgagtcatgccgtttggactcagtaacgtgtcgtcgacat

SEQ ID NO: 14347 - DNA, 332 bp, Glycine max
tacgctacggtcaattaatttcttatgttcaaaaggtattcttaaaaatttgtcaagatgataagattcaacgacaattagccaaagaaaaggcccaaacaaagaaagacttaggttctttctgcgaacaatttggtctaccggcctgtccaaaacaaaagaaaaaacaaacctctaggaaagaaatcaatgaaagcaaactagtcaataaaaagtgatttcctaggaggagatactcacacaaaccctcaactagtaatggaatggaaaatcctaggcaaaagataaaataaaaaataacatgttacaattatggaaaacaaggccacatt

SEQ ID NO: 14348 - DNA, 388 bp, Glycine max
agcttagccacacaactcaagaggctaatctcacactaacgggaatatatcttggtataatcataatcacacatagtacagaaaatcaaagcaattttcagagtcctacatcttccaaaacaataacagctcaaacatacaaatctaaaaccaaatacaagggaaacagaacatcgaaaaatacgatagctctacctctaattcaaccccaagcactactaatccagaaaacaatgaacaaaaacaggagaacgatccactttcagaagcaaaaaaagacgcgaaatttcaaaacaagaatataacgagcactgtcttagaaacgtaacagcgtaattaagatctagaatgagaaatatacacagttttgcaatgaagcatctaagaa

SEQ ID NO: 14349 - DNA, 327 bp, Glycine max
tgagaagctctctatgaaacaagataattgattacccaagtcaataatcgattaccttatttttggaaatgtagaacaaagaggattttgaacgagttaatcgattacctaatttgttaacaattaattttgttttatttgttaaaactcacttgttctttctcattagtaactcttgtttcgatcctatcttttgaaaaacactttctaaaaatcatctatgggaaccaatctagatttcaacaagagtttcatgatgatcaagattcattcattcttcatcatggtttgagaaagaaaggaaaagcttaaagatattaggatcta

SEQ ID NO: 14350 - DNA, 350 bp, Glycine max
agcttaaccttttcgctctcacgtctttattattgggagccaatccaatccttgttttcggactctcagccacttatgatagccgccgatgatcccattactgcttcccctaagctctctgtcctttcttcacgccgcatcccatgccttgcgaactccttggagtaccctcgcgttatggtcactgaaacctcgtgcgatgaaaggcgtgatgctttcgtctaatggcgctcctctcatggggtagccaagctgtcttatggcgaggacgggattataattaatacaaccccttgttcccatcaagggaacatttggacatccttcgcatgaagatggaatcttgattc

SEQ ID NO: 14351 - DNA, 323 bp, Glycine max
tgtaggattatggggtactcatcacatgttgtactaggtggcggtcgggcgatggtgcacaacaagttttccacatccacaatgcgcgcataaacccaccatcccctgttgcccacctccaactgagctcacgtactcccacgtagcccatatcctcgtttctctcaacaccgggtccccatcaatcctcccaagcttccacaacatccaagcaaaacaacattcacacagcacaagctatcacagccaagcaaaacaaagcaaaggcagaaaactctgccaaaacaccaaccaaaaatcacagcttttcccactcaaagacc

SEQ ID NO: 14352 - DNA, 395 bp, Glycine max
  unsure (1)..(395): unsure at all n locations
agcttcagacattttgttgtaatcaattttcacaactctgnaatcgtttaaaacaaagagttgttgcctctgaagaaatttttctaacttagaaactttttcttcacacaaaccatgatgatgcatgatgtctgatgcaatgcaaatatcaaatgtactaagatgtcacaaccaagttaacaaccaatacaaatgccactcaagggagttgggcatgtaaaagccaaaacttcttcaaaacttgttcaaacttttccttgagcttcaagctttagcctttaggttgttcaccatgttgctccccttatctctaacaatagtttgtcataattaaaaccaaggatgtggattcaatatgtttaacccacaaatttagagaactagagtagtagtct

SEQ ID NO: 14353 - DNA, 322 bp, Glycine max
tgagttgcatttgatatattttgtgttgtaacaacaagatctataaaatataaagataaaaaaaaggtgaaagctgggttgacccatttcccctcaacttccaacttttgcaaataataaacaacaaatgaataaaaggaaatgaaataacattggagataaaataaaccctaaagcctcttcatataccgaagcatcattgggagcatttgaatatgcaagagcaatgttgccataatagatatcctagttgtgaagagagtgaggatgaaagagaagagaacaaatgagaaagtgaagactagagtatagaaaaaaaaaa

SEQ ID NO: 14354 - DNA, 391 bp, Glycine max
  unsure (1)..(391): unsure at all n locations
agcttaacattgtgttaattggcaaagattgtataactaatttcgccaaggtgattctccctgccaatgggataggccattagaaacggngatcaaattttatgggctcaagtcctggttggtaaatatggtaagaatggatccacttctgattcctacatttggaaagctcatgctgatcaatggggtactttccaagagatggagatatgggccattcataatggtcctactgtcaatgcttggcatgataggtggttggatgagcgaacaatgttatttgatcaagctattgttttccctgctcatattcataattgttgtgttgctgacttagtggataacaatggagaatggaacctccctctcttgaatatgttcttgcctcatg

SEQ ID NO: 14355 - DNA, 319 bp, Glycine max
tctatgcggacatatttatacgtgcgattctggtttaccgtttaggaaatctgagatttgattggctggaaaagtctataaattgagaacccaagcatacattggatatatcgccctccatttgccaaccttttcaaacttttttttttccttcattcatttttcatttataaactatggctatgcctcgaagtttattcattactctagctattttcttgggattcctttcaggtattcttgatactcagatacatgttatgcgtattaattttcgttctaaaaatggagaaggtttaagaggtcgtgtgtgtcgtgc

SEQ ID NO: 14356 - DNA, 387 bp, Glycine max
agcttacacatttattcactagttcaatatatactgaacaaatagtcatcatcagtccatagttctaatcaatcatgcttagcatgatgcatgcacctgacctcaactctcaaatgcaatatgataccatccccaaggaaatagcctaagcgtgtccacatgacactctcacttatgaaaattaggcagtaagtgtcgaggtcaccctgtcatgcataggcaactcccccccccccctatggtgatcaacctgagtctcaagggagttccaaaccaagtgacatgcccccaagtacaagtattcctcctcacaagaaactacaagtacttattgacaaagtttatactatttccatgtcatatgaagtatgaaacatgggcaccatc

SEQ ID NO: 14357 - DNA, 322 bp, Glycine max
tgcacaacaagtaactaaatctttttttttcaaaatgaagtaactaactaactaaattatactaatatatagagttactacttagaaggaagggataagctttgattaaacccatctaatatacctatttaaactaattacacaaaacaaagcccaaactcccagcccaattatttaagtgcagagattctgacttctaagccaaatttgaaactcaaaatggaagaaatggcccaagcttatttgtgacaaaattgaatatactcttcttagctttccagggactactcacacgctccatttggagttatgtagtgtccta

SEQ ID NO: 14358 - DNA, 383 bp, Glycine max
  unsure (1)..(383): unsure at all n locations
agcttgtcttgtttaaatttccttcttgttagcagacaacttcattatgagcttatgactagtctaattgctcccaatcttaaaaggttagattgtactcaagtgcctccaaatcaatgtcatcaatctaaaaggtctctacagacgtagtgtgatcccaaggaagaacaacattgagggcacaaataagacccatgaattcttgaagatccaaggaagtatagaagggcaactcanagggttaagcttcctacatttgtagacagtagcgctaggaggatatacctttcctgctattggcctatgctcaaatatatgatcngtcaaattgtagcacaaatttttgatggggactcttgaaaatggttcattttcccatacat

SEQ ID NO: 14359 - DNA, 321 bp, Glycine max
tgaaagttatctttagggaattaatacattgataagattgcttatcaaagataattgataaatactaattaagaaaaaattacaaggataagatcacccgccagaattaaacctacttaaaaatattatacatatggattgagggtctctctttctttagtcttttattctttttgcgttttgagagtttcgaagagcaagaacgagtccttagccccaatgaagcatgaagatcaccattgagaaggttccttgctcggattccaaccctcttggtatgcttacgattctttatggcatttctagtttattcatggctat

SEQ ID NO: 14360 - DNA, 354 bp, Glycine max
  unsure (1)..(354): unsure at all n locations
agcttcagttatccatttcgagcgactttttatatacaggactcaatcagacatgcgagtaaaaatttactgtcgtttgaatttgctcagagctacaacattcaatttcaagcgttccgatatattacgggacttaatcagacatccgagtaaaaagttattgttgtttgaatttgctcagagcttcgatattccatttcgagcatctcgatatattacgggactcaatcagacatccgagtaaaaagntattgtagtttgaatttgctcaacgcttcngtattccatttcgagcgtctcgatatattacgggactcaatcagacatccgagtaaaagttattgtcgttgaatt

SEQ ID NO: 14361 - DNA, 315 bp, Glycine max
agacttaagcttcgagaaaagccaaacgacaataactttttagtgcgatgtgtgcatgagtcccgaaatatatacagacgctcgaaattgacaacagaaacgctgagcaaattgaaacgacaaaaactggttactcggacggcggaaggaggaccggaatatatcgaaaagctcgaaagtgaatgtagaagctcagagcgaagccaaacaacaagaacttcatactgggatgtctgactgagtcccgaaaatatcgagacgctcgaaatggaataccgaagctcggagcaaattcaaactagaataactttttac

SEQ ID NO: 14362 - DNA, 380 bp, Glycine max
  unsure (1)..(380): unsure at all n locations
tttcatgcaagctntgacttatccaatggcatggacactttaaaagactaaactctattttcaaaattgtactaactggtttctctgtctcaaggagttatgccagggaccaaaggtacaggtggcttcggtttctttattttatccaccaaaataacttgagtagttagaatgacaccagcaacagaaactgcactttgaagagcacatcttgcaacacgactaggatccgctactccagcattcaaaagatcttcatacgtgcctgtcattgcattatatccagttctccaatcatgtgttctagtcttccggacaacaatgtctccatcaactccggcattagttgcaatngattttcaggttcaaggagtgcctgc

SEQ ID NO: 14363 - DNA, 302 bp, Glycine max
tattctactctacagtttcaagtgctcaaaccgtagatattcagagaggaaccacgttgtttcgtcaagcttgtattggatgccatgatgcaagtggaaacataatacaaccggtgagtatccccttatgcatgacatttctttattttctttttctttttaaactgaaattaatttgttctttcttccttattcttcctattttaacttacaaggggcaactctatttacaaaggatttacagaggtaaatggagtaaacctaagcaccctcatgcagtgaattgaaaatatggaatagaa

SEQ ID NO: 14364 - DNA, 362 bp, Glycine max
  unsure (1)..(362): unsure at all n locations
tgtgatgaaagcttttataacttcttggtaggaatatgaactctatcatgcaaaattgcgtggtcactggcagccatattttcaattaagtccatggcttcttcaggtgtcttcatggaatgaagaaattgcagcttttccttctgcagttttagactctgggaaatatttttttagaaacttctcaacaacctcatcccaggtctttaaactattgcccttgaatgaatgcaaccatctcttggcctcccctgataaagaaaatgaaaacaggctgagcctaatagcatcttcaggtacaccgacaagcttaacagtattacaaatctcaatatacgtngccaagtgtgagtatggatctt

SEQ ID NO: 14365 - DNA, 252 bp, Glycine max
acgagcaaaacaatttccttcgataaagcctgagactgtaacatttttgtgcgctgtgtgcatgttcaaggagtttggacttaatctctagttcacataagaaacactgactttttgttacgaatcaatctggttcaagagctgcggcaggaggacttgtaataagcctaagcattgatgtagatgtccctgctaagagcgtagcttctctcctgcttatacaagaggcgtgtaccgctgacttcaacaaaa

SEQ ID NO: 14366 - DNA, 348 bp, Glycine max
atttgatcatcctactaggacgactgagaaaactggggcaaatgaagagggtgagaaagagggagaaacccatgctgtgactaccattcctatacggccaagtttcccaccaacccaacaatgtcattactcagccaataacaaacctcctccttacccaccacccagttatccacaaaggccatccctaaatcaaccacaaagtctgtctaccgcacttccaatgacgaagaccacttttagcacaaacaaaaaaaaaaacaccaacaaaaaggaattttgcagcaaaaagcctgtagggttcaccccaaattccgttgcatatgctaacttgacccatatctactg

SEQ ID NO: 14367 - DNA, 330 bp, Glycine max
tagcagaagaacttcaatataccaatcattatgtggactaccgaccccaaagaatggacatcacctgaaattggaaggtcttggatctgaacaaatgactatctttcacattttgatttaaaaaagaaaatcagaaacagaaagaaacttgtccttggatcacaagttgataattactgtttcttgcagtgtgcgatagcacctatcaaatgtgaactgtacttcatcagcaatgaggaagtgatcaaacccactagcatatggcgttgcaatgatcaatatacccctagtaacacaaagggggtgataactatggctttttcattgtag

SEQ ID NO: 14368 - DNA, 387 bp, Glycine max
  unsure (1)..(387): unsure at all n locations
agcttgtggnggatgtcacgcataaggtcttttctggatctgcgtctagaacccgatgattatgttccgcatccatcaaccacctccatatttgacctcctagggactccttcaactaacaccatcatgggcaacaaccattgtcgtcatcactccatgccacattggacctcatgcctctgtacaaacattaactccctaaaagcactctacacctccttcctcatccacgacccccttactacaacatcctcttcttcgtcattttcaaatcctacaccaaattgtgctaaaggaagtagccgacgatgggagagatgtgctatatccaaatgaaacgttaccgaaggccctcaaataacaccatatgcttgactttgctgtagt

SEQ ID NO: 14369 - DNA, 348 bp, Glycine max
accatagaactctcaagctttacgcggacaagaacagaagggaagtcttctatgaaatcaatgattgggtattggtcaaacttcgaccttatcgacagtccacggtgagaggatctccggcgagctccggtaagctgaccaaacgctactttggtccctttagagtcattgaacgaattgggatggctgcgtatcgccttgaactacccgagggagctaagatacattctgtcttccactgctccttgcttaagccttttcgaggatccccgacacagcctgactctacttctctacctccacaattcattgatggacatcctagcactactcctcttgctatcctca

SEQ ID NO: 14370 - DNA, 330 bp, Glycine max
ttgaaattctggtattagacaattaacatcagaacacctgtgtgataatgttttttgtcatggaaaaggaggtagctctagtccttcacagagccaaccgggagcatgagtacttagcacccatgattatcttggcatcttggttttgcaacccctatcttttaatcatttgttcccttcacgctcttggttgctgtcgatctagtcagcttattcatataccctttgcaatcgattatgtctttgattgatgtttacatttcacagaccactctctctatatacattatctctctccgatcatgataatcatacttcaattcttacctt

SEQ ID NO: 14371 - DNA, 385 bp, Glycine max
gcatgcaagctttagcatggcctccgtgatagaagttatttgatcttttaatttcgataggtcggcctttatctgttcttgcactccctcttcgttatccatcctacttctggatcgggtgttataggggtgcctttgcgcttttttagttatgatgagttccctaaagaaacaaacagtggtgagtatgtcaccaaaacatgaatatgctaatgaatgatcagagcacttggatccacctcaaggcctttttagacaacgtgatgagtttcataacttctctttttataaaaaggaacaaaagcttttatctagccaagatcatacaaaagtgttacaacagaacctaacggtttctaattatatgggccattaaatctatcat

SEQ ID NO: 14372 - DNA, 326 bp, Glycine max
ttgtatggataggaagctctgctgttagttaaaagagttgacatcccttccaaattggaaggggtaaattagttgagtaaggacagggatgaattattacaggaactttggaacaatctgctaaaggctcaggatcagatgaaaagatctgcaaacaagtataggagggagctagtcctgcaggaaggagattgactctttttgaaactacaaccttatagaatgaagtctccagcaagaaagccgaaggagaagctgagtccacaattttatggaccctacaaggtgatacaacgaattggagaggtcacttataaactggaact

SEQ ID NO: 14373 - DNA, 400 bp, Glycine max
agcttcaacaaatattgaacactcatacttattggaaaaatgctaacaatacgtttattgaaatttacaaaaattataagtaaaactcatcagataagaaataaaacttataaaaaattataatttttagtaaaatttacaataatggagtagctcattataaaaaatatctttacaaggctatgtttttttttaacgttaaatcatgcattttataaggctatgctaaataatggagtttgttttttcccccttccccgtataaataaataattcctatattttttgagcaaatatttcctatattattaagagtaaaaataaataaaaaaaacttacggagttggatcgggcatagaagcgcacagtagagagaaaccaaaccaaagcgtacaccctt

SEQ ID NO: 14374 - DNA, 324 bp, Glycine max
ttgatgtttgtgttgaatgcattaaaggttaacagaccaaaagcaagaaattaggtgcatatagagctacaaatgtcttggaattgatacatacaaacatttgtgggccatttcatacaccttcatggaatggtcaacaatattttatatcattcatagacgattactccatatatgcatacttgtttcttatacatgaaaagtcataatctctagatgtgttcaaaacatttaaagttgaagttaaaaatcaactcaacaaaagaataaagtgtgtcagatctgaccgtggtggtgaatactatggcagatatgacgatttag

SEQ ID NO: 14375 - DNA, 375 bp, Glycine max
  unsure (1)..(375): unsure at all n locations
agctntgaaggttcgtagtccaccatttttcctagtagaatactggttatgtgtctactatcattgtcatcgtttttttcgtcattgaggtgccacttgagttgccaggttctccacctttgggcgtattctttgaaagatccgtgcccctttttttgcacatattttgtagttgcatcctatctgaagccattataccgacacagcctaatgaaggcaaccattatgtccttccaagaatggactcgagaaggttccaagttagtgtaccaggtaacagctaccctagtaagactttcttggaaggaatgtatcagcaattcctctttntttgtgtatgcccccatcttccgacaatacatctttagatggttc

SEQ ID NO: 14376 - DNA, 324 bp, Glycine max
tacctcaaacacaaacagtgacaatggctttgagatctaacaaaatggcacggaacttgaagctttcctcgtaccttaatcagcaatactgcaactgaagacgtattattattatcatcaataaaacatgaacacccacagaaacttagtatacacgaagttgacctacgtacctcacggagaaagctttgagctttgtgcacccacgagtgtttcagcaccttagtaccaagagtgtatgtagggttttcttcgagccacacttccaagagcagtgtaaggggttctgtgggttcgagcgaggggtttccggcagtattcaaa

SEQ ID NO: 14377 - DNA, 121 bp, Glycine max
agcttgaaatgtttaagtgtggaagggttttacttcctacttttattcgttgaccacagagtggtacctggaaatatgtcgcgggggttaagagaccttggggacgtcatgtggggtgcta

SEQ ID NO: 14378 - DNA, 319 bp, Glycine max
tccgttcccgagagcatctcttatttaatcatttcagcctttgctttcttgtagcttaggaaaaacatcatttcttcttctttctttcttccaaagacatttataaagttccaagaactttctccatcacccaaaaccaccattagccaccacaaaccatcattgttctccattgaaatcccataccgagaggaacccttcaaccgaagcggaatcttccaacttggcttgcggttccggtagagaacaaaaaccctaatctaacctttcgttttctttcgaggtaaccatggttctatgcttgtttcttgttagtttc

SEQ ID NO: 14379 - DNA, 350 bp, Glycine max
  unsure (1)..(350): unsure at all n locations
agcttgcttgagaagcttctatggagggtttatctttgagcttcaatattgtccttcaatggtgattttcagccatggagttgcagtggaagataaaggagaagaggtgagaggaggcgccatccaataaagaataagccatgaaaggagaagcttcaccaccaagagagtgccttggataataagcttagagagaaaacttcaatggaggaagagaatgatgtatagagagagagaggaagtggcatggaaattgaaggagaagagggagagaagttgaactttgaagtgtgtctcanaagtttctcattcatcaaagttatgacaagtgttacacatgtttctactta

SEQ ID NO: 14380 - DNA, 320 bp, Glycine max
tgtcgtgaatttcaatataaatttgaaaactgtaattattatttttttatcaaacattacacatgagtatatatatgagattatagcggacttaagatcctctccctttttctgtttttgatttgttgtctcatataaatactgtcaattaagtgaaaaaatataagcatcttaaattctgtcttctctcatagtttggcagtatatttttgtgcgattaaatgtatataattaaggagtgtctcttgatagatctcgtgcacaatagtatgctaatagttctcaacttctcatagctttacttcaacttggtgttttgt

SEQ ID NO: 14381 - DNA, 365 bp, Glycine max
agcttgaaatttataatagaggctctgagcttaatcaaacgataataactttttactcggatgtccgattgtgtcccgtagtatatcgagaccctcgaaattcagaatagaagttctgagcaaaatcaatcgacaataacattttactcgggtgtccgattgtatcccgttgtatattgagacgcttgatattcaaaatagaagctctgagcaaaatctaacgacaataaccttttactcggatgtccgattgtgtcccgctgtatatcgagacgctcgaaactcagaacagaagctctgagcaaaatcaatcgacaataactttttactcggttgttcgattgtgtcccgatgtatatcgagac

SEQ ID NO: 14382 - DNA, 322 bp, Glycine max
tctattctgaatttcgagtcgtctcgatatactataagacacaatcagacatccgagtaaaaagttattgtcgtttcattttgcttagagtttctgttctgaatgtcgagcatctcgatatactacgggacacaatcagacatccgagtaaaaagttattgtcatttgaatatgctcagaggttccgttttcaaatacgagcgtctcgatatattacgggattcattcggacatccgtgtaaaaagttattgtcgtttgattttgctcagagcttccgttatcaaattcgagcgtgacgatatattgcgggattcattcgga

SEQ ID NO: 14383 - DNA, 275 bp, Glycine max
ggtgacaagtggttgaaaataacaatttagtgcccaacttgctccacaaagtcctccaaaaatggcttaggaacttagagtccctatcactaacaatgctccttggcaaaccatggagtctcacaatctccttgaaaaacaaatcaggcacatgggaagcatcatcaacttttttacgtggaataaaatgagccattttagaaaacctatcaacaaccaaaaaaatggaatctctaccattgcttgtttttggcagccccaaaacaaaatccatg

SEQ ID NO: 14384 - DNA, 305 bp, Glycine max
tggttcgaggtacttacccgttgaagatctaagaacgatgaagaacgaatgaagaacgtcgaagaacggtttaaacctttgcgaaattcttcacggaaaacgttacggaaacgtttcggaagcgcctcggcttagattttcttcacggaaacaatttttccaagcaaattcgaaagagagagaagtgcctaaggggctgaacacttttcttcttcacttcctcccctatttatagcaaaataggggaggtggttgccgcccagctcgcccaggcgagccaagttgcttcctccagaagcaacagc

SEQ ID NO: 14385 - DNA, 155 bp, Glycine max
tagcatctggttcaccttgtaccattaggaagcagaatcatatcaggcataaccctaggaatcggcataacttccataacccatgtaggattctcatccgtcatgggatgagaagtgcggaggattctgtttttgtgtaatcaaaaagatggagt

SEQ ID NO: 14386 - DNA, 301 bp, Glycine max
ttcacctacctcctcagacataaaactgtttggaacattcaaaatgttgtaatgtggagtggtatatgcgtcacatttttgcctttccttatccctccaagaattaacaaatgctttctcgaaactccatggatcccctatcaggactcgttgtatttcaatggggtggtagaacctaaacaagaataaggctggttcaatcccagtgattgttacacatgtaaaggtctccaaacatctaccatgtgatctttcatgatgggcactctgatgtttttatcagccaggaatcttcatacaa

SEQ ID NO: 14387 - DNA, 400 bp, Glycine max
  unsure (1)..(400): unsure at all n locations
gtcactaatgatggagttcgatcatgtaagattactctggtgtggtgaggttgaatcaaatagtaaatggatcaataatgacaaggacgtacgaaactgatggtgcagtgaagaataacgtagcaaatcccacaaattgcggacattttaatgttgaggaccagaaaaggaatggtttggttctttccgttttcaaaaacccacaactattatctcctcctagtgtgctttccgcaaataaagatgctatcaatgaaattgatgagttgccaagaaaaacaaaaaaattaaaagaaataacaaaaaaaaataaaacaaaataggttctgtggaatngatttcataagatagttttggaaataanaacgaaatacactattcctgatttcataaagtctat

SEQ ID NO: 14388 - DNA, 359 bp, Glycine max
ctgacatctcaaacaaacaaatcaaacgtaacaagacaattatagttgttgtttgaatacctcacccactcaagtgtatcacacaatgatggcttttctctaatgaaacactcttgccttttaccactctaattccccttgagttcttaagcaattcaagagattatggccacaacaaagaacaattcaccaatatgtgtaaggtaaggctagagagacaaggaaaaggttaaccaagaaaaaggctaacaatgtttttaggcacaaatgaaggaaataaaattcagaatttatgaattcaagtaacaatccttcatgcaaccaatatattaccttaaagagattttttttaaaagttc

SEQ ID NO: 14389 - DNA, 325 bp, Glycine max
tacacaccgttgatagtgtggggcagtatctgtgtagatttattttgggcctggatatgatgattggggcaatttctagaattgcttgttaggatttggtttttaatgtattgcagagggggtatgatatggtattttttaatcatatgatttctgaaggatatatatggcaattatttaaaactaactatgtcatgttgcataactggatttttttaatgtcttttttttttgtaaaataaaaatgatgttgttttcaaccaatggagtatacgcagcatgatctgatatatttgcacgattggcatgagcgatttttttttat

SEQ ID NO: 14390 - DNA, 400 bp, Glycine max
  unsure (1)..(400): unsure at all n locations
agcttcaacatcttgatttaatatattcttttttcttaattagtttagtttccattgattcatgtaagtatatttttgtgattttaatttcagttaattaacatttttttttaaatttatcataataaaatattttgtttatcttaagttttcaataaattgaatttttttaattttgatcttcaacagcaagagaagtaatgcaagcatcaggttcatgtgaagaagtgcatgaacggcagctagcacaagtaactcctcatcatcatcaacaacaacaacatgctcatcatcatcaaatntcaaactcagcttttcatattagtaggtcgtcacatcccatctctaccattatctctccttccctccatcacactttcatcattctcgatgacaactc

SEQ ID NO: 14391 - DNA, 365 bp, Glycine max
acctcttcactctcctcaggcttttcagcctcttccctactcagactctttagctttttgagctaagttatcccttgcgttctagacttcaaccatttgtgatagccgcctattacacgattgctacttcccctaagttctttatcttttctttctactttattccatgccttacggattctctgaagtgtctttgcattcacttcattgaaacctcacacgatgaaaggcgcgataatctcctctgatggtgcacctctcataaggtaacccaactgtcttatggtcaacacgggattataattaatataacccctcatccctatcaaagggatatttggaaatccttcacatgagcataacac

SEQ ID NO: 14392 - DNA, 333 bp, Glycine max
tctacagaaggttcgttcctaatttctctacaattgcatcacctttcaatgagctggtgaagaagaatgtggcatttacctagggtgaaaaacaagagcaagcctttgctttgctcaaagaaaagcttactaaggcacctgttctagctcttcctgacttttctaaaacttttgagctagaatgtgatgcctctggagtgggagttggagctgtattgttacaaggtgggcaccctattgcttattttagtgaaaaacttcatagtgccaccctcaactaccccacctatgataaagagctttatgccttaataagagccctccaaacttggg

SEQ ID NO: 14393 - DNA, 376 bp, Glycine max
  unsure (1)..(376): unsure at all n locations
agctttgaacatttcaatgaaattcgnntttaaaaataccctcctttctcgcttcatttgatgaagcacctcttccagggaccgaaaatcgagggaagaggcgtggctttcaatgagggaatagaaagacaaatcgcccaatttgtaagaacccatttgggtacctgatttgaagatttcatatgaagggtggggtttgtgggaagaggaagaataagaggggagtgtaattagggtttgggagaaatagcgatggagagttgttcgaagaacgtttgtgggaaatgatgagtgctttggcatgacatggatcattcgggaaaaaaaaaaagtggggttntgaggtaatgggcagtgtcactgactcagtgagttg

SEQ ID NO: 14394 - DNA, 319 bp, Glycine max
tgtatttgatagatattgtgttatgtgtttaaatctgtcatattccaggatgaagacataaaaaatgcaattgaagatgctgggtttgaagcagacatattacctgaatccagtacagttgcacatgaaaccctggtgggacagttcacaattggaggtatgacatgtgcagcatgtgtaaattctgttgaaggtattttaagaaatcttacaggggtcaaaagggctgttgtagctttggctacttcatcaggtgaagttgaatatgatcccagtgtaattagtaaagatgatatattcaacgcaattgaagattctg

SEQ ID NO: 14395 - DNA, 362 bp, Glycine max
agcttgtacaattttgattccggctagttttttctctagtttattagacattctcttcctaagaatgaataaaatgtttctcgaccaaagagagagattggatgaatagaaaaggagcaattgtgctaattcacgttcaacgaatatcacttcattcacaccacaaacccggagttagacaattcttctggtttatgaactttatacaggaccatacaaatacaatgcaatgaacatttcggtgatggattagaaatgacagtcacaacatttttttttttgtttacagttcttgtttatgtcaagcagattgctatctgtacaatgtaagcttgcagaatgcagggtttggcatttcatta

SEQ ID NO: 14396 - DNA, 322 bp, Glycine max
tagcactcttcaagtccccatgcttgactaaatcccttctatcatcacttggcaaatctatccaaaactccccgtcatttcttcccccacctggcaaatttgagccggctgcatcaatggtctctcccgtggacacgccctttcggtacaacaaggccccattattgaaaaaccaatcaacagaagaaggcaagtaagcttcctcgggatgaaagaaaacagtaggcccatagtgctctataagtgcatgtatttggtggaggcgtggcattgctggtagcacaggatttaggttcttcaagcacacaacaggtagctcttc

SEQ ID NO: 14397 - DNA, 393 bp, Glycine max
  unsure (1)..(393): unsure at all n locations
agctttaagcattttcaaacgacaataatttttaactcggatgtccgattgagccctataatatatcgagacgctcaaaattgaaaacggaagctctgagcaaatttaaaggacaataaatnttcactcggatgtccgattgtgtcctgtangatatcgagacgctcgtaattgaaaacggaagctctgagaaaaatcaaacgacaataacttttaactcggatgtccaattgagccctttaatatatcgagacgcttgaaattgaaaacggaagctctatgaaatgtcaaacgacaataacttttaattcggatgtctaattgagtcccgtaatatatcgagacgctcgtaattaaaaattgaagctctgagcaaattcaaacgacaataac

SEQ ID NO: 14398 - DNA, 319 bp, Glycine max
tctcgatatattacgggactcaatcggtcatccgagttaaaaataattgtcgtttgatttttgtcagagcttccattttcaattacgagcgtctcgatatcctccaggacataattggacatccgagtgaaaagttattgtcatttgaatttgctcagagcttctgttttcaattacgagtgtctcgatttattacaggactcaatcggacatccgagttaaaagttattgtcgtttgatttttctcagagcttccgttttcaattactagcgtctcgatatcctacgggacacaatcggacatccgagtcaaaattta

SEQ ID NO: 14399 - DNA, 341 bp, Glycine max
agcttctcttacaaagatgaaaaagagatattgaaagattaggaagttcttgtggtgaggatatctccttcacctctagaaacctcataatcactcaaaccctcatctaatactccgcatgataacttcctcttcaatctctgctgtccctcaggatcttcacaccagaagttctctctgccactcagccactcagaagaatgctttcaagaacggagaaaatgccaaaaattgagaactctcttccatttctgatttcaggctttaaatagtgttgctgatttttggtcgttcgatcaaccatattttggttcgcttagccaaattaagtgacatttggc

SEQ ID NO: 14400 - DNA, 322 bp, Glycine max
tgtgcagctaatccatattattatggcatttgattaaatcttttattctgttttctattccatattcataatatgtgcatttcatttcatattttcttcatacttaatcatactgaatgactgtttggtaatttagattgacgttacttattgctggcaaaagcagaaacatgttcgatttgtttgaatctaatttctgtaaaaattttctcaaatgcaaatcatgtgacttttgaggaaattacatggagatatatttttgatgtttcactcccctcccctatatactagcttctatgagtggttaatttccacattatct

SEQ ID NO: 14401 - DNA, 407 bp, Glycine max
agcttctatatattctgaaccattttattattaaacacaagttgagttttattcagaaaattagagtttatctcttttatcttagtgagagtgattctcctaaattcttgagtgattcaagaacaccctggctgtatcaaaggactttcacaacctttgtgtgttgccctcgctggaaagagtgattctttccttcctatcatctccacccttgttctttcaaaccacaattccagaaaatccacctctgcccaaaattatctcgtgaccataactcccatttcacacactcaaattaagtgattcttgagcctaaattgaatttcaaaacgagacctttcacctcgttttggaatcacctcatttggagccctgtagctttccgtattgccatttctatatttctg

SEQ ID NO: 14402 - DNA, 321 bp, Glycine max
tctagatgagttatgtcttcgaatcggtctatcctgtgaaaagttatgaccatttgaatttctcgagtgcttccgttgtttaatttcaagcgtctcgatattttatgtcctcaaatcagacatcggagcgaaatgttatgaccattcgaatttgtcgagagcttccgtttttcaatttcgagcgtctagatgagttatgtcaccgaatcagacatctgagtgaaatgttatgaccattcgaatttgtcgagagcttccgttgttcaatttcgagcgtctagatgagttatgtcaccgaatcggacatccgggtgaaaagtt

SEQ ID NO: 14403 - DNA, 367 bp, Glycine max
agcttgcacattgctgcttgatagaagattagcaagacggtaaatcatggtactttgacatcaagcggtacgtagagtataaggagtatccacagggggcttctgacaatgacaagaggacattgtgaaggttggcaactagtttctttttaagcggaggtatcctatacaaatgaaatcatgatatggttttgctctgatgtgtagacactaaagaagccgagcgaatgctcatggaggtacatgaagggtcctttgggatgcatgctaatgtgcatgtcatggctaggatgattctaagggcagactatcactggctcaccatggaaaatgactgttgcatccatgtgaggaaatgccacaagtg

SEQ ID NO: 14404 - DNA, 306 bp, Glycine max
tcaacatctcccgctaggcttctaatgctacggtaggttgggatgacattagcactttttgttgcaatgctcattgctttggtagcatctggtgattgaatggtatgtctcaaattccttccctcactaccgagtagttcatgggacaaaaacaagagtgcaaagagaaaccaaatgtgggtgagacggcccatttgtgaaaatgagaaagaaaagaactcagctaaaagatactgagttcaagggttaaaggtggcacgggctggaaaagatgggtgtttatgcaaggaattgaagggagaatga

SEQ ID NO: 14405 - DNA, 318 bp, Glycine max
agcttattgtgaaaacactctttaagtgatatataatacattttgtatcaaacaaatattgtttgtgaaagctaggagtgacttattgacaaagaatatttgggtcttaatctcacggggagattaagtgtagtgccagaagtggcctaaagagtacttgttatagctagaagcggcatagagaatacttgattgtaatcaaagaattgattagtggaaccctttaggtttgaaggagaactggacatagcccaagagttgaggtgaaccaatataaaacctgtgttttctttactgtttctatataactagttcttt

SEQ ID NO: 14406 - DNA, 304 bp, Glycine max
ttgaacaatatatttgtccttcatttaactgtctttgggcttggcggccacgctcaacaaagtattttcgacacctactgtacgttgatttgaccaacgctgttatgggaatgttgcgacaatccttcaaaaccttattgatacattctgagaggttggttgtcatgtggccataccgacgtccttctctatcataagccatcgtccatttttcttttgaaatgcgatcaatccatgttgctatggctggactcagttcacgaaatttttctagattttgatcaaaaatgtgcttgcaaggagt

SEQ ID NO: 14407 - DNA, 388 bp, Glycine max
actagaatgcctggtttacctggtaacccaactggccatgaataaaaaattttcacctgtcgccagactctatggtttatgctcctctattgaccaccacacagacctttgcccttctgtgcaacaatctgaagcaattgaacaacctgaagcttatgctgcaaacatctacaatagacctcctcaacctcagcagcaaaatcagccacaacaaaacaattatgacctctccagcaacaggtacaatcccgggtggaggaatcatcccaaccttagatggtcgaatccttcacaacaacagcaacaacaacaatagccttattttcaaaatgctgctggcccaagcagacatacgttcctccaccaatccagcagcaacaacaacaac

SEQ ID NO: 14408 - DNA, 320 bp, Glycine max
agcgttactatacaatttgcaagcttcgcaggctataggttgtgattaggaatctctgggcatctagtgccgctgatgccgatttaagcactggaacactatgatcaaaggatgatatctactctagccaatatattccttggactcgatgccatctataacaaagacaactcaaaattaaccttacactacatggcttcgagtctgaaaacaatccacattaaaggctgaaattcaccatgggcgcttaactgatacaactcactcaatgcgccctcaaaaatctgacactatggctgaacgcaatagggtgcgcttta

SEQ ID NO: 14409 - DNA, 329 bp, Glycine max
gtcttcatctcataccataaaaccacgaaatcggcaatcaaaaatcttgaagttcaagtaggccaacttgcaaagcaacttgcggagaagtccaatgggaattttgtggctaacacagagaaaaaccacaaagagaaatctaaagtggtacttacaataagaaaaaggatggatggccttgttagtgataatttagtggaaggtgtagtaaaagatatgggtgatgcgaggaaagtgtatgagagagagacatagctgagaataaagagaaacaaataagtgttgaaaatgtagaaaaaaccagaatagtggagaaaaaaagaaaaaca

SEQ ID NO: 14410 - DNA, 331 bp, Glycine max
tgtcagaaagggaagcaagttaaaaactctctttcaaagcaaaaacattgtttctacttcaaaaccccttgaactacttcacattgatttatttggtccctcaagaactatgagtttaggtggaaattactatgttttagtaatagtagaggattactcaagattcacttggactttgtttttgaaaaccaaaaatgaagcttttgatgcttttcacaaacttgccaaggtgattcaaaatgaaaaaaggtctcaacattgtttcaattggaagtgatcatggaggtgaatttcaaaatgagttttttgaaaacttttgtgaagaaaatgg

SEQ ID NO: 14411 - DNA, 408 bp, Glycine max
  unsure (1)..(408): unsure at all n locations
tgaggcctttgaacacctgacagtatctacaagaaaagatcccactgacatataataacaacaacgatcaatttattgctgaatgagcttctctcacaaggtcgccaaattttgtaggagaagatatccttactagaaggacaaaatgtagatgtacatcaagttcactcgatacagaatttggcttatcatcatgaatgctgatattcctatccccagacctgaagtagaatggatagatatcattctggccatcatggaactaaataatgttaagtcaaaatacatttgtatcttaagacaaatcatgactcttaattgtaaaattattatttcattnttacctttatttttcaaaaataaaaaatagtgaaaataaaatatttttttacatatatctctatatta

SEQ ID NO: 14412 - DNA, 331 bp, Glycine max
ttttgtctttcctcaacggacttctccactccttgtggactctttgtataaccttgagactttgcgcgccaaaatctctcacaaggaaggacgagagactctcttctattggcgctcccctcatggggtaccctagctgtcttatggcaagtgcgggattatagttaatacaacccctcgtccctatcaacggaacattagggtagtccccacacgagaaaagaactccctccttgccttccttccatcgaggaaaccaattgattgcgctgcctcctatcccaaccaagtgttgctcccaatcgacttatcttttttcgacgcacgagcg

SEQ ID NO: 14413 - DNA, 402 bp, Glycine max
agctttgagcaaattcaaacgacaataacgttttactcggatgtctgattgagtcccgtaatatatcgagacgctcgaaatggaataccaaagctctgagcaaattcaaacgacaataactttttattaggatgtctgattgagtcccgtaatatatcggaacgctcgaaattgaatgttgcagctctgagaaaattcaaacgacaattactttttactcggatgtctgattgagtcccgtaatatatcgagacgctcgaaatggaatatcgaagctctgagcaaattcaaacgacaataactttttactcggatgtctgactgagtcccgtaatatatcgagacgctcgaaattgaatatcgaagctctgagcaaattcaaacgacaataactgtttactc

SEQ ID NO: 14414 - DNA, 329 bp, Glycine max
tcggaattccatttcgagcaactcgatatattacgagactcaatcagacatccgagtaaaaagttattgtcgtttgaatttgctcagagcttcagtattcgatttcgagaaactcgatatattacaggactaaatcagacatccgagtaaaaaattattgtcgtttgaatttgctcagagcttcggaattccatttcgagaaactcgatatattacaggactaaatcagacatccgagtaaaaaattattgtcgtttgaatttgctcagagcttcagaattccatttcaagcaactcgatatattacgggactcaatcagacatccgag

SEQ ID NO: 14415 - DNA, 333 bp, Glycine max
ttaaaatttgaattaaaacgttcaataactgctggtaatcgattaccatccatgtgtaatcgattacacattgtaaaatttgaattcaaatttctaatagctgttataaatagtttcaaatcattttggccactggtaatcaattacatcctctggtaatcgattaccaaagagtaaatatcttgaacaaaacattttaactcatattctttggccaaacctctcgttgtttcaacttggaattcccttcctaagtctctagagattttcttgatgatgtatcttgaatttcttggattcttgtcttgaattaaaattgagaagcgcatgatc

SEQ ID NO: 14416 - DNA, 380 bp, Glycine max
gcttggccattttgtatttaaggttttaattgagcttggaagttatagcctttgcactataataatggggttacgagttagggctttgttttgtgtaattagtttaattaggtagattaggtggtcctaatcaaggcctgtcacttccttctaagtagttaatctatatattagtggaagttatttagttagttagttagttacttctttttgtaaaaaacagaattagttacttgttgtgcaaactttttcttttctctcaattgttcttcattcttcttcctcttttcacttttgttttacaattttattgaacataatttcgtggattttcctttggtaatgatcatggagggctaaacaattaatcaatccaagta

SEQ ID NO: 14417 - DNA, 320 bp, Glycine max
tttctttgtgggttgatgggttctgtctcgtagaatggcatgatcactggctgacatgttctcaattagctcagttgcttctttcggggtcttcaattttatctttccccctgcagaagcatctaacagttgcttggtttgtggtctcagcccatctataaacatattcaattggattggctcggaaaacccatgagtaggagttcttctcaacaagcctctgaatctctccaatgcttcactcagagattcatcaagaaactgatgaaatgaagagattgcagctttcccttctgcagtcttggactctggaaagtatt

SEQ ID NO: 14418 - DNA, 364 bp, Glycine max
  unsure (1)..(364): unsure at all n locations
agcttctatgtttctggaatattcgattatgaattgtggtaattgattattttgaaacatagagagctcctaagtttccaggcgcaatctaatcaattacaatatgtggtaattgactatctcaagctacaaagactgccttcttttgttgcttgttctaacactttgtaatctattacacaatgttaaacttattgctttttaaaaactttgagatcaatacatatgacttatcatgtttcattaccactaagcatggataaagaaaactaagtctaaaacactcaacatgcctagtctgaaaacatccaatataaatgccacatctttagaanaatttttggcattgcaaaaatattaaaac

SEQ ID NO: 14419 - DNA, 321 bp, Glycine max
tggagagcaccctttttagactgttcttttctcaccattctccttttttcttgtgccttttaatgcatttaatagttatattaaggtaatattagatagatctttagtattttctaaagaatggattgtggcttgaaatctctcaagaacaataataagtattttcttaaccattttagaatcagaaaattcaaagccatgaaatcttacttatttgcaatgttgagaagtttattggcatactcttgaatcttgattgtttgacttcttcattttttgtatctcaaatcctgtaaccagattcaacacttctaggctctt

SEQ ID NO: 14420 - DNA, 380 bp, Glycine max
agcttgcaccatatcagcacccttgtaattatacattccgaacatggatggcacaacctaaggtgaacaagagacatatatggatgaatgaccaatgtatttaatgaaagacgacatagaccgccatgattggataaacttctctccatgcgtacatatgggaaaacaaattatgaagagtaaatgaattgagcttctcctgtcaacctaagttaatttacatactttgactttgagagaatttaaatgacattgctcttatagaagtatagcgcatgagttgactttaactcacaggagatgcttaatacatggtagcttcttagaatcttcttctataagggcatacgaagaaatttatccaaacaatataccttggc

SEQ ID NO: 14421 - DNA, 321 bp, Glycine max
tcatacagcacttacctgtttccaaatgtatatcgcaagcactaaaaaaacacgtagaatgacttgccgtgcaacttgggacattagcacaatgatactcaataactggataagtgcaaacactagtccacctaatctgcatggtatgttagagtcgtccaactaatatgtatggtatgactgtgtctacagcactttgatccgttgatgactgtaatcatgaacaagagaatggttgaaatttgattaaagctgatgataatcaatagatatcaatgatctatcaaataaagaaataatagtgaaactgaccctactcat

SEQ ID NO: 14422 - DNA, 374 bp, Glycine max
  unsure (1)..(374): unsure at all n locations
ttagtggctatcaacgatgaatagaatgtatctntttagttggtttacaagcaaatgagtagacatattattaacctgagctcatgctatccaaatttaccaaaggcatgttttttgcctactgaatttgctgaagatatgtagttgatatatatatatatatatatatatatatatatatatatatataatatttttttatactgacagttaagttttattgacctacacggggcttcaaaaaaccccatattagcttgaagtgggttcaaaccggaactttaactatcttcacctgccattgtcaaggcaactgcttgggtcattcaccatatatgttgggacaccgtgtagcctccgtgtagttttcatag

SEQ ID NO: 14423 - DNA, 316 bp, Glycine max
ttgagtacaatgccttttttcttttttttattctcatcatgttggttgagtctcataagttccatttcatgtccttgaagtttcccaaagagagtgacaagagaaatgttggtgaatcttttgattccacaattgcagttacttttggttgtcatttcctgcttaaacatctcaacactttgttaatgagatcctcattaggaaacatttttcctaatgatgcaagatgattaactatgtgtgtaaatctcttttgcatctcttgtatggtctcattttgatttattctaaaaagtttatattcatgtgtgagagt

SEQ ID NO: 14424 - DNA, 386 bp, Glycine max
agcttcttgaacttcccccttccacaaaggctgctgctgatgtcatattactttcagtcttgccttccatttctggaacctatatttttcacagttcagagtcagatgcaatattttgcaagtgatactcttgagtgcataatatttccagcaaacactgatggaagttcattcagagccattatccaaacacagtctccataaataaacttaaaatccagaatatacctcaaattacttaatgaatcaggggatagttgacaaggaaatgatgcaatgacattactagcctaattctgctttgaaaaaatcccaactagttcaagctaagtgcacaacccctccctctgaattgttgcaaccacaaccctcacatgatatacaag

SEQ ID NO: 14425 - DNA, 322 bp, Glycine max
ttctaatgaatttacaatgttccaattgttttcaaaatattgtaattgattacaatgatttggtaattgattaccagtgtgtttgaacgttgtaattcaaattaaattgtgaagagtcacatcatttcacaaaaaagctttgtgtaatcgattacactgatttggtaatcaattaccagtgatagtttctgaacaaaatcaaaagatgtaactcttccaatagttttcaagtttttctaaaagttataacttttccaatggttttcagattttctaatagttataacttttccaatagttttcagattttctaaaggttata

SEQ ID NO: 14426 - DNA, 379 bp, Glycine max
  unsure (1)..(379): unsure at all n locations
agcttgctctaaatatacattgatgtttgtatttattggaggaggttgtatgccatttttgttttaagagtagcattccttggtaaaactaactttccaaatgtttgccttcgcaggaaatggccccgaagaagcttgcctcanagaggtccaggaaggataaggcggccgaagggactagttccgctcctgagtatgacagtcaccgctttaggagcgttgtacatcagcagcgcttcgaggccatcaagggatggtcgtttctccgggaacgacgtgtccagctcagagacgacgagtatacggatttccaggaggagatagggcatcggcggtggacatcactggttactcccatggccaagttcgatccaaaaat

SEQ ID NO: 14427 - DNA, 307 bp, Glycine max
tccttaagaagattcctaaagaagctagagcttagctacacatacctctctaatagctaagctcacctccttgagatgagaagctagagcttagctacacaccccttataatagctaagctcacccccatgacaaaaaacatgaaaatacaaaaaaaaagtccttactacaaagactactcaaaatgccccgaaatacaaggctaaaaccttatactactagaatggccaaaatacaaggcctaaacgaaggaaaaaacctattctaatatttacaaagataagcgggctcatacttagcccatggg

SEQ ID NO: 14428 - DNA, 379 bp, Glycine max
  unsure (1)..(379): unsure at all n locations
gcatgcaagctnttggattaccttcacgaaatnntttgtttctttataaacgcatggcacatcgacttcatacatttgtaaaaccacatatggcagcatcttggtcaaatctgtctacaagtgctgggcttgaccttgagaacanatttgttgtccctccatttccttaatatttactagcttgccatggcgaaagtcatacatcagcgacataaagttaagttggatcacgcgtatgacttaatccaataacaggtctagtacaaatctgagactatgaagtgtatgcattactggacatgaatatgatttttttttgggtctagaataagagactttgagtgtcccccacctattggatcaaagaataatcttgctc

SEQ ID NO: 14429 - DNA, 315 bp, Glycine max
atagaccactttagcttcgctactctgatatcttggatatatggtttgaacccataaagtacaagttctcaatccatgaaattaacagtgttgtcgctatacggttcaaaactggccacgataatatgcgaccaaaacatatggtacgtatttatagcatacaaataaaatttataacacatgtaattctatgatatctcactctcaaaaaccggaaataaaaggaatttgaatctgtgtgtttttgctttgtcttctcaatattaaaaggaaggatatatagcaagggacaaaagtcctatttcacctctcaaa

SEQ ID NO: 14430 - DNA, 383 bp, Glycine max
gctctaagcatggttattagaatcttatgattcataatttgaattctaggatttagtcatctatcgatctgtatcacaagatgaatttcaaatgctgtatattacaatacatgaatgaatctgtgcgattttgtgttaagctgtatggttgaaggatccatttctttgttgtttgtttgggccgtatgggtataattttcttatgaagggtttcatgggctattgtctgttgctggttgttggatcccatggttaatccttatttttatcattctttaggatttaaatagctgttaacctttggtgaacacatctttgtatgtatggattcggtactcctgttccaatcataatatatcttttatttggctgataaaaaaatc

SEQ ID NO: 14431 - DNA, 304 bp, Glycine max
tcaactagatgccttggttaatttggtaaccctactggccatgaataaaaaatttgcacttgtcgccagactctgtggtttatgctcctctgccgaccaccacacagacctttgcccttctgtgcaacattctgaagcaattgaacagcctgcagctaatgctgcaaacatctacaacagaccttctcaacctcaacaacaaaatctgccacaacagaataactatgacctttccagctacaggggcaattccggatggaggaatcatcccaaccttagatggtcaaatccgtcacaacaacaa

SEQ ID NO: 14432 - DNA, 409 bp, Glycine max
  unsure (1)..(409): unsure at all n locations
agcttatgcgcatatttccctacgaacgttcacttgcacaagatattctattaactaagaaaaatgcacccatatacaatcaaggtagcttcattacctaaattatttacatgtacttccaaggtgtatttgttatttacatcacacacgcctccttggctaaatttacatacatgcatactcaaagcatttcggggtaccaaaaattgcacatgcgctcatcttggtatttctaatacctatacatatacaaacttcacgatgaatcttgactacctacacaataaggtgctacatttcatgcctttnttttttcaagtttttgctacctaaagccgcatgcaaattcaagcatattttcctttgctgactaaaaatgtattcaaattaaaaggtatatattttttgt

SEQ ID NO: 14433 - DNA, 327 bp, Glycine max
agcttcacatcaatgcgtaaccaccatggattgtaagcttaatgatttttttttaaaatatatagtaggaattcttgaccagatcgaaccccggggacagcaattgcttcaaggacaaagataaggaagaagttgctggacaacaggatcaacaaatgacttttttttttgtaatataaacacttgagaccctcttgatgaatgaaggggacagcgatattaaatagcagaccacacaacagatgaatagaagaacaagagaaaatggagctgcacaacaaagggttaagagagacaaatgaggagggaataatctcttgcaacatg

SEQ ID NO: 14434 - DNA, 388 bp, Glycine max
  unsure (1)..(388): unsure at all n locations
accatgagcacgtgtacttgcaagctnttcttccacaacacctatagtgaccacaacatctggaattgctgagtcattttctgattaacttgctcagggatccgttttgtaagagcctcaaatatctcatgctgatagttattgagatggagccatgatgggtaggtggtccaaaatatttcctaatacccatacttccaccaacaccacgaacacgaccagggtactctagtttcccaatggtagtagtcaagatatcttaacacccaaaggaaacaaaggatctttgtgtgctctattcaacaagggaatcttacaaaaaataattcattagcatacaatccttaagtgacttgttaattaaatgtagagttgaatattaacttac

SEQ ID NO: 14435 - DNA, 334 bp, Glycine max
caagcttggttgcattccatctttgagggatgactatgctagctaaagtagtctattggagtacacatttgtattagtcttgtaggttatcttgtatggttcctcctagtttgctaggagtttgttgcctcaagtgtttatctttgacatatactcatcttaatggttaacacaatacttgaaattcataaggtctgacacaatggttatatttaagggacacccttttctaggtagcaacttctttaatttgaggaatctttccttttcttttctatcatatccatttcttcccctaacaattagttattagaacttgatggaaatggtactg

SEQ ID NO: 14436 - DNA, 374 bp, Glycine max
agcttgtaggtggaaaggtatgaaactgttctcttttctgggattttcccatccatatatatatatgacacatcaaatgaggataaaaaaactcaattaaattaatgattgtggtatttctcccaatagtttgttgtgagacaaatctaaaatctccatcattaccatgcttgatagctgctaaggaattgttgaggtaagcatgcccatccctacttctatcagtctaacatgttgaaatgtcggagcttcgtgcatcaagcaatcctctggttatattttataaaagaatcagttctattacagaaaagtgaaattgcaaggaattttctttcttgttttatgccaagtctggttgtagtacaatttaaaca

SEQ ID NO: 14437 - DNA, 339 bp, Glycine max
  unsure (1)..(339): unsure at all n locations
agctcttacggacttgaagagattctgagtttgtccatcacatttttgatggagngctgtgtatactaacaatttaacaccatgtgaccgcattatacctgtcccaaaagagattaagatgctgtatctctgtctaaaatgatttgctctggccatacatgcaatctcacaactgtgttcatgaataattttgcaacttttgctgcactgaatggatgtcctaaagctatgaaatgggcctatttagtacatatatctaccactactaatatgacactgatacgatgagacgacggcaaacctgtgatgaaatccatagagattgactctcatgctcta

SEQ ID NO: 14438 - DNA, 341 bp, Glycine max
tagaatcctcaagcttctagaatatcaaattttccctacaatattaaggacactgtactagtttatgaatgacattgtttgtaagtaaaatttaacaaaatgaaatacaaatggttaattaagtgaacataccaaaatgtcatcccatattaggtcctttagagattcggggacaactttccaaatagaatgaacaattggactcttttcttgagcgaccacccttccaaatagctgtggaacttttctttatatgggccagattctctcccaatggtagaattgacattaactgtaggccttggctgatccaaggtcctaacagtcaagcttctcagctg

SEQ ID NO: 14439 - DNA, 326 bp, Glycine max
  unsure (1)..(326): unsure at all n locations
agctatgctgatttagtttttgtcggcgtagttatcgaagtgggcttgagaagaggcaaattttatcatcttgctttgataaataagaagcatggggaaaatagagagaataataaggagggaggaacccatgctatgactattattcctacatggccaaattttccaccagctcaatactcagccaatatcagtctttctcattacccaccaccctatcagccaagaacacccaatcatccaccaaggccacccctaaatcagccataaagcccacttgtcacacaaccgataccaaacaccacctttaacacanaccaaacacc

SEQ ID NO: 14440 - DNA, 320 bp, Glycine max
ttaaagacatggattacatacctacgcgctaacagtcaatttcttttgttaaaagctctctgtatattcttgtaaagtttgaaaaagctctcaaaataatttgatcatctcaagagaaaatactaagtgctaagattccatatttgtctgtaagaccattaagagttagtcagtgtgcaaacaaactacaaatattttgatttgtttagtgccaacaatgattagataggacaaagatgccgagttattgaaagctttgtgataagctttgttgtaagagctagaagtagcattgacaaatacttgtaactttgtgaagt

SEQ ID NO: 14441 - DNA, 299 bp, Glycine max
  unsure (1)..(299): unsure at all n locations
nagctttgatgattatgagatgtggcatttatggataccaaccacgttatagtagcccctgaggttgatcctttcaactggacctgcgcctcctaaccatgcaaaacacattctataagattaatgcctcaattatgggaattaatgttgattccattactttatgcaagaaaaacgttgatttcataagtattacaaatactgtgacatgctgcctacttttccataaatgatgcaaataatgttgcggaaagataacattttctttaaattactcacataatgatgaatggtgacca

SEQ ID NO: 14442 - DNA, 314 bp, Glycine max
tcaagcttgattagaactaacctatctagccgcgcttggcccgtgtattggccgatttatacaaaaaacacttaaaaaagagaaagttgttgacaaaagaaatgaaaaaaaaaatagcgtaagactttatatatcatacttgattatcaataatctttctgatcaagtgttaaatactacaatccgcgtttgctcatgctcattttatagtgagaattcttactcatacttaatactcctaatgattctggataattttctattcagaatagtttcctgagtttgacacataaaggatgtcttttgcctggaac

SEQ ID NO: 14443 - DNA, 347 bp, Glycine max
agcttgcctcttataggtccaggaaggttatgcggccgaaggaactatttccgctctggagtacgacagtcaccgcttcatgagcgttgtacaccagcagcgcttcgaagccatcaagggatggtcgtttctccgggagcgacgcgtccagctcatggacgacgagtatactgatttccaggaggaaataaggcgccggcggtgggcaccactggttactcccatggccaagtttgatccagaaatagtccttgagttttacgccaatgcttggccaacagaggagggcgtgcgtgacatgagatcctgggttatgggtcagtggatcccgctcgatgccgatgcta

SEQ ID NO: 14444 - DNA, 322 bp, Glycine max
tggaattgcatttgggcacctattttgaatctcctatgttgcacctacatataagaaacagtcccactctcccaattttacaaaatcatattcatacatcattggggcatttcactgagcacttggtgagcgcatgtttggacataaattgcaagaggatggggacaatgtggcatgccccattgcttcagaatacagcataggcctaaggccttctcattcaaatcctcaattcaagaaaacaagcataaaaacaaaccaaaactgccccacaaatataagcacattctctcaatttggagcaccaaaagatgaagaaaat

SEQ ID NO: 14445 - DNA, 357 bp, Glycine max
agcttcaggctttctactttctcaagattatactctagaggtatgattggcctattctgagccaactctcgcaggctgtgcatgctaattagttgtcctctgaataggctctgtagcatagggactaaggtttgcgggtgttggacatttggttctatggctgctgacagaggagttgggatgcatgatgaagggatgtctttggttctagccctctttcttgatgccatctacaaataaaggaaccaaacagtttaacaggacacaatttgttcaaattcaaaaactgaaaaaggtactggcggcttaacgggacatggttcgcttaactggccttcacaaaaacaaactaccact

SEQ ID NO: 14446 - DNA, 323 bp, Glycine max
cttacttttgaactctctagaaaccaataatttagtaattccattctccaatttagaattgctatggttctgtggtgtatttggaaaaggcaaaatgtaaaactaaggaattaggtagacactactccaaacatctcaatctctatctttatgcaattcctcctcaaatggagccatgctcaaaacttctcttaactaccaagagaattttaaatagcttatgcacactcgcgatggacaaaatcacaaaggaagtacttgaacatctcaatctctatcattttgcattggtctctgtctacgcattgaggaaggaacatttt

SEQ ID NO: 14447 - DNA, 390 bp, Glycine max
agcttaaataggtgggttggtccatgcttactcgcttagcgcaaatattaattgcttagcacgcataagtggattttggcttaacgcacttctctcgcttagcggatgagctgaagtggtgctcctgatgacctggagcgatgcgctcagtgaacctgatagctcatcttcttttggcttcttcctcgcgcttagccactgagtgtcacgcttagtgaatgctcgctaagccagcagattggcttagcgagaaggtgaaaacaacacttttgccaatttgcctaattaacctgaaattgagagaaattgattattaaacacacaaaacaaaagtataaattatctattacctatatttaatagaaagtacttataatattacaaaacaac

SEQ ID NO: 14448 - DNA, 324 bp, Glycine max
ctcaagcttgctaaatggaagcagcgatgtctttctatggggggcaggataaccctcttcaattctgtcccaacagccctccctatctaccttctctcttttttcagaattcctaaaaaagtgatacataaggtagtttctattcagaggaactttttgtgggggggtggttctgaaacagctaagataccatgggtgatctgggatattgtttgtcttcccaagactaaaggagggttggggatcaaagatttgtctaagtttaatgaggccttgattggtaaatggggatgggatctggctaataaccagaatcagctttgg

SEQ ID NO: 14449 - DNA, 391 bp, Glycine max
tttgttgcaagcttgcttctacaatctccccctttttgttgatgacaactctgaaatcaagaaacacatacacacactttttcctagtcgatcactcacttaattttccattctccccctttgtttttgagtttatgcttcacttgaaattaagttaattacttatgtgagttcttgatttaatccctatttctctccccctttggcatcaacaaaaaagccaaagtgcgtaacaagtagaaatcatacatacactactaataattcacaagtcattcattgaagaataaaatatataaaaaccacatagtcatataacataattcataattgttcaaacataccgtgcaaataaaagaaatactaaattgttcaaatgtcataataatat

SEQ ID NO: 14450 - DNA, 296 bp, Glycine max
tgatgatcggagtgagaaacatgtgtttattggctatgatgcaagttcaaaaggctacaaattgttcaatccaaacaatggaaggacaattgtgagccgaaatgtcgagttctatgaaaaaggcacatggaattgggaggagaaagaagacacttatgattttttcccgtactttgaagaaatagatgaagaagccttgactccaaatgattcaactccaacactttcaccaactccttcaaccaatgaagcctcatcatctttcgaaaggagttcaagtgaaaggccaagaagaa

SEQ ID NO: 14451 - DNA, 241 bp, Glycine max
  unsure (1)..(241): unsure at all n locations
agcttgactcaacactctgagcataaaagtgtgttttcttttttagaatgtatataggtgtatggcaattaaaatatattagatgttcttgtatgttgacatgggtaatatgatactttctacacatgcgcgtgtgcataaatggattacatgagnttggtctaaatcagaggggctagcacgacatttttgcgttaatataagcattatcttgtaaaactaacttctaaatgtttgttct

SEQ ID NO: 14452 - DNA, 304 bp, Glycine max
ttgtcatcgcgggttggatgtgcgaggtgtttggtcaccatgatacatgaagaaacccccaggagcaatcaaattgggtgtgatcgtgccctccgaagttcgaattggggaactagcgaattgtcaaacaacccagaatttccgtggcaaacacaatgtaattcgttagtcctaaccttatcgctaggcctaggctttaggatttttcctccctgtttgggcttgtcttttgttaccataaatatatgaatatacaatccttcttcatttgttcttgccctttcatccattctcattctgctgc

SEQ ID NO: 14453 - DNA, 169 bp, Glycine max
actgggaaatctttaaacaaccaagacaatgagatatctgaaatatgtttaagagagatactttccctagggtatgctataaaactaaactgctcttcataaaacaggcactaaatattgcacaatgatgaagaagggactaaactttagtttgtcttctaaaagtatc

SEQ ID NO: 14454 - DNA, 369 bp, Glycine max
  unsure (1)..(369): unsure at all n locations
agcttgtgtgtntagcaagatataccttatgtcanngtaccatcttattcgagtgaagtctgacgatattccgaagactacttttaggacccgttatggtcactacgagtatctagtcatgccctttggtgtgactaatgctccaggtgtgtttatggactacatgaataaagtctttcacccttactttgatagttttgtggtagtattcatagatgatattttggtatattcaaagactagagaggaacatgaagagcacttgaggattatgctgcttacccttaggaatcgacaactttatgctaagttgtccaagtgtgagtttttggttagagaaagttagtttcctagggcatgtgatatctc

SEQ ID NO: 14455 - DNA, 336 bp, Glycine max
tagaactctcaagcttcgaagggaagagagagatcgatcacgagcacatagcatggtcttaaaagaagagttagcagcttgcttaaggtccaaaaggaacttgactcagcgtttgtgcgagacagagatcaacatgttggctatcatcaccaagtatcaataagaactaagtctagccacagcccacgagcatagggtggcaaacgagtatgcccaagtgtacgcggaaaaggaggctagaggaagggtgatcgactcgttacaccaagaggcaaccatgtggatggaccaatttgctcttaccttaaacgggagtcaagaacttccccgattgct

SEQ ID NO: 14456 - DNA, 345 bp, Glycine max
agcttcaggttgctcattaactccagattgctgcaaagaaggacttatatctaaatggtgatctgtagaagaacatataccacagtctcttgcaacaggtgtagatttctgattcatggcaagctgggttactaggttgagcaaggcatcaagtttttcttcaagctttttattttcagtagatgaagatgaatccgtggccacctcatggactcctctaagaacaataacatcatttcttgcactgaattgttgggagttggaagccatcttctcaattaaattcctatcttcagcaggggtcatatcaccaagagctccaccactggcagcatcaatcatact

SEQ ID NO: 14457 - DNA, 329 bp, Glycine max
tcaagcttttagaaaatgtcgatgccgagtgtatactatttttcttccatgtttcagttgtacgtatcctgtgtccactcaaattcccgtatgctggaaagtcatttatggtacaaaatagcattgcgcgcaacttgaatgtttcatttcgatacccatcaaacatgaaaacccccttgttcaacaacttgctcaagtcttcaatcaagggactgagataagcatcgatgtcatttcctgggtgtcttgggcttgatatcatcatagacaacattatgtattttcgcttcatgcacaatcaaggatgcaagttgtaaattactaacaaa

SEQ ID NO: 14458 - DNA, 360 bp, Glycine max
  unsure (1)..(360): unsure at all n locations
agcttgcaccagaacagcagccttgtagtataacattccgaacatgtctggcacaagctagggtgaacaagagacatatataaatgaatgaccaatgtatttaaggaaagttgaatagtaaggccatgattggataaacttctctccatgcgtacatatgggagaagaaattatgaagataaaatgaattgagtttctcctgtaagcctaagttaatttacatactttgacttttagagaatttaaatgagattgcttttatagaagtaaagtgcatgagttgattntaactcataggagatgcttaatttattttatcttcttattttcttcttctataagtgcttatgaagaaattta

SEQ ID NO: 14459 - DNA, 329 bp, Glycine max
tcatacagttcttacctgataccaaatggaaattgcaagcactaaaaaaacaagtagaatgacttgccatgcaacttgggacattagcacaatgatactcaataactggataagtgcaaacactagtccagctaatctgtatggtatgtttgtgtcgtccaactaatctgtatggtatgtctgtgtctacagtactttgatccgttgatgactgtaatcatgaacaagagaatggttgaaatttgattaaagctgataataatcaaaagatagcaataatctatcaaataaagaaataatagtgaaactgaccctactcataattcggc

SEQ ID NO: 14460 - DNA, 332 bp, Glycine max
tgtggcaaagttgaacaattaaactaaataaaattgtattttgattacattagtatttcatagtatataatgcatctatatgtataaaagagaaggtgcaacaatgttgctcaccaatgtccctttaacctgagttgaaacatggcctttctcactgtctgagacaagcttagacaaaccaaaatctgcaacctttgctgtcaaattttcatccagcaagatattagtggacttcacgtctctgtggattatgggagggttggcaagctcatgtaagtatgcaagtcctctggatgaaccaagagcaacacggagtctcctcttccagtcaa

SEQ ID NO: 14461 - DNA, 392 bp, Glycine max
  unsure (1)..(392): unsure at all n locations
ctgcagcttgagatttatgtaacccttggttcatcaaaacattcagcttgatcctttgtctacaaggacatggngttgaatcaatttagatttttaacattgtccattacatctttgtcaaggtgaaactggaagtaataaggacatcaacagtcctaaatgtgtttggcagtagacgaagcagcgatgtaactcgatccatcttttgccccaattttttgcaagatggttacttccatacttcaacttgacttgatgaaccttttcgtaaatgcatgagtttgatttaaccccgtaatccaaggaatgcaattctaattgccaatacttcgacaacatttcatagagatgaaagactcgggaatacacatgctatgcatggaaaatgtaat

SEQ ID NO: 14462 - DNA, 318 bp, Glycine max
ttcacttaaagttcgtataccacgtctttttccggtttttccgacgttttcctcaaataaacgttggtggcgactccgcgcgtattcctttcttggaacacgcactcgcgagtcacgcgtcgccctcccgccgaagggtaggttgcgacaaccgtgacccaagagtccggtggcatacggagccacacgaccgtgggatccccaaattcgtatgttccatcatttatcatttgtatgttatcttatttttatgacttgagggactaacgtttgttttgctttttcgatcgccttttgttttgtgcatacatattgttt

SEQ ID NO: 14463 - DNA, 387 bp, Glycine max
agctttcatatattataaataaaaataatttatattgtgaagatattatgtttaaacaataaagtgttgaaacggtatatatattaaaaaaatgtcagcatgatgacaagatatactgaaaaaccagtatgaattaacaaaatattatcaaaatctacttgaaattggtaaaagccagttttgtgcacctatggaataaaaaaatccatgtttttcagttatcaccaagcggttgaatgatcccctcaagaacttgcaacttcttagatatctcacgagacgttcctcattttaattctactctttacgccacacctaagagtaatcagcatagccaccactgtagtcaaaattaaccagcatgtaatgctaaatcaaagcaccaca

SEQ ID NO: 14464 - DNA, 323 bp, Glycine max
tcactaccctaacataccccaacatcattaacatccaaccaaaaacctgtataccactaaaagcaaaaaaccccactatacaatcaactccctcccaaattctcgttgggttggagtccctccaaaagcaagacaagaaccacccaaacattgccccaaacaatcaaggaacatgctcatcccaactatctcaaggacatcaaatagaccctcaggtctgacaaccaatcataggaggataaagaagcagaatccgctttggccttaatccatgtccatgatttaaacatatagagatgatccactacctcctatacgtttgg

SEQ ID NO: 14465 - DNA, 362 bp, Glycine max
  unsure (1)..(362): unsure at all n locations
agcttctcaaggaagttacctagtctattaatagaagcatgtgtaacacttgttgtaactttgatgaatgagagtcttgtgagacatacttcaaagttccacttctatacctcctttattccttcaatttcgtgctcccccctctctctttctctccctctttcttttcctccattgaagcatcctctccaagcttcttatcccaggctcatcttggtggtgaagctccttcttccatggcttattccttaatggatggcgcctcctctcacctattttcctttgtcttccgctgcatctccatggtggaaaatcaccattaaaggaccccattgaagctcanagatccagcctccatagaa

SEQ ID NO: 14466 - DNA, 320 bp, Glycine max
tgagatgaggaagtgttgttgggtgaattttcctgcttttattgttgaccacagagtggtacctggagatatgtcgcgggggtcaggagaccttggggacgtcaggtggggtgctattgcccaaaaccaagcttgaccaatcccgacccaacccgggcatagtcggtcagtgagaacctgtgatgtacctaaacaggcgagctcctggcagtcaacagataaaaggaacaaagaccacaaagcaaggaggcttgtggtggctggccagttgtgaattttgtgtgatatgtaaagtaatggcctctggtaatcgattacca

SEQ ID NO: 14467 - DNA, 371 bp, Glycine max
  unsure (1)..(371): unsure at all n locations
agctttgctactttcagatttgttgcatttaaattcgctaaaaaaatgatacaaaatatgattaattaatattataaacttgaaaaaaaaatatgaagaaaagacgaattaaataacaatgtacctaaaagtaataactaaagaagttccaacactaatagttccaacacttacaattccaatattttgaatcccaatattagcagtatttcaaatcaaaccaaagaactctacaatttttttttattgattttgattggtttagtttgattttgatcagatctataaatctaaacccgtgacccaacccgtatatgaacaagtttaatcggttcgattcaaatttgatcanatacataatgactcaaccc

SEQ ID NO: 14468 - DNA, 321 bp, Glycine max
ttattaaaggattccaaagagctaaatgaacttcatgatcacgtgaaaattgaaaggtatgatatttggaaataatgtgcacatgcacacaaagattatgaaaatctagaaaatagtaaacatgatctttgggggtaatgtgagaataaaaaatagtctataaagtttttaaataaaaaacttttgaagaatggagctttagaaggtcaaccttaggatgttgtaaaacttcatgaagaaattgaatctttaaagacaacattagccaaattttttggaggaacagaagctctcaacaaaattttgatgtattgtagatgt

SEQ ID NO: 14469 - DNA, 408 bp, Glycine max
  unsure (1)..(408): unsure at all n locations
agctntaacctttaaacaaactaactaatatataatttcaaattgtaatgataaaaatctaatacaacaacaattaaactaatataggttatattgttactcatttaaatatgaaaatatattagatataaaatgtttttcaaactaaataaataaaagagtggatgcatgtgtaggttaatagcctataactaaaacctttataacataacatttgtttttctcgagaaaacatctcacttgttttaaggtgttgctacgtgtaccaatcatattacttgtgcacccagcaaaaaaaatttaatttcgaaaatgctcttatagcttttttcttccctttaagtttctttttttacaataacacagtcattctttcattntctcggtccatttcttttggtttattca

SEQ ID NO: 14470 - DNA, 345 bp, Glycine max
ctatactacactcaagcttgtctactgccaagtctaacaaaataaataataaaaaaaaataacaaagttaacaaaaacagcttccaccaaaattttacaaggcaaaatctaaagaacttctttgatggcatatgaaaattgaattttctaaaagtgattcttccaaaagaagtttcacagaaagaatctcataaaagcagacattttagagcaaattcaaatgcaaactaagagacgaagagtaaatttgcttaagcttctagttcttaaaagggttccaagtgttggtgcgactttttcccatattatcactggcttaacaaataatctatcctaggctaacag

SEQ ID NO: 14471 - DNA, 380 bp, Glycine max
  unsure (1)..(380): unsure at all n locations
agcttgaacataaccttttgttggggctttccacctgacttgctttggaggcctaactatcgtgctactattgaggcctgggaaattcctggagaagattatgaatttgatgaagaatagtccatgtgtttgtaattacattctggatgacctccttgtttctggttttccaaattatccaacaagcaaccataaacagaagacaatggtccgacgatgcatgagtttgaagccaatccaagatagagatgtcaccattgtgatggcaaacatctagctgtaaagagctccaccttcccgccaccttagagcagtgttagtcaatgaatacgactaactnttgtgtataaaacctgtgtatactgtatcaaactttccta

SEQ ID NO: 14472 - DNA, 302 bp, Glycine max
tgtctatattcagaaataatattgtccctaacactagcaatgctaatacgtccatgaatgatacccactctccttggcttgctagagtttccgccttctcctccaagcacttcctcagtattcctgctacttcattcctactttgtttcactcgatctaattctcattatgagatcttgaccactcctgctattctcaccatagaaggatagtacccagaaaagaggtatggcttccttcctcctatcgagcatcctaagatcccatcaaactcctctatggttagtgctaacggaaagtcc

SEQ ID NO: 14473 - DNA, 306 bp, Glycine max
  unsure (1)..(306): unsure at all n locations
agcttgcattatggaagcaaagatgtctttctatatgtggcagaataaccctcattaactctgttttaacagctttacccatttacttgttgtcttttttcataatccctaaaaaaatggtgcataagatagtctctattcaaagaaactttctttacaaaaacctggactaatatcaagcatcttataacttctaaggagttatttactttcaaaaaagcanaattaattaacagataccaaccttcaactatacagattattgaggttcttattcagatagcanagaatgaggaaattgatcta

SEQ ID NO: 14474 - DNA, 301 bp, Glycine max
tgtatcatgcaacgtaatgcatgtagggttaccagttagttacaacggcttaggactgttattctgttctcccagttagttacaggccataacggtgcaataccattgtataaaaggagatcatattcatgaataaagcagagaaaaccattttccaataatagtttagcgtaggtacttttctctttcctctcgctcatatcactttggtccgacctgctattacggcggagcacggtacccgccgtaccaccactgatcgactcgaagaagccatctccgccctcgccgagaagcactc

SEQ ID NO: 14475 - DNA, 387 bp, Glycine max
  unsure (1)..(387): unsure at all n locations
gcttcttgacgcaacgaagatgacacgtttttgctcttgaagaagacctttggatcgaagtttctccaatctctgtgaacatacttcttcacgtggttcatgcacctcatcttcttctgcttccgatggccctttccttatgtactcttcttgctcctttttcccgtgcantttttccactactcatgcaatgaaagacaagaccaataacgcaacacaacacaacacaacacaatgttttttctctcacactattgcttaatcaattaccttttgttgtacccgttaaaatattgcttctcacacactaatatagtactattactatgttgttctaatgcgaattttctttggtgattttacggttatgcatggcagttattacct

SEQ ID NO: 14476 - DNA, 254 bp, Glycine max
tgttcttgactctgtcatcttgaaggtgtacagtagttgcttcaagcatagccgattttgcaagggactttgccatatacaatgactccagattcagccacattgaggctgatgtcctttctcttgcaacttctcttaaagctttgtctccaaggcaaagaatgattgcacttctagctttagcaataatacttgatttctcctttgagcttagagatttaaacatctttgtttttctttaataacttatgcac

SEQ ID NO: 14477 - DNA, 404 bp, Glycine max
  unsure (1)..(404): unsure at all n locations
agcttgtacccaccagtactatgatagcctagcataatcatttgtttcacccttttgtccagttttcttcttaattgatttggaacatgcttgaagcacaagcatccaaacacccttaggtgcttgagacaaggcttacttccactccaagtttcttcaggtgtcacattctctagcctctttgttgaacatctgttgagcagataagctgctgttgacactgcctcaccccaaaactcctttggcaagtgaaaattccttagcatacacctggtcatgttgactatggttctattgagtatctcanatacaccattgtggtgtggtgcatatggaggtgtgatcttatgaatattaccctcatcctcatagaaattctttgattcatgtgatgtgtattcact

SEQ ID NO: 14478 - DNA, 333 bp, Glycine max
agcttctttgtgacgaaattgaagatattttgtttatctttctatggactactcacacgcttcatttggagttatgtagtgtcctataaaccttgcataaggcagatatatcaagtaaacacaaaaatccaaaaataagccacaattatcaattgagctcaatcacttgcctacgatcaaaactgagtttaaggtgggacaataggagtcaaagagatttaaaataagctaagaagaatataaaaatactaaactacaaatgctcaatcacatatataattatagagaaagataattaatttcaatgtaagaagaaaccttctactttgtcac

SEQ ID NO: 14479 - DNA, 350 bp, Glycine max
  unsure (1)..(350): unsure at all n locations
tcatgcgtntacacatcaagaaagacacactcatccaagatatatatatggtccaaaaggttcttgcaacactaatccacgcatcaaggaagaaataagctaactaacaacatacacataggatgataaaggttcattaacacattatcaatcaatatcaagactacttgcatcacccaatggcttgccataatgcccaaccgcacttcgcaaattatagagatggccagtctcataacttatgactcaacagtggatttatggtatagcagacattaaggatgcaaggcacatacaagcattattattaagtctcatttaatcatgtaggagaaaatacaaataataat

SEQ ID NO: 14480 - DNA, 328 bp, Glycine max
tatcgaaggagtcataaataaactattttcataagctccttagaagctattatcattaactgtgaagcattcaagcttaagcaataatacaattggagaattctcatgttccataaaacagagtttgatttcaatcaccgtacgtatctatctatcatagaatcaacaattctaatcataacatgaaagcaagtacccgcaactgctccaacagcgccaaaagcaccagattttccgtctataacactggcatcgcactccacgccaccgtcttcggtcagattggagcctctgccggcgtttgtgcagggatcgtcctccagcactt

SEQ ID NO: 14481 - DNA, 233 bp, Glycine max
  unsure (1)..(233): unsure at all n locations
ctacatctgaaataatatctgtaaaatgagaaaaaatatagagggataatagactgaaactgtgtatcagagtacacagcggatgctctattatatagtggtcattacaataaatactgattatgagaggatattcagtttcctctaaatcagatatgtttcctataaatcaaaactatacattaaatatnttttattctcaacactccacctcaagctgaagcttactatgc

SEQ ID NO: 14482 - DNA, 122 bp, Glycine max
agctttcacaccatatagagcatatgatgccatttgcagacattttgaaatcaacgcccactatgaggaagatggagtgaggcgagcaaattttttctactaattgtatctttttcttggct

SEQ ID NO: 14483 - DNA, 402 bp, Glycine max
  unsure (1)..(402): unsure at all n locations
gacttaccttgttttaattccttngatatcctnnttgagccttgtttccctttccttggtttgaagttcactacaagccttatatgaaaaaccatgatatcaccatattcttaaggaattttggagctttggaattgttttgggaataagtgtggggggttttgtttcattggacaacttgctatgacggttatgcttcatgatgtatattgggccatacttgatgtacattgtgtattggttaaatgttggacatgctgaatgaaatgttgtttctcaaaggctatatagtaaaaataaaaaaaatcggaaaaaaaattcaaaaaaaagaaaaagaagagctattaagttgagtgaataagatcttaattggcacaagaatgatgaaactcttggttctac

SEQ ID NO: 14484 - DNA, 340 bp, Glycine max
ctcaagcttctcccctatttggctatagatagggggataagtgaagttgaaaagggttcagcctcttatacacttctatctctttcgaatttgcttaggaaaattgtttccgtgaagaaaatccaagccgaggcgcttctgtaacgtttccgtgagtaattatgcgaagattcttgaccgttcttcaagattcatcgatcgttcttcgttttcttcagtcttcaacaggtaagtacctcaaaccaagcttttcaattcattatatgtacccgtggtggtccacattgtgtttcatgtattatcattcccggcttcatttactttttatacccccgttttg

SEQ ID NO: 14485 - DNA, 379 bp, Glycine max
  unsure (1)..(379): unsure at all n locations
agcttcctcggtgctattcctgcgaaggcttaacattggaaagttagttttaccaagaaatgctacccttaaaacaaaaaatggcatacaacctcctccaataaatacaaacatcaatgtaaatttagagcaagcttatgcgcatatttccttacgaacattcactcacacaagatattcttctaactaagaaaaatgcacccatgcacaatcaaggcactttcgttacctacattatttgtatgtacttccaaggtgtactacctacaccacatgcatttccttggctaaatntacatacatgcatgctcaaagcctcttggctaccaaaagttgcacacatgtaaactntatgatgaatctttgctatctacacaat

SEQ ID NO: 14486 - DNA, 318 bp, Glycine max
tgaccaatcccgacccattccgggcattttcggtcagtgagaacctgggatgtacctaaacaggcgagttcctggcagtcaacagataaaaggaacaaagaccacaaagcaaggaggcttgtggtggctggccagctgtgaattttgtgtgatatatgggttgtggcctctggtaatcgattaccaagggtgggtaatcgattacaaggcttaaaaatgaagacaggaggctaagatggtctctggtaatcgattaccacggggtgtaatcgattaccaggcttgaaaatgaggtcaggaagccatgagggcttctgg

SEQ ID NO: 14487 - DNA, 389 bp, Glycine max
agcttaatgattgtaatatttaagatgttgtatttttcattctaagatatttagttgatttaacatttactcttaatacgacttatacagtgactaggttccaattttcatttttaaaatgaaaatattaataacttataaaaataacaagtgcttggtggaccaatagtgtttacgaagtataagttacttgtcatgtctaggtaattgtcctattttaagttttagttaagttttaattagttaactgctagacagtttttgttgaaatttacactattaaaaagttttctctaatgttagcattaggcacaaaacttatttgtacgtgtaagcactaaaatttgagacacgtaaagaaaataatcgagaggatcttttctcctgaa

SEQ ID NO: 14488 - DNA, 314 bp, Glycine max
ttttttttaccaacgagtttaaattaaattttatcgaatctaaatatttattagaagttaaaaagatattttatcgtaaattcaatttataagctaaatagtaagactttattttccacacatcccttagaagttaatgtcaattttcaattcgctcgcagaactgtcaagttggactaagttttcctctttgttgtaaagctagcatgaacattattaatgctaacgcggttttattgttcggttttttcctctttgttttttccattgcccggttttttctagcgaagacaatagatattaatgctaacgcg

SEQ ID NO: 14489 - DNA, 341 bp, Glycine max
  unsure (1)..(341): unsure at all n locations
ncaagcttgagcaattttaaacgacaataattttntactcggatgtctgattgagtcccgtaatatatcgagacgctcgaaatggaataccgaagctctgagcaaattcaaacgacaataactttttactcggatgtcagattgagtcccgtaatatatcgagacgctcgaaatggaataccgaagctctgaacaaattcaaacgacaataaatttttactcggatgtctgattgagtcccgtaatatatcgagacgctcgaaattgaataccgaagccctgagcaaattcaaacgacaatcactttntactcggatgtctgattgaatcccgtaatatat

SEQ ID NO: 14490 - DNA, 321 bp, Glycine max
tctacattcaatttcgagtcttttcgatatattacgggactcaatcggacatccgagtaaaaagttattgtagtttgaatttgctcagggcttcggtattccatttcgagcgtctcgatatattacgggactcaatctgacatccgagtaaaaagttattgttgtttgaatttgctcagagcttcggtattccatttcgagcatctcgatatattacgggactcaatcagacatccgagtaaaaagttattgtagtttgaatttgctcagggcttctgcattccatttcgagcgtctcgatgtattacgggactcaatcag

SEQ ID NO: 14491 - DNA, 378 bp, Glycine max
  unsure (1)..(378): unsure at all n locations
agcttcatgcattatacttcaataaatttgtgaatatttcatatgtgatattatagaggactcagaagcatgccttcatgtaatttggtagctggtcaattgctgtaatatctcatctgcattattaaaaaaaattagtaatcattgtttttaatttcttttcatctttccatataaaaaaatatttttatctaagaaaactcttaactaataattagtgattggccctgcaaacagcttttgtgataagaatttaatggtcacctgaattagaagagatacactctgctcaatattcttggacctgtggcagcaggttcaacactgctcaatattcttggagaggtctantttgatagcatcttcataccttattac

SEQ ID NO: 14492 - DNA, 322 bp, Glycine max
tggtgaggatgctccaatggaggaaaagtaagagggagagaaagagagatgggggagcacgaaattgaaggaagaaaaagggagagaagttgaactttgagttgtgtctcacaagactctcattcatcaaagttacaacaagtgttacacatacttctatttatagactaggtagcttccttgagaagctttcttgagaaaacttccttgataaaattctttgagataacttccttgagaagctagagcttagctacacacacccctctcataactaagctcacctccttgagaagcttccttaagaagattcctaaataag

SEQ ID NO: 14493 - DNA, 371 bp, Glycine max
agcttagaggtgcacatttcattgcttcttatgtaactattttgtatgattgctaaccccgtgaaatgtgatccaatggacccaaatagaggccttgcagtgtaggaagaacatagagcatgttcatcaactgggcattctgaaaatgccaaattgaaaggttccagttgaaagtggctacatttatactttgtacacgcgagaaaacaaacaagatagacttagacatttgatcaaacaccttgcgagcatatacaaaagggcaagtatcaaagaacaaaacaaattttcatcgacattagtgatagacttgaacatatcaagatatgggtacgctcagaatagaagagggagatttaattactggaatg

SEQ ID NO: 14494 - DNA, 304 bp, Glycine max
tcatggttgcccagcttcaataacaagttacagggacccgatttttgtcagtcaattctggaaggacttcatggcttatcaagggattcaagtttagttttctactgcttaccatcctcagacagatgggcagatagaggtagtgaacatgtgtattaagacatatctgagatgtatgtgctcagatgatcctaaacaatggtccaaatggcttcccttggctgagtggtggtataactctacatatcacagcactattaaggccagtccctatgaaatcatgtatggacaagcaccaccagct

SEQ ID NO: 14495 - DNA, 325 bp, Glycine max
  unsure (1)..(325): unsure at all n locations
agcttngaaaatgatctggtcggaatcatttaatgaaggacaagatgtcatatacacaggaatccatagacggagcacatgctccaatgatcaaatggacaccaaatgaacacatacaccacaatggcaggtgtacaatacagcaagccacacgcagaacagcgtccacaaggaatgcagcatcaagaaccaacaacagtgccacaggaagaagtaacgacacttcgtgcagaacaacgacaactattctaagacagccccagcctgactgagacaaaatccacatgcacctgccactgaatattgacttgactgacaagacacg

SEQ ID NO: 14496 - DNA, 144 bp, Glycine max
tgcacgctcttatctatgactatataagtctgagtgaccctcaatgatgaagcggacaatacttcttcataaaaactgagggaaagagtgacacactgtatattgttcatcaccatggctgacatggatagaacaagaatcacc

SEQ ID NO: 14497 - DNA, 338 bp, Glycine max
  unsure (1)..(338): unsure at all n locations
agctntaaagttctagttgattaaaaacttgtgttttatagtaatgcttgttcatgggaagaattcactaatacactatgaagcaccgacacagacaccggacacagacacgtgaacacctgtaatgtctaaaatattagaatgtggacggcaaattgctctgaagggggtacttttacaaacttattctctaaataaggccgttttaaaactaattccgcaatggtactcctttttacgtaaagagcatgcaaaaaccatgcaaaccgccagccctattggcgggtttgctgtgactgtgacacgtggcgaaaatgccactggcgggttcgttgtgt

SEQ ID NO: 14498 - DNA, 303 bp, Glycine max
ttcaactagcttataagttagttttacctaatattataccttataagctatcagctagctcatatgctttagttagcatataagttagttttaccaaacatatgacaataggttagcttatgacctaccaaacatgaaatataagctactaatttttttctctcaattttatcctcactaatttatttgaaattatttttacccatttattcaacttaaaaatcctatttatttattttaatattcttacaaacactagatggtatttattttcttagttatcatgaaacttggaattctact

SEQ ID NO: 14499 - DNA, 398 bp, Glycine max
  unsure (1)..(398): unsure at all n locations
ccgggcattactttccatgaatcctgataattatatgtgatctttgttgccacttatattttangttgaagtatctcgattgactagtcattttcaggtgttttttttctctgatgttgttattttttttttggcacctttcttggttctcaataaaattgttctattcataaaagttacattttaattattcattgtatttcaaatggtgagattgagttgaacgcatgtattctatggtatattttcatataaaaaaattacggaatagtttttgttgatgttttaaaaatcggacctgtcattaaacttcctattctgctgtttatataaacttattaaccttatatgaatgccatgttttttatatgttatgccttcaaggcagcatgcatgtt

SEQ ID NO: 14500 - DNA, 266 bp, Glycine max
acatacccatcctgtactagggataatgttattatgcaagagacgcttatatgcggaaattgctgatggaaaactgatggagacaaagggtacaactaacctacggataaaacgcgagaatgagacgtgatgagttgacaacgagcgagactctgagggcaggaaggctaaacctgaattctgcggtaaatggaggattaagtgagttaatgctatcgtgcaacgtcacttaggacttatgagaaagcttggactgagctatagag

SEQ ID NO: 14501 - DNA, 407 bp, Glycine max
agcttgatccaccatatattactaaattatatatgtctttcaagtttcaacaagaaataataaattaccatgtggcatccaataatgatccctttgatcattaaccaagtataaaaaatgaaaaacaccaaaactgtttgggtcacttacccacaatctttgtccgagattccgaggaagaatacccgaattagtgagttaaagaatactcgcgtatataaaggggcaaattagtcatttacaacattcataacagtgtctttggactagattcacggtgacaaataataatcaattgaaataacaaatagttgattttattttttttatggtatcatcatgaatttataaaaaaaatataagattgactgataaaaaggaaaaaagaagatcatgaatttaaattt

SEQ ID NO: 14502 - DNA, 326 bp, Glycine max
tgccatccacaggggaagccaagataacatctctgtaattgtgatagacttaaaggctcaaagaaaaattaagagaaagccataaagtgatgtgttttacatctggcatatcttcattgtaagctattgatttattgtattttaaagtcattggcactttttagcccgtcagtttttcaccagggctaagctaagttatatatgctaatatttgcactttacaaggataccttcagcttggatgagttatcactctgtctctgagaactttccaagcataacaaaggttttttttttttttaaatgttaagagccaatattgtgtt

SEQ ID NO: 14503 - DNA, 390 bp, Glycine max
  unsure (1)..(390): unsure at all n locations
cacctgcggctgcagcttggaagaagtgataggtacatttctaaggcagagcttgaaagagcccgggtagtctaagagaagttcatgtccatagccatcaaagtctgaaaagagtatgatgaactaagggacgtcaatatggccacagctgaagccttggaacgagaaaccaaataggcccgaaaggaagaacacgaccaaagcaaagttttgaggggctttatagggcagcaatagtgagctcaagctccaaagaggtgaaaggaatcatcacgggtcaaaggcatgatcttgaaggacgagctaaaggtttgccttangtcgaaaagaaatttgtcccaacagttaagcgagactgaagggaatatgtgggccatcatcgataagtgc

SEQ ID NO: 14504 - DNA, 328 bp, Glycine max
tcatgatgatgaatcaagttgattcaagtttgagtcaacaattcaagaatcaagagaagattgatttcaagattgaagagaagatgaattcaagattcaagagaagaaatcaagaagacttcacaagggaagtattgaaaagatttttaaaaaaacaacatagcacaactttgtttttcaaaagagtttttctcaaaattttctaagttaccagagtttttactctctggtaatcgattaccagtttcctgtaatcgattactagtggcaaagtttgattccaaaagttgtcaactaaatttgcaatgttccaattgatttcaaaatg

SEQ ID NO: 14505 - DNA, 315 bp, Glycine max
tcatacaaatgttacatggtgccaaattttaattgcaatctctacataaacaagtataatgacttgccttgcgactagggacattagcacattgatactgaataactggattaatgcgaacactagtccagctcatcggtatggtatgtttgagtagtacaactaatatgtgtggaatgcttggatgtacagtactttgatccgtctatgactgtcatcatgaacaagataatggtcgaaatttgatacatgctgataatagtgaaaagatagcactattctatcagataagagaaatagtagtgaaactgaccc

SEQ ID NO: 14506 - DNA, 365 bp, Glycine max
  unsure (1)..(365): unsure at all n locations
agcttttgagatactcanatggtcattatttttcactcggaggtccgattcangcgcatcacatgtcgagacgctcgaaattgaaaaatggaagctcttgagcaattcaaatggtcataatatttcactcgtacgtccaatacaggcgcataatatatcgagaggctcgaaattgaacaacggaagctctcgagaaattcaaatggtcataacttttcactcggaggtccgattcaggtttataacatatcgagacgcttgaaattgaacaacggaagctctcgagaattcaaatggtcttacttttcacttggaggtccgattcaggcgcatcacatatagagacgctcgacattgaataacgg

SEQ ID NO: 14507 - DNA, 318 bp, Glycine max
tatgcacggaaaatgtaattatgaaatttagatgcccgaagaaacaccatttcctagttaaccatgcattaggtaccatgttcaattattttgttttttaagtgaaacgggtttatgatcccaacatggttggctcgtggtgcctaacacatgaaactaagaatgtagtgtgaagtttcacgcttccccctttttgtttttgttttgtagaggaaaacgcaaggatgagcaaacatgaaaacaaatggtatgcaattttgcagatcaaaaagtttgttgaacgcatatgcatgatgatgccatgactcatgcaaaatg

SEQ ID NO: 14508 - DNA, 386 bp, Glycine max
  unsure (1)..(386): unsure at all n locations
ncaagcttggcactggtattcatgtttcatttatgccttttgagtatgtgcattttgatttatggggaccatctagagtgaaaactcatggtggaagctcaaactttctcaccatcatagatgatttctcaagaagagtatggttgtatgttttgaaaaaaaaatcataagcttttcaaaagttcagagagtggcatactcttattggaaatcaacttggtacaaaactaaaagttttaaggactgaaaatggcctggagtttgtttcagagcaattcaatgagttttgcaggaaagtaggtatcaaaaggcacaaaacagtccctcacacaccacaacagaatggattagcagaaagaatgaataggaccatttttgaaaaagtg

SEQ ID NO: 14509 - DNA, 319 bp, Glycine max
taagggtgttcattatttcatctttcggacatatttatactttttttctttagttgaagtatgttagtattttatgtcaaaaaatttggtagatgtatctcgcaatctcttttatttaaaaaaaattcttttaaaggatatcaaagtaatttaagacatgagatcttttaaagaatataaaataaaaaaactttttctctctccgtgtctgcaagtcatccctcccctctcatctcttgttcatccgacttcgagcaaggagtattttgtttccttggcacacctcctgaaacaaaaacctccaacttgtgtctaccat

SEQ ID NO: 14510 - DNA, 373 bp, Glycine max
  unsure (1)..(373): unsure at all n locations
agcttatgatgtgatttaccaagaggatctcatcaaacgccttgagtccgagatctctggtgactttgaggtaccataagaacattattcacataattttgccaactatttcatcatgtagcatttttttggtacattgtgatgactataaattaatgacgggactagtgttggcctagtggaggattgagatagtgtgcatgagatcttaggttcaaatcttagtacgactattgtataaaaaaaaaattaatgatggtgtgtatgtatgcaaatcagagagctatgtaccggtggatgttgcagcctgcggatcgtgatgctgttttggtgaatgtggcaatcaagaatggcaccanagactaccatgtga

SEQ ID NO: 14511 - DNA, 324 bp, Glycine max
tgacaagccagctttttttagtaataattataataataataactattatctataccatttttatggaattataaatgacaggatgaagtggcataaagtgcttagagagttcacttgcatgtgaaaaattttcaaaaagaaaaagactcaagttaaaagaataatgcaaccagattaatacttccaaagaaaagaatattttgtaaagacattttcagacaatttaaatatttttatttggctatattagtataaaacatctctaatccatatatttttttaatattatgctctttttttcattttcttttgatatactttgtg

SEQ ID NO: 14512 - DNA, 344 bp, Glycine max
agcttcctagctgtttctaattatatgggctcattaagtctatcatatggtgacagtagctgagaagtccatggatctcctcgaggccagagtaggtgtccgccattgctttggccttggctagcaatcggggaagttcttgactcctgttcaaggtaagagcaaatcggtccatccacgttgttgcttcttgatgtaacgagtcgatcacccttcctctagccttcttttccgcatacactcgagcatactcgtctgccactttgtgctcgtgggtcgtggctagatttaactcctcttggtacttgttgacgatggctaacatgctggtctctgtttcgtgt

SEQ ID NO: 14513 - DNA, 323 bp, Glycine max
ttgccaatgaattttgatgcttttcacctaattcaaggaggttacttattatgggaacacgggatggtcccgatggcagcttatggtttgcttttgtggccattgcaaggaatgaaccaagaagtgcatgaaccatggtgcatggcaagacaataatgagtagtgaacaacttgcaatgtccttaaattttcttaatatataaacttagtactctatttgaaaactcacatgttttcttgggtttttctagagttatcctgtcatgcaactgcaatatctttagaatatagtttgtacatcatggcttaattacataggatgg

SEQ ID NO: 14514 - DNA, 381 bp, Glycine max
  unsure (1)..(381): unsure at all n locations
agcttattattggactntgcaaagngggtctctngaatgtagccttcagtttgtaccatcatatgagggaagggggaatctctccctctgaaattattcataattctcttctaagtagttgttgcaagttgggaatgtttggggaagcactgacattggtagattctatgatggagtgtagtcatttagcacatctagaatcctataagcttcttatttgtggtctgtttgaacaaatgaacaaagagaaggctgaagctgttttttgtagtttactacgatgtgggtataattatgatgaagtggcttggaaagttctgattgatggcttaactaaggctggatatgttgatcaatgctcagaatngctgaatctaatgg

SEQ ID NO: 14515 - DNA, 307 bp, Glycine max
tgttggcaaaaactttgttggcgaaggattagaaattgtaaccgacacactcgaagaggtaccacaatgcgatggcataaatgagcaccgcaaccgctccacgccaattcatccacaacactacatcagcaactaagcctttgtcgagaacacgatgaaaggatgagaaactaaggcaatgccaagattgttagaagaatgaagaatgagggggttagaatcatcaatggcagccatggccatgagagaaaaaaaagaaccaaccaggcatccgaaggtttccttaaaaaacgattcataagggagt

SEQ ID NO: 14516 - DNA, 369 bp, Glycine max
  unsure (1)..(369): unsure at all n locations
tttcatgcaagcttacatgtattgacaagctgttattttttaactgccatggaattccttaagagtatacaaaagaagccattcttacctgcaattttcttacatattcttcttggaacctgaatgtgacaatttcctgtccaaggattgtagttggttgcggaagttctggttttcctcaagtaagcgatcatactcaagaaggaacccctcagattgttttctcagagcagctatattggcttcagcaccatctacgtcttttgtttttgactgtagttcagattcaaggcggctaagttcagctctcaatctggctctttcttcctccacagacttaatntcttctgaattngcaactttcccatc

SEQ ID NO: 14517 - DNA, 305 bp, Glycine max
ttagaaagaaaaaaaaaagaatgttaactaaaagattatttgcctagtttcgctcatcaattatgtaatagccctgatgctcatgcagatcctttaaaaaccaaattaccgttggatccgttcttcacttataatttaaagtaaattacactagttatttatgagatcgatttcataaaattacacaaattctatctgtttttaaaattcatagcaactttcttcgtaggagagcacggtataatatttttaaaatagttaagaggataagtgtaatgtataagaaggtatatgtataaacaatt

SEQ ID NO: 14518 - DNA, 161 bp, Glycine max
agcttacttgatatcgactaagcacgcttattgcgcgaaccgggtctaaggagatgcagaggtaggcatgccacctggacaaaggagagaactagactggctcaacaaggtgagaatggaggaaacacccatgctgggacgaccattgctattcacccaat

SEQ ID NO: 14519 - DNA, 295 bp, Glycine max
tcacgcttgatgactcggatctaagctttttgccctctcgagcatggtcatggtgcatccataacagggggaggtgtcgctggatcacatacataatgcctgaggctagatatcgacggtaattcacacacgggtgcacaattggtctaactgagagccgataataccttgctccttaagattacagacccgcttggtgattatcggcatgcatcccataggatccctgatgctcccctatccaattttgttcattgtttgtggcacacacacatttaacccgtcccatgttttg

SEQ ID NO: 14520 - DNA, 438 bp, Glycine max
  unsure (1)..(438): unsure at all n locations
nctgaaagccctcganagccnggtttgaaaccctgactgccgcgtgcctcttagacacccgccgcttccaggtgctttattccactctgaattttttctaagctgaacagacggtggatcggaagagaactcttcccaaaaacggacggaaaagctccggatgcataggatgacttctgagggactgaaatcctgggcttcaaaaaaagagtgctaagggctgaccctttcttctcacttcctcccttatttaatagcaaaatatgggaagtgcttgcgcccgccacacaacgaacaaaattaggctctcaaatattttttgtgtccttccccaacttaggggaagtgagagaaacagacttgcagagctcgaaggccttctttgcagaaacaccttaatccggggaatccgaaccagtggctaccacacaagccacg

SEQ ID NO: 14521 - DNA, 424 bp, Glycine max
gaagaattgaaggtgattgactgcgttgttgaaaaaattgattgatgataaaaaaagggaaaatatcttggtcatagtgatcataatgatgtcgttgctgctttttattgtcattgtccagtgacaagattttcacgttaatttgattatcgggggtgaatagatttttttatttgaagtatttgtgatgaaagtaagttggattgtctattatctttttttttgtcctggtttcttgaatgaatattgggtttatggcaaatttggtttcaagaacttgattttttttctaatatgttgtgttttgctttatgatattttagtaattacccaaacacataaaatgaatgtgctttgatgcttttttccttttataatacaaagaaattggatagtcttgtaagtttgttagttaagaaaaata

SEQ ID NO: 14522 - DNA, 226 bp, Glycine max
tacttcacatggatcctatggtgcctatgcagggtgaaagtcttggaagaaagaggtatgcctatggttgtggggatgatttctccagatttacctgagtaaatgttatcagagagaaatcagaaacctttgaagtattcaaagtagtgagtctaatacttcatagagaagaagactgtgtcatcaagaagaatctggagtgaccatggcagagaatttgaaaaca

SEQ ID NO: 14523 - DNA, 457 bp, Glycine max
  unsure (1)..(457): unsure at all n locations
cgaggtacttacccgttgaagatcgaagaactttgaagaacgaatgatgatcgttgaagaacggttgaaacctttgcgaaattcctcacggaaaacgttacggaaacgtttcggaagcgcctcggcttagattttcttcacggaaataatttttccaagcaaattcgaaagagagagaagtgccaaaggggctgaacccttttcttcttcacttcctcccctatttatagcaaaataggggaggtggttgccgcccagctcgcccaggcgagccaggttgcttcctccagaagcaacagccttctggaggaatattctggagggcccaagtgagcctgggtgctatttgcacccccatttntactaagtacacccctctgcttttttggtgattcttttttcgaaagttacggaaacttacgaatatcgaacgatacttgtttctttccgtaatgta

SEQ ID NO: 14524 - DNA, 348 bp, Glycine max
caagctagccacccagctcgcccagacgagctctgctagcccaggcgagcatggttgcttccttcagaagaaacagccttctggatggcccaagtgggcctggatgctattagcacccccatttatactaatgacaccccattgcctttcttgttgagatacgtttttcgtaaagttacggaaacttatgaattacgtaacgagacttgttatcttttcgtaatgttacagaaccttgcagaatacataatcatcccctattagacttacagagtgttacagaacctcgctaatcatccctttttagagttccggttgtcacggaaccttatggattgagcatctata

SEQ ID NO: 14525 - DNA, 333 bp, Glycine max
  unsure (1)..(333): unsure at all n locations
agttccgctcctgagtatgacagtcaccgctntaagagcgctgtacaccagcagcgcttcgaggccatcatgggatggtcatttctccgggagcgacgcgtccagctcagggatgacgagtatactgatttccaggaggagataggtcgccggcggtaggcatcactggttacccccatggccaagttcgatccagaagtagtccttgagttttatgccaatgcttggccaacagaggagggcgtgcgtgacatgaggtcctgngtgaggggtcagtggaatcccgttgatgcagatgctatcggccagctcctgggatatccattggtgctg

SEQ ID NO: 14526 - DNA, 311 bp, Glycine max
tcggacctcagtgtgaaaagttatggccataatttatctcagagctttcttgttcatcttcgagcgtctctatatgtgatgcgccttaatctaacttccgtgtgaaaagatatgaccatttgaatttctcaagagctttctctgttcaattttgagcgtctcgatatgtgatttgcctgaatcggacatccgtgtcaaatgttatgaccatttgaattctccagagctttcgctgtacaattcgagcctctcgacatattatgcgccctcatcggacatccgtgggaaaagctttggacatttgaattttt

SEQ ID NO: 14527 - DNA, 429 bp, Glycine max
  unsure (1)..(429): unsure at all n locations
tgcaagctttcctacataatggtcccttcattattgccattcaaatatggagagatagtggcatcaaagaggttgttgttgatgttgttctctgagttgaaagtatgcaactgatgatggaagttgcggctcgttgaggatgatatggtagtaaccatagttgaaggaaatcaaagttgttggtaaaaaccaaaaagagaaaatagaaccaaattggagatagataggttaatagaatatgcaagaagaacaaattataggcaaaatgaaaatgaaggataagaacaacacatatttaggatcaataaaacaactgatgattatgtgaaagttgatcatattaagggcttgatatatatgcatgcattccctaggtgcttgttgaggatcaaagttgagtgaaataaaaacttattttatgaantgaaa

SEQ ID NO: 14528 - DNA, 469 bp, Glycine max
  unsure (1)..(469): unsure at all n locations
tctttgcgaaaatcataaaacccanaanaatggttataggaaagaatgatcacattcgagaaggctgatgaagatgaaaaaatttaaccataaaccaaaaaaacaaagaaaatgaacctatattcgtggagtttccagataaaaactgtacatgtagtgtgtttttccacctgttgtgcatgcaatagaggctaactaaaaacatttaagcttttgtattgtcagaaacaaagaaataaagaaaacgtagacaaagaaacaaagaaaacaaacctatttgaaataaaaataaaaaatcacagctttagtgtcttcttccaccttctctgcatacaatagtgaaggtattgtgagaagtcagaacacaaaataaaaaaattagcaactctgccttgaaaatgtctttagcatcgccgttgtcactttagtagcanaaataaatcagcaagcaaaaatggcagaagataat

SEQ ID NO: 14529 - DNA, 505 bp, Glycine max
  unsure (1)..(505): unsure at all n locations
tgcaatgtgnncggatgattacttganttgataacttgagaacnccgcntggnaaggnccnncccnngggaatcgaggacttttgaacaatattaattgtcacacagcagaacccggcaggtgaccccgctggcacctctaggacattaatctgtgctactcgttatcactcatgcttgaagaagtggtctatcagaactgatcgatctatggttatctaccatatggtgtggctctcctggtatttgaaaatgttccctattttatttaacttgttgatgaaatgtaactgatctgagtagattttccattcatcagcttctaacataatcgatcacgctcttgtagaactgtcatgacagaccattggagcctgcgtgacgtctgctctccatgcatactaagtacaccgcgaactgttgcttatggttctatatacatttagatacggcacatgcggacactcttaccagacttgtggactgtcctaatgcaacggacgcag

SEQ ID NO: 14530 - DNA, 167 bp, Glycine max
ttggctcctaaccagaagttgggagatgtcttgccacaggtttctaatgttaaatagaggtttggggttcaatcgtacaagatgatagagaattcctggaggatgttccacatatgactcaagggcgatgacttaaatggagagaatcatcgaggattattcatgat

SEQ ID NO: 14531 - DNA, 460 bp, Glycine max
  unsure (1)..(460): unsure at all n locations
ntaactnntagttttgtggagtctaagaagggagctgtttcgctggaacattggttgtgtcttaatggttttccagcaactactattcatggtgacaggtcacagcaggttagtctattgcacaaatgtttaatagtaaacagcacttgttgtaatgggttgtcatatgtctatgatgattgacgtataacataagagtgctatagtgctatgtgaaaaattgtgtgtattattgttaataattaaattaaaaatatgaaacattttatagactcccaaattccccctttttgaccacatatctctttcccatattgccattgactntntgtttgtagtcacaattctttgccatttgaaatgaatcgcatgttccctgaatgagtatgaactctnntgttaataattctttntactctcacaatctctcaaaccgatgcagacatttactntcctggat

SEQ ID NO: 14532 - DNA, 193 bp, Glycine max
gtgcaagcttattgtcgtttgaatatgcttagaccttatgtattttatttcgagcgccacgatatagtgcggtacacaatctgacatccgaggtaaaaggtataggtttttgaatgtactgagagcttcagttgtcaattgcgagcgtctcgatatgtatctggactcaatcagacatgcgagttaaaaggta

SEQ ID NO: 14533 - DNA, 455 bp, Glycine max
  unsure (1)..(455): unsure at all n locations
tataaaactcagcttgacataatcgcggacaatatcttttactcagtatgtacgaatgaatcccgtaatatattgagacactcgtaattgagaacggaagctcgtagcaaattcaaatgacaataacttttaactcggatgttcgattgagtcttgtaatatatcgagacgcttgaaattgaaaacggaagctctgagcaaattctaacgagaataacttttactcggatgttcgattaagtcccgtaatatattgagaggctcgtaattgaaaacagaacctcgtagcaaattctaaagacaataactttttacttgaatgcgattgagtcccgtaatatatcgagacactcgaaatttaaaatggaagctcgtagcngatgcatacgacaatgactgtctactcagatgtccgattcaatcccgtaatatatgaatacgctcgtaattgaata

SEQ ID NO: 14534 - DNA, 335 bp, Glycine max
  unsure (1)..(335): unsure at all n locations
agctntgtatatcggntacaggtataggacttggagtagagtgnttnctttctaatgccaatctccccacccacattattctaagtaagaattttaagcaccaaatgtgaactaaaacttgatcagacttgtgagttgtgatcaaagaaaaactaagccatgaacaagattgtgattgaagaaaaactaagccatgaacatgattgatatattttataacaaggaaacaagttttgtcttcaagatgatgaaacaaatttttactgcagactaaagattcttgtgaggcttgcaataataaggtggttgaatgggggaaattgattcaccatagt

SEQ ID NO: 14535 - DNA, 427 bp, Glycine max
  unsure (1)..(427): unsure at all n locations
tcaccgtgtggaggctcctaaccctaattgcgagtggtatgatgcattccaccgttgcagtcacatctgcattagcgtggagcaaatctgtgacgacattggcactaccgcattccatggcaggtttgaaaaacctcgtgagctggggttttatgcatgtagatatggattcggtgaataggttgtgagatatgggaattttggagacgaggaactcgacaagaggagaggaatagactgaggcatgtgaatagaagaggagaggaacgggtgtgaggtatgtgaacaggagaggagaggaacatgcgcaaagggaaatagcgagagtgtaaatgaaaaaaaaggtccatgacggttttcttggaaaaccaactntgagtatttaatttcaaggatgaatttgacaaaaaccatttttgaaaagatg

SEQ ID NO: 14536 - DNA, 211 bp, Glycine max
  unsure (1)..(211): unsure at all n locations
agctnacctgtttaagcagacagagagagtgtggccgtgtcaaagtacatgcatattactatacatgtgtcacactctattgcacatggagttagtatatagaccagatgtcgcaccaatcacgatcgatcactttcagaacgtctacattcccttgggatttattgtcttgctcacaactggagaggattgaagagatcaattttttttt

SEQ ID NO: 14537 - DNA, 437 bp, Glycine max
  unsure (1)..(437): unsure at all n locations
ngatcaaaacaattatctaattattccaatccactcttatataaaatttctcattcaaatcattctcaaacactcatttcacacaaaacaatccactacatatcattttcaataaattcactgttcaaacacgctctttggtacaagcaaacaactcaaagtgctgaaatttaaataactaaaatttaaagaactgaaacataaaacaaactaaaaagcaagctaaatactgataaactaaaatattcatgctttgcagaaattaaactaaacacaatntaaacatcctgctcatcctatggctaatcttcattaagatccagtgctggagctgctgatgaatcctggataggctgctctggctccgtgattggtgcagatggttaagtctcctcacgaacacgtgcacgagatggctcangtatctgatctgtgga

SEQ ID NO: 14538 - DNA, 401 bp, Glycine max
tactcattactcaagcatagtgaaaatgacaactctatacgatatcaaagtaccttaatataaaattcaggcttcgaaaagacactagcataatgtgacagtcgaaaactaaaagtatacaaaagtgcagaacaagaaatccacttttagcacaacaggcacaacagcgaccttgtacgataattgggaggattgcaaagaaatcaccaatgcatgaagtggcctgtcacccattcctggagatagataatgctttttataagtcactactcaaccgatcggctttcattatgaattattaaagataattcagtgaacttaaagaagctgtccctggtgtggcattccacttctcatcattgcacagaattcctcagtagttattctcccatcctgttagt

SEQ ID NO: 14539 - DNA, 431 bp, Glycine max
agcttaagccaccagctcgcctgagtgagttatgtagcaagctcctcctccattcttcctataaaatggcattagaggctgatgggaaggggttcaacacctttggtatttaaagtttactctaaattagtgagaagaagaaaaaagaaggagaaaatcaaggtcgaggcacttctgtaatgcttccgtgatcaaatccgtgaatgttcttcacagttcttcgccgttcttcatcgttcgtcgaccttcaaccggttagttttcgatttcaaagctttgaattcattgtatgcacccttaagggtccattcttgctttgtatgtttacatcttcatctcgtctaccttcagtattcttttcttcgtgttaagcgagtttcgaccgattgtttaagccgtaatctcactcaatcaatgttaaatgaatttca

SEQ ID NO: 14540 - DNA, 451 bp, Glycine max
tatctcatgttagactctcctaatatcagcatttgcattcaatcacagtttacttggtgccaacttaaagtggaattaaacaacgaatatacttaaagtgcataaaaaagttaaataatgctcaaaataggcaatcctagcttaaatcttaccctttccttgatgtcacccaaagtcggcaagtacaacttatagaattcctctctgaatgcaaccacaaacctaaataaagtttagaaaccaacaagaataagacaattagaatctgtgtgatttgtataaatttaagggacaacaagatacatgtactatattatagtattttcacttttaaaggactaaagacgaattattgaccataattgatatattagcatttgtatatcactaactcgctcttacttagtatgtctctcaacttgcaattacaaattcattgcaactcagcatt

SEQ ID NO: 14541 - DNA, 309 bp, Glycine max
gagaaaagttgaactctgagttgtgtctcacaagactctcattcatcaaagttacaacaagtgttacacatccttctatttatagcctaggtagtttccttgagaaacttccttgagaatatttcttgagaaacttccttgagaagctagagctttgctactgtcataccctaatttcggtcggtgatcattgtgtttgggatgcgacctttgttgaccacctaaatgttaacactcatcgtgggaatcgaaagtccgagagtttcggaaaaatcacgcaaaacacaaatgggggttttaccaaggggg

SEQ ID NO: 14542 - DNA, 454 bp, Glycine max
gatagcacgctccatagttagtttacaatttatatagatgcggtttcctttatatgaactataaaaactcaaaaagggacacatcagagggtctcaagctgtcatctcttggggaagtgagtttctgtcaagctgtggaagtgattccaaaggggatgaagccatcgaggtggtttgcagggagatggaaaagcatgaaaaaatggtgccatcgaagcattggtggagattccagacatttaagctcttgatgatgcaactaagagagggcaaacaatgttccttagggctcctacaaatcccattctccctgcttgtactttccctcttaagaatgtcttagatacacatcaaatgaaatgcattcattggaagcactagaaagtgagcttctgagttatcataatatgcagattccaatcatatctcaggatgctctcaacaaataaatgca

SEQ ID NO: 14543 - DNA, 410 bp, Glycine max
  unsure (1)..(410): unsure at all n locations
ccacaacgcgatggcataaatgagcaccgcaaccgctccacgccaattcatccacaacactacatcagcaactaagcctttgtcgagaacacgatgaaaggatgagaaactaaggcaatgccaagattgttagaagaatgaagaatgagggggttagaatcatcaatggcagccatggccatgagagaaaaaaaagaaccaaccaggcatccgaaggtttccttaaaaaacgattcataagggagtgacttgtcaattatataagaacttaatcatcaatgacatccagggccatgagaganaaaaaaagaaccaaccaggcattcgaaaggtccccttaaaaaatgattcataagggggtgacctatccaattatataagaactgaatcatcctcgtgaaccacccgat

SEQ ID NO: 14544 - DNA, 300 bp, Glycine max
gcaagctaggttacctccttcttcactacatcaataatcaccgagttgagtcttctctggggctgtcttactggaatagccccatcctctaaatttatccgatgcatacatatggatgggctaataccaggaatgtccaccagggtccagcctatagcctatttatgcttcttgagaacatataacagcttctcctcttgctcatcagctagggaggcagatataattactgtaaatcctttgctatcatccaagtaagcatattttaaatctgatggcagagacttcaattctggtgtg

SEQ ID NO: 14545 - DNA, 431 bp, Glycine max
  unsure (1)..(431): unsure at all n locations
ggggtgatgttgcgcgtactgataggtaccatgaggtgtttgctgnggtttgacccatgcgggtgttgaagagacggcatgggcctctccttccttcctttntgcccctgttgccccgattcttttggcgttcacgtttgtggaggaaacgtaatcaaactttcctctcttcaatcccacctcgattctttccccggcaaacaccagatccgcaaagctggacggcatgtaacccactagcttctcatagtagaacactggcagagtgtctaccatcatggtgatcatctctctctcaaccatgggaggagctacttgtgccgccaaatccctccatcgctgcgcatattctttaaaggtttcaccctctttcttaaacatattctgcagttgagtacggtcaggagccatatcagaatngtactgatact

SEQ ID NO: 14546 - DNA, 383 bp, Glycine max
gcacgcatgcaagcttattctctccttcctacaatgtcgcgctttactcttccatgcagaaattgtaaaccttttaaagataaaatagtagttctttcaatttgacatatgggaagtaagaataggggcttctacaatctttacatgcacgtgaaggcaattgtaaattgtaatgaatctcccccgtgactagctataatagggttttagaattttgtggcttcctaagtaattacctactcatgcgattgtgccacatgattaattaaaattccttgggaatgaattgcatttgaaaaatagtgcttctctttgattaacaaataactccatcaagaaatggttcaaacgtgttattttaatgctgcccttgttagataggt

SEQ ID NO: 14547 - DNA, 519 bp, Glycine max
  unsure (1)..(519): unsure at all n locations
ggaacattgatacgctgcatnatgagaacnttagaatactcaagctngaagtggaaaggagatgatttntgtttggtctggaatatgaactaataggatttttaaaaggaaaagaaaacgtgaataggaagccaataaaaataatgaggaatataaaagggacacatgactcacacctaaattataattaaagtcttacttgattatagaaatgaaagttatggagtaataaggtgtaatcaaagtctgctagtttaaaaaaaaaatattaattgtacccaaaaaataatataagtatatacacacacacacacacacacacatatatatatatatatatatatatatatatatatatatatatatatatatatatagatcgacttatcaggcttataagattttttaataagcctgatttatttaatataataggctgttaaaaaagtctgaacttaacctcttaattaaataggttagtccaggtcaagttttatgtatgtcaagtcgtacgccccg

SEQ ID NO: 14548 - DNA, 336 bp, Glycine max
  unsure (1)..(336): unsure at all n locations
aaataatataatatatcctattataaagaaatttataacctaataactcatattaatcataagtatttctcaaaaaaaagcatggaataagtatttccataaataaattatggaaatcaaatttgaacctgaattctcattaaacctgaaaagagacatgtnggttaaaagaaaacaaaaacatacacacacacactttacttgtgtgggttagaagaacttactccgtacaaaggatggatccgctgttcaagtttcataaaagatgtatttgatttgtactgattctacaaaacaccttggaagacaagtttctacgagtatgattaacatatg

SEQ ID NO: 14549 - DNA, 465 bp, Glycine max
  unsure (1)..(465): unsure at all n locations
gtaaaattaggactntctctcagctgtcacactccctctgttcataattcttattgaatttgcagagtgataaaatataatgcaaaaggctaataaaggttggaccggttaataaggattaggtttatatgacttacaagaaccttgctaacggacgatcaataaatatctccataatgacattctttgagtcctaagacatatcgtgtaatgccctacaaaaagacctaagcttgcacctaatgagaaccgttgaacttaagtctatcctaggtcggcctattaatttcagcccaaaatgaaggatgacgaatggataagtgagctttcctaagttgtagagtgataaaatataatgcaaaaggctaataaaagttggaccagataataaggattagatttatatgacttacaagaaccttgctaatgtacgatcaataaatatctccataatgacattctgag

SEQ ID NO: 14550 - DNA, 435 bp, Glycine max
  unsure (1)..(435): unsure at all n locations
tgctcattgtttggtatgtttctctctacagcncacttcctattgataagctcataaagaactacaccatagctccacacatcactcttagcagttagcttaccagtctgaacatactcaggtgcagcataacctatggtgccgacaacctttgagaagagataagtcatttattttgcatgacagcaaaatatcaggaacaaaacgaagattcagacttcagattatcattgtaactttntataaattagattcattcacattgaatatggtaaaatatagttaatttactcaatataagctgccagaaggcacactattctgatgtactactatgatgcaatattgtcaatataatgagttttctcaagagtatagacaaattcttactgctggtgaaacatagccagacccttctgatggtccttgccgagc

SEQ ID NO: 14551 - DNA, 331 bp, Glycine max
agcttattttgtgataatgtaataccaactatatagatgattatgtatgttagattctataagaatcgaatctaatttatttatatgagataaggatatctttaatgtctaatctcacatttatgacaacttatttaaaaagatattttagaagttaaaagacacaaattatgttataataaacttaaggttgactttatatatagtggaccatgcttaacgttgataaagattgatataaaatgttaatatattataatagattgaatataataatgacacaatcaacaaatattagtatttatctttaaatagatgggttagtaagctt

SEQ ID NO: 14552 - DNA, 466 bp, Glycine max
  unsure (1)..(466): unsure at all n locations
gacacaaaaactaagcttatggtatataggcctcgttttcaagtatccattgtctcatatcgagtagatcttcccttgatcctcgtctaacaaaagagggtcgttgggtgcatttaatgccatcctttcctcgtgcggatatctctttgtttaaggcatgcatatacaagaaattgtagcaggtagtcacatctttgtgtcaaagcaagtcttgcgtagcaaagctcttcttttgatagtgaagatgacatatcagatcttgacttcatatattcttcataggatttagcagatcctaagagaatgtttctgctaacagaatcttagacacatagtaataaatgaagttttaaagattataccacatgtggtagcaaatcatgactntattttcctatcatctgagaaacatcagacacaaatattataacgatatcagatgccataccacaactttgacctttgt

SEQ ID NO: 14553 - DNA, 415 bp, Glycine max
  unsure (1)..(415): unsure at all n locations
agcttgtataatggctagacatgatacatgtcatggctntgttaggttcaaagataaaagggatgccccacattatttccatgacacaaatgcaaaaatgatgatttggaaattttatgcaaaactggtcatgcatgcacctatgcggacgctcaagtgtcaaatttttatggtcatgtgatgctagggctcaggattcatttcctctattntaaatcaacccaatgtttccaaaatatgttcttttatcaatgtgtgcattcctccaagtccatttcgggcgtccggggaaattttcacagcattcacccttcaggtgtagacacggtttttttcttcagaaatgcggtatgatcaatgaattttnttttttgtaaagaaaagttggaatcatctttttctaagcatattggtt

SEQ ID NO: 14554 - DNA, 444 bp, Glycine max
  unsure (1)..(444): unsure at all n locations
cttggaaagtgttatttntcactttctcgctaagccaatatgctggcttagcgagcatccgctaagcgcaacactcctggctaagcgcgaggaagaatccagaagaagatgagttgtacagattcgctaaccgcaccacttcatctctctaagtgcaccgctttagttcattcgctaagtgagaaaggcgccctaagccaaaaatcactaacatgcgctaagcggtccatacgtgcgctaagtgcacgagcacaaacaaggccacctatttaagccttaaattagattttgtgaggggagtgtggactgggattcagagctttacatgtctagggtttctagagagagaaagatccaagttccagagagttttgagagattntgttgtgtgaagatctgcagagaccggagctcgaagcaggagccggttagagagcttgagat

SEQ ID NO: 14555 - DNA, 308 bp, Glycine max
  unsure (1)..(308): unsure at all n locations
aacttttggcaaaacttaaaccaatccaagacaaactcatatgtgtttgagagaaattggntgagcttctaaaaaataaagagaccattgaacaaaacaatgattttctttattcctcaactcgccaaattgtgcaagaactaaaaggtcaacttgagtatgcctcaaaagaatctatcaatgcactattcacatggatcaagaccttcaatgatttgaggaggagcccctatgtcaaatctggcaactcttctttatgctttggactttaagaagattaatatttattntcaatttatttggaataa

SEQ ID NO: 14556 - DNA, 448 bp, Glycine max
  unsure (1)..(448): unsure at all n locations
tgaagttggtgcanaaatggtgtgttcccgtgggtcttgtggagcctttggtgagttttgaagaaaatgggggaagatggggtgaaatttggcttcccctctccccccccccccgttttatttttttcatcagaccatgctcgcccaggcgagttgaatttgcaaaattctattgcaaagtttttgttatatatatttcccttttaaaccttattaattatgtataagcttaggtgaattcatgagataattcaagaaaataaataagtatgaaacatgatgttagtgcttagctttactgagttttaaaagattggctaaaattttgttaaaacataagcgcttagacaatgaaggaaagctggagttgctgcacatgatgtccaacgttatgtcaaggaatcagattgggctgcacaatgcacaaggcaagataaaatgtcaaatg

SEQ ID NO: 14557 - DNA, 431 bp, Glycine max
  unsure (1)..(431): unsure at all n locations
agctntataatgtgacaaactntatttaaggttctaataacaccatcattcattctgatttggacggaacctatatcgactgacctacaaagattattgttacccatgagaacattaccaccagacttcttctcatatgacataaactgatgtttgcatggacacatatgattagaataacttgagtccaacatccattgttcaaagagatgatgtagttgttcaccaaaatccagaaccaaatcatttttagataaggagtcattctaaacaagagcaacaacaaaatatttctttgctttctttagagaatctcacttccaatgacctggttctttgcagtgactgcatatgtccataagattgactttgctcttcttgccacctttgcctttcttcttctagccttancagaaataatcactgatagt

SEQ ID NO: 14558 - DNA, 432 bp, Glycine max
  unsure (1)..(432): unsure at all n locations
tatcatctagaggttaaaagtatgcttcttttagttttcccagaagtagtagtatatgtgacctctatatgcaatagtattttcagtatgtctagcttatgtaggtctactggcaaatatttgtgtaagcattcgaatttgacacacattcaacaaaaaatatggtccaaatgaaatatacacagcaaatactacgtatttacacctttgatggagcttttccctagactgtgccttttccatttgtcctatgaaataagcaattccaaatgacatacaatcttgttttctgtcataaacattcttttccacttgcttgtgctgaaaataagcactccttacaattacctttgttgtttcctcctccctagttnttcctttagctgtgtctttgacatttgtgtgcccatgcaaccacaaacacagnttatg

SEQ ID NO: 14559 - DNA, 390 bp, Glycine max
  unsure (1)..(390): unsure at all n locations
tttatgatctgngacctgtatgagttgatgtgggcatcattggatgagaggaagtgtgattttcgaaatctgctcttatgcagatttttgctggcaaaataggtgcagcataattttggctttgtgcaaaaaaatgcttgtgtgtggttggctgtggaaagaaacacgcagaatgagttcttggatgtttggtagaagatcccaacggtcacaagggaagctcatgtactatatacttccattaaattttggagcaatccaccggtaaccaatcggatccgagaatagtactgcgtctttagatgaaaaagctgtgatctggtgcggatgggcagagattctgccttagcctgcttgctggctgagtaactggctgtatgatgtggtctg

SEQ ID NO: 14560 - DNA, 453 bp, Glycine max
  unsure (1)..(453): unsure at all n locations
agcatgatttacattctccccctttctcaagcacattcttcttagtatcatcaaaatcttcatgatttacattctccccctttctcaagcaaattcttcttgacatcatcaaaatcttcatgatttacattctccccctttttgatgatgacaaccacctgtaggttaggagcaacaacaaagaaaatatctatttgcatatagtttactcccccttgatttttcaatgtttgcttatatgagacaattgaagatttcatatttttcacatataaaaagttgtctcataaaaaatagataatttttcttactattttatcttttatctttctctccccctttgtcaacataaaaaataaatcaagaatagagaggagaaaaatgttaccacttgttgtaatgtatgagaatcaagtgantaccgaaggcattaaaccaatcattcaatattga

SEQ ID NO: 14561 - DNA, 427 bp, Glycine max
  unsure (1)..(427): unsure at all n locations
agcttccatcaagtggtaaatatagcacaattatcttcaagtaggtgctccttanacctccattaattatttgctgtaccttttcttcgattgttggttcttcattttttctccatgtatctcctcacatgtctcgtgataaatgtgtttaacatgattatttagagtttccactgattaaacttgctatagaagctagatttgattttctatgagtcaaatttcttgttcttgttcttgaaccatgaattgtgttgagtttaggttcctttgagttttgtcttgttattttttgtggctganacctaaaccatanaattcttacaaaaatattaaagtaaaagataacctcagagatctagagtgacttgttcacctatttgagttttgtcatagaagtcatgtctagtcatgagacttgcacata

SEQ ID NO: 14562 - DNA, 448 bp, Glycine max
  unsure (1)..(448): unsure at all n locations
ngaaggcaaactggatgcgttggtcaacttggtaacttagctggccttgaatcagaaatctgtacctgtcgcaagggtttgtggtctgtgctcctctactgaccaccatacagacctttgcccttccatgcagcaacctgtagcaattgagcagcctgaagcttatgctgcaaatatttacaatagacctcctcaacctcagcagcaaaatcaaccacaacagaacaattatgacctttccagcaatagatacaaccctggatagaggaatcaccctaacctcagatggtccagccctcagcaacaacaacagcagcctgctccttccttccaaaatgctgctggcccaagcagaccatacattcctccaccaatccaacaatagcaacaaccccagaaacagccaacagttgaggcccctccacaaccttccctcgaagaacttgtg

SEQ ID NO: 14563 - DNA, 226 bp, Glycine max
ttgagatggtgaagtgtagaaaggagattcttcctgctttattcattgaccacagattggtacctggagatatgtcgcggaggtcaggagaccttgtggacgtcaggtggggtgctattgcccaaaaccaagcttgaccaatcccgacccaacccgggcataatcaggcaatgagaacctgtgatgtacctaaacaggcgagctcctgccagtcatcagattaaag

SEQ ID NO: 14564 - DNA, 440 bp, Glycine max
  unsure (1)..(440): unsure at all n locations
caatggctcaatgagcaaggcgagatgatagtcaatttacaagtaaacataccctnttctataggagactactatgatgacgttttatatgatataatccttatggatgcagggaacattttgttgggtagaccatggcaatttaacaagaaagacatccacaatggtctcaccaatgaaataaccctcacccatgtaagcaaaaagctcaaacttgttcccttgacaccttcacaagtggttggggatcaagtacaaataaaactcaaatgggatgaggaaaataataaaaaaaagaaaagaagaacaacctttaatggttaatgaggagtgtaaggaggtaggtgtctcctccaataggttagctaagaagaaaagtcattttgctataaagacaaacattaaagacacttcccttcttagacaacctccacatattc

SEQ ID NO: 14565 - DNA, 377 bp, Glycine max
  unsure (1)..(377): unsure at all n locations
ctgcagctcaagattgattccatttctttgtacaaaattcatcttcctggtgtccncttaaggtaatggagaattgataggtagcttgtaagtggacttctcttggacagtgcataaattggctcaccaaactaacaacaaaagtaatattaagccttgtgtgagacaagtcaatcaagtttccaactagacgttgatgcatctccttatccacttatgcattgtcatcttaattagccaatttaatgtttgaatccatgagagtacttagagaagctatcatacatgtctccttcagcagatttgtgacatatttntggccggaatatgaaaatacccttcttggagtgagacacttcaattcccaaaaaatattt

SEQ ID NO: 14566 - DNA, 424 bp, Glycine max
  unsure (1)..(424): unsure at all n locations
tatacttcatatccaatgcttgatcactntntatcttttacttaaatcactcatccttaagttattcctttattagcttgaaaaacccatatatttctagttaaaatggtctgaacatgaaaattctcccatcacggatgttggcttacatattttaggcaccaagaaagtcctcaaaatgtcatgatattcatgcaatgaattaaagttgcccagataagtagctcttaagtcttaagtaggttgttgttggtgtttttcctattttgggctagtcagttgatacaagaataggatagtgtaatatagttcctgaaaattatgatggtcaattataatcaatcttntttctgcctaggatttggtacaatttttattttaataatttttatattagaaaggtgtaatagcaatgatttaccca

SEQ ID NO: 14567 - DNA, 336 bp, Glycine max
caacaagtttcttcacaaataactatcttgaagcagaagactagcatgactacccatcatatctcccaaaaccccatacgcccgaaaatctaaggagaaagaagtccacccaaacctgaaattttgaagtcccactcgtagccacgcacttcacgactccaaaaatgctctcctttcgcgatttgaagcaaaaatgatggccaaaggttggagctttgttgggaaactatggtataggaagataataagatgaacgctgcgtgagagagagggagagcttctgatattttctgctttggctgagtgaagaaagagaatagctttttggtattaaat

SEQ ID NO: 14568 - DNA, 463 bp, Glycine max
  unsure (1)..(463): unsure at all n locations
tgtgacatgaggccattaagtgcctctgccacaatgttatatagaagaggtgatagatggtctccttgccttagtcctttctgaggtaggaactcagctgagggactaccattcaccanaaatgaaacagatgctgattntagacacccctcaatccattgaattcatttgctgcaaaagcccatcctacccatcatataagtgagaaactcccaagacacaaaatcatatgccttttcataatcaaccttgaagacaatgcaaggcttttggcatcttttggcctcttcaactacctcatttgtagtcaccacgctgtgtagcatatgtcttccttctataaatgctgattgcctctcatgaataataaaaggcatgaccttcttcaatctattggccaatattttagccactatcttgtatgtgcatcctatcaatgatatanngttgaagtcattcaaca

SEQ ID NO: 14569 - DNA, 453 bp, Glycine max
  unsure (1)..(453): unsure at all n locations
atgtaaatgatcaaacttattcttgtattgagatattatntgcttcattgttattctnccacctcatcatttacactaaaaacatccttatatcacatgttttcacataaaaagtaaaaattaaatactatcaagatacatgatgaaaccaatttgaagatataactagtattcaaatatataaataaattgaatataattgatctaattatatactaacattcatatgtcaccacatttcatctacattgtctttactaatatcactccaaccattaacttgtaaaggagctttctggcaaatacatacttgtgtctcatacttgaaatattttacactattaggtagagacttcttcactagtttctcaagagagtggtgtatggatgaatgattatttgctcttttagaatcaatatcaatgaatttaccatctatcagttacaacggat

SEQ ID NO: 14570 - DNA, 464 bp, Glycine max
cacttgaaagcacatttgagacattctatttgagcttgttctgaactcgttagaacacatactatgttatgctttttgtatatgtattgtttgcagatatgtttgcttgcatagctttcctgcatatgatgttatgctttgagagtgttctctaatgtagatggaaagacacaaaatgttcttcttataggaataatataatgatatggcatgggaaacttgtattccaaacattctagtgtgagcttgttgtagcatgttatgcctgttactatttttttatttctttgaacctttaaatggccaaaatagcttttgatgtcttcatgaaagttgtaggtaattctttccttgaaatccaagcactcattttatgtcatttggaccaatacaacataagcaatcttcaaagcattgtagttgtgttatattgtgaggaagaaatgacatctttatcttgatca

SEQ ID NO: 14571 - DNA, 445 bp, Glycine max
  unsure (1)..(445): unsure at all n locations
gtgagccacaatcctgactctttatataccttaccctctaaagcaaaaaaaggaaagaaggaaaggaaatttcccatcaaagagaaagcaaaaaaggaaggaaaggaaattcccaatcaaagagaaagcaaaaaaggaaggaaaggaaattcccaatcaaagagtgggagaaagagaaaaaaagaaacgaaaggaaattcccaatcaaagagtgggagaaagaaaaaagaaaagaaagaaaattcctaaccaaagaatgggagaaagtaaaaaagaaggaaaccatgacctaaaagtggtcttctccctttgattaccaaccaaaatcctgtgcgctagcgactntntgccccacactaaacaaaaacagaaaaggaaaaaagccaaccaaaaatcaaaagccaaaaacacacaaaagcaaaaaataaaccatcaaaagaaccca

SEQ ID NO: 14572 - DNA, 115 bp, Glycine max
tgctactcttgtggccattcctgcgaaggctattcatgtggatagatagtgttatgtgggacattactcttatatcggaaatggcatatatactccggccatgaatacaaacgtc

SEQ ID NO: 14573 - DNA, 269 bp, Glycine max
  unsure (1)..(269): unsure at all n locations
tgagaatggaggatntccttgatggtcctctctnatgttatcttgtaacacagctccaaactcaaaaatggaggacacatgaatgacaacgcaattcattcatggggctccgaaaaagggtaagaatggaggattttcttgagggtcttctcttatgcaatcatggaacacatctccaaactcaaaaatggaggacacatgaatgacaacgcacttcatgcattgggctccgaaaaagggtgagaatggaagatcgcctgatggtcctt

SEQ ID NO: 14574 - DNA, 325 bp, Glycine max
  unsure (1)..(325): unsure at all n locations
atgctctgtataacatatatagganccaaaatttctgtgattctgagatcacataacgtaagtaaatttctgggactgtgtgagtgttcgactttttcaagcatcactattgatcatgaatagcaagtgcaacacaagacatgtacctttatgctgtgcctgttataacataaccagctcaaataacatataaggcttcttctctgatcaagagctgtagcttattaaggcctatatatctctaaatttgtgcggacattatcctaatcattcctaatttcacatatatttatagcatatttgagttaacataaaaacatgaatt

SEQ ID NO: 14575 - DNA, 364 bp, Glycine max
ctgactttaatgcatggctggtcatatgtaataggttgcacttcttgctgcatgtgtacgtatgggtttgaaggttctatctgccacggaggctggtgccacagctgatccaacaagaatacgcattgccgatctaagagagtcaactaatgatccattgtctcgagctgtaatgtcccttatgcatgccgataaacatttgtatcctctagagcttagaccatatataataatctcgtgtggcacttcaacagctaatggcactccctcccgtagatgcacatccatatatactaatcatgctaataacatactgatgtattgctataccacacgacgggctcattacaatatacagacgtat

SEQ ID NO: 14576 - DNA, 180 bp, Glycine max
agctttgatcgaatttaaacgacaataactttttactcggatgtgtgagagaggcccgttgtatatcgagaccgtcgaatttgaatgttgaagctctgagccaactcatactacaataacgctttactcggatgatggattgagtcccgtcatataccgagaagctcgatattgtatgtt

SEQ ID NO: 14577 - DNA, 432 bp, Glycine max
taaatattcaatttcgagcctctccatatattacggtttctcaatcaaacatccgagaaaaacgttattgtcgtatgaatttgctcagaggttcaacattcaatttcgagcgtctctatatattacgggactcaatcagacatccgagtaaaacgttattgtcgtttgaattggctcagaggttcaacattcaatttcgagcgtctcgatatattacgggactcaatcagacatccgagtaaaaagttattgtcgtttgaattggctctgagcttcaacattcaatttcgagcgtctcgatatatgacgggactcaatcagacatccgagtaaaaagttattgtcgtttgaattggctcagaggttcaacattcaatttcgagcgtctcgatatattacgggactcaatcacacatccgagtaaaaagttat

SEQ ID NO: 14578 - DNA, 429 bp, Glycine max
  unsure (1)..(429): unsure at all n locations
agcttcaacattcaacttcgagcgtctcgncttattatacgactcaattagacatccgagtaaaaagttattgtcgtttgaatatgctcagagcttcaacattcaatttcgggcgtctcgatatatgacgggactcaatcggacatccgagtacaacgatattatcgtcttaattggctcagagcttctacattcaattttgagcgtctcgatatgttacgggactcaatcaggcatccgagtaaaaagttactgtcgcttgaattggctgagagcttcacattcaatttcgagcgtctcgatatggtacgggactcaatcagacatccgagtaanaagttattgccgnttgagttggctcagagcttcaacattcatttcaagcgtcttgatatttgacggactcaatcaggcatccgggcaaaaagt

SEQ ID NO: 14579 - DNA, 456 bp, Glycine max
  unsure (1)..(456): unsure at all n locations
tgatgtcattcaaaacacactatgtagacctaaatgtttactaaacatgcattgccaactcaaacgacaataactttgtactcggatgtctgattgagtcccgtcatatatcgagacgcttgaaattgaatgtcgaagctctgagccaactcaaacgacaataactttttactcggatgtctgattgactcccgtaacatatcgagacgctcgaaattgaatgttgaagctctcagccaattcaaacgacaataactttttacacggatgcctgattgagtcccgtcatatatcgagacgctcgaaattgaatgtagaagctctgagccaactcanacgacaataactntntactcggatgtctgattgagtcccgtcatatatcgagacgctcgaaatngaatgtcgaagctctgagccaactcaaacgacaataactttttactcggatgtctg

SEQ ID NO: 14580 - DNA, 505 bp, Glycine max
  unsure (1)..(505): unsure at all n locations
tgaaactttgacctctcgacccggatccttaagcaccgcagctgcttcttgcttgagcacattatttcttttgtgaccatggcatgagtggcatataattcagcgcttcaatatagtgtgtcagtagacaatgtgttgctacacaatactatgtctaccgctcgcgtgtctcgtgtcgttcgctccatatatgaagagtagtttgattacgtgtacctcatactgtctttgctatagagtgtttagttcaggaactttctctacgcaaaaagaagtcgtctgtgaagaaacgtagggcgatgggtgccttattcatagctcttcgccctgtgccaagagacataatcactaaccgcctggattctgatgtgactcgtttctcccttggccaaagagcgatggactaacccacgtaattgcgagggtatgtctgtgccctggtaaagattcaatgactaccggccgagagtcttttgattctgcctcgccttaagagaaatttacn

SEQ ID NO: 14581 - DNA, 412 bp, Glycine max
  unsure (1)..(412): unsure at all n locations
tgctgatttagatttcaccggcgaaaggatcgaagttggtctaagaagaggaaaanttgattatcctgctttgatggatgggaagcttggggcaaatggagagagtaataaggagggaggaacccatgttgtgaccattgttcctacatggccaaatttcccaccagctcaacaatgtcattactcagccaatatcggctcttcttattacccaccaccctatcagccaagaatacccaatcaaccacaaaggccacccctaaatcagccacaaggcctgcctgccgcacatacaataccgaacaccacccttaacacaaaccaaaacactaactagggaaggaatnttccagcaaaaaagtttgacttgctcccatatctactcgataatgcaatggtagccataacccca

SEQ ID NO: 14582 - DNA, 401 bp, Glycine max
  unsure (1)..(401): unsure at all n locations
agcttccttntagtgcgtcacgtttaanactgatctcgatggtggngcgagcttttgatggtactcggcgggaagtgatggaggaaatcgacaatcccattcagataggcccccacacttgcaatgtggtgtttcaagtaatggatataaatcccgcctatagctgcctcttgggaagaccttggattcatgccctgggagtggtcccttcaacgcttcatcagaaattgaagttcgcagtgggtggacttttagtgatagtgtcgggtgaagaggatatgttagtgagctgcccctcctccgccccatacgtagaagcggcggaagaataattggatacgactntccaatccttcgaagtggtgagctgcgcctctgtggaaccaagtccgttgctacct

SEQ ID NO: 14583 - DNA, 394 bp, Glycine max
  unsure (1)..(394): unsure at all n locations
cttgatggtgcgtagtttatcatctnttcatattagattaccgataatgtgtctaccatcacgattatcgtctccctttttgcacatgttctgtagttgcatcctatccggaaccatatcagaatagtactgatactgcttaatgaaggcaaccattaggtccttccaagtatggactctggaaggttcctaagtgagtatatcacgcgacagttgtcctattaagactttctcatgaaaaatgtatcagcagtttctcatctttagcgtatgccctcatctaccgacaatacatatttagatggttctgggagcaagtagtccccttgaacttgtcaaaggctagctcctagaacgagggaagagtgatgatattgggtctacgaacaattct

SEQ ID NO: 14584 - DNA, 389 bp, Glycine max
  unsure (1)..(389): unsure at all n locations
ccataatggaagaacaccatcttatgaatagatctaaatcttatangcgtaataatactgaattaccattcatagaaacagggtaaagtaaaggtaggcaagagaaccaatgatgctagtaccttactatatcattttctttcttgacgaatattcgaatgttatgctcgtttaattcataacaaacacatctagttttgactaatagactatcttttttttttaagggaatagatattccacacttcttgaattctctagattacgattatggtcttctcgtcaacgtactggattcgaaaacatnctataataacacttntctcataggtgtttaattgtctttttgctaaacaattatttttcaatctgagagatagtgactggga

SEQ ID NO: 14585 - DNA, 418 bp, Glycine max
agcttagaacaatatacttgtccttcatttatctgtctttggacttgccggccacgatcaacaaagtactttcgacacctactgtatgttgatttgaccaacgttattatgggtatgttgcgacaatccttcaaaaccttatcgatacattctgagagagttggtgtcatgtgaccatatcgacgtccttctctatcataagccatcatccatttttcctttgaaatgcgatcaatccatgttgctatggctggactcagttgacgaaattgttctaagtgttgataaaaaaaaaatgtgcttgcacggagtgaaacctacataaaatttggtaggaaccaacaatttaatgatatatgatacttaaattaccggaccatcaaaatgaaatcttcccatttcttcacattcttttgtt

SEQ ID NO: 14586 - DNA, 414 bp, Glycine max
gctcttgaattcttagaaacccatgagttgttggcaacctatccccattacaagcttagaaagtccttcggattcattttatgtgttcattgttgtatagatgagatgaaatgcaaaggttaggatttgtgttagttgtttatgatggaatgagcctaaacacttgagcttgagtgaaacaatgactatgaggctttgattgaggcttctttccttgatttctgccattcttactagcttatttcaattgtgactctagtgtgtatgttcctatctttgaaatgctgcatgtttgtgaaaagcaattgattgaagcattccatgatattcagttcatatcgttgaatttttctgtgaagcaaacaccatttttgagtgaccactgagaattgtcacttgaggacaagtgaactg

SEQ ID NO: 14587 - DNA, 284 bp, Glycine max
gcagctggcattcatatcttgatagggtgttcctatgttctcaagactgttactaatacttttgctgcccaagtttcatggccctgcaggtgaatatcctcataaacatcttaaagagttccattttgtttgttccaccatgaagccccctgaagtccagaagatcatatctatctagaagctcttcctccttctctggagggagtggcaaaagattggctgacaaccttgctaccgatccatttcaactggatgacctgtctcgacaaattttccctgatcta

SEQ ID NO: 14588 - DNA, 453 bp, Glycine max
  unsure (1)..(453): unsure at all n locations
agaggaagaagcatgatggaaatctgctggtcattgttgaaaatntcatgcacgcatccaagaaatatganaaggtcaggttattagttaaaacttactagttaattcattatacttgattataatgaatatttttaaagaaagatgtccttctgaatgcaacttaaataggtgcataacagaataaacttcttcattgatattgtaggctgtaaaatacattgagtttgatcactcattcagtgaagatgagaagtgtcgtgctaataccttacatttatcctgtaatttgaacaatgctgcctgtaaacttaaattgngggagtacattgaagcttcaagactatgcacaaaggtactctctgatcctaatttaagtanttttctctttctccctgtctctctatcacctgatgagacaagaaaacattgcataaggtagtgcatgttctt

SEQ ID NO: 14589 - DNA, 328 bp, Glycine max
  unsure (1)..(328): unsure at all n locations
cacgcgtgcaagctgtacttattattntagtatatggtatttatttatagtggtgatcacattatttattatatttatcactcttttgttacttgtttgttgtcttcttatctccctcgtttatatctcaatcaccccgagacaaattaaacgtttatcataactcttatctcatactacttctttaaaaaaaatcgaaaaaaaaaatgcacaatttgaaacttcaaaacagagtcaacgagtgggctccacgcggcgtgcacgcgtgcaacgacactagggtcccaattcggatccctttgtagctggaggctgctttgttttcatg

SEQ ID NO: 14590 - DNA, 474 bp, Glycine max
  unsure (1)..(474): unsure at all n locations
actcagcttaagttgccgactgcagaanattatgaaacagagactatgcagttttggtttttaacaggggaaggaaatcaaccacacatgctaatcacgtgacctcttagttaggtgtaatcaaaccagggtttgctttttacttaacctatttatttttattttctttctttttgaaatgatataaaaagtgacgaagtatttctttcttacttttttctctctatctatttaatatatccttttttgtttttatctttcatatttctttctaatccaaacaaaaatttaaagatgaaaattcccagtttttctatgagaaacaattattaggataaggtaataatatttatgattaaaacttattagagtcagcttaacgataaagagtgatttagaattttagatccatttgcacaaagtcagctcaaatcttggtgatgcaattgagcataanaaaatattattaatatg

SEQ ID NO: 14591 - DNA, 262 bp, Glycine max
tgatttctgttactaattttgctagctggtaatggtgaatcatagagttgctccctcatctgcccttcgtgtgatctgtttaccttacgactcaggcaattgctatcattaccctttttcaatatgcaaaattagcaacatgcaaacatatctaatctagcaaatgccaccatcaatagccaggctatggtccataaccaacgaaatgcctgatgtgccatatctttcatcttctagatttattgaagcttctccagattta

SEQ ID NO: 14592 - DNA, 462 bp, Glycine max
  unsure (1)..(462): unsure at all n locations
tctggaaggagtcaatgcaggagagacaacaggtgctgtcaccacattgttntgctaattaaattaattaatgcacaatagcattaacaagaaatcatagtaatcagatgcagatgttaaacactccagaatgaaagtttcaggagaacatttatatactgaaaaaaaatcaataatttttttgaagagtttcttggtaaaagatatttcattgttaagctacatgctgatagttgtaactacactaaatttattttatgactacatattcttttgaatgtttagtagcaactntgtggatttagctccttgagagtgaggaagtaaaggagaatccacccttgatttgaattgaagtatcccataatttaatccactttaaaattgaggttgaatgcaccctttntttaacctttggagatccaaatcccaatggtatcatgattaattctattgaatatc

SEQ ID NO: 14593 - DNA, 167 bp, Glycine max
  unsure (1)..(167): unsure at all n locations
tacaagctnttttatggtttgagctaccttgctatctaagaagactctgtaaaaagtttgagcttgacctttatagtaaacaagccgagccgagccttacataggccgagccgaagaccctcgacaagctgctcggctcatttccacccctagtaatatgcaagggt

SEQ ID NO: 14594 - DNA, 211 bp, Glycine max
  unsure (1)..(211): unsure at all n locations
agctntattatgatgcatgtgatactgtttttgcgtgtggcggctgttaaagataacaatatagttgatacactttcattaagcatactgacgtctcattgagtgtagcatccccgccaacaaagattccttactatcatcgtacgaagtatagatatgagtctcacactgatgggcttaagcattatagacgatggttgacgtgttacta

SEQ ID NO: 14595 - DNA, 456 bp, Glycine max
  unsure (1)..(456): unsure at all n locations
ggacctataaatctaagctagcaacctcccaaaccctgatgaggatgatgcttagttgtgttttggtgcctgtntttgttgtttggctttcattgttgttttgtcttctgtttgatgctaatcttgttgttctagttgtcatcttttttgtgaaagttgttttatttttttaatgatggttgtaatgtttaactaatgaatggattatttattgcttttacccttggttactccttatgttgtttgttttttactctgtgttgtttgtgactttttggccttgttatgccaaaagggggagaaaaaattacaccattgtcattacattggcacatacatacattcttattcattcgatcactatatttatgatgatgatatgacatgattgagacttctcttggtcatagtgttcattaatcttaaggtgatgtctcaagaaaagtctctactctc

SEQ ID NO: 14596 - DNA, 320 bp, Glycine max
  unsure (1)..(320): unsure at all n locations
agcttgtaccctatgccccacagggaatcatcatcgcattaagtgtcaaccatagggggagaaaagaggtggaagccgatgccaacacagtggagttaaagaaaaaggaggcggcatcatatgagcactcatggtcaccacaccgacactcagcaaggatgtagcgactgtgaacgatagagacacaatatgactagccaaagcagctggcgcatcaactctagtaataggagtggcctcctgaacaagcacaacaagaggaggtggaggagtangagtaacatcaacaacatcagcgataggcaaagcctcaacggatc

SEQ ID NO: 14597 - DNA, 454 bp, Glycine max
  unsure (1)..(454): unsure at all n locations
taggttctaggatagcattcattcatagataaacctttattntttcattcattcacatcccatacttgccttttagttaggcactcagctntatttcattgttttgcagcatacacacttattaatttcatttgtacttactgttttttttaacacaatatacatagagacattatgtgtatgtacataaataatgtctgtatgctatttactttgaccatttccattcttacccagtgcctcccccaaatttggaacaaatttaccttgataattctcccccaaatttggcacaaatttgctttgaaccatgcttcctgtggatgatgctctcctacaacctaagtcaaggtagcaggagataacactgtataggctcaaggttcaatcaatcaataattcattcagctcaaactgggtacaanggataattcattcaagcacatggtcagct

SEQ ID NO: 14598 - DNA, 455 bp, Glycine max
  unsure (1)..(455): unsure at all n locations
ctaagctctattaagctgaaccatttatcataacacatttgagtttattcagaaaattagagtttatctcttttatcttagtgagagtgattctcctaaattcttgagtgattcaagaacaccctggctgtatcaaaggactttcacaacctttgtgtgttgccctcactggaaagagtgattctttccttcctatcatctccacccttgttctttcaaaccacaattccagaaaatccacctctgcccaaaattatctcgtgaccaaaactcccatttcacacactcaaattaagtgattcttgagcctaaattgaatttcaaaacgagacctttcacctcgttntggaatcacctcatttggagccctgtagcttccgttattgtcatttctatatttctgtccagccaccacttaacctacgttttaccatcccattcatccattttatgtc

SEQ ID NO: 14599 - DNA, 408 bp, Glycine max
  unsure (1)..(408): unsure at all n locations
cctcttcacgtctggagtatgtatgtagcatatagatccaaagacccttaggtgctntgctgatggcttcttcccgttccaagcttcaattggagtctgtcttttatagactcagttggacatctgttgagtatgtaaacagtagtgtagactgcttcagcccaaaatgagttaagtagtccctcttccttgagcatcgatctagccatctctataactgtgggattctttctcttggacactccactttggtgaggagaatatgcgactgtaagttgtcgctcaatgccttcatcctctcaaaaatcttcaaactcgcgagaggtgactctntgccgcaatcacttcttagaactttatccatcttccactttgatttcagcaatggccttgaacttgtgaatactc

SEQ ID NO: 14600 - DNA, 453 bp, Glycine max
  unsure (1)..(453): unsure at all n locations
tataagaacacaaatgcctatatcatttgcaaatatgtatgtgaattacgaagcatcaacaagaatcaagccaaggctattgtgcaagcaatcaatggggcaaaacacaccaaaagattatgatgatggatggctcaaattctcacaaaggtgaacttatcactttcaaattgagctttcaaaactatcatgacatgtataggaaaaacaaggatttcaaatcacaaaatgtcaagagacttttattttcataacaagtacccgtttcttgaacatatcctataattcaaagaaaaatatgcaaagttgtacatgcaaatagaattgacctaaaatattaaactagagacccaacaaaactaacaaaactaacagatntaacacaaacaaaactaacaaaactagcaaaactaaaaccaaagaatactcccccgcatacttaagcaacacatt

SEQ ID NO: 14601 - DNA, 399 bp, Glycine max
attgatttcatgttgccatttccttcatctgtaagaaatgaataaactgtggtagctggagattacgtgtctaaatgggtggaagctatggccacttcaagaaatgatgctaatattgtggttaagatcatcaagaagaatatttttgctcaattaggggtacctcgaatcttaatcagtgatgctggttcacattattgtaatactcaacttcaaaaggtgttgagtcaatatcatgttaatcataaaggggcatccccctaccaccctcatacttatgtgcaagtcgaagtatcaacccaaattaaaaaaatctatagaaacagtgcgtcaccaaaaaaattgggcaccaattggaaatcactgtgggctacaaactgatacaaactcaattgttgg

SEQ ID NO: 14602 - DNA, 452 bp, Glycine max
tcaagaaaaggccaaactctgttccaaaatctgattttatgcttaaataggtggctttgtttgtgctcgtgtgcttagtgcaattctgaatcgcttagtgcgcattagtgaatttcgacatagcgtggcttttcacactcggcgaatggactgaagcggtgcgcttagcaggatggccctttgctcagcgaacatgcacaactcatccttcttccagattcttcctcgcacttagccaaggaatgttgtgctcagtggatggctcgctaagccagcagattggcttagcgagagggtgagaatcaacacttcacaaactcgccaaattaacctaaaattgatacaatttacacaagttttatacacaaaagttagtcgtattcatcgactaacaacggtgaagcctcatctagaagtttcctcttttagtgatgcattgtcgctgatagtcc

SEQ ID NO: 14603 - DNA, 353 bp, Glycine max
agattagatcaagagaagatggtttccaatttttatactggctcactctcttattctagagaacctatccagtatctagctatctgattagatttcactatgctatgaattttacaagcaatctaggtcctaccccaaaaaagagaccaagatacccaacccctaagcctttgtgaataagagccttagagaaacctaccttatccccaatttaaaaaacttattctagcatggcttcagacattcatgcatatgctaacaatttacaccaaatacatagtctaagcaggactcaccctgatcatttgatgcaagacccttgcttgattgaatgattgccttcttgaactcaa

SEQ ID NO: 14604 - DNA, 451 bp, Glycine max
  unsure (1)..(451): unsure at all n locations
tgtaatcgattacacttatactgtaatcgattaccattacagagtgtcagaaaatattctcaacagtcacatctttgtatgtggttcttgaatggctatcaaaggcctatatatatgtgacttgagacacgaatttactaaaagtttttcagaacaaaaaggtcttatcttcttataaagcaaaatcgttttatcctcttacaaattccttggccaaattacttgtgattcaataaggaattatttgagtgctcaaattgttcaatctatctctttcaagagagatttcttcttttcttcttcttcattttgaaaagggattaagagaccgagggtctcttgttgtgaaagaattctaaacacaaaggaaggcgtgtcctttgtgtgttagaacttgttaaaggaatntacaagatagtggaactctcaagcgggttgcttgtggactgga

SEQ ID NO: 14605 - DNA, 256 bp, Glycine max
atgcaagcttgcttctacacttattagagcattgtgttctgacgtcctttagcacaaagttcctttaaataattcacatagtcatctgctcccataaatacaaagtttgagatcatcacatgatccaaacacatacaacacacggtgagtgagttatcacatgccaaaatgatatagagaaataagacaacatgtagatatgcatatcatataaacgaaattacaacttcttaaacatgatagacaaatggcctca

SEQ ID NO: 14606 - DNA, 343 bp, Glycine max
  unsure (1)..(343): unsure at all n locations
tccttatggctagccttcggacttttctccccgtgccactctggattatntaagccaagcccctacttctgaggggcaactcccgccttatgacgatctatcccggctagacgatgaggaaggagatacccatctcggccccctgctccacctgaaagatccgtccccacatgaactaccccaaccgaacatagtctgccatatcccggcctcacccacacccgtaaaagaatctgttcccttcgcggaagataagggaaagatagaggcgcttgaagagaggttaagagcagtcgtgggccttgcaattacccattcttagatttagcggatttattgtctc

SEQ ID NO: 14607 - DNA, 468 bp, Glycine max
  unsure (1)..(468): unsure at all n locations
cttgcttgtggggcttctatggagactggatctntgagcttcaatgaggtccttttttggtgattttccaccatggagatgtagcggaagacaaagtagaagaggtgagaggaggcgccatccactagggaataagccatggaagaaggagcttcaccaccaagatgagccttggataagatgcttggaaggatgcttcaatggaagaaaagaaagagggagagaaagagagaggggggagcacgaaattgaaggaataaaagagggagagaagtggaactctgaagtatgtctcacaagactctcattcatcaaagttacaacaagtgttacacatgtttctatttatagactaggtagcttccttgagaagctttcttgagaaaacttccttgagaagcttctntgagaaaacttccttgagaagctagagcttagctacacacaccactctaataactaagctca

SEQ ID NO: 14608 - DNA, 260 bp, Glycine max
gatatctctctctctatggcagaatgaccctctttattttttttttaacagccttacccatttacttgctgactgttttcagaatccatcaactagtggtatcacaagacattctctattcagacaaacattctcttgacaggtgtcagtgatgcagcacaaatcccttgggtcaactagtactactaaaaaaaaagctattacatcgcccaattaacatccgttatagctaaatccgatgtcagcaaaagcgtagtggc

SEQ ID NO: 14609 - DNA, 460 bp, Glycine max
  unsure (1)..(460): unsure at all n locations
tgaggaagtgtggaagggtgagactntcctactttattcgttgaccacagagtgtgacctggagatatgtcgcgggggtcaggagaccttgtggacgtcaggtggggtgctattgcccaaaaccaagcttgaccaatcccgacccaacccgggcatagtcagtcagtgagaacctgtgatgtacctaaacaggcgagctcctggcagtcaaccgataaaagaacaaagaccacaaagcaaggaggcttgtgtggtggctggccagctgtgaatcttgagtgatatatgggatatggccactggtaatcgattaccaagggtgggtaatcgattacaaggcttaaaaacgagatcaggaagctaagagggcttctgctaatcgattacaaaggggcgtaattgattaccaggcttagaaatgggactggaatgttgaaggggcctctggtaatcgattacc

SEQ ID NO: 14610 - DNA, 392 bp, Glycine max
  unsure (1)..(392): unsure at all n locations
cgctgcagcttgaaggaaattctggtgaaatatggtgtttaaactatcaccttatattttatgagtgtntactagatgccaacatctcttaaagaccaactacaaaatataatgaattgttcttggtggggtttgaaatatgcatatgcaagaaaataatttggttgaattgggataaaatgtctatgaaaataagagtttggaggaatggaattccgcatcttgcatggatctaatcttgcaatgcttgagaagctagggtggcaatttaccacttattatgatgctaccatgacaaaacatttcaaagcaatatattgccccaatggcgatttcttggatgctcaacttgagcatagtccaagctatgtttgacataccatccatgcttt

SEQ ID NO: 14611 - DNA, 462 bp, Glycine max
  unsure (1)..(462): unsure at all n locations
gcaagttgtgtgcatcgtcaaggaaagaattattattggaagcttatttgcttgaagataaacttgatcataagcaatatgttgatttggatgttttggagtattgaaaatcaaatgaaaggaaatatcttgaactttctttgatggcacaagatgttttgagtatattgattactacagttgcattagaatcaacatttagcatcagtggacgtcctaacaagtatcaaagttctcttttgcctaaaaatgttgaagcattagtatgtttaaatgattggcttcatggaactccaagttagtatccaccaacttgttattcttaatcattttatttaatttgagcctcttttttagttntgttgtttaattattttttaactttcatttattttgtagttgcattgtatcttgatgatgaagaactntggaagactnttgagccttgtctatgtcttgaac

SEQ ID NO: 14612 - DNA, 345 bp, Glycine max
ctgacattcaccacagattctgccttcttctattttcagatagagaatgcctctaacagcacctttgtcaatgatattcttcatgcctcttaagagcagatgtccaaatctttgatgccatattttgacttcatcttctttggaggatggacatgtggatgagtaactggtttctagaggtgtccataagtaacagttgtcctttgatctgctggccttcattagaacttcattcttctcatttgtcaccaagcattctgactttgtgaaggttacattgaatccttcatcacacaactgactgatgctgatcaagtttgcagtcagtccctttaccagcagtac

SEQ ID NO: 14613 - DNA, 459 bp, Glycine max
  unsure (1)..(459): unsure at all n locations
gctatcactcttactggtgattgaaaaaagctnttaatgtttactcaagagcatgtattgtgccgataccgttaactggtgaacaggttcttgagcgggttgacgacattaatactgtatttggaaagacttcattattggtctgatctagatgtcagacattgtattgatgttatccatgtcaagaaaaatgattgtgatagtgtcatcgacacgcttcttaagatttaatgcaagtcaaaggatggtttgaataatcactaagatctagttgagatgggtatacgagaccagttacatccaaggtctgatggtaacaaaatatacttgcttctagcttgtcatactttgtctagaaaggaaaagataactttttgtcagtgtttgtgccatgtcaaagtgccacagggataatcttcaaatgttaacagccttgtgcagttgaaggatctcaagcta

SEQ ID NO: 14614 - DNA, 457 bp, Glycine max
tggttcgaggtacttacccgtttaagatcgaagaactatgaagaacgaatgaagaacgtcgaagaacggtcgaaaccttcgcgaaattccttacggaaacgttacggaaacgttttggaagcgcctcggcttagattttcttcacggaaacaattcttccaagcaaattcgaaaaagagagaagtgtctaaggggctgaaccctttttcacttcacttctgcccctatttatagaaaattgggggagaagcttgccacccagctcgcccaacatcacaacaacttttgaatcaaaggatcttgcttctatgacacatgctaagctatttgggaaattaagggaatacgaaatggactagataataatggttgaggaagaagaaatagacaaacagattaagggcttggccttgaagaccaccattctgttaagcgatgatagtaaagatgacaatgc

SEQ ID NO: 14615 - DNA, 460 bp, Glycine max
  unsure (1)..(460): unsure at all n locations
ntgaaggcattatctntatggattctaaattgaggtgtttattgaccataagagccttagatacctattttattagagagagcttaacatgaggcaggggagatggttagagttccttaaggattacatgtcttcgctggtgatcgcttagagcccctcttccatcaataggtactcccaacgcgtcgaccacacgccctagcatagccttttcccgcaagaacatccacagatcttgagcttaactatcacccaagtaaaaccaatgtagtggctgatgccttaagtaggaaatgtggaagcaaagcttcatgatgaatcaacaatgattcanaggtgttttgatgataacaatgatgacaacaaaagatgatgacaaaagtgatgaacaaaaagctcaagagaatcaaagaacatccatctcaagaaaatatagaacaagtcanagagttcaagaatn

SEQ ID NO: 14616 - DNA, 162 bp, Glycine max
agcttcgtgctcagaaggaaacaacaccaatttgtagccttccataatgtcaaccaagaacagaaaacacaattgatgctaaaggcggaaatgtaaatgaaactggagatagatatgataatgaaactaaagcagatacgttaatgatactcatggcagaag

SEQ ID NO: 14617 - DNA, 458 bp, Glycine max
  unsure (1)..(458): unsure at all n locations
tctntgaganaacttccttgttatagctagagcttagctacacacacccctctcataactaagctcacctccttgagaagcttctttaagaagattcctaaagaagctagagcttagctacacatacctctctaatagctaagctcacctccttgagatgagaagctagagcttagctacacacccctataatagctaagctcacccccatgacaaaaaaaacatgaaaatacaaaaaaaagtccttactacaaagactactcaaaatgccccgaaatacaaggctaaaaccctatactattagaatggccaaaatacaaggcccaaacaaagaanaaacctattctaatatttacaaagataagcgggtcatgcttagcccatgggctcgaaatctaccctaaggctcatgagaaccttagggccttcccttggatctctagcccaatctacttgga

SEQ ID NO: 14618 - DNA, 273 bp, Glycine max
  unsure (1)..(273): unsure at all n locations
agctncttatgaaagtgatgaggtacaagtcttaaaagcttagcttganagagcccgggtagtcaaatagaatttcaagtccatatccatcatagtctgaagagagtatgatgaactaagggacgtcagtatggccaccgatgaagccttgtaatgatataccataaaggcccgagatgaatatctcgacctatacaatgtttgaagggctgtataaagaatcatcacgggtcaaaggcatgatctggaaagacgagctataggcttgcctta

SEQ ID NO: 14619 - DNA, 437 bp, Glycine max
  unsure (1)..(437): unsure at all n locations
ntannaattgaattaaaacgttcataaactgctggtatatgattaccatatatgtgtaatcgattacacagggcaaattttgaattcaaattttaatagctgttgtaaatcagttttggccactggtaatcgattaccagagagtaaatttcttgtaaaagactttttaatttaattttcttggccaaaccttttgctacttcaattggaattcccttcctatttaatataccctttctaagactctatagactgtcttgatcatctatcttgaatatctttaattgctttgtcttgaataaagcttttagacgcatgtgatctttgggcatcatcaaaacattggcttgatcctttgtctacaccttgtacaagaattaagctctgctaccacttgttgaacaagtggccttaataacttaagagggggggggggg

SEQ ID NO: 14620 - DNA, 199 bp, Glycine max
agctttgtttgtttggtcttcaccggcgaattgatcgatttgtatctaaaaagatgcaaatctgatcatctggctttgatatatgcaaaataaacataaattggtgccagtaaagaagatgagaaggaggattctacctagtttcccaccaacccaacattgttattatcttagcaatatccaaccttcttcttaccca

SEQ ID NO: 14621 - DNA, 448 bp, Glycine max
  unsure (1)..(448): unsure at all n locations
ntagtgactatgtgtaaccacttattttaaattgagttttctcattgatatgttctacagttggtttcgcatgaatttctaattgaacatatgattcatgggtatgatcaaggcatgctttctttctttacattttaagccactggccaaacagctatcccaatgtatactattttatcatttgcaagccctttgagccaaacacttgatattttattggaacactaacctaggataaaagtttccaaccttaccttatgttaggagagcaagggtgtttttgatggggatttctattatttggtggctaatgtgatgtgaatacgttgtttttatgggtattaaaggaaattaaatatttatcagaaaggaaaagaaataaaatagaaaataaaaacaaaaaaggaaaaataagttcatgtacagagttgttgtaaatatcttaata

SEQ ID NO: 14622 - DNA, 449 bp, Glycine max
  unsure (1)..(449): unsure at all n locations
tgttgngtgtatatgtaggacctgatgtcctattatttatgatggttagatattaactattaagttaccaggttatttattattcgtgacgtataggagcttttatgacttaagtgactgctctaaagggtgtcttcaagagatacacaatttatgagtatttgatgttatccttttgagcattctaaatcttggtggagatcttatattggtttcatatgtgttttagcctttggaaactactacaattgtttttcatgttcaaatctttcgtccaatttgttcttcccaaaagtagttcgattttgaatcacttctcaatcctaatcaattgtgccagtcattagaaatagttgttaaccgttagaaataattatataagttattntatctattagccataanaaaacaattacttctaatcattaatcaatttagcactcaacaaa

SEQ ID NO: 14623 - DNA, 389 bp, Glycine max
tctagcttaccaaataaacttatatattgactatttatcttaccaaaaccacttattcattgactatggtgttacttaggcgcgacttaccaattggactttaagatatgaggggaatatgcattcttgtcccttaatgtgtaagttcgctgacaaatacgtccctgtaagatgaatataccaaatttacgcctcgaaagtattgaaagtgcagcacagttatccagacattaataatgaattgtcctcgagacataagctatggaaatatggatttaaaataccgcttaacacaacttaagagttgaactcttatacttcaattatcgatctatgcatccatctatcaaattgagaatcaatttttatatgactgtatagctacttat

SEQ ID NO: 14624 - DNA, 443 bp, Glycine max
tgtaacacgtaagtgtcaatagcgtcataatgtgcattatttgggcctctttaatctttataggttcgagtgctagtttcctcgggtaacctaaactaggtgttaattaatattatgatgtaccaaggcttatttatagaatatagatcatcaatgaattgtgtatcatgtttataaatcgttgaagtttgattgttatctatatagaaaagttctaattattattaattatctgacggcaaaagtccatttaaaaatgcaataatgaaaagaaaaatattcactagtgaatcttttagcttgcaaaagatgtgacaggcggcagttgcaacgttgacatgggagcaaccatcaagggggggtagcattttgaagggacgttatagtggtagagatgagtttgtttgtgggcaaaaaaccttgtcagtgtggtgtatatagac

SEQ ID NO: 14625 - DNA, 337 bp, Glycine max
  unsure (1)..(337): unsure at all n locations
tgcaagctntctcccaagtcctaaatgacatgncattgctgtattaactcactttatcctccatttaccatagaagtcagactgaacctttcaaccctcagagcctcactctttttccactcataacaccacattctcactttccaaccctaggattactctacctttcatctctaacaaggtttccacaagcaatttgagcatacagacatcgcaaacatcatcacaaaaaccctaaagctgaatgggtatgtctaactcatccaaacatggcagtatcgacaagctttcacatgttcctcacaaaaatgatatgaagcaaaactagcagactccc

SEQ ID NO: 14626 - DNA, 452 bp, Glycine max
  unsure (1)..(452): unsure at all n locations
ggagtagaaacatgggaccaactcattntattttataaaggaagtcatttctagtaaggtctgagagaccatacaagtttcctaacgatttctaattatgtgggccattaagtctatcatatgctgacaatagccgagaagcccatgaatctcttcgggggcggagtaggtgtctgccatcgccttggccttggctaacaatcggggaagttcttgactcccgttcaaggtaagggcaaaccgatccatccacatggttgcctcttggtgtaaagagtcgatcacccttcctctagcctctttttccgcgtatacttgggcatactcatccgcgattctatgctcgtgggccgtggctagacctaactcttcttggtacttggcgatgatagctagcatgttggtctccgtctcgcataaacgctgagacaagcttcntttggaccttgaac

SEQ ID NO: 14627 - DNA, 337 bp, Glycine max
ttatgtgctcttcattgctgtttttgttgaataatccctaaaattctttcttgataaaactctattgatgtagctctcatttcattttttgggactctccgaattgcttgtctcttggcctgcttattggtgagttgccatatagggaattgtaaaggatgattgtggacatcccttgataatattgagtcaagaagttaggggaaaaccaccttaagagcttttggactaagaaacacttcaaattgagtgaatcacctatgagagaacactctccataaattcacgaccttcttttagtggttttaatagagaattacttaccttcattgtttca

SEQ ID NO: 14628 - DNA, 456 bp, Glycine max
  unsure (1)..(456): unsure at all n locations
gcttctgcacttttggctgagtgagtgaggagagagagaatgtggctntgngtnttaatataaggcttgctctttttattttgtttaaaagttgtgccacatgtcttcttttgagtggagcaaaaaggggcccactttttcccttgatgtgactcatactcagccacaagaagagaaaaaaatctgaccttttgaaatgctaaaatcctgtctcgatttgtgtgccgtttctctggttccagtccctcgcgtttctctgcacccgtcggggccagttttcgaaagtaagcaatatatatatcaaaacgctcagaatgaagccccgagcgtggttcagaggttggttttgttaaattttaagttgcatgcaaaatgataatttttagactaattaattgagaattaatctataactatccagctatgggattttcttcgttaattagcctaacccgc

SEQ ID NO: 14629 - DNA, 308 bp, Glycine max
  unsure (1)..(308): unsure at all n locations
gcttatatcatgttgtatatataggntatttatgcatgntctcttttgtattgtagatgatcaatgagaggagcctccttgtgtatgttaactctagcatgaggtagttcggaaatttctactttgtgctttgagtgtaccggtgcccaaatactataaaaaaaaaacgactcttatgcctaataataaacatgatggcgagccctgttgcagcggtaaagttgtgccttggtgacttgttggtcatgggttcgaatccagaaacaacctctttgcatatgcaagggtaaggctgctgacaacatccc

SEQ ID NO: 14630 - DNA, 447 bp, Glycine max
  unsure (1)..(447): unsure at all n locations
ctcatgctcgcacctctcattctaatctattatatgtagccactntgataccaccaatgaaacccacctttaatactatgcctattaagaacttcactctgtctcaaaagcaagagaggtacacaaagggcttatgcttctactttgatgagaagtttcacaccagtcattgttgtcaggctaaacaattcttgctcttgttattggacaaggaaccttctgaaggctccccagaatatgcaacttctgtccaagagtctaatgaccttgatccttttacaactctttttgaaactctctattgaatgagttaaggactactatagttttttccatgatcaaattgcagggtgttgaatgccattacaattagggttcgattatcatcaaattctagtttgaccggaagatacacacaaaatgactntgaaaacatacaatagacac

SEQ ID NO: 14631 - DNA, 410 bp, Glycine max
  unsure (1)..(410): unsure at all n locations
cacgcatgcaagcttctatatgccatcagttcaaatgccgtattcgaactttcttgatctgcttcaagaggtcaatatatatttgtgttataatataatgaattggggccaacttctgttgcatctanctgtgatataatcatggctcaacaaagattaggcgcatagttgagtgttgcttactgttacatactgtccgtgtattatgttagaacttatttggttgtgtcctcttttgggttaatgacatgaataaagtttttatgtcttaattttatgtcagacaaggttctgaagggactaacattttcatttaaggtgcaattagaaacaagccaaggagagagattgttctagataacgtcatggatttgggattccaactggatttgtgtctggtatctgagtct

SEQ ID NO: 14632 - DNA, 459 bp, Glycine max
  unsure (1)..(459): unsure at all n locations
cttgtatatttcttgcgaataacaataatggaagctacgttttcaatccttcagtacttttagccttcagttgggttaaaataaattaagagcataaatagtattagcagatatattttttagtatatcaagagtactgcagtgagctatgccaaagtgacattttaggacatatgttggcatcatgaatatattcgtatgctatcaatctcatgaaacgaatcacacacggcatatgtgattattcaaaattctcgcagaaaggaaaacgacgtatgttcaaacacctacataaaagaaaaaattagagaaaatgagaaataccccatgaaacccttaattaaaaaagaaaagaagaaagttttgtatatcttttcctcctaagtttttttttttttttgcaaggcaaactggacagtccttttttcgtcggctatatactcatnnttttttttaaca

SEQ ID NO: 14633 - DNA, 520 bp, Glycine max
  unsure (1)..(520): unsure at all n locations
tttgaacccttcacgacccaagatttataacctttcncagcgcgtgcaatctagactgcactagagatacgcttcttcatattatgtgagatatctaaaactcttgttagacantagatgaacacattcatatgccctgttaataaattcctaccaggaacgacttctgatcatccaaaggcttcaaggatagcagatgactcatattacagccagatgttcctacaccctctagcattggcaaactcaatgtgaataacagctgcaagatactcgtgctgcaaagaggaggaaatgccaagacgaactacgaattctctataaaaacctccatttgattttgatattgcctacatataatctaggcctatattaccatttgaagcctcgacaagtttacatttatcgtatacagatgtcgccgcaactagatcaccaaattaaaaatgtttgtgacttctaataatacccatatgttttgttagtccctaataaaacagagcttaatatgtctctgccg

SEQ ID NO: 14634 - DNA, 430 bp, Glycine max
atgaacatatcagcaggattgtgtagagggctaattttatgaacattgagttttctttctaaccgaatgaagtgatatctaacatctatatgcttggttctatcatgatgaacttgatccttggccaagcatatagcactaacgctgtcacagtagatgttagcatattcttgattaattccgagatcatttatcagacctctaagccaaattccttcctttgcagctttagtaagagccatatatttagcctcagtagttgagagagcaaccgaaggttgaagtgttaccttccaactcaccaagcagccaccaagggtgtaagcataccctgttaatgaccttctcttgaccagatcagcagcaaaatctgcatcagaatagccagtgaggcagcaatctgggtgagatccatagatcaaacctacat

SEQ ID NO: 14635 - DNA, 455 bp, Glycine max
  unsure (1)..(455): unsure at all n locations
ntattctattgtaaccttcatctttaagtatttgttgtctctcaatgaatggattctccattatgtttttcacttgaggctcttaaagcatttaatgcttgcattaaatacacatccatttttcatgtaaagtctatgctgataggttgacatgtcttatacttcagtaggaaagtcacttcttccatcggagcaagtctgcaccaacagagcgcgtcttttgataaagatcaacacttctagattgtagactttatttattcttcataggattcaatagattctagaagaatgctttcttcaacaaagaatctcagatataaagtattaaatgaaggttttaaaggactacttaatgttatgccaaattgtcttatattgatgtatcttcaaaaaactcagatgcagaaatacagacaatgatctgataacacatcanacacaacttttatcat

SEQ ID NO: 14636 - DNA, 279 bp, Glycine max
agcttgcttcccatctcgcccaggcgagctcttctcgcccaggcgagcaaaggtgcttcctccagatacataatccttctggaggaatcttctggagggcccaagtgagcctggttgctatttgcactcccatttttactaaatacaccccgctgccctttctttggagattcttttgtcgtaaattactgatacctacaaatttcgtatcgatacttgttttctttccgtattgtaacggaaccttgcggattacataatcatcctctttttgactta

SEQ ID NO: 14637 - DNA, 455 bp, Glycine max
  unsure (1)..(455): unsure at all n locations
ggccaacaaatccgtatttctttagagacattntcatattattattccatttgtcattttaattagaatattgcttttacattccgcaattcaattaaaaactattgtaagtataactttaaaatatttattataaaatttaacaattttattatacaaatgagagtctttgattgaatgacaactatattcacattaaattcttttatttttattatttgaagcatttaattaaactttgaacattacagctcttagtatgtttaaaacttagtttatttatttaactttccaatagacaatgatttctttgatgatagaaaaaccacacaaaaaaagctatttaattgaagaaaaatcaaattaaaagaaaaataaaataaagattttctttataaaaactaattntatctctnttatatcttcttattnttaattaaaattcacaaactaat

SEQ ID NO: 14638 - DNA, 412 bp, Glycine max
ggatcttaagcactgagctgcagctattttgacacaatgaaatatttttctatatttccaaggactactcacacgcttcatttggagttctgcagagtcctataggcctcgcacaagacagatatgtcgagtaagcacaaaatccaaaaattagctacaattctcaatcaagcacaatcatttgcctaagaccaaaatcgagttagagtgagatagatagggtcaaatagatgtcaattgagctaagaagaatagaaaaatgctaaactacaaatgctcaatctaattccgtcacactaatctttgcgctcctgggcaaaactaaaagatagactaagaaaaagagatcaaactagaaataaccacaactaaaagaaaggtatgaacaaggcacacccattttttaatggat

SEQ ID NO: 14639 - DNA, 449 bp, Glycine max
  unsure (1)..(449): unsure at all n locations
tcctcgggccattcctgcgaatgcaaacatttggaattgtagttntaccagtgggacgttactcttaaagcaaaaatggcatgtaacctcctcccctcaatacaaacatcaatgtaaatttagagcaagcttatgcgcatatttccctacgaacgttcacttgcacaagacatcctattaactaagaaaaatgcacccatatacaatcaaggtagcttcattacctagattatttacatgtacttccaaagtgtatttgttatttacatcatacacgccatcttgtcaaaatttacacacatgcatactcaaagcatttcggggtaccaaaaattgcacatgcgctcatcttggtatttctaatatctatacatatacaaacttcatgatgaatcttgactacctacgcaataaggtgctacatttcatgctctttttttatttttttt

SEQ ID NO: 14640 - DNA, 114 bp, Glycine max
  unsure (1)..(114): unsure at all n locations
cttatattacttatcaggcgtagctaccggcgttataggcaccattactgnctaaaataatacccccccctgtcctttggatactggtgaatcatttacatctgcgcatggagn

SEQ ID NO: 14641 - DNA, 282 bp, Glycine max
tcacacaagcgcgctctctcacacacacatgcatagcaaagaattgcatgatgtaaaacatatttctattgtaagttaattcatacatgcaccaatgacataacacaaaggttcttctggctatcagagttggaatgtttcagggtggtacagctctaacttattttaattattctacatgatataattatacactgtaattagtcaccaattaatgaaactaaaattctattttaaactaagttttaatcatttatgacaaggccctcctttaaactctat

SEQ ID NO: 14642 - DNA, 449 bp, Glycine max
  unsure (1)..(449): unsure at all n locations
gtgacaactttcctgcatgatgccccacacgaactctttcaatttgtactttttgcattccactgcatatttgcatccacttgcacatctctcaagtgcactaatcttactagaatgaagtcttagtcagatcgatagttgtgctcgagtccctgtgaactatcacacaattgttgattgttggacgatgtacaatagtgatagggtggatgatagtgttggttgtttagtctagtactcttgtcttttgaataggtcgtccaatcttctataatctggtggagcgtccagttacatagaagggagtgtccagctcgatggttcattggcataagttntgttatgattgttttttggtggaactattttcgtttagacaattatgtgtaaccttaattgtaaggagctctatattctagatntaaagagttggagagagatttgaacca

SEQ ID NO: 14643 - DNA, 107 bp, Glycine max
ttggattcttatgggtgatgctgtttttacatggaagtctgagaagcaagggcttgagacactgtctacttgtgaaaccgatcatggagctgcaacatcttgcacat

SEQ ID NO: 14644 - DNA, 446 bp, Glycine max
  unsure (1)..(446): unsure at all n locations
nttaatttcaatacaaggaagcatgacttacgcctattttgtaagttttggttntgaatgtaaaaaggcatgaatattangacatgtttgagaggtttttattagaatttaaatttgactgccccatgaggaataccttgcacctaggtagcatggaaaatacctttcaacggtatgtatatatgtggatatatatagcatggaaatgccttgcaaagtgtgtgaatatatggcataaaaataccttgcaaagtgtgaatgtatagcaaataatgcatttcaaaaatctgtatatgtaggataggtagcgtaaaaatgcctttcaaaatatgtatatttatggataggtagcataaggagcctttcaaaaaaaatgtacccatgtcaaaaatggcacgagaatgcttcccaaatgaatatatgatgtggaattgcctttcaagtgt

SEQ ID NO: 14645 - DNA, 562 bp, Glycine max
  unsure (1)..(562): unsure at all n locations
ctcgcactcggaacggaaaatgtgattccgactgtgatgaggaaccgcaaacgtttcgaacatgagaagccgngtgngacttttnacatctcgtcccgagacctctaagtcgactgcagcattcactagagaataagcaaggtgtccatatcttgctcagaactatacattaggaagaaaaaatacccaacacacacattgtgcaacaaatcttacatcgacagcggacaacagtgagtatctaaactccgacataatgacataggaactaacacacgtccagttaattcaaatttcccataatgtcacagacatctaatatgttaccttgaaataagaacacctgatcaacccatatcctctggggacatcacatgtgatgtcgtattttgatgaccctctaatagaatgatgataactcacacaataacaatgatacgctcataactaagacgcatagtagtccaatatcatctntagtaattccttacttaggacccttcgtcacccgaggagaagaaacaacttatgtgtaaatcttctactaaaccactgaagcccc

SEQ ID NO: 14646 - DNA, 450 bp, Glycine max
  unsure (1)..(450): unsure at all n locations
tcatgtggaaataatgtctcaagccaagactcttaattattcttctcttaggtcgaccttgtaactcctttgtttccgaagctatgttnttgtgttgcatggctagggaatgtccacttaaccgagaaccaatttcaagttgttgcgtgatatgtgcggcgcttgttgccatttctaaacccaatgcatttcttaatttaactaaaagggcagcggaaacaagtttttaactttgtatatattacattgtttcttttccacattttgaaataaaatacagatttgaagttttgttattatatgattctctaacgtaactattatacacatttaaatgattacctaggtatttgatcaaaactaccctgaataccaacccataaaatattactcanatacaactattgtacacaatccacccncccgccccccgcttctggattcaatgac

SEQ ID NO: 14647 - DNA, 509 bp, Glycine max
  unsure (1)..(509): unsure at all n locations
cttgatgccgtctcaggcagngatctcttnatttacgccctcatgcacgcttaagcgacgtcatggcaggcttaggtttgaaccctagaacatgtgtttgaatgactcttaaatgaaggtcaataggacgatccttagtgcggtggacatataagatgcgcaattagtgtataatgttaaggtatgagaatctactttcactaaatatcgtatgaatctaaaagctatgtgtagactattgccgactgaacaaggtgaagatttagaatatgtaccatttgcctaggatagattacttgatgggccaattagtaagggcttgtgtgccactaacatagatcttaggcaagttcccaccatatttaagtgatagcctcgggattcttaaagactgcccttatgacctggttcatccattatgagttcttggctatgccttctggtggagaccacggcggctgctgcgtgcattgactacatgagtcttaattccaaccctaaagtggacg

SEQ ID NO: 14648 - DNA, 453 bp, Glycine max
  unsure (1)..(453): unsure at all n locations
acagattattntattatgtaagtgtaaatggttatattaacctctatgttgttattttttttattattaaaatcataaatttatttacttttttaaatgttaggaatgttgatatatataaaaaagtcaaacttataagtttattgaaggataaagttatgtttattttaaagtctgattgcaaaatgaatttttaaataagttatcattcaccttatattagaccttaaagataagcttataaaacataagttagactcaatttttataaaaggttcatttgtttaagttgtttttttaaaaaaatataataacaaaataattaagcatcttttcatgtgtttgtctaaattatctttttgctaagaaaacnagaaaatgatttttnttaataaacaaactttatctacttttagaaaaaacatttanaaacattgcttaaaaaaataattt

SEQ ID NO: 14649 - DNA, 343 bp, Glycine max
tgccgcatgcaagcttctaaactttatacaagaatgaagctctttaccacttgttagacaagttggcctagatatcttaagaagggggggttgaattaagatactacgaattatatccccaattaaaaattctatttatctttctattcaagggatagattcccttcataatgaatgtcttaaataatgattcaaaagaacaatgtgaatatgaatatgaaacaataataaataaaggagtttaagggaatagaaagtgcaaactcagatttatactggttcggccacacccttgtgcctacgtccagtccccaagcaacccgcttgagagttccactatctt

SEQ ID NO: 14650 - DNA, 446 bp, Glycine max
tctcggctcatactgggaatacctctagttcaacacctttgctacctaaggctctccacccagagggaagctccccaagttccaactccgaacacgactcgaccggccggtaattccaacacgacaaggaacttccctccaaggccatttccggaattcaccccactcccaatgacgtacgaagatcttctgccatccctcatcgccaatcatttggccgtggtaactcccggaagggtcctcgaaccccctttcccgaagtggtatgaccctaacgcaacttgcaagtaccatgggggtgtcccggggcattccgtcgaaaaatgcttggcccttaaatacaaggtccaacatttaatggatgctggatggctgactttccaagaggatcggcccaatgtgagaaccaacccgctcgccaatcatggagggggagcagttaatgc

SEQ ID NO: 14651 - DNA, 346 bp, Glycine max
cacaccatatatgtttcacctttatgggagagtgtgttaaatatcatattatacacaatgttatattttttaaaataaagggcatgcagaagcttattgcataacccaaatattgtacacatgggtatattgaaatacacacatgttaatatcatgaagatagccattattagaattaaggatttgatttgtatttaagattgaccccctttgtactctaatatattactatatatagtactctggtatagtacacatgtgcatacctctgagatcacaacattaaggtataagtctgtttatagaaacaactaagaatcactaaagcaaccagtaactggaaata

SEQ ID NO: 14652 - DNA, 405 bp, Glycine max
  unsure (1)..(405): unsure at all n locations
atttgcatcanagtccagtctatgtgtcacaatctgagacaatttatcacattgcatagtctatgtgacattaaattgtcaataatgcacctcactaatagcgttacttttaaatttaacaacaataattattttgtaaaacatatgcaaaagtagaaactattttttacatttcaaaaagataaggactaatttacaaaaggaatcaaaagtcaaggaccaaaatgtctatttactccattaatttatccaaaagttgatttttaacttgtgtacaagttaattntaacaaaaggaaaaaaaaaatctcatttttctttctaattttcttctcctataagtacttcattactcatacttaatgttcaagcaggtcgatattgtatttctgcgccagttgactct

SEQ ID NO: 14653 - DNA, 203 bp, Glycine max
gcatgcaagctagcatggctcactaagccttattctattacagagagctaattgtgcttttctagactcactcgcttagcacgacacactaaacaggcttagcgccatcaggcaacttacccaaatggactactggaacttaattggcttagcgagcaagcttactaagccctattcctaaatatgagaagagattgcactta

SEQ ID NO: 14654 - DNA, 433 bp, Glycine max
  unsure (1)..(433): unsure at all n locations
taatgtctgacactatttatcanaaaggattgttcctcaaacgctttcactgtcttacatcttatatttttgcgtggtgtcaaagtgaacatctaattagtttatcttttgttatttattgtatcgctgctgagaacaatttgaattagaatagaataattctatttcctccacatatctattgtctctcttctctcctctgttttttataatttcctcctcaaaaccaacaattggtatcaagagctttattcttacgggacctgtaccatggaaggtgatggagagaattatgatctttgggaagtgaaaatgcaatcctacatggattctttggattaatgggatgctgtagaagaggattatgaaatatatccgctgcctgaaaatcccaccatggcccaaattaaaaatcacaaggaaagaaagatga

SEQ ID NO: 14655 - DNA, 336 bp, Glycine max
ttatgcctttgtgtaataggctgtgcgctttgtgatagcacttatgttgatgtgaatagcctagaatctcctgtatgagcgtatatggacagcttttttatgatataaagcaggataaatgtactcaatctccttttatctcaatttctggaagccacttaatcctggaatcctaagtctagttcccatgtacccaccagtcattctctggttactctaattggataagcatatattgtatttttgagtggaggtgatttgacaattatgttctctttatcagactattgtgtagactcttatctatatgctagttcgactctttatataaaaaat

SEQ ID NO: 14656 - DNA, 430 bp, Glycine max
ggcacaaatgtcaggattcttactattcctcggaatagtctaatcaaccaatcccaaacaagggcatattccatcgactgttttggtcatttaaggcatgcattgatgcgtttgcattttatgaacccattgtgtgaatctatggaacatggctatatggaagatacaaagggacattgttagttgcaatttcacaatatggcgctaacaacatatttccattggcatttgccattgtcgagggtgagacagtagatgggtggcactttattttgcagaacttgagaacatgtgtgacaccacaacatggtatatgcttaatctctgacagatacgagtcaatcaaaagtgcatacagatgaccgaacagtgtgtagacagcagacaactcatcacatgtgttctgtattcggcacatatgtcaaaacta

SEQ ID NO: 14657 - DNA, 417 bp, Glycine max
  unsure (1)..(417): unsure at all n locations
gaccttaatgattaatatattccagatagtcttggatccttattatcttcgttgggcttaaatctaagtgggaataattntgttagtccacctactcgttgcattagtaatcttcataccctgcaaagtttgaccttaattgattgcccaaggcttgagtctttgcctatgcttccaccaagtgctcaatgcttgggtacaactaatagtactcaaatgaaacccttgaattcaaatgcatatatgctgtggaagatttatgagttacatatgaatcagacatactttttatatactcattctctccctactctgccccttacccacccaaattatttccataaagtgtgtgcttaccaaatggaagatagaccacatcttttgttatcattccaggagagagattagaaatgaatg

SEQ ID NO: 14658 - DNA, 155 bp, Glycine max
agctcatttctccttcaattgcacaaaggtcttaatatttgaagagtatccttgtggaaccttcacccgacgaagacactgacttaaacttatcttctccttcttggacaaagtatggcaagctggtggcaagtcaattttcttgccatcagacc

SEQ ID NO: 14659 - DNA, 432 bp, Glycine max
  unsure (1)..(432): unsure at all n locations
tccaccaacccaacaatgtcattactcagccaataaatttacctcctccttacccaccacccagttatccacaaaggccatccctaaatcaaccacaaagtctgtctaccgcacttccaatgacgaagaccacctttagcacanactctnttaaaaaaaataaaaataaaaaaaaataacctcctccaaaaaggaattttgcagcaaaaagcctgtagggttcaccccaaattccgttgtcatatgctaaacttgatcccatatctacttgataattcaaatggtagccataaccctagccaaggttcatcaacctccatttctccgagaatacgactcgaacgcaacgtgtgcttgtcacggagaagccncggggcgttccattgagcatggtagggctctgaagcgtaaggtgcaaggtctaattgatgc

SEQ ID NO: 14660 - DNA, 282 bp, Glycine max
agcttgaaagatcccgagtagtcaaagagaattttattgttcatagccatcaaagtctaaagaagagagtatgatgaactaagggacgtcaatatggccaccgatgaagccttggaatgagaaaccaagaatgcccgaaaggaagaacacgaccaatacaagttttgaggggctctatagggcagctatagtgatctcaaactccgaaaggtgaaaggaatcatcacgggtcataggcctgatcttgaaagatgagcttaaggcttgccttaggtcgaaaag

SEQ ID NO: 14661 - DNA, 465 bp, Glycine max
  unsure (1)..(465): unsure at all n locations
agaaactcagctaaagtatgcccgagtcattcatccctatgagatgtttttgaagtattggcgatcagaattgccattccttggattatagggttgaaccaagctcatgcttttacaaaaaggttcatcaagtcaagttgaaatatggaagtaaccgtcttgcaaaattggggcaaaagatgaatcgagtcacatcactgcttcgtctactgccaaacatatttaggattgttgatgtccttgttacttccagtttcaccttgacaaagatgtcatggaccatgttgaaaatctaaattgattcaaccccatatcctgcgtaaaaattcgcaatacttcaactgtacatcattcgcatgcatccatgcttntcattggttgcattgctcattacattctttccttgaaaaataaaataaaataaaataaaatgaacttaatcattggtataaaaaagaaaagaac

SEQ ID NO: 14662 - DNA, 155 bp, Glycine max; identical to SEQ ID NO: 14658

SEQ ID NO: 14663 - DNA, 444 bp, Glycine max
  unsure (1)..(444): unsure at all n locations
ctaagcttgatatccacaccgttgtttacgtcaccctgttctatgagaggatcagatccccacaaagaaaaatttcacagttacttaggggtgttggcaagagaaaaaattccaattgtccacaccaattggaatgttgttccggaggatctaaagaagctaatttgggaagacatcttagtaagtcctttaatataaagcgtatgttaaccattgtctttatatgttctacgttttaaatgactaattggcagtggtgttgtttaacacgtttgttatggagcggaaatntgacatccctgagcgtgacaatgcgtaaacaaggtcatgtctatagtggctactagatggaggcaatttaaatctaccttgatgtctagaattgtgtattctaataatgaaggtcaacanataagtgatcctacagtgaagtatggtattgat

SEQ ID NO: 14664 - DNA, 251 bp, Glycine max
acatatctctaggtaccacgttgtggtctacgaataaaagccggaagttttacccttctacactggctcatctcaagcttgtaggattatggagtactcatcacatgtggtactaggtggcggtctggcaatggagcacaacatgttttacacattcacaagtcgcgcataaacccaccatcccctattgcccacctccaactgagctcactgtctcccacgtagcccatatccttcgtatctgtctacac

SEQ ID NO: 14665 - DNA, 409 bp, Glycine max
cgtaatactcaccacctctatcagatctaataattttcacctttctatctaattgtctttctacttcattcaagtaaatttctaaggcatccactgcacgagggcagtaagtagacataaccgtaacgtgaatagtcatcaataaaggtgataaagtatctttccttttcaaaagaattaacatcaaaagattcacaaatatcagtatgcacaatttcaagaagctgagtgcttcttgtagctcctttctttgttttcccttaatacaatccacacaaatatttagattcgtaaaatctaaatcaggaagaatttcattctttattactctttccatcctttctctaagaatgtgacgtaaacatttatgccacaagaaagccgatcgttcatcactaaatatacgtta

SEQ ID NO: 14666 - DNA, 72 bp, Glycine max
ttgctaggagaggatgcttcagtgtgggaatttacagagggagataaagagagagaggtgagctcgatattg

SEQ ID NO: 14667 - DNA, 449 bp, Glycine max
  unsure (1)..(449): unsure at all n locations
nttgtgtgggatacctaatgtgagcacagtttctagtctccttaaggaaagattcatgaccgctccagtgctagttttgcctaacccgagagaaccatttgaggtgtattgtgatgcatcaaagatgggtttaggcggagtgttgatgcagaatggccaagtggtggcctatgcttctagacagcttaagactcatgagaggaattatcctacccatgatctagagttggctactgtagttttttcccttaagatgtggaggcattatctttttggctctaagttcgaggtgtttagtgatcataagagccttaagttattgtttagtcagaaggagctgaacatgagacaaaggagatggttattgtttcttaaggattatgattntgagcttagttaccatcctggtaaagccaatgtagtggctgatgctttgagtangaaatctc

SEQ ID NO: 14668 - DNA, 254 bp, Glycine max
tatgctcaccaagtagactatattttcatattttatggcaacggaaataattctttatttattggagcattatttattcttgcgtgcagaaagatgagactaattcatattaccagggagatttacctgtgagcattacgctacataccattgcatagttgagaatattactgccttatagttatgagatatattaacgaagatgtagaattgtaatctcttatactcattgaatcttacctgcagatgaatca

SEQ ID NO: 14669 - DNA, 420 bp, Glycine max
  unsure (1)..(420): unsure at all n locations
ntaacctcatcgtctctcacagtctttagatttgggttctcaatccaatccttgtgttcggactctcagccacttatgatagccgccgatgatcccattactgcttcccctaagctctctgtcctttcttcacgccgcatcccatgccttgcgaactccttggagtaccctcgcgttgtggtcactaaaaccccgtgcgatgaaaggcgtgatgctttcgtctaatggcgctcctctcatggggtagccaagctgtcttatggtgagaacgagattataattaatacaaccccttgttcccatcaagggaacatttggacatccttcgcatgaagatagaatcctgattcttccttccttctagcgagggaaccaaataacagacgcccncccatgctagccaagagttggtcccaattc

SEQ ID NO: 14670 - DNA, 365 bp, Glycine max
tgcaagctaggctgcattgcacaagaattaaagtttctcttaagagcttctaatgattattacaagtacatgggtgatgaagcatgacatgagacagcttcaaggcaaagtgaaagctaagtgtgctgtttgttgtccaaacagacagcttcatgacatgagacagcttcaaaaaaaaataactagtctacttcccactcagttctactactagtttacacttactttgttagctgtccaaaatcttaagtgatcaaaataataaccaccatctttgagaatgttatgttaataataaatactaattcggactgcaatattagaagtggacatatacctcaatgtactttcgaaaaccatggcct

SEQ ID NO: 14671 - DNA, 467 bp, Glycine max
  unsure (1)..(467): unsure at all n locations
tccttgtggatgggtttctgatcagttccttgtatatagccacaaatcattcttataacttccttttgcagtgtaataatcgctcaaaaattgttataagacatttatactaatgattaaaggagaattaaagacaaagacaaccgttacaaaatttaggaggagaaagaggttgtgtctgtaataaaacatggagacaaagttaacaggacatattacattggtctcaattaaatgttcttgagctaggtcttgtaaatcttaggtgagatataattacaagaatgctttagtgcggactcgatgaaatgcttcccaatgcccatgtgtcttgttcaaagacgagcttatattaaaatgtgaatntgaaacggtgctcgaatacttngagggatgatgatctcatataagtagtgtaattcattgagtgtagaatccaaccaatttgtgattntcacccgctaagt

SEQ ID NO: 14672 - DNA, 323 bp, Glycine max
tctatacctattacttcataccttcgatgctcttttctttcttcacctaatcacgtaccgtaaagcccactctttctcttattcactcctctctcactaccaccgatcaaaatccataaaaacttcatcaaatggcagatccatctaagaagagatagggatcatcctccaccgctaccggtgctagccatcgccgtcacggcccatccggatcacccacagaaactattcctccttctttgtcaactccaagatcatcaacactggtatcatcctatgatctacagctacggaacctatctcaggttcttctagattatctt

SEQ ID NO: 14673 - DNA, 453 bp, Glycine max
tggtctaaactattcacacggattgccgattcgggcgtataatttatcgagacactcgaaattgaacaatgcaagctctcgagaaattcaaatggtcataacttttcaatcggaggaccgattcatgcgcataatatatcgagacactcgaaattgaacaacggaagctctctagaatttcaacatggtcataacttttcacatcggaggtccgattcatgcgcataatatatcgagacgctcgaaatcgaacaacggaagctctcgagaaattcaaatggacataacttttcactcggaggttcgattcaggcgcataatatatcgagacgcacgatattgaacaacggaagctctcgagaaattcaaactgtcataactcttcactcagaggtccgattcaggcgcataatatatcgagacgctcgaatatgaacaacggaagctctcgag

SEQ ID NO: 14674 - DNA, 217 bp, Glycine max
ccaataataaacttgcttatgaatgaagatacaaacaacacgtaacacacctgatgcttttcaagcaaactgataacatcactattggccttcatctgcttctctgttgctaaaattagtgattccatttgctcgacattataaggtaaataggtcggtatttgtattgatattatcattaaaaattttatgtcattcaagtccaagataagttaat

SEQ ID NO: 14675 - DNA, 433 bp, Glycine max
  unsure (1)..(433): unsure at all n locations
atgatatggncttcaccgacgaaaggatcaaagtgtgtctaaaaagaggcttttcttatcatcatgctttgataaatgccaaaaaaaactatggcaaatgaagagggtgagaatgagggaaaagcccatgctgtgactgccattcctatacagccaagtatcccaccaacccaacaatgtcattactcagccaataaccaaccttctccttacccaccgcccagttatccacaaaggccatccctaaaacaaccacaaagtttgtctaccgcacttccaatgacgaacatcacctttagcacaatccaaaaacaccaaccaagagatgaattttgcagcgagaaagcctgtagaattcaccccaattccagtgtcctatgctgacttgctcccatatctacttgataattcaatggtagccataaccccaacc

SEQ ID NO: 14676 - DNA, 316 bp, Glycine max
  unsure (1)..(316): unsure at all n locations
gcttgtacgcgttgttctacaaggattcattgatgcagaatgagccttccctgtttggagatagctntcctttagagttgtctttcatggcatctccttggagcctccaaaccaaggcattgggcttgaagctacatttcttgagctttgagatgcatttccaagttattctgtgtttgcaggcattttcttgaattcatggttcacttctgacttcctcaggcaggtccaactccatcgccaatgattctgagttgttggccacgttgaccatgcttctgcggagtgaaggttcgccaatttccatagtgatcat

SEQ ID NO: 14677 - DNA, 456 bp, Glycine max
  unsure (1)..(456): unsure at all n locations
acattgatgtttgtatttatgggatgaggttatatgccatttttgctttaagagtagtgtcccactggtaaaattaactttccaaatgtttgccttcgcaggaatggccccgaggaagcttgcctcaaagaggtccaggaaggacaaggcggccgaaggaactagttccgctccggagtacgacagtcaccgctttaggagcgctgtacaccagcagcgcttcgaagccatcaagggatggtcgtttctccgggagcgacgcgtccagctcagggacgacgagtatactgatttccaggaggaaatagggcgccggcggtgggcaccactggttactcccatggccaagtttgatccagaaatagtccttgagttttacgccaatgcttggccaacagaggaaggcgtgcgtgacatgagatcctgngttaggggtcagtggatcccgttcgatgc

SEQ ID NO: 14678 - DNA, 373 bp, Glycine max
tagcttgaagcgcgtcccaccatttttatagtataacactggtaatgtgtctactattattgggatcatctctttctccgtcattggaggtgccactagagctgccaggtctcttcacctttgggcatattctttgaaagattcatgctcctttatgcacatgttctataattgcatcctattcgaagccatatcagaattgtactgatactgcctaacgaaggcaaccattatgtccttccaagaatggactcgggaagggtcctaggtagtgtaccatgtaacagctaccccagtaagactctcttggaagatatatatcagcagttcctcatctttggcatatgcacgcatcttccgacaatacatcttc

SEQ ID NO: 14679 - DNA, 445 bp, Glycine max
  unsure (1)..(445): unsure at all n locations
ntctacgctgccagttaacaaggtatgagctctaccttattttgttgctcttcttattaagtttttaatcagtgcggtggcaatgtccgaaggttcttatcaaattattgggtcattttgtccacttggctaaccatataaaagtatcaataagaattgtaatgtggggtttcattttgttgtggtagttgattgtgctttacgtggttttcaagcttgacgagagttacatgccgagcaaagtttccatccttgcccgtgatggttttcacaacttgaaggtaaatttttattttattggtttgggtttgattgggatgattatgcttaattatttggtgttgactttgggaacatttttaggagattaagaccgtggaactcgagaagccaactgggtgggtttatctatccttgtctggagcttatcctangtaagtacagt

SEQ ID NO: 14680 - DNA, 447 bp, Glycine max
atcctctgagtcacctgctgcatgcagctgatacataattattcattcattcttatcagaaattaacgtactactcgaaccaatataatatgttcggtatcccattaacgatttaagaaatataactaacactcataatttacaacaaatcatactgttttggtgtcaaatcaattgttaaatgtctaaaaattagcttgaaagttgaaatagtgaactcaataactgagagaattaaattaaatcatcccataaataatacgtaatataaacagaaatgatctaaacaagtaaatgacatgcacttctatattgttgttcgggtgcatgacgtacggttttaagttgaggctttacatgaagtattacatattaacatgggataacctttcttcttaaacttattgtattttttacttcgtgagctaacttttttatcacaattaa

SEQ ID NO: 14681 - DNA, 453 bp, Glycine max
  unsure (1)..(453): unsure at all n locations
ntataaaagaatgatattaatttccaaaatgccaccgttagctttattaaatcggttttttataaccgacttagattcaacgatgttgaatcacacttttttagtagtggagtttggatcgtagatcttgaaattggacaacactgtttgcttgtgcagatgtccctacccgaatatgaaagaacaagcattagatatggagattcacagccaactaatactgcaaggtacttaatttttccagccctatattagattttttctcattatatatgagcaaagagcaatacatgtttgttcttctcattctgttctataattctttgttatcaagaatttctaggctaatatatatctttaattaattctttgttgcaaaccagatgggaacattccactgctcaaactagacctttacttaacctatatgtaaggatttcttttcaacttgta

SEQ ID NO: 14682 - DNA, 152 bp, Glycine max
gagcttgttttatgaaatcggaatgcaccatattgacatatggatagaccataagaggagtagggccattcttcctggttaatagccctaaagttatttgtggtttctttttaattacatcaacgcatcacacatatctaagacatcgaata

SEQ ID NO: 14683 - DNA, 450 bp, Glycine max
  unsure (1)..(450): unsure at all n locations
taactatttgattccaaattgttgccgcaagtttctattcttatctatttgattccaaattgatgaagatgatgacgaaaaatcaattaaggtagtttgaacatatgcaaagaaggccactaaaggcaatggtgaggagagtggattacatgatttttagccttgtgaaaaggtagaggaagaccaaaaggttattggagaaaattattaaaagagattttntaatgcataatatctctgaaaaattggtttatgaccaatcctaataatgtgtgattcatgtagtcaatctcacttagttggataatacttttgttgttgttcttgtttcaatattaaactgctagttacatgaatntcagtggatagttatcagttacttttttctaaccttttttttttgtcgcagttcctataatatggatggctagacagcgatggaagtgccct

SEQ ID NO: 14684 - DNA, 249 bp, Glycine max
attttccaccatggagatgcaacggaagacaaaggaaaggatgtgaaaggaggcgccatccattaaagaataagccatggaagaaagagcttcaccaccaatatgagccttggattagaagctcggagaggatgctccaatggaggaaaagaaagagggagagatagatagaggggggagcacgtatttgaaggaagacaaagggagagaagtcgaactttgagttgagtctcacaagactctcattca

SEQ ID NO: 14685 - DNA, 448 bp, Glycine max
  unsure (1)..(448): unsure at all n locations
ttgaattaaaacgttcagaaatggctggttatcgattaccatatgtgtgtaatcgattacacagtgcaaattttgaattcaaattttaatagctgttgtaaatcaattttggccactggtaattgattacatcctctggtaatcgattaccagagagtaaatttgttgaaaaagactttttaacttaaatttcttggccaaaccttttgctacttcaattggaattcccttcctatttaatataccctttctaagactctagagactgtcttgatcatccatcttgaatatctttaatttctttgtcttgaataaagctntgagacgcatgtaaaactntggcatcatcaaaacattcagctngatccttngtctacaatctccccctttttgatgatgacaatccctgaaatcaagacaagctatatacaagatgatagcacgttca

SEQ ID NO: 14686 - DNA, 457 bp, Glycine max
  unsure (1)..(457): unsure at all n locations
nctgtncccctctgagcctgagctcctctgagtcgcctgcggcatgcnagcttctatntgtgctggcccctgtatctttttgccttgttgagtcttcttcagccgattcgagcttatctnatngactacttgtgagtgtgttgtctctctttgtctctgtgagctgatgtcactgtactctgcttggcgtgcantcccgggtcttccgcaacctttttntgttgccctcgctggaaagagtggttctttccttcctttcgtcttccccttggctttcnnccccntttctgtgtttgccctctgcccgattttttggtggcgtgttcccttgtggcctctcgttgtgttcttggccnnnttgattccaccgagcctttccctcgtttgtgtccctctttgtgcctgtnctctgttttgccttcttgttctggcgcccccttgccttcgttcctccgtg

SEQ ID NO: 14687 - DNA, 386 bp, Glycine max
gccttgagaagattcctaaagtagctagagcttagctttacgctcctctctaatagctaagctcacctgcttgagatgagaagctagaacttagctacacaccccctataatagctgagctcacccctatgacaaaatacatgaaaatacagaaaaaaagttcctacttcaaagactactcaaaatgcctcgaaatacaagggtaaaaccctatactactagaatagccaaaatacaaggcctaaatgaaggaaaaaacctattctaatatttaaaaagataagcgggctcatacttagcccatgggctgaaaatataccctaaggctcatgagaaccctatggccttcccttagatctctggcccaatctacttggagtcttcta

SEQ ID NO: 14688 - DNA, 339 bp, Glycine max
  unsure (1)..(339): unsure at all n locations
agctntactcatgtacaggactcctactgtgatatttcaccggagttcattcaggaacccagagaccaaccttcgaatgaagagttgctaagtcctgcacatatacagataaacatactagagtaagcatatgtttgattngatggtagatcaagagataccaggaactatcttcaaatggaactagatttactttgagtacagagataaataattcacaaatttgtttagtgataagcaatcatggtcttaataaatgtttcaaggccattgagctttggttattatttgctttaattgaaaacataagtagggatactctggcttgtcgggttgcac

SEQ ID NO: 14689 - DNA, 418 bp, Glycine max
  unsure (1)..(418): unsure at all n locations
tatacaatggagggttcaaactacatgaactgtttggtaaagcaattccaagaacacggaacactacccatatgaagatctactttagttgacctaatgcaagattggatgttgtactctttttcctacttaattcttttgtccctgtcagaccctaattttgtccggggactatcatttgctaacgttttgattcttgctaaccgaattgagctgcttgacaccagttgctacgcaatatgaaaggtttttcgatgtttcggtaaagaatgtagaaaatactcaaatgggagggcaaaagggtcattttggagtttttctgacccctggctcgcccaggatagcctttggctcgcctgngcccccaaatagcttaagggtgaagtaaccagctcacctaaccgagcaaggttacttt

SEQ ID NO: 14690 - DNA, 426 bp, Glycine max
  unsure (1)..(426): unsure at all n locations
tatcgagggaaccgtttctcaatcaaggtgttagatttctaagataccttctgttagatggctggcttctgataagggtatttaggacggatctagaagctcgtaaccacctataaatactatgtcatcatacggttgaagcatgaaataatactcgatcatatattccttctcttgcttctaggatgtntgcttgggcctctaaagtcaagctataacaaaggagctctcattgagcatcaatggcggatggaacgcattctaaggcatcatcacagcggtcggaagatgcaagtgccaagctcactacttcgcaacttgctatgaattcaaagattgaatatcttctccaacgaatgtatgagcttgaggcgaatcatcaacaaccgcagtcttcgccgtcgtcgtccgcaagacacacgccac

SEQ ID NO: 14691 - DNA, 130 bp, Glycine max
agcgagaaaggcgcgctaagccaaatatcactcacgtgcgctgagcggtccatacatgcgctaagcgcaccagcactaacaatgctacctatttaagccttaaatcatattgtgtgaacagaggttggac

SEQ ID NO: 14692 - DNA, 452 bp, Glycine max
  unsure (1)..(452): unsure at all n locations
tgtaggattatggggtacccatcacatgtggtactatgtggcggtcgggcgatggtgcacaacaagttttccacatccacaatgcgcgcataaacccaccatcccctgttgcccacctccatctgagctcacgtactcccacgtagcccatatcctcgtttctctcaacaccgggtccccatcaatcctcccaagcttccacaacatccaagcaaaacaacattcaaacagcacaagctatcacagccaagcaaaacagggcaaggcagaaaactctgctcaacacaccaaccaaaatcacagcttttctcacttaaagaccccagtaacaattccttcgatccaattcgttaaccgttggatcgactccaaaattttactggaagtctatagtacataagcctacattgtgaccgttgggatctactagcaaacatncagaactcattctg

SEQ ID NO: 14693 - DNA, 444 bp, Glycine max
  unsure (1)..(444): unsure at all n locations
ttagagcacctgcagctgcagctggaagtgacaacactcgtgttgatctttgatgcatngagcgcatgcctgtgtgatagattcccttccagattcttcttatccgctaagtgcgttgatgcctcgcttagcggatgacactcgctaagcgcattgagctcgcttagcgagacatcaactttagcacttcttcaaaataactcctttttgcctgaaattaaagagaagttgacattaattccatacacaaggcttctactaagcacagatagaaacaaagaaaatttatttacaatcctacaaaaagaaccataaatgggggaaaatatatacattttgtaaaagttttctatacaaaagttagtcgtataagatgactaacagtggtatgattgttataaaanatgatctaataccaacttatactgttacgggttggtgaat

SEQ ID NO: 14694 - DNA, 474 bp, Glycine max
  unsure (1)..(474): unsure at all n locations
ccaatgaactttttcctctatcaccgctgtcaattactgagttgattatggaggatgtgatgttattttgtttaagagtagcgccccactggtgaaactaactttccaaatgttggccttctcaggaaatggctccgaggaagctngcctctaagaggtccaagaaggacaaggcagccgaaggaactagttccgctccggagtatgatagtcaccgctttaggagtgctgtacaccagcaacgcttctaggccatcataggatggtcgtttctccgggagcgacgcatacagctcagggacaacgagtatactgatttgcacgatgaaatagggcgcctgcggtaggcatcactggctactaccatggacgagttgatccagacataatccttgagtcttatgcccatgcttgtgcaacagaggagggcgtgcgtgacacagatcctgagtacgcgcagtggataccttgagn

SEQ ID NO: 14695 - DNA, 336 bp, Glycine max
cgctcgaaattcaacactggcagctccgcaccaattcagatgggcatacctttacactcggaggttcgattcacgcgcataatatatcgaggcgctcgaaattgagaaccgagagctctcgagaaaatcaaatggtcataactctccactcagaggtccgattcatgcgcctaatatatcgagacgctcgaaatcgaacaacggaagctctcgagaaatacaaatggtgataacttttcactcagagatccgattcagtgcataatatatcgagacgctagaaatttaacaacgaaagctctcgagatattcaaatggtcctaactttaactcgga

SEQ ID NO: 14696 - DNA, 322 bp, Glycine max
gtggagctggagatatgacgcggtggtcaggagaccttggggacgtcaagtggtgtgctattgcccaaaaccaagcttgaccaatcccgacccaacccgggcatagtcggtcagtgagaacctgtgatgtacctaagcaggcgagctcctggcagtcaacagataaaaggaaaacaagaccacaaagcatggatgcttgtggtggctggccaactgagaattttgtgtaatatgaggattgaggcctctggtaatcgattaccaagggtgggtaatcgagtacaaggctcaaaattgaggacaggaggctaagatggtctct

SEQ ID NO: 14697 - DNA, 400 bp, Glycine max
  unsure (1)..(400): unsure at all n locations
agctntgagccaaaatcccaacttaccgtttaacctttgacccagtgtgagaatgncaatccttgccctcggaagaagacaaagaaaagaaagttcccgacccaagaatcggaagaaaacaaagagaaaattcccaatcaaaagagtggaagaaagcaaaaaaaaaggaaagaaaattctcgatcaaggattggaagaaaacagaagaaatatgtagaacaatatctaaacaacacagagttgtcaccaagtaaaaaaaacaaaaaaagaaaggaaaacacgatctaaagtggtcctctccctttgatggccaaccaaaaatcttgtgcgctagcgactttctcgccccgcactaaacaaaaacagaaaaggaaaaggctagaacactcaaagccgaatt

SEQ ID NO: 14698 - DNA, 449 bp, Glycine max
  unsure (1)..(449): unsure at all n locations
ttagtcaaacagaataatccgaanatgtcaaagaaatgtgtggttgaaatatataactttactntctgtgatnggnttaaagatacaatctttgcagatgagaatgcttcagaaacattaagaaagctagcagatgggcctaagagaaatgttataacctggcaaggatacgacataaacaggtattcattttacacagaagcacaagatgacaaatgtacaatgcagaacaacggggtcaccctaagggctgaatctcaacactttgcaagtgtcaatgacgccaatccctgtgtagcatccatcccttactttgggttcattgatgaaatttgggagcttaattatgtgaaatttacagtatggtgtttcaaatgtaaatgggttgacagcaacaccggtgtgcgcaccgatgatatatgatttaccctggtagatctaaagaaact

SEQ ID NO: 14699 - DNA, 363 bp, Glycine max
aacacacacacatattttttcctagtcgatcactcacataaatttccattctccacctttgtttttgaatttatgcttcactaaaaatgaagctaattactcatgtgagttcttgatttaattcctatttctctacccctttggcgtcaacaaaaagccaaagtgcgtaacaagtaagaaacatacaaatacaactaatcattcacacaacaatcatggaaaagtataaactaatcatgaagcaagaaacatgactagatcaaatatatagaaaaatcacatagtcatataacataattcataattgtcaaacacaccatgcaaataaagaaatactaaattgctcaaatgtcataataatat

SEQ ID NO: 14700 - DNA, 307 bp, Glycine max
agtctacggaggacatgctgaccacctcataagactgtacagctgtttctaatgactcctgtacggcctccacattaggcatagaggatgggtagctgaccaagatgtgttcttcgcctgatacgatgaccagatgccctcccactacgaatgtcaactattggtggagtgtcgagggaacaactcccactgagtggatccactggcgccccaacacacagctgtagggggggataatatccagtatctggaatgtgacttgacaggtgtgacggcctatctgtactgtgagatcgatctctccact

SEQ ID NO: 14701 - DNA, 441 bp, Glycine max
  unsure (1)..(441): unsure at all n locations
agcttcaagaataatggcctcagcaaacttcttatttctagaaggattattaatcaatagacctccaatctttaatggagagggttaccactactggaaaagccgaatgcaaatttttattgaggcaatagacttaaacatttgggaagccatagaaatagggccttatatacccaccacagtagaaagaaccacaatagatggaagcacaacaagtggaagcacaacaatagaaaaacctagagatagatggtctgaagaggatagaagacgagtacaatataatttaaaagccaaaaacatataattacatctgccctgggaatggatgaatatttcagggtttcaaattgtaagagtgctaaggaaatgtgggacactctacaagtaacacatgaaggcacaacanatgttaaaagatctaggataaacacattaact

SEQ ID NO: 14702 - DNA, 439 bp, Glycine max
  unsure (1)..(439): unsure at all n locations
agagancgaggagaccatatttttcttcttcttcttccatgggtacctaatgttcttaagcccttcttccatcaagcttaggtaagtgacctccattttcaactctatgcttgattttcacttcattttcttggtttattctcacttgtagtttcaaaaccttactttgcactcttgaagattgaaaacttgaatataaaatctctcattcttccttctaaattttgtggagactaccaaaggtaagggggtctctctaactcttgaaccatatgcttgttgttgatgttgaacttccttgaacatgttcctttgaaatttttgagcttgccgtcatgtcctgaatctgtgtgctgagttgttttccttgagtttttatgccaaanagttctttgcatgttgaaacatatagttagcctaaaatttacgcaaattggag

SEQ ID NO: 14703 - DNA, 436 bp, Glycine max
  unsure (1)..(436): unsure at all n locations
agcttagagaggatgcttcaatgtttgattttatagagggagagaaagagagaggggggagcacgaaattgaaggaagaaaaagggagagaagttgaactttgagttgtgtctcacaagactctcattcatcaaagttacaacaagtgttacacatgcttctatttatagactaggtagcttccttgagaagctttcttgagaaaacttccttgagaagcttctttgagaaaacttccttgagaagctagagcttagctacacacacccctctcataactaagctcacctccttgagaagcttccttaagaagattcctaaagaagctaaagcttagctacacatacctctctaatagctaagctcacctccttgagatgagaagctagagcttagctacacacccnctataatagctaagctcacccccatgaga

SEQ ID NO: 14704 - DNA, 343 bp, Glycine max
ctatgctatgttgggcttttttgggtccactggatgcctgggaggtgtgatcccttgtaattggtaaatggcatccgagattaactgggccacattaatactaactgtaacatcctagaaatttctacccggaatttttgggaaacgatgtattttgaatgattatatatatatatatataagtattattcagtgtatatgcatatatgttcttggtagaagtagggatagtgggggcaagatacgcgggttaggctaattaaggaagagaagtccataactgggagggtatgggttaattcttaattaattagtctaaatatcatcgttttgcgtgcgactt

SEQ ID NO: 14705 - DNA, 379 bp, Glycine max
agcttatccttatggcctgcctccagacttcatcccccgtgccactccggaagatttaagccaagcccttacttttgaggggcaactcccaccttatgaagactttcccgggcaagacgatggggaaggagatacccatcttggccccctgctccacctcaaagatccatccccgcatgaactaccctagccgaacatagtccgccatatcccggcctcacccacacccgtaaaagaatctgttccctttgcagaaggtaagggaaagattgaagcgcttgaagagaggttaagaacagtcgaaggcctcggcaattacccattctcggatttggcagatttatgtcttgtgcccaacatcgtcattcctcccaagttc

SEQ ID NO: 14706 - DNA, 376 bp, Glycine max
  unsure (1)..(376): unsure at all n locations
agcttgcttgtggggcttctatggagacttgatctttgagcttcaatgaggtcctttaatggtgattttccaccatggagatgtagcggaagacaaagtagaagaggtgagaggaggcgccatccactagggaataagccatggaagaaggagcttcaccaccaagatgagccttggataagatgcttggaaggatgcttcaatggaagaaaagaaagagggagagaaagagagaggggggagcacgaaattgaaggaataaaagagggagagaagtggaactttgaagtatgtctcacaagactctcattcatcaaagttacaacaagtgttacacatgtttctatntatagactangtagcttccttgagaagc

SEQ ID NO: 14707 - DNA, 473 bp, Glycine max
  unsure (1)..(473): unsure at all n locations
ntgaccctgtgaaccgtgatatgcgagccctacgagactaagctggtctctggggagctgctgactctttgtggagttttctcttatataaaggcaagacgccagttctgaggaggagcacccgccatgtgactactaacccgggtgggaccatgaggagggagagtgccatcatggccccctgctgcacatggaagatccatgcggacatgaaataggccaacctaacatagactgacatgttcaggcctcccccacacccgtgaaagagggggttaccttcgcggaaggaaacgggaagatagaggcgctagaagagaggttaacagcatacgcgggccttgcaataaccgattcttatagtagcggatatatgaatcggcccaatatggaatttgtacaatttatagtggggactttatacgtcgaatggacgaatggccctgggcatgtcggcgttagcccttatgggg

SEQ ID NO: 14708 - DNA, 429 bp, Glycine max
  unsure (1)..(429): unsure at all n locations
agctntatagagngntaacagcngttctatantacccactaattcagnnacaggcgggtataagaagataacagaaactacactaagctaactccctatgccataaagtcctaagccaactgttaacaaaaagatttcagatcattccaattaatcacgaaaaaaaatgtagttcacacatgcaattctcacatagtcgtaaaaacaaataacttaatttttctgccaataaaatagagctcattccaacaaaaggtagtatactaaagtacagacaacaacaatagcaaaaggaaagcttttcacatgtatatgaaatttggtacttaatatataaccatatcatctttgactactcattcattgacctttaaaatcttgtgaacatatttatgtaactgttccaatttctcctctcttatttcctat

SEQ ID NO: 14709 - DNA, 381 bp, Glycine max
  unsure (1)..(381): unsure at all n locations
tgaaaaatngacactnggncttcaatcntggtagtagatattcttgcagggagaagtaatggcctgtctgcaggagaacattcttataacagagatcaacaacaaaatgacttaatgaacttgtcttatattgatcacaaactatcatttcaaaccaaaaataccactaaatttggtcggtttcacaatcagcatgatttaagtaagacaagtacattatatggtctacctctcaattccatcgaatatttcacttatttcttggtgagtttagcatcaactttaaaagaagtacatgaatagacacatgtttgcaactgattcatttgccttgtagagaggagaaccattgtctgctagcaatgtcatcaaaggaatgga

SEQ ID NO: 14710 - DNA, 390 bp, Glycine max
  unsure (1)..(390): unsure at all n locations
tatagagggagagaaagagagaggggggagcacgaaatcgaacgaagaaanagggagagaagtngaactttgagttgtggctcacaagacttttattcataaaggtacaacagtgtacacatgcttctatttatagactacgtagcttacttgagaagctatcttgagaaaacttacttgagaagctggtatgagantacttccttgagaagctagagcttagctacacacaccgcctctcataactaagctcaccgtcttgagaagcttncttatgaagattcctaaagatgctcgagcctagctacacatacctctctattagctaagctcacttgcttggatgagaagctagacttagctcacacccnctatnatagtaagctcacg

SEQ ID NO: 14711 - DNA, 362 bp, Glycine max
  unsure (1)..(362): unsure at all n locations
acacatacatacactactttctactggaccactcacttaatactccattactgccctttgcttgtgagtttatgcctcactcgaaatttgggggaaacggattaatccactaagccttcctgcgggaaaccacagatacgatcattcattagatgcgggtggaaatagagatttcataaattacagaagacctactacactacattatcatcagttgtggcatgctaggcccctacatcataccattctgatttcatgcgctgcggcagaatgatctttactnctcatgctatctttttctttgccttactctaaagtttacacttctaattctttatcgattattcttctacttcttctca

SEQ ID NO: 14712 - DNA, 396 bp, Glycine max
agctcagtaatttgaagtatataactcattatatcataaactccaaaacatatggaatgagtgaacgttctatcttgtatatattctatgctgcatcttgacttcaaaaattaaattgtcatcatcaaaaagggggagattgtagaagcaaagactttgatgttctgatgatgtcaaaggatcatgtgcttctcaagtttaattcaagaggatcatgcgcttctcaagtttaattcaagacaagaattcaagaaatgtgcgatatatgatcaagataatctctacagatttaggaagggaattccaagttgaaacagcaagaggcttggcaatgaattcagctaaatgttttacaagagattactctctggtatctattacagaggatgtatcgat

SEQ ID NO: 14713 - DNA, 487 bp, Glycine max
  unsure (1)..(487): unsure at all n locations
aatgactcccttgtgannncttgatanccnttcgaacaccagcgacactctagagctcatccgcatggcttgtcacagacgcttttggggtgccactactttatatactaccctagcgactactgcataagggctggtgctgaactgttacgagtatgcagccctctactaagatgaatgataggcccatctcggaccactgctccaacggctacatccgtgcccacatgaactatacttctctacatattctgacgtcttcctgactaactcgcacgacgaacataatctgattccttcgcggagagcacgtggagatagacgcgctagaatagaggctaacatcatacagggtccttggctattaccgattcttacatgtaacggacttacgtatcgttccgatatcgaattcgtccatttctatagaagactctgtacgtcaccggacactgtgcactggcattgtgatgcatgcaattatgcg

SEQ ID NO: 14714 - DNA, 165 bp, Glycine max
ggccccggaccacaaaaagagagcccccccccccccgccaagaggaaaaacggaaccgccgcggggaccccacaaagacgaccaaagaggggaaaaagaaaccgcagaggacccccgaaaaaacaggcggcaaaaggagaaccgaccgccaaggggcacaagcca

SEQ ID NO: 14715 - DNA, 428 bp, Glycine max
  unsure (1)..(428): unsure at all n locations
agcttctgagaaagnnnnaannctattatttgccctgcaaactggtcgncaaatggactgggcccatcttgttcactatcgtatgcataaggcattacggaaaaatacacctctttcttatccccacctagttactctgattctgcagcacttcaacattcctcttgctaatgaaccttttgtcaaggttcaacgttcatttgccattggagccgctgcagttgcatcctttgggtataggaaagatctagatggtcaatgggttcataaacaggatctatcgactaatgctcccgatgaacgcactccatctccaccaccaagggatccctcctcttcattactgaatgatgtccttagtgagctttgagatctttgtgcctttgtcggagaaaggtttgactccatggattcacacatcacatgac

SEQ ID NO: 14716 - DNA, 324 bp, Glycine max
  unsure (1)..(324): unsure at all n locations
acttcatataggataaatattaaaaagaatttttcaaaaaccaaatagcacagttttgttttacaaaagaattntctcanattttctaggttaccagagtgattactctctggtaatcgattaccaattggcattaatcgattaccagtgaccagtttggttttcaaaatgttttcaaatgatttataattttccaaaatgattntcanatagtgtnatcgattactatattagtaatcgattacaagtgaatctgaacgttggaattcaaatccaattgtgaagagtcacaacttttcataaaatacattgtgtaatcgatta

SEQ ID NO: 14717 - DNA, 427 bp, Glycine max
  unsure (1)..(427): unsure at all n locations
agcttgaaggtgtgtaacccaccatnntctttatttatacactagtaatatgnctactatcattgttattatttctttcttcgtcattaagggaaacacttgggctgccagatccctccacctttgggcgtattctttaaaagatttgtgccccctttttgcacatgttctgtagtttcatcctatccgaagacattatactgacactgcctaacgaaggcaaccattaggtccttccaagagtggacttgagaaggttccaagttagtgtaccaggtaacagctaccccagtaagactttcttggaaggaatgtatcagcaattcctcatcttttgcatatgcccccatcttccgacaatacnatcttagatggttcttgggcaaatagtccccttgtacttgtcaaagtcctgcaccttgaactt

SEQ ID NO: 14718 - DNA, 455 bp, Glycine max
  unsure (1)..(455): unsure at all n locations
gctatgatgcaggtgtcactattaaggcatgtggtggtttgttatgatagcaatatagtttatacactntcatttagcatactgtcatctcattgagtgttgcatccccgccaacaaagatttccttactatcatcgttcgaggtatgtatgtgattgtcacactagatatttattgattaatacagacaatttggtaactagatatttattgattaactagatagttagtgaagtagagacgtgaagccacaaatgtgtcccaagcaaagttaatttcttgttcaacccaaatgtaaagtgaggggtatatagcatttttaattgaggtcatgagctgacacattntaatttgagagaaagggatgggaacaaacttttggataaaatattttttgtttgataagcatggtgttctgatactatagttgcgtgttaattactattctaaatata

SEQ ID NO: 14719 - DNA, 149 bp, Glycine max
  unsure (1)..(149): unsure at all n locations
gacaggtttcatttaatagctgcaagactttcattattcatactacgacaagcgttacacatgctcttatatagagacaatgtacctatctttgaaagctatcttgagacatctttctttaaagcttcttaagaaaacttcctgataan

SEQ ID NO: 14720 - DNA, 136 bp, Glycine max
  unsure (1)..(136): unsure at all n locations
acgaataagaaatcgaatctgtggagccgacatcacactctgtatgattaatgaattgtatttatggttcagcccactaattcaagatcaagtcccagatctccaataagtgtgcttagtgcatgagacatgaacn

SEQ ID NO: 14721 - DNA, 296 bp, Glycine max
gatactgagttctgcaacagccacatatggttcatttgtttctttaatgcggaccttcacacctagctcactaaaatttaccatctgttgtacatcagtgcacgacagcgtgatattgtacaattagaaatgtggtgcttgaggcttaaagaactagagcccacatgataattaccttattacgaatgtcataggcgttgattgtagtgaagacactgcaatctgtttcttctctttgctcccctgatgagtttattgttgatgctggagatacatatgacgacattcgggttctg

SEQ ID NO: 14722 - DNA, 349 bp, Glycine max
  unsure (1)..(349): unsure at all n locations
aatgtgcgcgtccattttctgaatgctcgattgcgancggttatgattgctattgnggggcacagacacaagcaattctagcataaggcctataacctccagagcaaagtaaagaacagaaaggaaattttgtattattatgtgttgatagaattacatccctctcatatttatagatgtcttatataattctggatgaaaatatttaacacattttggcagtgccttggaggataaacataatgctaccaggagacaatatctaacggcacaaagatttgggatattctgcttctagaagactattgtcagtgcatgcttacttcagtgcatagtcctccaggtactg

SEQ ID NO: 14723 - DNA, 290 bp, Glycine max
  unsure (1)..(290): unsure at all n locations
gcatgcagcttcatcaagggaatcattgccatgatcttcaagtaggngctccataaacctccattaagtttttttctttaccttctctgccattggggatacttcatttttctccatgtatctcctcacatgtcttgttctaaatgtcgttaacatgattctttatagtgtccaccgattaaacttgctatagaagttagatttgattctctatggttcaaatttcttgttcttgttcttgaaccatgaattgcgttgagtttaagttcctttgagtttagccttgctat

SEQ ID NO: 14724 - DNA, 352 bp, Glycine max
cgctaagcacaggccttgcgccaagcgctcaatcttcacatgctaagctaagcttgctcgcgctaagcgcaaagacccctgattggttggctgaatagtttagctaagtgcacatcattgcgctaagcccccacatcttcactgtaattgaaccttaagcagtgggcttagcgtggatgatgcactaagcgccacttcttctctggaaaatttttattgtagcaacgctaagcgcgctatactgcgctaagccccagatccattctataaattgagtttttaagttgggcttagcgggccatggagcgctatgcgccaatctattctggattttgaactcttggaagtgcgc

SEQ ID NO: 14725 - DNA, 180 bp, Glycine max
  unsure (1)..(180): unsure at all n locations
agctttgagagaagaagncncattatcacttgtgtggagtttggaagaagaaccaaaaagggggcccctcctcccttggtcgactcatgaaactaaggatccaagactttgctttgggaaggaaatgatgagtctatggtctacggctaacgatgagtctcaatgacaagcatgaacgac

SEQ ID NO: 14726 - DNA, 432 bp, Glycine max
  unsure (1)..(432): unsure at all n locations
ttaagcacctgcagcatgcagctgcttggggctttattttgttgatctttgagcttcaattgggtcctttaatggtgattttcgaccatgaagatgcagcggaagacaaaggaaaataggtgagaggaggcgccatccattaaggaataagccatggaagaaggagcttcaccaccaaaatgagtcttggataagaagcttggagaggatgcttcaatggaggaaaagaaagagggagagaaagagagaggggggagcacgaaattgaaggaataaaagaggtatagaagtggaactttgaagtatgtctcacaagactctcattcatcaaagttacaacaagtgttacacatgcttctatttatagactaggtagcttccttgagaagctntcttgagaaaacttccttgagaagcttctttgagaaaact

SEQ ID NO: 14727 - DNA, 189 bp, Glycine max
agggaaggccgacaaaccccccagacgcgggaaaccaggggaaaacaccaaaaaggacccgaagaacgcaaaaccagccgacgaaaaggcgacagcaaagacagggaaccaaaacccaaccacaaagagcaagggagaacagccacaaaggcccgagcacacggagagccacaaaaggaggaaaacgag

SEQ ID NO: 14728 - DNA, 411 bp, Glycine max
  unsure (1)..(411): unsure at all n locations
agcttctacattcaattcgagctttcgttatattactgtactcaancggacatccgagtaaaaagttattgtagtttgaatttgctcagggcttcggtattccatttcgagcgtctcgatatattacgggactcaatcggacatcagagtaaaaagttattgttgtttgaatcttctcagagcttcggtattccatttcgagcatctcgatatattacgggactcaatcagacatccgagcaaaaagccattgtcgtttcaatgtgctcagggcttctgtattccattacgagcgtctcgatgtattacaggactcaatcagacatccgagtcaagagatatagtcgcttgaatttgctcagagctactacattcaatttcgagcttttcgatatattacgggactcaatc

SEQ ID NO: 14729 - DNA, 434 bp, Glycine max
acctgcggcatgcaagcttcagcctgatcgctaagcgtcatactttttcgtggctaagcttgacctattatcgccaagcgcaattccttacggccataagagtccctctcatctaagcgaatgtgatgcaatcctaccccccaagggcattggataaaaaactcgaagcagattggaccaaagatgcaagagaaggcccaagggttctcatgagccttagggtagatttcgggtccatgggctaagtatgagcccacttatctttgttgatattagattaaggtttcattaattttgggccgtgtatttagggctccataatgtaggcagggtaccctagaaatataggatttttcagcccttggtatttagggcacctagaactagttttgtattaggggtagttttgtaatttcacatgcactaagtgaata

SEQ ID NO: 14730 - DNA, 454 bp, Glycine max
  unsure (1)..(454): unsure at all n locations
cttgtganacatgtaatccnttggcattatcaaaacatcttcttgatcctttgtctacagttgtaacaccctgaaattttgctaattataaatcgatgtttaattgtatttatcgtgttagttgattatatgattgacttgaatgagtttaggtatggtgtgaattagtcatgtgtgattttcttgatgtggatgttgagttatatggatttttattgacctaagttgaaattatgagatttcaaaatttacccaaacctattccagtaaaatcacgatcctggattcgttaaccgttggatcgtcttcaaattntgactggggtccctaagacatttccccatggtctgaccgttcggattntcaaagtaacaacttttgatttctcacttagcgtgagaagcgtgctaagcgcaattccaactctggagggaattgcgctgagcaagaattg

SEQ ID NO: 14731 - DNA, 316 bp, Glycine max
agcttactaagctatctgtttgttacaagtaattttattcccaagaaaaacataaaacttgagatccaataaaaaacacaatagtttgaatgacaacccacggatgttggtgaagtctgggaatattgctagaaagagagagctggaatatccatcagcctgagagaagcatgttccgacattcttaaaaccatcatttggaagcttctaaccaatattctgaagacgactcaaggatttcggtgaaatcggggaatattgctaggaagagagagctggaatatccatcaacaacaacaacaacaacaacgcctta

SEQ ID NO: 14732 - DNA, 353 bp, Glycine max
tcatatctaatcattttcacatttatgtctaactgcccttttacttcattgtagtaaatatgtaaggcatccattgcctaagaaatctcaggcagtaagtagacataaccataacgtgaataatcatcaataatggtgatgaagtatcattcctttctgacagaactaacatcaaaaggtccacaaatatcagcatccacaatttcaagaagctgagtgcttcttggagctcttttctttgtatgttatggttgttttcccttaatacaacccacacaaatatttagatccataaaatctagataaggaagaatttcattctttattaatctttccatcctttctctagaaat

SEQ ID NO: 14733 - DNA, 394 bp, Glycine max
  unsure (1)..(394): unsure at all n locations
agctnngnnntgtattttctattcaatcttttattcatnctataaatcaatcttttccaattcattctttacacaagcaagttttccacattgatttctgagtctctttgaacttcttcttcttccttttgccaaaagctttccaaacttttctggttttctaaaccttgaaaacttgtgttattcatctttttcattcccttctccctttttccaaaaagaattcgccaaggactaaccgcctgaattctttntgtgtctctcttctcccttttccaaaagaacaaagtactaaccacctgaattcttttgtgtctcccttctcccttgcaaagaatcaaaacgacacaggctgagaattctttgattctccctttccatatacaaaagattc

SEQ ID NO: 14734 - DNA, 385 bp, Glycine max
atctaagagacttctctgttaagctagatctttatcatacacacccctctattaactaaattaaccttcttataaataattacggatgaaaataacgcaacaaataatcaaacatcaaacataattactaataatatatagatatatatatcatggtgttacaggtatggagtatcaaaagattcatgcttgcccgaatgattgcatattgtacaaacatgaatttcaaaaaatgccaaaatgccctaagtgtggggtatcacagtacaaagtgaaggatgatgaggagtgtattaatgatgaaaactcataaggcccgccagcgaatgtgttatggtatcttgccatcattccaaggtgtaagcatctgtttactaatggagac

SEQ ID NO: 14735 - DNA, 402 bp, Glycine max
  unsure (1)..(402): unsure at all n locations
agctctcttgagaagattcctagagaagttttagttatctacacttacccctnnaaagctaagctcatctcttccttgagatgataagatagagcttagctacacacacaccctataatagttaagctctcccccatgccaaaatacataaaaatacaaaaaagtccctactacaaagactactcaaaatgccttgaaatataagactaaaaccatatactactagaatgaccaaaatacaaggtccaaaagaaggaaaaacctattctaatatttacaaagaagagtggacccaatcttggcccatgggtcagaaatctaccttgaggttcatgagaaccctagggccttctttaacagctctagcctaatcctctttgagtcttctatccaatacccttg

SEQ ID NO: 14736 - DNA, 264 bp, Glycine max
cctcctctcacctcttctcctttgtctaccgctgcatctgcatggtggaaaatcaccattaaaggacctcattgaagctcaaagatccaatctccatagaagccccacaagcaagcttccatcaagtggtaatcagagcacaagagcttcaagtaggcgtttcttcattttttttctccatgtatctcctgacatgtcttgtgataaatgtttataacatgattctttagagtttccaccgattaaacttgctttagaagctag

SEQ ID NO: 14737 - DNA, 412 bp, Glycine max
  unsure (1)..(412): unsure at all n locations
agctttcaacatatgtcttcacanataancttcactctgtagaaccctagcaagattacccatcatatctcccagaaccccatacccacgaaatntaagagagaaagaagtccacccaaacctgaattttcgaagtcccactcgtagccacgcacttcacgactccgggaatgccctccttttgcgatttggagcggaaatgagcaccaaaggttggagctttgttgggcaacaatggtggatgggagaaaagaagaagaaggctgcgtgagagagagggagagctgtctgaaattttgtggggctgagtgaagagagagagagagttgctttttggtcttaaataaaaggttttccctttttccattattntattcaagctctgccacatgtccctatttgagtggagcaa

SEQ ID NO: 14738 - DNA, 461 bp, Glycine max
  unsure (1)..(461): unsure at all n locations
ctcagcttccagatcgatcatggaggacttggaactgcctncttatgcagtttcagtacaatacggatatggctcccgatcggaaccagcttcatagtatgactaagcgagagcatgagtccattaaagaatatgcccaaagatggagatatctcgcagcccaagtcgtaccgcccatgacggaaagggagatgatcacaattatggtagatacgttacccacgttctactatgaaaagctgataggctacatgccagctaactntgtggatctcgtcttcgccggagaaaggattgaatctggactacgaaaaggcaagttcgaatatgcttccaatgtggcccccaacaacaacagaagagccccagtagtgggcgcgaggaaaaaggaaggagacgcccacgcggtcaccaccgccccgacgtggatgaaagcaccccagaatatccaaagctcatac

SEQ ID NO: 14739 - DNA, 374 bp, Glycine max
agggagcctcgccaagtgtccccatcgaaattgaaaaacctttattcaaacctttcaaaggtagtgagaaggctaaacggaaaattaaggaacttagaaaaactaaatccttaactgaaggcgtaggtgacaatcatagggaattactaaacaagagtggtagtttacttaaggtcattccagatactccccaagcctcggaaaatacttctaaaatggtaacaagaagtacctccaaattaattaatgttattaatgaagatagtgaccaaaactcagataacacaactgagataggatcagtatcagagaagaatataaatccaattaattccaaaaactggaaaacaccctccaaattatattatcaacgt

SEQ ID NO: 14740 - DNA, 435 bp, Glycine max
  unsure (1)..(435): unsure at all n locations
tgcatgattacatctcctcntctaagcaanctttttgtttatcttaattttttgactnacattctccccctttttgatgatgacaaccacctgtaggttaggagcaacaacaaagaaaatatctatttgcatatagtttactcccccttggttttacaatgattgcttatatgagataattgaagatttcatattcttcatatataaaaagttgtctgataaaacaatagataatttttcttactattttatcttttatctttgtctccccctttgtcaacatcaaaaacaaatcatgaatagaaaggagaaagatgttaccacttgttgcaatgtatgagaataaatgataccaaaaggcattaaaacaatcattcaatattaatcgagcaaaaacaagtacaataacacatcaatcaaacacagtcaatcatc

SEQ ID NO: 14741 - DNA, 251 bp, Glycine max
  unsure (1)..(251): unsure at all n locations
agacgacatcaatgtcggtaaaaacgttgttgaaataaagcgcatatttactaaaatgccaccgcctattaaacaacgacgtttttcggaccagcgtccttgaaagcgggtcctagaatcaagagtttgtagtagtgaatattttatattacaatctataactattttcttttacattgtacatatcattcaattntttcatattagtaatttctaaattctaatatatctntttctctataaatatttta

SEQ ID NO: 14742 - DNA, 436 bp, Glycine max
cttaagcaacattacactactcttgactcctaggtggaaatcgctggtgttggcaggttgaacatacatacttgtatcaattaatgggaattggtaactacgttattagagctaagagttttactgaacttgttagatatctggaccaaaattatgatgaaaagaaccaatcggtttagattatacgaaaaagtcagagaaatcactcatgttagcacataaatctgtgtcctggaatagaataaaagagtgaaagggaggtgtgcttgttgctttggctcaaaatttgatctataattggtgactattttataccagacctacttgtgaaacgttaatcgataatcattgtgaaatacgtgtcaaaactacaggactcttgagtctctttgttatagattgttgtactatactgtggagacattctaagtttctc

SEQ ID NO: 14743 - DNA, 206 bp, Glycine max
aatagcacagttttgttttacaaaagaattatctcacattttctaagttaccaaagagattactctctggtaatcgattaccagttgtcagtgattgattaccaacgaccagttcggttttcaaaatgttatcaaatggtgtgcaacattccaaaacgattgtcccatagtgctattgattacactatattagtaatcgattacaa

SEQ ID NO: 14744 - DNA, 389 bp, Glycine max
  unsure (1)..(389): unsure at all n locations
gaaagacaaactgcacaataattttaaaggatcaacctagcactaaaagtagcactagtaacagcttttcatttgtgcgaagacatacaattcctagaacttgatggaaatcaaattttctatcaaattgagactggttcgattgcaaattctaatagtaaactcttatcagatgcaaagtngttgaatatttgttaaaacttatgctttccctacaacagaggtgaaaaataatagatctagtgccaagagccttgcggggtacttatatggtggactcaaacccaagtctaatgtacctattgtgcataaacactacatggacaacgtactttgtgcaatgttgtttaaaaaagatatcagtctatggtcttcaaccagtaagttag

SEQ ID NO: 14745 - DNA, 226 bp, Glycine max
ctatccccgcatataacacgcaagcactgaagctcctcccacatctgtgactatattgataaaactgactcgacctttatttggaaaggttcctacgggaaacggactcatatgagtgggttggaacaatactactacgaataggaacaaaagaggtcagccggtgataaaaacttgtttctaaaccggttattgtgcacataataagacaagattgattcatcat

SEQ ID NO: 14746 - DNA, 388 bp, Glycine max
tgtagggttaaagtctcacgaaagcacttgctcatgcttcatttgttagccgcggctatacgagacatcttgccaaacaaagacaggttagcgataactcgcctgtgctttttcttccatgctatatgtagcaaagtcattgatccagtcatgtttgatgagttagaaaatgaggccgcaattatactgtgccagttggagatgtattctccccctgctttctttgacatcatgattcacttgattgtgcatctggtcagagaaatcaaatgttgtggtcctgtttatctacggcggatgtactcggttgagcaatacatgaagatcataaaatggtatacaaagaatctatatcgtccagaagcatctattgttgagaggtacattg

SEQ ID NO: 14747 - DNA, 426 bp, Glycine max
  unsure (1)..(426): unsure at all n locations
catgcaagcttaacatagcanagaacgtatacttagatactgagaaccccacgactcccaatacacgcattactctcctctcgtacataagacgtacaacttatatatttcatacattacatatataaaacatagaacataacccatatgtttcatacatcatatatataaaacatataacccatacatcgcatatatataaaacatacaagtagcaatgatatggttatcacctctaacaaataaagccaaatcatgacatctaggatgtatttaaaattgcaacccaatacaactgacaggtcgcccaaaattaaactacgacatgtaggctgcaaaagggaataaaataaatcatagcacatattctatatctaanataaaaataaactaaggtcacaaccaaggcaccactatgagaattat

SEQ ID NO: 14748 - DNA, 357 bp, Glycine max
  unsure (1)..(357): unsure at all n locations
agcttgtagccattagaagagaatatcatgnttattggaagtatgacngaaaangnnagtcagtttgtcaaattgattgcgaaggaatgcattaatcatatcccggtgagagtgtgatcctttaattctgagagaaacaactatcatttagtactgatttttgcttgaatctctgaagtatggactgaatgcatgaaattgaggatgatgaaggccatgtttgattgtgatagccacttagccaaaaagctgaccatgtgcttgaatgaattattgattgattgaaccttgagcctatagtgttatctcttgctaccttgacttaggttgtaggagagcatcatccataggaaacgt

SEQ ID NO: 14749 - DNA, 402 bp, Glycine max
agcttccaccttccacaatcttccttacttatcttacaaccaaacttaacctacatggttaatttgggatacatgtagattacaaactagaagagtgtgtttaaggggattttatagcgaaacaacactcatgggttggatcttcattgatgctttggttgtatttcactccattttcttccttttagcacatagaaggttatggagggtggagagcatgtgattttcatttttgcactgtgtaggtagtctcttacctttttcacaacttctgtagccatcctttaatagttttatagacctataggtcaaactagtcgttatgacagttgggtctctttttctctttcttcaaaagcttgcttcaagtttgaaatgtccccaagaaaatagctgttggaa

SEQ ID NO: 14750 - DNA, 472 bp, Glycine max
  unsure (1)..(472): unsure at all n locations
nttgagacacgtagancnttganaacggacactcgaaactcagcttaagcgcttgtcgcccacaccgttgttaatnttttggacttagacgcaggagagaacaccgctgtgactagaaagacctatgcttacttgaattactgggttatcccactttcgatgacatgaaagacctatattgtacgaaaagtgaaaatcagcgatattgtgattaccaccaaattcagccgactatgttatgactgctggagaccgtatctcgcacgatcttccttagccttaaggagcactgtaaggctcatcaagtgttggaagatataagctcatagaccttgttacggccttggcagagcacataacactatgtattgatggtacagagcacttcttacatctagactatcattcgcctccacttgcgttgtagaagatactaatttgaacgtgtgctggaaatcgaaagatagatgct

SEQ ID NO: 14751 - DNA, 335 bp, Glycine max
  unsure (1)..(335): unsure at all n locations
agcttaaancaattcttagttttctntgntctaccaagccactagtggctctatacaagtaagaaagatttgttgtttgtgtctacacaatgactaactgtttgagcatcttacagacaaatatggaatctcagcactaagtttattttctcaagataatcaaagtgttttgagagagcttttctaaactttacaataatttatagatatcttttttacagaaagaatttgaatgaatgtgcatcgggttcatgtttcatttcttcaaagcttctagtatttataggccttcatcttcaagtgtttgttgtctcacgacaacataatttcttcac

SEQ ID NO: 14752 - DNA, 259 bp, Glycine max
ctgatccaccatctctagtggcggatccatcttcttccgagctcgaagcagctcccgcatcttcacctattattattattatctctcaagactctacaaagtcagcatctggatgagctgctactccttctgctacccctgttctccatctgacagatgaagaggatacacaagaccagtcacaggaattctaaattcctgatttttcattttttggatattattataactattatgttttagtacattgttttttttg

SEQ ID NO: 14753 - DNA, 271 bp, Glycine max
  unsure (1)..(271): unsure at all n locations
agctagccnngtttcttgttatatnngatttactcanggncactatgaacgacaaataccttgggataaagggagngccgccatgttttcaaagcccggactaaagcatacaactccttatcataagttgaatagctaagggtaggaccacttaacttttcactaatatacgcaattggatggcctttttgatcaacacagccccaatcccaacatgtgaagcatcacactcaatttcaaaagatttttgaaagtttggcaacgcaagtat

SEQ ID NO: 14754 - DNA, 377 bp, Glycine max
catcgctacgatatggctactctaaaccacataaatttcaagtcttaaatgagaactgcgataattagcttatgaaagacgtgagtgaactgtttgcgaggtgcatttgccaaagaacacacacgtacttagacgaatatatgtatagatttattaactctctgcacatcatccacatgatgaatggtaaatacgttcatacatataattagatctataagtgacatcctctagttataacgagctatcgaaccaactaccattgagtgggttaacacaacacagatgtctcccaaaataatgctaacgtcattacgtcggctaggcggctccaacaaaagaacctcactcgacataatgtactgttgccatctact

SEQ ID NO: 14755 - DNA, 217 bp, Glycine max
ggaaaaccaaagccgggcaaacaagccccccagccacacacagccaaccaacacaccaacaaccaagcgaagcacccaggcaacaacaaaggcgaaacccgcgaacaccacgcaaaaccagcgggcccggcaaaacccaaaacaccccccaaccaaggccacggggaacgaccgaaaacaagggggcaaaagggaggcccccccagccgggggacac

SEQ ID NO: 14756 - DNA, 401 bp, Glycine max
  unsure (1)..(401): unsure at all n locations
actttctcggnttcaaaactatatgtttcagaaaatataattatagtaatctatgtatttaatatttttttaaaatatatataacctttcttaaatatatatatatatatatatatatatatatatatatatatatatcacataaaaaaccaatgatataaaacgaatgaagtatttcaagtaaaaaattgaggtatagattgtttctcctgtatagatagtagtatcattcactttcaaggtagtgttatttgaaataaaatactactaattatacaaactattaagacaacataattttctttgtaaaaattacctctgattaaaggagttagagtttagctgtaaattcattcactctccgcatctcacttatcttttaccagcctcgcatctcatat

SEQ ID NO: 14757 - DNA, 308 bp, Glycine max
  unsure (1)..(308): unsure at all n locations
aacttaaacgcgcagaaaaggagaaggtttcngtagtggagaacatcaccttgttaaggggtcaacttactgtatccggtgcgaagttgctttcacatgtgaactgtttcaatnttgaactgcactaaactatatacttaatacttgctgtcatagtagatacataaaaaagctgtgtgatgagcacaaaaatatggaagctgcaatttttgtggacatggatagatgattagagagaatctgatgattcttaccctcttcgtcatcaactggttttgaatgagtgattcgcgaatagagtaatgctt

SEQ ID NO: 14758 - DNA, 446 bp, Glycine max
atttgaaagtgtacttcttaggatttatctagcatactactatatgatctatatcaactgttcatagcagttgagaaagttaaattttgtatacctgtaagaagaatgcctacttaggatccttattgagttggagttgggtatataaatagatttgtgtttacttctacttctatatgcctctctaaattaagtcttattttttttaacatttacaactaccttctttttaagtgaacacaatgtaatgtttttcaaacaattaaggaagattagtataatgtataagaggtattggaataatatttttgaaataattgaggggttagtgtaggggtaaaaaaagtatgaaaagattgtgaaaatttcactaaatctaagaaataactagtgtaatttactcaatcaaatatctttaagctagataatgtcttcttcattttctt

SEQ ID NO: 14759 - DNA, 340 bp, Glycine max
  unsure (1)..(340): unsure at all n locations
tactttntataccccctgttgacgtgcttaagccattttacttaagtcatttctcgcttaacttaaaaataaaataaatttccaccgaacgtttgaattatattatccgttaacttcggttaaaataaattccgaccgttcggtcgtgccgtaaccacgttggaaatcaaaaagaggtagaaaataatataataatcaaaaagacatcttttagtaaaataaagcggaaaatcaatcggacgttttctctttgggatttctcattcttaatcgaattgattaataactaaagtgaaactaaggctaatatcaactcgcctagtcaagcttcgncacaaaa

SEQ ID NO: 14760 - DNA, 428 bp, Glycine max
  unsure (1)..(428): unsure at all n locations
attcgcanagcttacggtaaaatctgggacctagccattgtttatgtctctacagaggccgntgcctccctcgcccagtattatgaccagccgttgaggtgcttcacctttggggacttccagctatcacccatggtagaagaatttgaagagatcctacgatgccctctacggggaaggaaaccataccttttctcaggattctatccctctttagctagaatttctaagatagtccaaatctcggcacaggaattagacaacagaaagcatgtcgaaaatggggtggttggagtaccgacaaaatgtttggaggcaaaagcaagaatcttggcatgtagaggcgaatgggccccgttcatagacatcctcgcacttttgatcttcggaggagtactctctccaaatgtggatgggttcggggacct

SEQ ID NO: 14761 - DNA, 340 bp, Glycine max
  unsure (1)..(340): unsure at all n locations
ctcttatgcaaaacttttatctcatagaanactttttcttagagacaaaaggagaagatttgtagaagcagagcaaattgttgaagaccgactntattcataaagcagaataaatcacttggttagccaatgtggttatggtgaagaaatcaactagaaaatagaggatgtatgtggattatagcgacctcaacaaagtaaggatgcttaccatttgcctaacatcgacaaattagttgatagggcatgcaggtttagattactatattttctagatgcctacacgggctataatcaaatcaagatgtgatacaatcctaccccccaagggcattggata

SEQ ID NO: 14762 - DNA, 268 bp, Glycine max
acccaaacaaaatcaaccaagtcttctttctatccaagtcttcaatttcttacctcatttactcaacttcattgttttatttttgattttttttatttttttttgtagtttttttttttttgaacgtggatagtagcaattgaaagcatttgaaaaataaagcagcaattaggcaatatatgtatacatcatcaagcatggccaataaaaacatattatccaatgaaacatacccccccccccccttcacacttattcccaaaacaat

SEQ ID NO: 14763 - DNA, 267 bp, Glycine max
  unsure (1)..(267): unsure at all n locations
cacaacaagnnnnccacacccacaangcgcgcanaaacccaccagccccgggggcccaccnccaacngagcncacgnacgcccacgnagcccananccncgnancncncaacaaccgggccccagcaagccncccaagcngccacaacanccaagcaaaacaacagncacacagcacaagcnancacagccaagcaaaacaaagcaaaggcagaaaacncngccaaaacaccaaccaaaaancacagcggngcccacacaaagaccc

SEQ ID NO: 14764 - DNA, 438 bp, Glycine max
  unsure (1)..(438): unsure at all n locations
tctcgatatgttatacgcctaaatcggatttctgagtgtttagntatgaccatnngaanttctcgagaccttccgttgttcaatttcgagcctgtcgatatattatgctcctgaattggacctacgagtgaaaagttaagaccatatgaattgctcaagagctaccattgtttaatttcgagcgtctcgacatgtgatgcgcctgaatcggacctccgagttaaaagttataaccatatgaatatgtcgagagcttacgttgttcaattccgagcgtctctatatgtgatgcgcctgaatcagacctccatgtgaaaagtaacgaccatttgaatcgctccagagcttctattgttcaacttcgagcgtctcgacatgtgatgcgcttgaattcgaccttcgagttacaagttatgaccatatgaacatgtcaagagc

SEQ ID NO: 14765 - DNA, 411 bp, Glycine max
agcttgtctcatgcgttatgcgatatagataccaacatgttatctatcatcgccaagtaccaagaagagttgggtctagccacggcccacgagcatagaatcgcggatgagtatgcccaagtatatgcggaaaaagaggctagaggaagggtgatcgactctttacaccaagaggcaaccatgtggatggatcggtttgctcttaccttgaacgggagtcaagaacttccccgattgttagccaaggccaaggcgatggcagacacctactccgcccccgaagagattcatgggcttctcggctattgtcagcatatgataaacttaatggcccacataattagaaatcgttaggaaacttgtatggtctctcagaccttgactagatacgacttcctttttgaaataaaa

SEQ ID NO: 14766 - DNA, 379 bp, Glycine max
  unsure (1)..(379): unsure at all n locations
agcttgtgcaaataaancactttttctttcatctctagcatgcattnnctttctttacccactcctcacgtttggttttttagggaaaaaacaccataactaaacgcgccgcaaggtatccctatcgcaccagatccaaatctaaaacgatgggtgatcaagaggagacgcacgaacagatgaaagccgacatgtcggctctgaaagaacaaatggcctccatgatggaggccatgttaagtatgaagcagctcatagagaagaacgcggccactgccgccgctgtcagttcggctgccgaagcagacccgactctcttggcaactacgcaccatcctccctcaaacatagtaggacggggaagggacacactggggca

SEQ ID NO: 14767 - DNA, 342 bp, Glycine max
  unsure (1)..(342): unsure at all n locations
gggactcctatcattatgcatgttgagcacttgntaagtcctaacccaatcaagaactgtcgcattaaccatatgctccttcatgatgatatttcctcattgagcactatgcatgtttgccagcctgataaaccgactgctaattttccgctagtagttcaacaataagagaaaaaatatgttgctgtttttcatgagcctaagggtttaccacctacaagggatatttcacaccgcattcctttgtattcaaatgcaaaatcaatatagatcataccatattaatatccttacttccaaaagatagaaattgagccattggtgactganatgcatcattct

SEQ ID NO: 14768 - DNA, 393 bp, Glycine max
catgcaagcttgggttcctaggcctagaatttatttgttcactcattttaaatccttcatgctgtccctatacatataaaacagtcccacaatcccaagcttacaaaaccatgcccatatgtcattgaggcatttcactgagcacttggtgggcgcatgttttggcatgaatagcaagagaatgggggcaatgtggcatcccccattactccagaatgcaacataggcctagggccatcctatacaaacccctaactcacaccaatcaagcatgaaacaaagccaaaattgccccatagacttgggcatattcacacaatttagagcaccaaaagaagaccaagatacatcaatggaaagcttgaaagctcaagaatgagatacttacttgat

SEQ ID NO: 14769 - DNA, 442 bp, Glycine max
  unsure (1)..(442): unsure at all n locations
ntactaactttcactgcacattttgtaatcattgattatttttattttatttgataaataaaatatttaataaaatcaaatattaaatatacataatgagtaataatatatacattctactttttttgaactacctaattttagtgtgtttcttgcattaatggttgtggaggtttgaaaaaaatgaattttcataaaaaatatcattttccccatttcttataaataatgaaaaaataattaatgatttagagaggtccatcaagtctcaactctaaacacatagtacaaaatgttgttctaacaaaaagaaaatcaatacaaaccggaaaattcaaccccttcaaaagcactgcaatttggctctcacttgcaactcgcctctcacttgcattgatttagaatcttaaaatatctttcctcggtgagagacaaaaatgtc

SEQ ID NO: 14770 - DNA, 405 bp, Glycine max
  unsure (1)..(405): unsure at all n locations
actaagctntcacaacatcacaacctccttcacactcttgcnttttctggttctgaanccaccacgaccgccagctcaggatcaatgttttgcttgtcaacttctaacatctaagcccttagtttcctaaagttgaaatccttcatgatatctgaagcaaaaaaaatgaagtcaagtcaggatagacgtaaaacatttacaaaatgatatgcataatcacaaaactcactctctatggagccttcaatgttcccgctaaagggaaagtgcagaacatccctaatgttcatcctcctcataaatcccaagatgatggcaatatcttgcctatcatcgggtgtcaaaaattgattggatcaagactaatacctctgtggaactattgccatacatggaaatttggag

SEQ ID NO: 14771 - DNA, 390 bp, Glycine max
  unsure (1)..(390): unsure at all n locations
agctngnnacatttctatattattnatcctttctagccacgacgggctntaacacaaataagaagatttattggtttgattgcacaatgactaacattttatcatcttacatacggataaatagtttcaacacttagttttttctctcaagataaacaaagtattttgagagcatttataactttacaagaatttacacataaaattttatacaaaaagaattttgaataatgagtgctccaattcgtacttcatatcttcaaagtttctagtatttaaaggtctccttcaatcaagtatttgttgtctctaaatgaacatatttcctctcttaagcttgcatatgaagaatgtgatcattggggcatttaatgttcgtacttcttcatg

SEQ ID NO: 14772 - DNA, 255 bp, Glycine max
  unsure (1)..(255): unsure at all n locations
taataaaatccttagtgacctctgttgngaatgtgtaattgcatttaatgagatgatgcgcaaagtccggatttgtgattgcaatcgcgtttgaatgaaagacacataactgatatacttgtctactcaagagaaacattggccttgagaggagagacacatggcttgctctttccttgataattgacatgatttctgacctctctaaactctgagtacattctttgtatgatgtcatcatgtaaaccataacaa

SEQ ID NO: 14773 - DNA, 372 bp, Glycine max
  unsure (1)..(372): unsure at all n locations
cccgcgccgatatggaaggtaatctgctttctaatgttaatggagtagaaatggttattgatgctaaagtgtggaaggcagtatccgggctggacatgggtggagtctgcaagtttgaagaatgtcctgatggttacaactagatgcaggcttatagaggtatgctctttgacctatcaaggaatatgaggaatcgcctaggtgtaggtggcttaactactaaagacagaatgctagtgtacctcataacctacattctcacattgaggtctagaaatcacggacaggcgactgatgatgatttatagatngcgtatggnctaaaattaggtattcaaatgaactgggtacttctaattgaggacatcatgt

SEQ ID NO: 14774 - DNA, 414 bp, Glycine max
  unsure (1)..(414): unsure at all n locations
tagtgctgatgaagactaggtgatctaagcacattgtacacctataatacttactgaaaatgatgttaatgtaatttctcgtttaagtattatgtgaatgatttggatgagttgatgtatcgtgtgaattagccatgtgtgatttgttgaggtggatgttgagttatgtggagttttattgacttangttaaaataatgagatttcaagttttacttgaacatgttcggataagaccatgatcccagacttattaaccgntggatcacctttaaatttagactgtaggttcgtaacccacgtctgtcattttttgaccgtggcatttacaaaatataactattggacatctcacttagtgcaagaaacatgctaagcacaattccaacccgagaggaattgcgcttagtgcaaa

SEQ ID NO: 14775 - DNA, 377 bp, Glycine max
  unsure (1)..(377): unsure at all n locations
cccgcgacatattctcaggtaccactcttgtggtcaactaataaaaagtggaagactgactctttcacgctttctcacacatggattattgggttatggngcacccttcatatgtggtactaggtggcgatcgggcgatggcgcanaacaaatatcccatttctacaagcccaggcataagtacaccatccccaattgcccacctttaaattgagctcacacacacgtacgtagcccttctcctcgttcctctcagcactgggtccccatcaacccctccaagctttcataatgtcaaatcaattcaattccatttgtcatgaaactaccttaaaaaaaacagagtggaggcagaaatctntacacaagattaattc

SEQ ID NO: 14776 - DNA, 359 bp, Glycine max
  unsure (1)..(359): unsure at all n locations
aaagggttactatttatttgaaccatgattgttgacaatttgaactggactatatattatatgcttgattcaaaaaaaatataatgttgatttaacttccatcgctcggcaccttaataaaatgaattaaaaggttactaagtttagaacaaaatatatatttatttaactttcgttttgcaggtttcattttttcttatagagctcatctcttttaatttatgttacactttttctctgttatgttatactcatttaccttatatttaacaagacaatatattaactgcataaattcgatttcattctatggtatactgttntatgggtgttataacttttattgtactaaattctct

SEQ ID NO: 14777 - DNA, 147 bp, Glycine max
  unsure (1)..(147): unsure at all n locations
cattaatatcgagcgtgtggattctgacgggtctcattcagacatccgatttgatttatatgggcggttgaaanagctcggagcatcgacattcaatgtccagcggcgaggaatattaccggactcactcgaacattcgagagaaaa

SEQ ID NO: 14778 - DNA, 433 bp, Glycine max
  unsure (1)..(433): unsure at all n locations
agctnngaaagctgaatattncatnncctatgtctttgtataatgaagagaactaggcctaaatccataaaatttaaaatctagccaagtggggggcttgatacaaaacatacctggaaatgtctagtacggttgactgagaaaattaatattacattttccacagagtcaaatgcttcatttagtttggattcattgctcctttgagttgcccaaactccttgttgtacagataactccaaattttcacgattgcaacttttaacaataaaatacctaatgtttttggtggagaagtatattagagcaattcatacaggtgagaaaatagagattcaactgaagcaatactttatagattataggtttggttaaatactcagaatttgaacgcacacccctcgtgaagacttatcgatcttttaacttatgg

SEQ ID NO: 14779 - DNA, 449 bp, Glycine max
tggagtcctgaagatgataatgagacagaactattgtaactgaattctatttgaaattgaattatgctctgacatctaatacttacgtgtacaagacatccacatacgggccttcaagttcttttacaggagtaacatgcatttttgagggctgatagctgatactcaggatccttaattgctatgatatacttgactattctaatcatttttggcccgagactctgaagagatcccactgcagtcttgtataaatgatacgaggatatctcttacctgcaaataaatgtcttagttcacaagcttaatataagacaataggaaatagtaagcatgttatacacagcgaaagatcaattacgatatagatttctaggccttaggataccaatctgagacgagccgacttgatatattcacgagactaaatcggagctgtgcttatgaac

SEQ ID NO: 14780 - DNA, 441 bp, Glycine max
  unsure (1)..(441): unsure at all n locations
agctntgcanaaagtgaggtttcatgggtttatattttaccaactaaatgcgtatttggagtatcaattggaaatttcctagtattcttggtacatcagaaggggactgaagttgataaaaacaaggcaagagtaatgttaaaggccaacccacttagaaacaagaaagaactaaagagcctcattagtaagattaacttcctataaagattcatagctaatttgactggcaaaatgaaggtcttctttcatttgctaaaggtgaaggataaaaaggaattcgtttgggagaagaacaacaacaagcattagagcagatcaaaaaagtgttagccgaaccacccattctagtgtcgcccataccagggaagccttctagcacaagatgcaaaagatggaattgaaagaacaatgtactatattagccaattattacataat

SEQ ID NO: 14781 - DNA, 457 bp, Glycine max
gaggagacctgagaatcgtggaaggttcatgttgggttacgagtctactcatgctgacaagaggagggtcaccctagaaaggaaggagagaagcctggcccatctacaagggcgaggactacaagtggaaagggtcctcatttgtcacatcagtgaaagctttgtcagtgcaagatggatgtgcgaggatcaagttgtggtgatagacgaagaaacccctcaagaccaaccaaattgggttcagccatgtcctctagactatgaattggggaattggcaaatcgtcgaatgacctgagatttttgtgacaaattcaatgtaatccaatagttccaaccctattgttgggcctaggctttagggtctgcttcttttgttaggcatacctctttctctaatgttcccacaattataaatacacaacccttttcatttgatgtgttccctctcttccttt

SEQ ID NO: 14782 - DNA, 439 bp, Glycine max
  unsure (1)..(439): unsure at all n locations
taagcacctgcagctgcagcttgcatacttcatttttattgtgttagatccttggataaactgatacaaccatgtaagctatttttacaactttgtaatcatagttgatattcatcctttgaaatttttatggaaattgcatctcctttcaatcagctcttaggaagctagataacaggaaaaacacatgagtttttcggagctttcctaaaggagagattttgcaaaggttggttttctttgggctgcaaggatggagaagaagaagtaaatgcagaatttaggatagcccatgggcaaatgggagatcctgctattagagataaggcgagcaatatgaagaagctntggagctcgaagatgttntgtctttttacatgctcaactctttgagtggcattngtattgattggtgcatcttagtctctatatttttata

SEQ ID NO: 14783 - DNA, 435 bp, Glycine max
  unsure (1)..(435): unsure at all n locations
tcgattcagggagttaattgggttcttgtgntatttgatgattgaaaactttctaaatcttactgtaagggtatgtgaccaaacttttcattttcaagtgcttataacatgtatctgtggcttttttctgcataattatccagagcagattagctgcatatatgtatctgttaacaagtttatagttgcataaatgatgcttgaaaatgaccaaagtgaatagtgttgcaggattttgctatcatggattaattgctagaattggcaaagcattttcatgttttaaattaaattaaagaagctggtaaaggatgtctcatcaaagaaaggcatcaaagtattaagattctgttgtcatggattctataccagtatttcttagcttataattgctntaaattaaattaaacaagttgataaaggatgctgcatcta

SEQ ID NO: 14784 - DNA, 369 bp, Glycine max
  unsure (1)..(369): unsure at all n locations
agcttgcttctttnggngcatagatagctttgctaaaaattttttaagngncatgaatctctgacataagcttcaaccaattaacattgtttgtatgacaactgttgtagttggacagcaatcacacagtttgtccaccatggtatgctttatgttcctattggttatagttttagtatgctttatgttcctattggttatagctttggtgctggaatgttcaatttggagtccacaaaaggaggaactccatatggtgttggagtttttgctggagatggtacaagacaagcaagtgaaatggagctggagctcgcagagtatcatggcaagtatatatgaaattagcccataaaagctagaatggat

SEQ ID NO: 14785 - DNA, 389 bp, Glycine max
  unsure (1)..(389): unsure at all n locations
gcaacaaannngagatatgaatataaacaatttagaaataggtgggattctttgaaaaaggaatgaaaattatgggttaagcttatcgggaaagacacaggtcttggctggaattggaagaagaaaaccattgttgctagtgatgaatggtggaaagccaaaattcaggtatgtattattcaacgaaaatagagtttttgtggaggccagtcttttgttcttttattttttatgtgtgattctatttcaaagaaagaaggattaatagtttatcttggaattctaataaaaaaatagataatcatgaaattgaacaatgtgttttaattacaaagattcttgatctatgaaaaanaaagattaattcttgatttagaacaaaacaatta

SEQ ID NO: 14786 - DNA, 413 bp, Glycine max
aagcacctgcagctgcagctgagctaaatcaaactttttttatttgagattatctcaggctttatatgtttgataaaagctcacaaacaacttgtgtttgtgtatgtgtatattctatacaaaagattgtcattttaaatgagaaaatgtatgtatactaataataataatttatttattgttattacttagtaaattgttatcttattgatttattactgtctactatttacgtaacgctacttttcaaagagtatctttactctcttcaacttctagcataaagatatgtactcaactaaatgctaaattaataaacatagaaagaatacattggagaaaattcgaggtacgaaaagaaaattattgttagaatctacaatatgttgaatagtaactgtcatgttgaatgt

SEQ ID NO: 14787 - DNA, 271 bp, Glycine max
attatacgctgactaaataccgttgatgcagacacaacctaagtttacactccacacaagccatcctgctaattcttttattacatgtaacacctttgcaaacgaaaaatgtatgatacgttcgacatcacctgatggctctaattggtttcctatacgcgacagactactaccctgcatagagcgacatgcccacgtgcgcatatagcatacagagtatgacaactaccaaagtcatgagacattattactgtcgtacattcgaaaacac

SEQ ID NO: 14788 - DNA, 383 bp, Glycine max
  unsure (1)..(383): unsure at all n locations
agcttgcctaaggtgtngnncttttctctcctctaatgtgtccttatggcatttcttattctgtttagtatcctagtagttaattaacctgttgcaacatgttaggagtcatttcagctgtttttggttataccattcaaattcttttctgtattcagtgctatgaatctgtaaattctgttatatggtactcttttggtgctttttaataacttatgtatacactgcaggaaggtgatgtaattgcttatcgattgattgagttaacagcatcttggactccggaactttcctcctttagggtgcatatcaactatcaagtctgcttttggattacattattaaaaaaaattgcatcagaagttcaatacgaattacatcta

SEQ ID NO: 14789 - DNA, 450 bp, Glycine max
  unsure (1)..(450): unsure at all n locations
ggcttgttccctggcttaatttgagactattttatgttttcaagttattacttcgnnggtgttggaagatgaatgaacagtcattagtcttgaaatttggatttagagctgaactcaactctacaaatcggtttgtagggtgagtatgacttaagccttatagggactacattgatcatatctctagctgatgagggatctcaacacactccctctcacccaggattggatatctggagcgtggacaaatgtgagtgacccaataatcacacttccttgctgcctaggaatagacatctagagtgtagataaatatggatgacccaataacattctaggataaactttgatacaatctaagaatttggacttaaagctgaactcaaccccacaaaattagcatgtaatgtgatgactgcctaagccttatgaggactacattggctatat

SEQ ID NO: 14790 - DNA, 343 bp, Glycine max
  unsure (1)..(343): unsure at all n locations
agcttgntgtgttatacatctcaatccattttttatgcatcataattttctattgataaatnttaaggactgtaatagccttagtaacttaagacagcaattggattcttcaacaactctaattctagacaatgtagttacaaagtatgtgcatttttcaatagtgagatccaaacgtattggatatatatccctacatggatgtgaaggattagaatgtggtgtactttcttctctcatatgtctccatttacagaacttgtatcctgaattcatcattnggaagcttgtctacacctctaatttccatggatatttttgggtcatctacagccaaagcatg

SEQ ID NO: 14791 - DNA, 502 bp, Glycine max
  unsure (1)..(502): unsure at all n locations
ttgacccttttgancctganacntcgagacccgtgaaatctcaaactctcatgctgacggacattagcaggcggatttgatagcattatttttataattagacacacagccaagccgtgtgcctatccaaagtaaagctttgcttacctgtcaggctgctttcccaagctctgcatcgacaaagagagtgggaaaatcgaatcttgagatccgcacggggtttactacaatcaatatcaccgacacaccatacccagggctccaatttgagtcactggctggaaaggataaaagtaaacacacgcagcatggagatcacaggcggaccgaggagatcttaccctctccatgtgagaccatgaagctcttacgtggacgacatgtgccaccaatgacagactgagctctttgatattaggcaagcgattatcgtgagaagatgacacatggttgatctgtcgtttgttatagctgtgcaaataggaatctatgtaactggact

SEQ ID NO: 14792 - DNA, 407 bp, Glycine max
  unsure (1)..(407): unsure at all n locations
agcttgtcaatgtattcttgtatccaacttactatacaagaggcatcacttccagtcctgctccaatgaataaatctttataagtaaaacatgtatgtttattctaactcaccccatcttggagcttgtcctctacagcagtggcaccaagaagaattaggttcttctcaatcttatctgatacttcctcaatcattatatcctgatcagcactgactacattcttggccctagagaatttactatcaaactccttgtattcttctgcatcaagttcacgataggccagtataagggttctcagacccgcatcagcatactcatgcacatgctccatggttntctcttcaaactcccttctattcttggcngcctttcaaacatggtgctgcatgaaaacatcactc

SEQ ID NO: 14793 - DNA, 228 bp, Glycine max
ctgactcaataccgccgaccaagactgcatctgagtatactcttcacacaagccatcctgctacaaagcatataccatgtttggaagttgcacgcgaataatggaggatatattcgacatcaaccgaatggtcattactcgggttggcttagacgcgactgactactaccactgcatagaccagacctggtctcgtgcgcataaacgaatacatgagactgcctacta

SEQ ID NO: 14794 - DNA, 377 bp, Glycine max
  unsure (1)..(377): unsure at all n locations
agggggagcatgaaattgaaggaataaaagagggacagaagtgggactttgaattatgtctcacaagactctcattcatcaaagtttcaacaagtgttacacatgcttctatgtatagactaggtagcttccttgagaagctgtcttaagaaaacttccttgagaagcttctttgagaaaacatccttgagaagctagagcttagctacacacacccatctaaaaactaagctcacctcctagagaagcttccttgagaagctagagcttagcaacacacacccatctaaaaagtaagctcacctccttgacaaaatacatgaaaatacaaaaaaaaagtccctactacaaagactactcanaatgccctgaaatac

SEQ ID NO: 14795 - DNA, 322 bp, Glycine max
  unsure (1)..(322): unsure at all n locations
gattgatttttttgattattctattattatttttttcaagatattttgattattttattattattctaccctctttttatataaccgaggttacaacatgaatgatcggttagattttgctttaacagtgattaaacgagattacaacacanatgatcggttgaaattcattttatcaattactaggtgagaaaatggcttaaataaacagctaaaagctcattaaaagtggaagaaaaggaaaccgaaagtgacaagatgatgatgaaggcaagcaaaacatgaaatgaattgaagcctcggattcgagcacttatcggtt

SEQ ID NO: 14796 - DNA, 374 bp, Glycine max
  unsure (1)..(374): unsure at all n locations
aaaggaaaatcctagtatttaatacttatactaataaaaaaactatacattacaaataccataaatgggaaagttgggacaattatacaagtttatacacaaagttagtcgttctcaccgactaacactggcgtagtatatagcatgaaataaaattcccttcctttgcccaagcactgcacctacgacgtaatcacttgcattacacatcagctcaaattcttgtccccaatctagtgctgtaattactggagcaaacactaatctggttttcaaatcattaaatgcatccatacactcttcattaaacacaaatgcaacatctttattcaacagattgctaagtggtttggtgactntngagaaatctttta

SEQ ID NO: 14797 - DNA, 376 bp, Glycine max
  unsure (1)..(376): unsure at all n locations
gagaagtgaaattgagaatggngtaaatttggagcaaactctcacctcacacaagtctataacatcaatttaaacttgttcaaactggatttacacctaanattccaccgaaccaaaatttgactcctcaacacccaattttaccctagaaatggctctttgttcactttggtcatttgtttttctctcttgcacagcccaagcttcctcataagtcctaaatgacatttcaaactaggattaactcactttaacctccaaataccactaaatccagatttggcctcccaactctcaaaaactcactctttgtccactcataacaccatattctcactttctaaccctaggttaactctacccttcatccctagca

SEQ ID NO: 14798 - DNA, 433 bp, Glycine max
  unsure (1)..(433): unsure at all n locations
agcttggccttacccttgataccagcctcttgatcttgcaattattgccacaangggagcatatggtcccatgagtgaatttacaaccttcggttcacacaagagaatatgtacaaagctttttgcttccgacactcacccctctttgtaaatactaccggaacacagctttcgtcttcttattggctctcctctccccttttctttggggagtacacaaactagtatttaatatttaaagacaagttacatgtgcaaggaatcttgcaacttttcaacaagaaagaagagcaatctttattacttcaaggatttctttgattcaataggatgattcagcttcaactacgccatagatttcgaaataaaaagatgaagctttgtctaccaaagtattgagttaattaattattagcaccgaatcagactaatg

SEQ ID NO: 14799 - DNA, 412 bp, Glycine max
  unsure (1)..(412): unsure at all n locations
ttctctcaataaaagggctatcttgtcatttcactttgtatagggaancctatacactggcatgttgattgacttcaactgcaccccaaaatgtatatgaatctcttgtgctatctcattagcatttacggttagaggggaattcgcccttgccttaatccaagagggtatcgggttctccatcaaagtagagtgatgcttaccaaccatttatggaactatcacattcgtgtgaggcatatagaacgacatttgagttgtttgccccacattcatcgactggtgatgtccaatcaatcgatgacattaggtccaccatgcctgacctttgcccatataccctgctgacaattgaaacattggcatgagagccattgaaggtaatgtaggtagtgcaatgatacctaataca

SEQ ID NO: 14800 - DNA, 291 bp, Glycine max
  unsure (1)..(291): unsure at all n locations
agacaagnggcctcagatatcttaagaaggggggggttgaattaagatattcgaaactttttcttctaattaaaaatctatcttactttttacttaagttatgaattcccttaatgataatcttcttaaatattaattcaaatgaagcaacttgaatatgaatataaagcaataataaataaaggagattaagggaagagaaaatgccaactcagttttatactggttcggccacacccttgtgcctacgtccagtccccaagcaacccgcttgagagagccactaacttg

SEQ ID NO: 14801 - DNA, 305 bp, Glycine max
tgaagatatgtgtcaacgccagaatgacatgttcatgcttggctactcgataaatatagcaatatgatacatagtttctaacatgacttactacataacatgaacgattaaagggctgttaagaatccggtcacattgacgatatgattgcttatacatataatataatgaggatggaatacatagatacaaaccacttatgcttcatacgctggacctgaggcatatatgcggtgtctactactggaggcctcattgtgccatgtataactatctatactctgactatgaagttctatatgatc

SEQ ID NO: 14802 - DNA, 476 bp, Glycine max
  unsure (1)..(476): unsure at all n locations
ncatgaatcatgcactgcagagccnccgatacctcacccgcaggcaggcaagctaataacctatcttgggaaaggggctttataattacgctcacttgccanggcccaagaggaggatgatganaanagggaaggcaaaacaggcaggcccaagaggggnggcccaccatagaccaatatgggaggacgaggtggaaaacacaacctgtccagacctatcccgctgaaccagcccactcgatggggaagaataaaggcgaggagggtctcacgccaccccgcaggaaggggacgcaatgcccatcgaacgaaagagaagacaacataaggacggcggacaatacccgcctcaggaggtagcaacgaaccccacaaatctaggaaacacaagccaaagaattgaggcacccaaaccaaataacgaaaacgggacgcttcgaattccacaacccaagcgagaatcgatgcggcggccg

SEQ ID NO: 14803 - DNA, 389 bp, Glycine max
  unsure (1)..(389): unsure at all n locations
aaacgaggttactattcactcatcaggaatcctatagagatttgtcccctataccaaaacatgagtgatcaagattgcaccgatgacaattaacgacctataacacattcacgtaaatgagattactaatcacccataaggaatcctgtcctttgcgttagaataaggatgcggccccacattgctattccccatacgatttttacctaacatcgcatgtttcaagacgatgtgactgaacaattctttctatgaagagtagactaaacactaatttattcaaattatgcgaaccaaacgtgattaattaagactcaatctaaaccgcttatatttgcggngcaatcttagtcgtttgatcagtcacatgaaaacactagatcacctat

SEQ ID NO: 14804 - DNA, 215 bp, Glycine max
  unsure (1)..(215): unsure at all n locations
ttttctttgtgttntacctttaaaatattaatcttttctttgctactatacgacttggaatgatttaggttgtgtttggacacctatttcaccagcgttgaggtaacatgcaaacacaatcttaatttgctgaaccaacaagtctacaacttagattttgggccgacctggctaaaaacaaaaatatgtgtaggattcatttctcagcatgatgt

SEQ ID NO: 14805 - DNA, 390 bp, Glycine max
  unsure (1)..(390): unsure at all n locations
aaatcaattgcaaccatgattaattcaatttaacacttttactttgaccaaccaaacctcaatattttgtaggcaaatttctttcaaaatgcaagttttggactaagatctattttgatccctaccaatagaaacctttatatcacccttttaagttntaccaaggacacattgaaatgaaataaatttcatgccaacaatatggtaactacaaaaccatggttcaagtaaaagctatgaaagaaaagttttaccaaaactacatttctaacaaacatccaaacgcacactgacatntgaatccatggatcatggtgtagtagctacaacatcaataatggcaccaaatataagtgacaagaaaagtttataataatgaaaattgaaata

SEQ ID NO: 14806 - DNA, 428 bp, Glycine max
  unsure (1)..(428): unsure at all n locations
agcttaagggtttgattcanggttaagtccctctntttttccctncnataaagactgatatcataataagagggattgaattgtgatttttacaaatttttaaaattttttttaaacacaacaatgttacgtctaaagatgaatatgtaagaaaacatatatcaaatttttgcaaagcaatttagacgatgactacagatcttgtaagacaaacaaagattttcaaagacaaaaatcaaatttgaaccctaagtcaatttaaagcacaaaagagaaaataaacaagataagacacatgaaattatattggttcatctaaactactgagactatgttcaattcttgacaaaccactaagtactactaacttcaactacttataagtatttatcagtctcactattaggtccttaactcaagctctatac

SEQ ID NO: 14807 - DNA, 395 bp, Glycine max
  unsure (1)..(395): unsure at all n locations
agcttgcaagctaagtggcttcctttnttgtctttaaatcccataggnngagacatgtacacttcttcctcaagatcctcatttaagaatgttgttttcacatccatttgatatagaaactagaatttgcattagttgcagggttttccataccaaataatttgttgtattcaattatttgttaatattacaattaaagtctttaaggtgtgtatgtctttttctccacaacaaaatttgaaaacccaaccagaatgccaattaatcagaggaaaaacagagaaaagcaaccaaaacaacaatcgttcttcgaaataggaaaacaaataatttcaacaaaaaagggaaacgaaacggcatatgcaagaaaattgttaagaaattatgcaattttg

SEQ ID NO: 14808 - DNA, 290 bp, Glycine max
  unsure (1)..(290): unsure at all n locations
agcccttggttttcaaaacgagtgttccgttatcgnacgtgacacaanacgacanccgaggcaaaagnganaacgnnngactcngcctacagctccgcgaaccaanngctagcgccncgagagaacgaagggctcaatccgacatccgaacnaaaaagcaatggcggnggacttttcttagagcttccgctttaaatttagagcgtcccgatatattacagggctcaataagacatccgacttaacagttattgtctgttgactttactcagagctcgcattttcaattt

SEQ ID NO: 14809 - DNA, 152 bp, Glycine max
  unsure (1)..(152): unsure at all n locations
actaagcttggataaagatgacctcatacgttgctactatttcctgttgaaaangagcaagcccacattccgtcctactttgcttccaaaatttaagtattgaaaactgctttaaatgctcactcactacagaactgttttggccattttgg

SEQ ID NO: 14810 - DNA, 430 bp, Glycine max
  unsure (1)..(430): unsure at all n locations
agcttattatgaacaaacacgtgtantattgtttgcaattttcanaaagaccaaaacaacagtcaacctggtatgcaacagaattactttgacgatactttcctataaatatagtttggtgtgaagcgatagttttattgtgtcctgatcaactttttttcctaattagtatatagtactatattagttcaaaactcgctttcaaatgtattataaactttgttaaggacatatcccagcacctactttacctaggaagattcaaattcccagcaagacaacctttccaaggcgaatatcacggtcacctataatcaaatttctgtctatgacattatatatccatgttcaaagaatatatatgttcatattgaaaatggccgcttattcgataatggtgatatttttctttttgatgtccttatcttta

SEQ ID NO: 14811 - DNA, 438 bp, Glycine max
  unsure (1)..(438): unsure at all n locations
gtaagcctttcagccttattttaagccctttttttcattatgcaagnctcgaattgagcttatcaataagaaaactaaaatcattcttagtgactctntgatgcaaaatggggaatccctagtatttaccaatagagagggtgctatgaatggaagttatatcaataacctcccttttttggttggaaggaccccaatagagaaaataactctaaactgcatgacattaaccttgagagctgcagctntggcaaaagggtctagcacattagctaaaaaaaaggcttgacactttctagctttcatgaataaaaggacatcatccacgaagaaaatatgagaagcggnggggcattttaggtgacataaatgggcttccacattccatcttccactttctcattaatagctaagaataacttctccatgcaaatgtca

SEQ ID NO: 14812 - DNA, 399 bp, Glycine max
  unsure (1)..(399): unsure at all n locations
agcttctcacgttttctctctgctnctggttgtccctnncaacttcaaagacatgactatttatagaaaagagccaagaggtgcaggccaattcacctaggccaattgttacttagtgatgaagacacagactcacctaggcgagtgtgttgcttatggctgaagaaatctgattagcccaggcgagctagttgctagactgggtgaatgaatgcctgaaatcttgaaaaaatgatcattttgcccttccttttgactctgtttctgaatctaacanacaaccatccaaacctacaaaaccatctttattatacttgtaaaaatgagagaaactgagggatatttggagaaatagattgaaaactgtgtgtctaagagaccctatggagcttgataata

SEQ ID NO: 14813 - DNA, 130 bp, Glycine max
acataccaaggtgaagaacgtgaacatagatccattgagcagagcacattctctctggaaagcgctggcgtgttagctatgacgatgatttgttatgccataacccatgacatgacccgcacccatatcg

SEQ ID NO: 14814 - DNA, 370 bp, Glycine max
accgagaggattggaaacataaaattcctcttcaatgtatccatttaggaaaacacttttgacatccatttggtataacttgaaatcgataacataagcataagctaataacaatcttaatgcctctcatcttgctaccggtgcataggtttcaccaaagcctataccctcttgttggttatagccctcggctactagccattctttatttctagtgatcaaaccatgttcattcaatttatttttaaacacccattttagtgccaatgatgttcatgttttttgaataaaggactaattcccatacatcatttcttttaaatcagttcaactcctcatgcatggatattatccaaaactcatctttgag

SEQ ID NO: 14815 - DNA, 66 bp, Glycine max
aaaaaagagtggtcactttatcctagagagaggattctcctacactctcgatgattaagaacacct

SEQ ID NO: 14816 - DNA, 333 bp, Glycine max
  unsure (1)..(333): unsure at all n locations
taaaaatgttatctaatactaccaactaagtcatgatacattttatgaattgatggtgtaccataatgaccaagttttattttttatttttaagacaatattatatgctaaccatttttttcaataccactggtaaagttaaacacatttatgggcattttctatgcacattatttgatatctaggtagatacaatctacaacgtaaaactaaatgtaacctgctgctttagatgggagtagatgatctagtcttgaagcagcagtcccagaaccagagcaggaaggatccataagaatagctntcacctatgatgatagatctaatgatagt

SEQ ID NO: 14817 - DNA, 397 bp, Glycine max
  unsure (1)..(397): unsure at all n locations
tctgccaacttcactctagtttgctaaactgaatttttcacacactttcaggttttgaanancctgccggnttgctacggatacatatngaacggtgcgatacagaatcaatgatgttctattttcattgtgtttagaattgaagggaagctcagaaagcgcctgatgttgtattttctttgggctttgaagaggtcgttttcgtgggaaagaaatgagtactgatgagatgacatggatgtataaatgtttgtgtctatgtttgttgcagctgtgcaaattaaactggcataagattgataccaattgcgtangggtttttgagattaccttcattacgatgtcagactattgagttttcaactaatgtggatcattttgttacaacaccgtatgt

SEQ ID NO: 14818 - DNA, 322 bp, Glycine max
  unsure (1)..(322): unsure at all n locations
caaaggttgggccacttaattactcaaccttgaacctctattaagggaatatgataaaaggctacatattgaagagatatgaagcttggaaaaatgtcttcttgggaagcaacacagattatcattgtcgcaacctacccttcagcggnggtgcgaaaaggccaaaattataggccggggaatttgtctccaagggagaaaatgagcggagtcgccaccaaccttctattgaggaaaacgttagaaaaaccaaaaaggcaaaggcgttgataaaatcaaacctacgtagttctttaagtcttgaaaattgagtggtacattg

SEQ ID NO: 14819 - DNA, 402 bp, Glycine max
  unsure (1)..(402): unsure at all n locations
actaagcttctagtctacctatgaattcggctacttatgcatttcctctattgacatgacatcacttctggcacttaaatgcttagaagttggaaccctcctctcaaataaaattttggctttaaccaggggcatgtcttccaaggcttcaacccttacaacaactaatatacttctcttcattggtgtgagtccctcataaaaaatatggagaaaaaactgctctgaaatctggtggtgaaggcaactagcacaataattnttaaatctctcccaatattcatatangctctctccattgagttgtctaatacctgaaatatcctttctgatggccatggtcctggaagtanggaaaattttttctaagaatactctcttgaggtcatcccaactcgtgat

SEQ ID NO: 14820 - DNA, 348 bp, Glycine max
cattccttggattatagggttgaaccaagctcatgcttttacaaaaaaggtcatcaagtcaaggtgaaatatggaagtaaccgtcttgcaaaattggggcaaaagatgaatcgagtcacatcactgcttcgtctactgccaaacatatttaggattgttgatgtccttgttacttccagtttcaccttgacaaagatgtcatggaccatgttgaaaatctaaattgattcaaccccatatcctgcgtaaaaattcgcaatcttcaactgtacatcattcgcatacatccatgcttttcattggttgcattgctcattgcattctttccttgaaaaaaaaaatagataa

SEQ ID NO: 14821 - DNA, 440 bp, Glycine max
  unsure (1)..(440): unsure at all n locations
atgtctcttatggccatgactatcatttgntgtatcaagttgtggcaancangagactntaagcctactaatttaagatctttcaactgcacttggctcttaatatttgaagagtatccttgtgggactttgacctggcgtagacactgaaaaaaactgatcttctcctttctgggcaaagtatgacaagctggaggcaagtatattttttaccatcagaccttagatgtaactgcgatcgtatatccatctcagctagatcttgacaagtattcaaatcatctttcgtcttgccttgaatgttaagaggcgtcccaatgacactatcacatatatttttcttcacatgcataacattaatacaatgtctaacatctagatcataccagtacgcaagatcaaacaaaatcgacctttttttccatatgcaaggcttactt

SEQ ID NO: 14822 - DNA, 357 bp, Glycine max
  unsure (1)..(357): unsure at all n locations
atattgtgtactggcgattaattaaatattgggtttaagcaaaaaatttgtgatacaatccttggatgcaaaagtttttcaaaaactcttttttattttgatttgttttcaaaagctccttgttcaaaaccaattcattcctatagtgtctttatggattatagtgtgttcattctcataagagggaaaccaactactaatggcttcatagtttaaggtaggatgatagggacctgcaaagcaaatgttttaagtgtttaaagatgataggagtaatacttgggtcaacttgaacaaaaagcttttcgcctacaaattcaagagctggtcctagccttcctctgntacttccacacc

SEQ ID NO: 14823 - DNA, 305 bp, Glycine max
gatgcccatactagagcacagcacgttctttacagaagggagtagttcatgtcacacgcgcgtgaactatttactcaagtagtagacggcgcgctctcttttcccagactcgacatgttgccccagcatacaccccattgacttgtccaaaatcgtcatatacaagatgagaggtgttccgggcaccggcggccgaagcactagagggattatgaggcactgattgatcctgccatacgcctctagacagtccttgatgcaacggatggattggctcttgcataacagcttgaacaacggctcac

SEQ ID NO: 14824 - DNA, 428 bp, Glycine max
  unsure (1)..(428): unsure at all n locations
agcttcaggctgctcaattgctccaggtagttgcatgntattggcaaaggtctgnatgggggncagcagaggagcacaaaccacaaacccttgcgacaggtacagatttctaattcaaggccagctgggttaccaagttgaccaacgcatccagtttgccttcaagcttcttagtttcagatgatgtagatgggtttgtagctacctcatgcactcctctaatgactatggcatcatttctggcgctaaactgctgggagttggaggccatcttctcaattaaatttctggcttcagcaggagtcatgtctccaagggctccaccactggcagcatctatcatacttctctccatattactgagtccttcataaaaatattggagaagaagttgttctgaaatctgatggtggnggcaactggcacat

SEQ ID NO: 14825 - DNA, 409 bp, Glycine max
  unsure (1)..(409): unsure at all n locations
attagagattcaagctggtgaacctgtagatgggcagtacgcaggtctcctccacagaagctacaatctactaagcaagcatctgcagaatagcagtttcaaacaaactaacttcacttacaagtatactgtttaatacatcaacacaaacagatgtatgttgcacttctcattacgtttcagtggaaccaagataataacatggattgtgcaaaccaaatttaaatattatgctgaagcctgaaaaatagaccgtaacatcaaaattgggcttgtttagaacactggatttatttactgttcgttaacaatacaggatatgaatgcagactatattggcacattattattaatattntatcctatctttntcttaagntaattaatgtcacattccaaatgtcatttt

SEQ ID NO: 14826 - DNA, 335 bp, Glycine max
tgggcgagcagaacaccttggttgtgtccgtgttgctggagctggcatcatgatttaacaatacttaggatcggcttcaaggacctcctgcacatcttcgtccatggctcccaaagtcctggagcagctgacgaaaaatatcaaggaccaactacacgaggcgatcacacaacagtgactcagcagctaatgttgtccttcatccagatgcaatcccagtttcaatcgcagatgcaatcacagggactcgcactacctcctgagcctgagataggtccttcagctactcgtgtctgcacaaagaagagatgtgtagatccctcatggaatgactc

SEQ ID NO: 14827 - DNA, 290 bp, Glycine max
  unsure (1)..(290): unsure at all n locations
agggaccactctgcggacaacaataaaagcaggaagattcacccttcaacacttgctcatctcaagcttgtaggattatggggtacccatcacatgtggtactacgtggcggtcgggcgatggtgcacaacatgttttccacatccacaaagcgcgcataaacccaccataccctgttgcccacctccatctgagctcacgtactcccacgtagcccatatcctcgtgtctctcaacaccgggtccctatcaatcctcccaagctttcacaacattcaagcanaacaaca

SEQ ID NO: 14828 - DNA, 427 bp, Glycine max
  unsure (1)..(427): unsure at all n locations
agcttatgagcatgaaacctttcttcacttactcgagantgttacatcaaatgattcctcatcctctaacaacatcccaaaatgttcaccaatatcagattcaagaacctgtattgtgtttaactgagaagaatatatctatggacgacactaaaaccgcaatagtgcaatttatcttcaagcagtcatccttgagaaaatttgacgtctcaaggtgtctccgtttgaaaaaccgcgtatagcccctattacacaacaagtgcatcattgatcactacgtaatgtacaccacaaaaaatggatacaagagctaataaatcatgatgatatccaaatcatatcaccaaaatcacaaggttctctagttcctttgaaaatttaatttttatgtcttatattctaataaaagagctatctctttacccct

SEQ ID NO: 14829 - DNA, 382 bp, Glycine max
  unsure (1)..(382): unsure at all n locations
agcttctcctctngaagctnctattgcncttttttcccaaataggcactgnggngngctctggaatctgtgccctttcttctgcctacaatttgtctaaaagtttgtaaaagtgtgtgtcaaagtgtgtgtaccctaattctgcacaagataggctttaaataagctctaaattcacgacgttgcgcttagcgccaccctatctgatgcaagctccattagagcttgtaggcctaggatcttcttcatcaatggattcctttgcttcttggaagatgaatggcagcggaatgaagaaaggaagagagagaggagacgccacttcaaggagaagatgagtctagaagaagctcaccaccataggaggccatggataagagctt

SEQ ID NO: 14830 - DNA, 394 bp, Glycine max
  unsure (1)..(394): unsure at all n locations
agcttcagccataaagatagcattttaatgttcacatctctcacatgnnatgngcaagnngagaaaaaaaatgtacggattaatctgtagagaatcagtgtggtgatcgactgttggatattgtttgattgaaaatgtttgtaatcataataagaagaaaaaagaaactattgatcctggcaaagaaaaaggctagcagtatatgttgtgtcaaactgtcaattcttgcggaatcgacgatggatgatggtgtctatcccttttataggaattgttgacacaacccacaattgtgtttctgatatcagccagccaccgttaatttccagggcccaagttcgattgtaccacatattttgcatcactgatcactgatcattgtcatttcaatatg

SEQ ID NO: 14831 - DNA, 181 bp, Glycine max
  unsure (1)..(181): unsure at all n locations
agacgcaacatattcgcgttctcggaaccttccacgaccccngcaagccagccacggaaccagacgcgcaggacccgcagcacacagcagccagcagcgacgacccagggcgggaacggcggcgacgagcacggcgngaacaacggcgacgcgaacggagaagacgacccagaaccgcgac

SEQ ID NO: 14832 - DNA, 252 bp, Glycine max
tgactggacacggagagcagaaattcacatttattatgctataatcataacgcaattcattgaggctaacttcaacgagacatccgatagcatagttgaaataggatgatgtcattcacacaacgaatcgtggaatggagtctttgccctcagcatagaacacctgaacttctttgaatagagaaaaaccgttaattgcagtctgtaactcagtacgaggatccaacgcttgtaattatttgtttaacaccc

SEQ ID NO: 14833 - DNA, 294 bp, Glycine max
  unsure (1)..(294): unsure at all n locations
agcacgancaattcaattatctaaacattttcttccactcaaagcatacaattgctcattcaaatcattctcaaacactcatatcatacanaacaatgcattgatatcatcttcaagcatttcatagctcagacaagctttttggaacagcaaacaactcatagtgttgaaatttaaataactggaatttaaagaattgaaatgtaaaaactgaaattaaaatgactgaacataaatcataaaataattgaaaataaaataaactaaaaatgttcaagatgcactaatttatat

SEQ ID NO: 14834 - DNA, 458 bp, Glycine max
  unsure (1)..(458): unsure at all n locations
ataccttancttaactcgaacggaataactgatcctgataaggaaaattttcgtaataagcttaccagaacggcattataaaaactattcttctcatacctggagagcaacacctctggtgggtacgaacactctcatgcaacatgtgtacaaactctaacatggataacccttgtgtatgcatcaaagaagtgtgaagagagacgggaattaagccttaaggtgtgagatgagagcactcatagataaccgtccaaggggattgctaggcgcggctatgagtacacctgctgcaggatacgtctacatgaagaagatactaataccaagagtgatgggttccgttcataaaaggccttattaggcgggatagatacccatatcactaccttatgccgcgcatcattttatggatgacaagggcgacgagaaaagacgctcagtctctaacttactcn

SEQ ID NO: 14835 - DNA, 420 bp, Glycine max
  unsure (1)..(420): unsure at all n locations
agcttggccaaattgactgtttagaaagttattgaaaacatcaatcatggcaagttttgtgtgaaagtggagataacataagttgtagtatgacttcaataatgattctggaggtagtttaatacaatgggtacatgccatgagctatgcatgacgtaaaaatcattgaaagacgcattacggaagacaacaagtgaaaacatacgtgcctacactagtttgagatgcagaaaccaaaaataatgaagatcaatacgatgctacaatatgttgatgcactgtcatggaggactctcttcatgtaacaaatgtatntggattagaagggagttaagtcttacattaacatcaaagccttgaaaaggaaaaaaagtcgtttatgtttgcaatggtccctanactctcatttttactttgaca

SEQ ID NO: 14836 - DNA, 171 bp, Glycine max
  unsure (1)..(171): unsure at all n locations
ctaagcttgccaccagctcgcccatgcgagctcagctcgcctaggtgagctaggtttcttcctccacaagcaaccgccttctgaaggaatnttctataaggcccaagttggcctggttgctatttgcacccctatttttactaaatacacccctttctcttttttggtgat

SEQ ID NO: 14837 - DNA, 169 bp, Glycine max
ccgaatatgacatgccaccgttttaggagtgctgagcaccagcaacgcttcgaggccatcaagggatggtcatttctccgggagcgacgcgtccagctcagggacgacgagtataccgacttccaggaggagatagttcaccgacggggggcattactggttaccccca

SEQ ID NO: 14838 - DNA, 466 bp, Glycine max
  unsure (1)..(466): unsure at all n locations
tatgctgcanacatctacaatagatctcctcaacctcatttagttaatcagccacaacagaacaattatgacctctccagcagcaggtacaatcccgggtggaggaatcatcccaaccttagatggtcgagtccttcacaacaacagcaacaacaacagccttattttcagaatgttgttggcccaagcagaccatacgttcctccaccaatccagcagcaacaacaacaacaacaacaacaacaatagccccagaaacaacaaacagttgaggccactccacaaccttcccttgaagaacttgtgaggcaaatgactatgcaaaacatgtagtttcaacaagagaccagagcctccattcagagcttaactaatcaaatgggacaattggctacacagntaaatcaacaacagtcccagaattctgatagattaccttctcaatctgtccataaatcccaaaatg

SEQ ID NO: 14839 - DNA, 377 bp, Glycine max
atctcccactccaagtaggcctccggatcattctttcctttaaatggaggaatgttgagtttaataccatcaattcggttatgtctaggaacaccatcattccctcttctcctcctttcttcttcattatgatctctattctccatttgatccaacctctcatggagcgcatcatctcgttgtttcattaacctctccaaatgttgcatcaaagcttgcatttggaattgcgaaagccccactccatcattaggattagtacctgacatctcaaactaacaaatcagacgtaacaagacaattatagttgctgtttgaatacctcacccactcaagtgtatcacacaagtatggctattctctaatgaaacactctt

SEQ ID NO: 14840 - DNA, 474 bp, Glycine max
  unsure (1)..(474): unsure at all n locations
ctcaagccttgagccgaaatcctgacccaccataaaccttgacccggtgngagaatgtcaatccttaccctcggaagcaaaaaagaaaagaaggaaaatttccaatcaaagagaaagcaaaaagagaagaaaggaaattcccaatcaaagagtgggagaaaaaaaagagagaagaaaggaaattcccaatcaaagaatgggagaaagtaaaaaaaaagaagaagaaagggaagaaagttcccgatcaaagaaaacaaaagaaatatgcagaaagatctttggaccggacaatatctgaacaatacagaattgtcaccaaatgaacaaaagaaagaaaaggaaaccatgacctacaagtggtcttctccctttgattaccaaccaaaatcttgtgtgctagcgactntttcgccccgcactanacaaaaacagaaaaggaaaaggccaacaaataaatatcataagccaaaaaca

SEQ ID NO: 14841 - DNA, 364 bp, Glycine max
  unsure (1)..(364): unsure at all n locations
agctntgatgcatcaattggagagggtaattgataattactagatgatgcgctccatgagagggtggatcaaatggagaataaagatcataatgaagaagaaaggaggagaagagggaatgatggtgttcctagaccaaaccgaattgatggtattaaactcaacattcctccctttaaaggaaagaatgatccggaggcctacttggagtgggagatgaaaatagagtgatcgaggccgtacccgaatcaaataaacatgaaaatgcagtaactaggaagtgatcctaggtcgtttctcaacgagcaatgataaaccaaatgatcataatatacttgcagtaatagtaacgattggggggggg

SEQ ID NO: 14842 - DNA, 436 bp, Glycine max
  unsure (1)..(436): unsure at all n locations
aatttatgggttatttggagtaaattttgttaataaatcttgttttatgggtaatgttgtctttagaatatttccattggatttaatgatgatatctgtgcattttcaggtgaaaaagaagctaagttttgaattgcaaaaagtagcagttgggctaagcgcatatccaccgctaaggagaatctggcaaagcatcagcatcagtgcgctaagcgtagcaggtgccttcggccaagctaagtgcaagattggcgctaagctcaatttcacttactcacgctaagcgcgagggtggcgctaagcgcaacgtcatgatttcagagcctatttaaagcctgtcttgtgcagaattagggtacactttacagaatacccagggcacanaattccacagcagccacagtgcctatttatggaaaagagccctagaagcagc

SEQ ID NO: 14843 - DNA, 417 bp, Glycine max
agcttacttgtttctattttatcacacaattgttatttgaaaaacctttgtgaaactatgttttatcttgcattggatgacaatcattcgttttcactaaaattgttttacactcattggacggcacagtcagaatttgtgtttttacatatttgtttttgaaaagctttcctttgcaaaaaaaattatcatatttgctaacacactattcaaccccccttctagtttgacctttgatatttcattttgttttctagtcgaggttgagtatgcaagtctaggaaatgagcacatgtggttgagtctgtgttagccctcaatgcatttatctcctatttcacttctaggatttcattcctgatgcaagttctgatgtgtgttacccaagagctccgctcatttgcgcaacaatggagt

SEQ ID NO: 14844 - DNA, 435 bp, Glycine max
tcaagtgtatccttattatgccattgagattctgaatttcctgtacgaacgttccaagctaaggttttattggagatattccttattgcttaggtttgcatatcatatcccaaaaaataataaatttatgattaaataatataaacatattaaagtacaaagaaatagacatcatatttatatatcatctctatatattatcatctttccattctttacagctatctttcaatatttttaatactcattgatatattgagaaatgttttaaaaagtaaaatattattatatttgggttaaattcttattttaagcatattacattggttgtgtggaaatggatcactggacaaatcaatatgacaaaagaaatgttcatggaagtatgctaattgataagcaataacctgatggcattgatgggataggttggta

SEQ ID NO: 14845 - DNA, 339 bp, Glycine max
  unsure (1)..(339): unsure at all n locations
agcttctacttatgtggcagggcgggcnttcnntactttcttgnctccaacgcgagctctgaccactgttcttccttcccgcgatgcttcttttcatgtccgcctgagtgggcttatagcctaaaccatacttcccacgatttccttgggtttttatcaggctagttatgccgccattgtctttgcctaaacccatcccgggttcataaccgttccccaacataactcgggccatcattaccgccgcatcggacagacaaggttgcccaaagagggagtccacggaggaaatgctgaccacctcaaaagactggaaagcggtttctaacgattcttctg

SEQ ID NO: 14846 - DNA, 316 bp, Glycine max
  unsure (1)..(316): unsure at all n locations
ccaaggacgccaagagcctcgcagcggccaatcaaaggttgtatatcatcaaataataatccccggacgagattagggtatgacaggagcccctctttacttacctctcatcggagataagaggaaagccctagataggacactgatttcgtccgtnctgccctttccgtgatgacgactctcgcctctactccttcgtgtttcttctgcacaaaacaaagtacaaacaacaacctgaacaacgaatatgatatgcatatgaaaatttacacctatttggcgaacgaaccgatccggaanacaacagaagaacgtg

SEQ ID NO: 14847 - DNA, 427 bp, Glycine max
  unsure (1)..(427): unsure at all n locations
agctngcttgtgtggcttctatggaggcttgatctttgtatcttaatgagggcctttaatggtgattntccaccatggagatgcagcggaagacaaaggagaagagaagagaggaggcgccatccactagggaataagccatggaagaaggagcttcaccaccaagatgagccttggataagaagcttggagaggatgcttcaatggaggaaaagaaagagggagagaaagagagaggggggagcacgaaattgaaggaagaaaaagggagagaagttgaactttgagttgtgtctcacaagactctcattcatcaaagttacaacaagtgttacacatgcttctatttatagactaggtagcttccttgagaagcttctttgagaaaacttccttgagaagctagagcttagctacacacacccct

SEQ ID NO: 14848 - DNA, 375 bp, Glycine max
agcttggtgaagaggtgaacagtaaagtacttagaaaaatctttcgggtggtcactcgctaagcgcacctctcacgctaagcgccaagtcttcacgcgctaagcgggcccttgcttgcgctaagcgcttggacccctgactagtggctggatggtagcgctaagcctaattacctctttggaatctgaatttctcgaattgggcttagcgaggtgatgtgctaagcgcaattccctctctgttttggaaatctttggaatagcgctaagcgccagctaagcgctaagcgcaagccatcacagcactaagaagcatgtttatgcgctaagctcaccattggttgctaagtgcgtgtcctcacgcctaagcctaaaa

SEQ ID NO: 14849 - DNA, 431 bp, Glycine max
  unsure (1)..(431): unsure at all n locations
agcttttatttctcccaaacaccttattatattatcatctacactnnncttgnataactaatctcccagcaaaacaaaacttgttgttggatactctattttcgacctacatttgaattgagattcttcaaatactcgaccaaaggtttcctcctatcttgatcattcaaaacatcgatttgtaaaacttcaaattgctctggcaatttatctcgaatatgaattaatctctcgaattgatcacttgataatctattgtcttaaaaaaaatactaagccaataaaatttattataatttgttttgaaaatatttaatagtatattgaatataattacattaaaattgaagaagatgactaattacattgttaattgaaagctcttaaaaatnttagcctattaaaaattaatttgattttaattttatttg

SEQ ID NO: 14850 - DNA, 384 bp, Glycine max
ttccagaaccattctccccgaagcgtttcaaggtgccaaagatgacttcaccatgcagcttgcattggtgtggaaccaaatcaaagcgccactgattgtcccgttgctgagactagcagtgtttctgtgcttgatcatgtcggtgatgatgttcattgagagagtctacatgggcattgtcatcactctggtgaagttgtttgggagaaagccagagaaacgttacaagtgggagccaatgaatgacgacattgagttgggaaactcttgttacccaatggttcttgttcaagtccccatgtacaacgaaagagaggtactattaccaataaggcaataacttagttttttttcctcatcatcacttctaacacttatactata

SEQ ID NO: 14851 - DNA, 405 bp, Glycine max
  unsure (1)..(405): unsure at all n locations
tataccttaagtggatctgattaaaattagactccatttactgttcttaatngntacgngaaaaaattactggtggggcaagtgcttttcaaatcagcaagagttttattaatttggaggacatgggacacaattgcaaaataattacaaaaaatcatgttaaaacaaagaggaatgcacttcgttttataaattangagacaggagaaaaactgcaattggatgaataaatggcaaagtgcaactgacccttttggcaagcttaccaaattctcatcatctgccatccatgtgtctgtgctcaaattgcttgatacattggctccatgatcagtcaaaccaatgttcatctcaccccacatgaactcctcttcttcagaagttttccagttacctgacatcaaa

SEQ ID NO: 14852 - DNA, 379 bp, Glycine max
  unsure (1)..(379): unsure at all n locations
agctntaacaatcaatatttctntacttgtgctttntgncaaaatcaagagaaactcatggattactttctctccatacaaacaaccataaacaaagtcttaggtcttgacctataaataacgttaagttttaaaaaaacctaattctaaccaataaaagtgtactctcaatgtatctaagtagcgttatcaaaaccaacaacaattacaaacctatgatactatttggttttacaataaacatataattgagcaagaaaacctttttcgcacaagtcatacaacaatgtttggcatgaaaaacagtagaaatataaatacctaacaattagaacagcaataaagaacaattagaccttgtaaccatggagaactaatc

SEQ ID NO: 14853 - DNA, 473 bp, Glycine max
  unsure (1)..(473): unsure at all n locations
atganccctttggcctgagacttggacncgcgaaactaagctgtaaggtagttgttggaggtatttaagagggagttttgatttatgtggggcatgacagtgagngaagtaatagggagagaagttgaacgatgggtatacattgacgcgaccctgcttgaccgaagtgactttatgcgccacggctgctagaatgtctaaaagatgaagcttacatgccatcctggaaacggaactcttcactatgcatgtagagcaggacattctctcgccagatgctagaacctatctactctcgcgcctcatatagctcaactcacatgcttgcgagactgcttgatgataatacaaagtagggccagccatctctcataactgtacatgatggcgctacactacatgggtgtattgtataactatcatccacccggtctgtntgaaatatcactccggaactacttgttgtacaaagg

SEQ ID NO: 14854 - DNA, 301 bp, Glycine max
  unsure (1)..(301): unsure at all n locations
atagnnnatgaatcttttgaatagcttgtgtgacaacattctaagacggttgttacatgataaccatcttagaaaggttggtttatggtgtgtatatcttactttccatctcaactctattttaatttctgaatttgaatgttttgtgcatcaatacatgacataaggatatataaaatattatatgcgattaaatatctaagatggttattacaaaataaccgtcttagaaagtctggcattctatgctttctaagacgattgtgttgtaataaccatcttagaatgtatgccttctaag

SEQ ID NO: 14855 - DNA, 248 bp, Glycine max
aaaaaatatatcatgctaaaaaggaaaaattcacattggatgtatgtcattcattagataatcttatcagggtttaaacactccttattctttcattattctcttccacactacgataagtgacactactcttacattgcgggctgtttcttccctaacactgatttatttatttatgtgacctgcacacctttgttttctcttctcttcttttgtatttactaatgcatacaaaggccaggggatgt

SEQ ID NO: 14856 - DNA, 368 bp, Glycine max
aaaccaacttgtgtaatcgattatagtaaggctgtaatagattaaaatagaaagttttaacattagaagaaattttctaacttcagaaactttcttcttactcctccctgaccatgcatgaaacttacagttgcaaagtcacttcttaatatgacagaacatgagtaaataagagtgcaggataacatacaataaacataaaggaaaataatttttaagggagaatttttaaatgatctaggttgaaatacgcaaatgttatccttagagaaaacgcttacattgcacatggattaacaatgtaatataatataaaataattacaaaggaaaattactttttaagggataaatttaaagagtctgggt

SEQ ID NO: 14857 - DNA, 235 bp, Glycine max
tgagcttatcagcactatctaccctatgtagtgtgggcccgtatggcgtggaactattgtgctctatcctgaaagtctcacacaagttccttatcattatgaagtgcatatagttggcattatccgcgataatcttcttgggcaacccataccggctgattatctctttcttaatggactatatccacctgattcttgtcactctgccatatgaagcaactcttaccgatttggt

SEQ ID NO: 14858 - DNA, 356 bp, Glycine max
tggaattgccgaccacatccactttcatctatcgtgtgggcatttctttagaaaagaagagtttgaatccctttttcttggcaacatcccaaataggtagacgagggcacaccttgtctacaacaaccttgataacattgtcctcttcatcatcatcagttacattgaggtctttcaacctctgaggagctatcttttctctagttggacaagcagggtaggacacaccagtctactcatgcttcttcttcgttctatgctctctaacaatcaattcctcctcctccttttacctatgaattctttgttgtctttatcttcatttggcgatcactaatgagtttttgcatcttctt

SEQ ID NO: 14859 - DNA, 351 bp, Glycine max
  unsure (1)..(351): unsure at all n locations
agactcaagcttcttggggttggctggctattatagaattttcatcgaaggtttttctaaattggcatngcccctaactaagttgactcgtaagaatgagaagtttgtttggaatgagaagtgtgagcaaagtttccaagagttgaagaggcggttgacgacagctccagtgttaattttgcccgaccctaagagaacatttgaagtgtattgcgatgcaagcgggcaaggcttggggtgtgtgttgacgcaagagggaagagtaatggcttatgcttcacgtcaattacgtcctcatgaagttaactacccgacccatgacttggaactagcagcggtggtctttgcctt

SEQ ID NO: 14860 - DNA, 405 bp, Glycine max
  unsure (1)..(405): unsure at all n locations
agcttggcaggagacagacttccatgaaagatacttaaacaaattctcacggccactgtatcactcatgcacaagtgtttaagctatttagtaataacaactaaaaagaggtccaatctttgtactttatctcatgccataaagttagaaatgcccaaattgaatcagaagaacttttattagcttgtagtgaggctgggctacaaaaatattggtttttctaagatgcaaacgcttgagttctaagagagcacagatcctagactaacccagtttgtcttttcaatccacttattccattcactagcctttcacttgactttgttttcacatcacacacttatttgaaattctctctctctctctctctttctctctctttttttgaacacantaaaacattta

SEQ ID NO: 14861 - DNA, 344 bp, Glycine max
tataagaacaaaattgccttaatcatttccttatatgcatgttaattaggacgcatcaacaagaatcaagccaaggctattgtgcaagcaatcaatggggcaaaacacaccaaatgattataatgatggatggctcaaattctcacaaaggtaaaatcatcactttcaaattgagctttcaaaactatcatgacatgtagaaaagaatcaaggatttcaagtcacaaaatgtcaagaacttttattttcaaaacaattacccatttcttgaacatatcctataattcaaagaaaaacatgcaaagtcgtacgtgcacatgaaattgacccaaaatattaaactg

SEQ ID NO: 14862 - DNA, 406 bp, Glycine max
agcttgaagatgatgctttaatggaggataagaaagagaaaagtgggggagcacgaaactgaaggaataaaatagggagagaaatggaactttgaagtgtgtctcataagactttcattcatgaaagttacaacaaatgttacacatgcttctatttatagactaggtagcttccttgagaagctttcttgagaaaacttccttgagaagcttctttgagaaaacttccttgagaagttagaggttagctacacacacccctctaataactaagctcacctccttgagaagcttccttgagaagaatcctaaagaagatagaacttagctacacacacctctctaatagctaagctcacctccttgagatgagaaactaaagtttagctacacaccccctataata

SEQ ID NO: 14863 - DNA, 323 bp, Glycine max
acgctagagcgggcagctacatttcctagtcactgtctccaatggatcttgttcgaggaagctacacctacacatgcctctcctcacggatccactcaacagacactaagagcttattttactaccactgatgtgtatgacggtataacgactagcacatatcctcttatatgagctacggttccagcccaatgcgaaacgtaatctgggctgtcaaacacatacaaggcaggccagacaatcttaatgctttacaacacatccatgctatcaaatcactaacaacaatggacattattacctgataagcatagaacgcatac

SEQ ID NO: 14864 - DNA, 222 bp, Glycine max
agcttctcgtggcttctttgagaagctagatccttatctacccacacccctctattaactaaattaacctccttggaaataattacggataaaataacacaacaaatacaatcaaacatcaaacataattattaatatatatatatatataagggtgttacacctccctcccgacactagcgaccttccttctcccttccggcacatagactagactttgat

SEQ ID NO: 14865 - DNA, 352 bp, Glycine max
tcatgcttaagtatgtatggcaaaacttcattactgttgttttagacatacaagtgagcttgtaacaaatcttctagacttggagtgatcacatgcagtcctcttgaacccttgccacccactctatcatcatgccgagacttagaaaggccaacaggtttagccttctcaatatattcttctgcaatgtacctctcaacaatagatgcttctggatgatatagattctttgtatacccttttaagatcttcatgtaccgatcaaccgggtacatccaccgcaaataaacaggaccacaacatttgatttctctgactagatgcacaatcaagtgaaccataatgtcaaaga

SEQ ID NO: 14866 - DNA, 353 bp, Glycine max
  unsure (1)..(353): unsure at all n locations
aaaccaacttgtgtaatcgattatagtaaggctgtaatagattaaaatagaaagttttaacattagaagaaattttctaacttcagaaactttcttcttactcctacatgatcatgcatgatacatatatgaaatgacaaagactaagatgcaacacataatacaacaatcaatacaaattccactcatgttagttgcgcatgtaaaacacaaaaattcttcaagctctncttcaagcttcaaggctaagtcttcatgtttctccccctatctctaacaatctccccctttntggctttgatgatgtngaaactgaattttccgttgagtgcatttggagggtctgagtcttg

SEQ ID NO: 14867 - DNA, 326 bp, Glycine max
tgaagctcaagaaaaattttgaagatgttttataagaagttgtggcttttagatgttattagcagcttcaactaccccattcatcttgggcctgtatggcgtggaattatggtgttggatcctgaaatcctcacacatttccttcatcattttgttgttcagattggtggcattatttgtgataatcttcttgggcaacccataccggcagattatctctttcttaatgaacttgaccaccacactccttgtcacactggcatatgaagcagcttcaacccatttggtgaagtagtcgatcgcaaccaaaatgaagcgacgtctat

SEQ ID NO: 14868 - DNA, 413 bp, Glycine max
agctttacccatttttttatataaaaaaacctaactcataaatgagtatcaacgttattgaattactactatgtgtgtggttggattatctttgtgaatacaagttttagatgcaaaagaagaatgaaatagagaacaatataagcaaaaaaaaaaaaaaattcttctgaaaaacaaaattacaatataaactcttcaaaaaaattcactcattgaaaaacattgtagatttgtagtcgtataattcttatttaaagaccaacaacatgaagagtacctattcaccaacactaatgaacttcaaagtgacctcttcaaatgacaaaatataattgattagcaattcataaacaaaaccatctaaaatattcattggactatctttagggagtgatgtttcttaaatgaaaaag

SEQ ID NO: 14869 - DNA, 335 bp, Glycine max
tcaaaaaactatagaagttaatgctacggtggccgctttcaatacagttagggaagcggaaccggtgctacagcccgcaataaacttgggccgagacagaaacacgacgggtttcaatcggaggtatagtcctcaagcctacccttatggtttgccttcgtacttcacttaacgaaccgctccaaatggtttgagccaagcccctaccttggaggggcagcttcctccttatgccgactatactcttcaataatatgatgaaggagatgcccatttatgccctctacttccgctcaatgatccagccctccatgagttgccccaactcaacatat

SEQ ID NO: 14870 - DNA, 365 bp, Glycine max
agcttgtcatttgctgtaaattatcaaactggttttgggcctaaggccctccttgttcccaaaaaatagttattgaggcatatcttggatgggtagaaaatgggaaagaagatacttgggtcagactaaatgataaaattataccatttttattggtagttgctatatctacttcctttcttttcttatccaccctccttttcaatttgtttttcaaaaaatacactcccttgtctacctataaaaggggagtggataagtgaatatagcaataaaattataccatttttattggtaagtgctatatatacttcctttcttttcttatccacccttcttttcttgatattggtttaaaaaataca

SEQ ID NO: 14871 - DNA, 335 bp, Glycine max
tctcaaagtgtgaatgcttctgttgcacattaagaactagctggtatgttcggtcataatggtgttcactagttgtcttaggagactgggaaatatctaaatttcttagcgatgtcacagtatctgattgcttcacatggtgctctagcatggttttccacatagtggccatcctgcagtccataaaaagtccatcaatattatatgtgtcatgtgtgaggttctgacataatgtatttatttgattaaatacatacattagatttaatcatattagtttgctgtatgcggactaatataaattcaatccatttcataaaaaaagtgtgaccaat

SEQ ID NO: 14872 - DNA, 383 bp, Glycine max
agctttcaacaaatgtctttacaaataattatcacacagcagaaccctagcaagattacccatcatatcttcccaaaaccccatacccacgaaatttaagagagaaagaagtccacccaaacctgaattgtcgaagtcccactcgtagccacgcacttcacgaccccgaaaatgctctcctttcacgatttgggggcagaaatgggcaccaaaggttgaagctttgtgtggagcttcaatggagaatgaagataaagagaatggcaacgtgagggagagagagggctgtctgaaatttctggtttgctgagtgaggagagacgaaaagcttttggtcttaaataaaagggtttcctctttctttataatttattcaagctctg

SEQ ID NO: 14873 - DNA, 337 bp, Glycine max
ttagacgatgttgttccataagatgactgttgaaagttaacagatgcaatgcatgcaattttgcatgcaaggggctctaagttgaagatagataggattcttaatatttgtcaggcttctcaatccttatcagggcaaaagaaccaaaataaattgaaagtatgtggtgcagaagttatggtcgaagaacaaccctctgtgaatcagatgaaatagactaatagtcctgtagatggctctgataaggctccaggtagcattcacaagcttactgaagaaacagaaacaaaagttattcccatagataaatcacctaattctacaaatttagcccagt

SEQ ID NO: 14874 - DNA, 363 bp, Glycine max
agcttaactatatgcataaaatgattttagaaagatgaggcattgaaattttgttttcattgttggtgggattaattagatctgaggtttatttttttttctctttatatatatttaagcaatttagtccttaaacatgcataaagatgagacattcaaattttgtattcattgttggtgggattaaccagatctgaggtttaaggcccaaactaaccaaacccagcagccgtccatttcccatccctagttgttaggcttaaaaggaatattatgtcagagtttgaaagaaggtgaaacattatgcaaaaagttaaatctcacacagcttttacggatggaaattaagaccaaaaaaagctt

SEQ ID NO: 14875 - DNA, 342 bp, Glycine max
tgttattaattgcgagatctcattgttcgtgatatgatgatgaatgtgtatgaggacagaagatgtgtatatatagatagatacattaatactttagagagtttctatgctgtccggaataatttggggtttttttatactattaattttttagagttgaaaataattaaaaagattttagggtttaacttataaagttatctttaattatatttttttatttaaaaaagttgtaattttaaattttaaaaaaataataatcaaggatcaatttaaaaaaaataatgaaaagatgatatgcaatttgattgattaaataatttaataatatcaaaactccaa

SEQ ID NO: 14876 - DNA, 377 bp, Glycine max
agcttccattcaatgcattgttagaaaatctggtgtagttgccaactagtggtgtagctgtctaggaacatgtctttgttggaagaattggacatcaagatggtgtcatttttggtgttgctaatcttggagctgcaagagacttccatctcataggcttttggggcaaatgatgatggtctctgctcataggaccctttatcagtagcactgtccctggggctgcaatctccctaccacccaaatcactcaattaatgcccccagcaatgaaacaacagcactgccccttgggctacaacttaagagggtgtttgataggtctgttagttagttagtcagttacgggacaatgaatcaaatagtgggttacttact

SEQ ID NO: 14877 - DNA, 382 bp, Glycine max
agcttgcctcaaagaggtccaggaaggacaaggcggccgaaggaactagttccgccccggagtacgatagtcaccgctttaggagcgttgtacaccagcagcgcttcgaagccatcaagggatggtcgtttctccgggagcgacgcgtccagctcagggacgacgagtatactgatttccaggaggaaatagggcgccggcggtgggcaccactggttactcccatggccaagtttgatccagaaatagtccttgagttttacgccaatgcttggccaacagaggagggcgtgcgtgacatgagatcctgggttaggggtcagtggatcccgttcgatgccgatgctatcagccagctcctgggatatccgatggtattgga

SEQ ID NO: 14878 - DNA, 431 bp, Glycine max
  unsure (1)..(431): unsure at all n locations
agcttgtctaanaaatttgtcaaaaaatgggcagagtctccttggtatgtagagctatcccaaagaataaacaaagaaaaagaataagcacacgtcatgcatgcaagcaattctcaagatagatttcacatgaaaccatgtttctttagagaaccctagtttatcttcaaagcaaatttttgtgagagcaattaaaatggaggtcattacagcaaagattaacccttccttaaggtaaccaagggtttgctagttctggacgaccatgcatctcatccaccctagattttgatgtataacataagtataaattattgatattctaatgagtttttgacaagaggacaagattattatgttaaaggaatatcatccataattatagagagtatgctctgttttgatctagcatccaactccttatatttagt

SEQ ID NO: 14879 - DNA, 237 bp, Glycine max
gaccgagaatcgctaatggagagggttaccactactgaaaaacgccaatgctgaaaaaccttgatgtcaccatcttcaacatgtaggaaggcacttaaatagggccttaggtaccaaccacgggggatagaacctcattggatagcatgacaagtaggccatgctcaacaatatataaaccctcaaaattgatgtctgaagaggatagaatacaagttcgacatactgaataagacg

SEQ ID NO: 14880 - DNA, 406 bp, Glycine max
  unsure (1)..(406): unsure at all n locations
cctgctgcatgcaagcttctcccncaattntctataaatagggggagaagtgaagtataataagggttcagccccttaggcacttgtctctctttcgaatttgcttagaaaaattgtttccgtgaagaaaatcaaagccgaggcgcttccgtaacgtttccgtaagtgatttcgcgaaggttttcgaccgtttttcgacgttcttcatcgttctccagtcttcaacgggtaagtacctcaaaccaagcttttcaattcattctatgtacccgcggcggtccacatttggtttcatgtatttntatcttcgnttcatttactttttatacccccttttgacgtgcttaagccgttttatttaagtcatttctcgcttaacccacaaataaaataaatttccaccgat

SEQ ID NO: 14881 - DNA, 337 bp, Glycine max
tttaactgaatttgcaacgttccaaacattttttaaatggttttatcaattacaatatattggtaattgattaccagtgtatctgaatgttgaaattcaaattgaattatgaagagtcacgtcttttcataaaatgctttgtgtaatcgattacatggtcatggtaatcgattaccgatgacaagttttgaataaaaattcaagagatgtaactcttccaatggttttctcaagggtttctcgaggttataactcttctaatggttttcttgaccaaacatgaagagtctataaaagcaagagtttgacttgcatttcgataactcttacagctttt

SEQ ID NO: 14882 - DNA, 359 bp, Glycine max
agcttgtctcagcatttatgcgagacggagaccaacatgctagctatcatcgccaagtaccaagaagagttaggtctagccatggcccacgagcatagaatcgcggatgagtatgctcaagtatatgcggaaaaagaggctagaggaagggtgatcgactctttacaccaagaggcaaccatgtggatggaccggtttgctcttaccttgaacgggagtcaagaacttccccgcttgttagccaaggccaaggcgatggcagacacctactccgcccccgaagagattcatgggcttctcggctattgtcagcatatgatagacttaatggcccacataattagaaatcgttaggaaac

SEQ ID NO: 14883 - DNA, 356 bp, Glycine max
ctacatattactcacagctttatcctcttaaaagattaagagtttttctttactaaaatgttttatcctttcaaaaagattccttggtcaaccacttgcatattcaataaggaattttgattggtcttcattttacaatctacctcttttaagagagacctcttcttctcttcttcttatttctgaaaagggattaagagaccgtgggtctcttgttgtaggggattcttgaacacaagggaagggttatctctgtgtgtattgttaatccaaagagagagtgaaagtttaattggggaatagtctttgtttctaaattcaaccccccctttttctgaggccatttgtccaacatc

SEQ ID NO: 14884 - DNA, 343 bp, Glycine max
agctttcctatcttgatgatatcgtcaaacattaataaattaagctcttttcgatcagtaatccaacataacatcagtatcatgttctttaactctattcaacttcaacgtcaataaactttctaatttttatacttaaaaaattttacttgctcccctaacaagattaaaaagatgcaataagttataagtcagccatttttctagcatgaaagacaagcaggttgagcccccaccacaagtacaaagatgtttgatggatatattggtagaagagaatcgaatgctaggtagaagcacaagaaagtagaagtaacttgtgaatggaaggattaaagaattg

SEQ ID NO: 14885 - DNA, 355 bp, Glycine max
ctcaagcttcttcagaattcaaataaatctaaactaattgtgaaatgcattttaatcaaccccacctgatctacaaaattcaaaggacacttcctaagaagctccttggtacattcaataagtcctaaatgactataaatccacaaatacacaaggtcttagcaagggaaagagtaagggaagctcaccttcaatgacaatgaccaatgtgaaagtaacacaaagttacaatgagttcagggcgcgagctacagtgaggccacggcgcgggctacattgacaccacaatgcaagccataatgcagcgacggcaggaactagactgagaccacgacgggagcttgagtaaaggaac

SEQ ID NO: 14886 - DNA, 363 bp, Glycine max
gagcttggctcctccttttactgaactcgcaacattgcccctcctccaggaccaaccccaaggactggttgatggcatcttcgtcataggggacccattggccccgcacccaggagcgcttatccctgactccttccttggtgggccatgcatttgcatagaattccatgactattttcaggtcatatttagccatgggccctgtgagttgagtccatttcctcttggcaacttcctcctggaactcagtgtactccccctctcttagttggacccatctctctttgaggaaagaccaacccttgattgcttcaaagcagcattgatgttcctcacttcaaaaatggtgtcccgcaaattcta

SEQ ID NO: 14887 - DNA, 352 bp, Glycine max
tctccttccatggcttattctctagtagattgcacctcctgtctccacttctactgtatcttctgctacaactccatggctgaaaatcaccattgaaggacctcattgaagctcaaagatccagcctccatagaagctcctcaagcaagcttccatcaggtattaaggtaaattaaatatttaattattgtatagaaaataaaagaaattaaataaagaaaagaaagaaaaggggaacaagttctttgtgaataaataaaatgtatgaatcatgtacattttataagttggtattttggaacaaaaagtagtgataacttggttgaaaaaggaaaggatgggaaatgatgat

SEQ ID NO: 14888 - DNA, 409 bp, Glycine max
  unsure (1)..(409): unsure at all n locations
agctttgggttcgatggcccctatgacatctatcccccacatggaaaaaggccaaggggcggacatgacattcaaaggatgtggcggaacattgacattgtctgcgtacgcttgacatttatggcatttccttacatgggtgcagcaatcgctttccatagtgagccagtaataacctgctctaaggatcttcctggccatagcatgcccattggcatgtgtcccaaatgaacccccatggacttcctcaatcatgtaattcgcctctttggcatctacgcagcgtaagagggtcatggttttgtttgtacaggacggtaccactcacaaagaaaccagtagccaatctccttaacgttatnttgtcattgtcggaaatccctggtggatattctttgttctcgacata

SEQ ID NO: 14889 - DNA, 333 bp, Glycine max
tctagccaaatggacttaccttgacttattttctttgaaagcccttttgagccttgtttccctttccttgttttgaagctcactacaagccttaagtgaaaaaccatgatatcaccatatccttaaggaattttggagctttggaattgttttgggaataagtgaggggggtttttgtttcattggataacatgttttgttggccatgcttcatgatatattttgagccatacttgatatacattgcatattggttaaatgttggacatgctgaatatgatgctgtttctcaaaaggctacaaagcaaaaaaaaaaaaaaaatcgaaaaagaa

SEQ ID NO: 14890 - DNA, 341 bp, Glycine max
  unsure (1)..(341): unsure at all n locations
agctttaaaccaaatttcgagaagatccatttttaccgaggcaacttcatgtagcttccttgagaagcttaattaagaggcttcatcgagaagcttcctcgtgacttctttgagaagctttctcaagaggcttctttgagaagctaacgctttgactactaacaccctttntttaataactaaactcacctccttgaaaataattacagataaaataacacattaaataatcaaacatcaaatataattactaataatatatcgatatatatcagggtgttacaacagggactctaaattgaccatcatcaagctcccacattttttgtatcactccaaaa

SEQ ID NO: 14891 - DNA, 323 bp, Glycine max
taccgaaaggtgggaattccggtaaggttttaattaatttgatatggttttgaatcagctgaccgctgtatccaatgtgatttcactgaccctaacaacttaaaatccagcttctgtatgcttattgcaaattttcttccatacctggtgatgggtatcgatgtgttaaaactacatgtgcttttttgtgattcaggagaagaccaaccaatgtggagtcaagggtagggaaatgggtttcatatctcaaacgagagaagaagctggattcactagttggtcaccgtccaactgttccttcagcttctaaagggctttacata

SEQ ID NO: 14892 - DNA, 316 bp, Glycine max
agcttcttagtttcagatgatgcagctgagtttgtagctacctcatgcactcctctaatgactatagcatcatttctagtgctaaactgctgggagttggaagccatcttctcaattgaatttctggcttcagcaaaagtcatgtctccaagggctccaccactggcagcatctatcatacttctctccatattactgagtccttcataaaaatattggagaagcagctgctctgaaatctgatggtgagggaaactggcacatagttttttaaatctctcccagtattcatacaagctctctccactgagttgct

SEQ ID NO: 14893 - DNA, 287 bp, Glycine max
tctcccctattttgctatttataggggatttgtgaagaagaaaagggttcatccccttatgcacttctctctctctctcgaatttgctgaggaaaattattttcgtgaagaaaatccaagccgaggcgcttccgtgatgtttccgtaacgtttccgtgagtaattacgcgaagattctcgaccgttcttcaagattcatcgttcgttcttcgtgttcttcagtctccaactggtaagtacctcaaaccaagcttttcaattcattctatgtaccccctgtggtccac

SEQ ID NO: 14894 - DNA, 390 bp, Glycine max
agcttcactggcatgtgaaatgatgtatacattatggcctactgaacaatagcttctaactaccatgctttgggatgtcaaacattatgtgaaattgatataatgtcatgtttcttctcttttttttataaattatacactgtgttggatttgaagttggagtatgaccaccttatttagcgctacttcaataaattcaaaagggtatacaacaacacattatatttaattaactgcagatttcatccacaaatttcaccaacagattatatttaattgaaatgggtaattggcatgatcaacaaactactttctactacaaattcttcaacgaaacaacaattacaatatcacaagatgttattacaccatttacctaaaatacattcc

SEQ ID NO: 14895 - DNA, 352 bp, Glycine max
tagaacctcaagcttgacatgccggcttagctggttcatatgatctcagaaataaaaactgaaaattcaaacgctcgctaagctgaagtgcagtggcttagcgagttcatacagaaatgcataaattcaaaaaaaatgatgagcacgcttagcatgatagggccggcatagcgagttcatcagaaagcccaaaaatgcatcagatattgatgaactcgcttagcgagcaggctcgcttagcaagtacatcgaaaattccagaaaatttggggctttgcagcccttattaggcctaaaaaacctaagcaattcacaccaaaacaacctacattatacgcagagtaaaagccct

SEQ ID NO: 14896 - DNA, 350 bp, Glycine max
agcttctttaggaatcttcttaaggaatcttctcaaggaggtgagcttagttatgagagaggtgtgtgtagctaagctctagcttctcaaggaagttttctcaaagaagcttctcaaggaagttttctcaagaaagcttctcaaggaagctacctagtctataaatagaagcatgtgtaacacttgttgtaactttgatgaatgaaagtcttatgagacacacttcaaagatctacttctccccctcttttattctttcaatttcgtgctcccccctctctctttctctccctctgtcttttcctccattgaagcattcttccaagcttcttattcaaggctcatcttgg

SEQ ID NO: 14897 - DNA, 363 bp, Glycine max
taagcgacactctgcaatgctcaatctgggcactgcatctcgacctagcgagctatgtttcttactccaaagtccacttgctcatggaggattatggtgacctacccctgtagaccatgttgctctctgctcatgattatttacggaatatggccccttgctattaatgggcgattcttgttacaaggcctttctacagttgaccaattttgcttccctgcatggatggtttggagcttgctgcaactgcttactcatatgttgatcatccactctatacctttaataacatgccagattagacactaacgcttgctcttaaattttggcgtgtcaccgaactgtactggttgagctacaatg

SEQ ID NO: 14898 - DNA, 403 bp, Glycine max
ttcttgaccaggaattatttgtgtgggttggatgttgaattctggttgttcctggtgcggagatgatggtacagagggtgaaccaggagctgaagtttcttttggtgaggtagccatggaaaagcagagcgtttggaatgatttcgtaaatttctgagagctgttggggaatgcagacaatgagattaacacgaaaatataagtttgaatgaggaatgtagagggacgtgtgaatcaacgcgcgaatttgctttggttcagtagtgaacgtgctattaatgttaagtgattcgtttgggcacgttcagatatcagtagttgctacaattcctctagcagacaaatgcccagcttgcccctcagtatttcaaactgttttgcaatcaatgcctttgtgaaaata

SEQ ID NO: 14899 - DNA, 327 bp, Glycine max
tctggtgtgtacatcttgacttgctttcctatctgacattcaccacagattctgccttcttctattttcagattgggaatgcctctaacagcacctttgtcaatgattttcttcatgcctcttaagtgcagatgtccaaatctttgatgccatattctgacttcatcttctttggagaatagacatgtggaggagcaactggtttcttgaggtgtccataggtgacaggtgtcctttgatctgctgcccttcattagaactttactcttctcatttgtcaccaagcattcggactttgtgaagattccatggaatactatcatcaca

SEQ ID NO: 14900 - DNA, 396 bp, Glycine max
ttctttgcggatttggtcttcgccagtgaaaggatcgatgtgggtcctaaaagaggcaaatttgatcatcctactaggatgactgagaaaactggggcaaatgaagagggtgagaaagagggagaaacccatgttgtgactgccattcctatacggccaagtttcccaccaaacccaacaatgtcattactcagtcaataacaaacctcctccttacccaccacccagttatccacaaaggccatccctaaatcaaccacaaagcctgtctaccgcacttccaatgacgaagaccacctttagcacaaaccaaaaaaacaccaacaaaaaggaattttgcagcaaaaagcctgtagggttcaccccacattcggttgtcatatgctaaacttgatc

SEQ ID NO: 14901 - DNA, 331 bp, Glycine max
ttcatgggcttcttccaattttacgctgaatacaacttcttgtccttaggcaacagatcttcctttagaaatcccggggttagggcaacttgaggtttcgacaaaccggtttttcccgcagacttggatcgattatggaccgaggaaaatgaaggtctagaaggggcataaagagctttgcttatttcttgaatgtcttgcagtagcagttgaccattattcatattaatttctccatcatcaacattagcatcttggtttccacactcaaacttagatttcatcatcatgtaggcattaaaattgaacaacagtaaaatcaagcaattct

SEQ ID NO: 14902 - DNA, 413 bp, Glycine max
agcttcttatccaagactcatcttggtggtgaagctccttcttccaaggcttattccctagtggatggcgcctcctctcacctcttctcctttgtcttccgctgcatctccatggtggaaaatcaccattaaaggacctcattgaagctcaaagattcagccttcataaaagccccacaagcaagcttccatcacttatcatattgtcttgtatgtcttatgcatcatatcatattgtcattgtgaaaacaacttttcccgacaaaattttcgttgtaagtcgctgcctaaaagtccattgctaaaagtttctacaacgacattaaattttgttgacattacttatgttttaacaatgataattatcgccattattttcacacaattgttgctaccataagtaatttgtagta

SEQ ID NO: 14903 - DNA, 159 bp, Glycine max
ctttaacctcatcgtccctcacagtctttatttttgggagcctttccaatccttgtgttcggactctcagccacttatgatagccgccgatgatcccattactgcttcacctaagctctctgtcctttcttcacgccccatcccatgccttgcgaaact

SEQ ID NO: 14904 - DNA, 415 bp, Glycine max
  unsure (1)..(415): unsure at all n locations
agctttacgcagtttccttggattggtgggattctatagaatatttattcgaggttacatgaagattgcagctcccctttcatagttgctgggcaatggtcccttccggtggacggagatggcgactgaggcgttcaacacactgaaaaaagcagtatccacagcaccagttcttgcattacccaattttgatgtcccattcgtggtggagaccgatgcgtcgggtaccggcgtcggggcagttctttcttaggtgggccaccctatagcattcttcagtaaggagttctgccccaaactccgagcttcgtctacatatatccgtgagcttgcagctatcacgatggccgttaagaaatggcgccactacttgctgggtcantcctttgtgatcctcactgatcatcaaaagttg

SEQ ID NO: 14905 - DNA, 342 bp, Glycine max
gtgcacaagcaaacaaacaactacacttttcaaatttatttgctgaaatttaaagaactgaaacataaaagctgaaattgaaatgacataaatcataaaataaatgaaaataaactaaagtgtccaaaatgcaaaaatttaaacgtcctgctcctctcgcggttggtcttcattaagatccagtgctggagttgccgatgaatcctgtatctctggctccataactggtgtagatggttgggtctcctcaagagtaatctgctcctctgatgctgctggtggatcctcagtcataggctcctgggctgcagaggctccaccccctccaaaagaagatggctg

SEQ ID NO: 14906 - DNA, 393 bp, Glycine max
agcttctaacagttattattggctttaatgataaatcttcttttaacttcttatgctcttttttttttttttttcaggttatgaagcaccaaatttaaggtatggccaattttcatttctgtctaatttttataggaacatattatttttgcttcattctgtccgaactctatgtagtgtagctttcatcacatttgattctttctcctttactttttgagtgagtgaaatccagtgacagcttacgtgaacactggacactggtatgcatatcctgtccagggggagtgcaaattcatgttttcttttatccaattgctcatattatagataatgagaattagaaagtttgtgaaaaagatattctacatcatactctaattgaacctactt

SEQ ID NO: 14907 - DNA, 355 bp, Glycine max
  unsure (1)..(355): unsure at all n locations
ctcacgcttaacatccccagactggccttcaacgggttttctctctnngttgtctgcgctatngacaagttacagtctaacaatactaactctgaggaatattcctctttcattccgaatcttccgcatcctatcacgttaaacgcaacaccaccgaagatattgaccgagttcatgaagccactgctggaaacagagctcaaaagctacggcttaatcgtcaacgactttgcggaactcggaggagaagagtacatcgagcactatgagcaaaccacgggtcacaaggcgtggcatattgggccagcgtctcttatgtgcaaaagaagccttgaagagaaagcggagaggggac

SEQ ID NO: 14908 - DNA, 371 bp, Glycine max
agcttgaccaggaattatttgtatgggttgaatgttgaattctggttgttcctggtgcggagatgatggtacagcgggtgaaccagaagctgcagtttcttttggtgaggtagccatggaaaaacagagcgtttggaacgatttcgtaaatctcggaaaactattgggaaatgctggtaaaaacacgaatgccaagcagatataaatttgaatgaagaatgtagagaggcgtgtgaagcaacggtcgaatttgctttgtggtgaacgtgctattaatgttaagtgattcgtttgggcacgttcagattgcagtagctgctataattcctctagcagacaaatgcccagcttgcccctcagtttttcaaact

SEQ ID NO: 14909 - DNA, 359 bp, Glycine max
aactcaagcttatacaatatataataaaagaacaatgacttttgaagagtcttttcatgtttccttcgatgagtctaatgccattcttccaaggaaggattttttagatgatatttcagattccttagaagatacacatattcatggaaatcattctaaagaaaaagacgaaggaagaaatgaggattctcaagataatggggctagaggaaataatgaacttccaagagaatggaaagcctcaagagatcatcccctcgacaacattattggtgatatatcaaaaggggtaacaactagacactctcttaaagatttatgcaataatatggcttttgtatctataattgaacctaaaa

SEQ ID NO: 14910 - DNA, 402 bp, Glycine max
agcttggagcacacaatttatatgctcatgcttgagggggagtgttaaagttgttgtttaataatgttttatatttctagcttgttgtagaagctcatagaagctgtcctgtaatctgtctccataggctaggctgtagtcttcatcatgaactattttttgtactatctgttaattctctctctctctctctctcacacacacacatatatacatctctcagcaaactaaggctgaggatcctttttgtgtgcatattttcatactcaaacatttctagtgtaactacagcacaaaactttattccattgtttggtgagaggggtccagttaaagggaaagaacccgtacttatatcttctgatcattctactaataattatatctgctgatcattctact

SEQ ID NO: 14911 - DNA, 355 bp, Glycine max
tggatatctggcagcagaaaaacaagtagttgagaactaagtaaaaggaaatggcttcctcaatgatctcctccccagctgttaccaccgtcaaccgtgccggtgccggcatggttgctccattcaccggcctcaaatccatggctggcttccccacgaggaagaccaacaatgacattacctccattgctagcaacggtggaagagtacaatgcatgcaggtaagacaactccacacatatatacacacaagaggcaccaaaaagtttaaaattcatcttacacatttatatatgctccaaaatgttacttaatttaacatgttagtcataggttacttaaattaacatgttaa

SEQ ID NO: 14912 - DNA, 418 bp, Glycine max
  unsure (1)..(418): unsure at all n locations
agcttgtaggccttggatcttcttcatcaatggagtcctatgcttcttgaattttaatcacaggggaatggagaagaagaagagttgagaggagacaccacttcaaggagaagatgagtcaagaagaagctcaccaccatagaaagccatggataagagcttgaaggtagaagaagatgaatggagggagagggagagaaggagcacgaaattttatgcctcaaaagaggtctgaactttgaagtttaattctcaaatgatcaaagttgaaaaaattcacacacatggcctctatttatagcctaagtgtcacacaaaattggagggaaatttgaatttctattcanatttcacttgaattttgaaatgaatttgtgaagccaaattttggagcccaaatttcactaattatgattag

SEQ ID NO: 14913 - DNA, 338 bp, Glycine max
gctggcttagcgagaattcgctaagcgcttcattcagtggctaagcgtgaggaagaattcaaaagaagatgagttgtcaacttcactaagcgcaccactccaggtcatcaagtgcaccgcttcagcttattcgctaagtgaaacaagcgcgctaagccaaaatccacttatgtgcgctaagcgatccagatttgtgctaagcgcattagcacgaacaaggccacctatttaagactgaaatcagatttgtaaggggagtttggcacctttcttgagaagctctgcatgcacgaaggttctagagagagaaaggtccaagttccagagtgttctgagag

SEQ ID NO: 14914 - DNA, 389 bp, Glycine max
agcttctcaggcccaaggtccacatcaatggtaggcatgtccatgcttgataatatctagacataacaagtttgaggataaatcatcgctatatactctttgatatccttgaaaacacttttaattttcttcaaattcattgttctattacaatctggtaagtgactacgattaaacaagaaaaagatttcagcatctaatgcacaatattggagacatatttcagatatcatcattcattaccatcaattacaaaatcaattgtcaaagatgaaattacagtgtttcacaaggacaaccaacaacataagttttcacagcctaatttatcaaaatgcatcccaattgagttgagtctctatgatcacacaacccattaaagtttcata

SEQ ID NO: 14915 - DNA, 332 bp, Glycine max
  unsure (1)..(332): unsure at all n locations
aagctcttnaattgcaacttctaactatcatatgctattttaaaaaaatggaaaaaataaatgtaaaaattatgtgattaaaaaaaatacattggaaggtttgtttatgtatcttattaaatatataggaatacaaagctagaaatatatattcttgtgtttgatagaaggtaattaaaaaatattgttagacataactcatttttaataatttagtttgtacatgtttctccgtctttttattttacgtaaagggatgagaatcttatattgaatgcttaaaaaataattcctcgtatttttcttattcaacctcatatgattatttattt

SEQ ID NO: 14916 - DNA, 350 bp, Glycine max
atgcttgagaaaattctaacgtcaataacttttaactcggatgtctgatcgagcccagtaatatatcaagacgctcgaaattgaaaatggaagctctaagaaaagtcaaacgacaataacttttgactcggatgtccgattgtgtcccctacgatataaagacgctcgtaattgaaaacggaagctctgagaaaaatcaaacgacaataacttttaactcggatgtccgattgagccctgtaatatatcgagacgctcgaaattgaaaacggaagctctaagataagtcaaacgacaataacttttgactcggatgtccgattgagccctgtaagatatcgagacgctcg

SEQ ID NO: 14917 - DNA, 337 bp, Glycine max
  unsure (1)..(337): unsure at all n locations
tccgttttcaatttcgagtcgtctnngatatttacagggctcgatcagatatccgagttaaaagttattgtcgtttgacttttcttagagcttccgttttcaatttcgagcgtcttaatatattacagggctcgatcagacatccgagttacaagttattgtcgtttgacttttcttagagcttccgttttcaatttcgagcgtctcgatatattacagggctcaatcagacatccgagataaaagttatagtcgtttgacttttcttagagcttccgttttcaatttcgagcgtctcgatatattacagggctcgatcagacatccgagttaaaag

SEQ ID NO: 14918 - DNA, 404 bp, Glycine max
agcttgtttttctagtagtgttagatgtcttgcatatatatcaaaaactatttattttatttcgttcataacttaatcaaataaattttaaaatatgaaaatcatttctcaatttttatttgaatcttaatagttgaaaattttaaaagataatgaattgagagaaaattgattatattttgtaaaactaatttaaaagctacctgaaagctggaaaactaattgaaaaatgaaaaattagcagcttgtaaccaaaagttgaaaacttttaaattaacttattaaatcacaagtgtttgataaaactatatgttgaagtagttgaaaaatgtaaaatgacaagaatagaaacatttatatgatattttatataaattttaattttattttatgggataaatatt

SEQ ID NO: 14919 - DNA, 79 bp, Glycine max
tctaaactttatacaagaatgaagctctgtaccacttgttagacaagtggcctcaaatatcttaagagggggggggggg

SEQ ID NO: 14920 - DNA, 377 bp, Glycine max
  unsure (1)..(377): unsure at all n locations
agctnttaatttcaatacaaggaagcatgacttacgcctaggaatctaagttttggttttgaatgtaaaaaggcatgaatattaggacatgtttgagaggttgttattagaatttaaatttggctgccccatgaggaatgccttgcacctaggtagcatggaaaatacctttcaacggtatgtatatatgtgaatatatatatagcatggaaatgccttgcaaaatgttgaataaaatgccttgcagaaagttgaataaaatgccttgcaaaatatgaatatatatagcatgaaaatgccttgcctaatatgaatatatatagcatgaagtgccttacaaagtgttggatgggtagcgtaaaagtgttttcaaaata

SEQ ID NO: 14921 - DNA, 347 bp, Glycine max
tataagaacaaaattgctttaatcatttctataatatgcatgtgaattatgaagcatcaacaagaatcaagccaaggctattgtgcaagcaatcaatggggcaaaacacaccaaatgattatgatgatggatggctcaaattctcacaaaagtaaactcatcactttcaaattgagctttcaaaactatcatgacatgtagaggagaatcaaggatttcaagtcacaaagtgtcaagaacttttattttcaaaacaattacccatttcttgaacatatcctataattcaaagaaaaacatgcaaagtcgtacatgcatacaaaattgacccaaaatattaaactaaa

SEQ ID NO: 14922 - DNA, 395 bp, Glycine max
agcttatgtataagaaaatatagtgtggtcctactatacctgaaatgttaatcataatttcaattatgttaattaactgtttaaactctgttagcttgaatgtgtttgttttaacccaaaatttcacatttcacccttgttatgaagctactattcaatttaaatattttaatcttccctcccttagcatgcatgtgccaatgtaatatatgtgattatcattccagtgtcaatttatttgtttttactgattaattcatggaaattcagaaattaatgcttggtttggcttttctcaactgtcaggtcaaagttgctgacagaacggctattgttacaacaaatgcagaaactgtggttgtgagctccccgggtctataagaagccataaatga

SEQ ID NO: 14923 - DNA, 343 bp, Glycine max
gaacactcaagctttagatgaatatacttaatgtacataatttatatttttataacatgaatacactacaaaagtttaaaaaaatcgcatcatatattcttataccctagccatgaaattttattttatattaattcattttctattgcatcaacatctttttttacacaaataagaatatgaatataataatattaattttcagaagttactgatttgtttggttaaggacttgggcaaagaaaagataattaaataaaaaaatttactcaatgtgataccgtgcaagtgaaaacaacaccaggacacctaggagtacgtaacaggacatgccacataatgg

SEQ ID NO: 14924 - DNA, 367 bp, Glycine max
agcttcattgtaagaactgtggaaagcatttgtagcagatatgatgagaatcatgaaacaggccaaatacagtctaaaggcccaactggagaaggacgaaggcccaagtggagaaggacaaagcccccgagtggagaaggatgaaggcccaagtggagaaggatgaaggcccagaggcagagacactatcaagactattaattgttgctgaaggcccaagttaaatatattttttagttataatttttatttattgtaattttggcccaaactattttgaaggcccatgtctatttttatcttttagttcagatacattataagtattggttttttgtttgaataaaaaaaacttttggcattttga

SEQ ID NO: 14925 - DNA, 330 bp, Glycine max
taatatcccatctacccatcttaaatagatttgctaaaacacagtccagcaagtactagtcaacacacttactgaacacacacttttacactgcataaagcataaaaaatacacataagaaaattcagcaactacattagaaatttcagtgcattaacagataccatttgtgcttttgaaatgaatatatgttcatagtcttttaaacatgtttgagaaaggtttgaagtttgatttcttcctaataaaaattaataaattattaattaatatttaccgttaaaataaaataaatatatgttcatagtcttttaaaacgtgctttgaaat

SEQ ID NO: 14926 - DNA, 393 bp, Glycine max
agcttccacaatcctaccaaatgcggatcacctaaaaactacgcggatcatctatatccctagcactactacggatcaactataacgcaaacgaggaacacctaaatgcatacgcagatcaactaccctaagcactacacaaagcaacaatggaaacgaaatgacagtgatgaaggagtgcttacctcgacaatggtgacgtgctgaagaagaagaagaagaaacgaacaatggcgccacggagggagcagacaacgatggagaacagagagttgcggatcaacttgttgggtcgcacacggtcgcaaaagaaggagcaagaaggagtcgcgggaagaagaaaagccaattgttgggtgcaaatgttttaagtaaataagcaggggcattttg

SEQ ID NO: 14927 - DNA, 327 bp, Glycine max
caagcccacatataaaataaaatctagacattattagataagataaaataaaatctagatgaaataaaatctaaataagataagataagatctagatgaaataatatctagattaaaaatctagataagataagatttgatctagataagataagatttgataaaattgtctgctctcttcaagtccaagcctaattctggattcaagctcaattgcttataattctcctgaaattaaattaaaaacacaaaattggtccaataggcccaaatgataaaactgcataattaatttgacaattaagactaatcagtaattaaagtagt

SEQ ID NO: 14928 - DNA, 406 bp, Glycine max
  unsure (1)..(406): unsure at all n locations
agcttacaaaggggctcatcaactccttgagtgaaagtagcaatcactggcttctttngattgatcttggattaagggaaaaatctattcaagaaattgtcacaaagcccatcccaagtcaaaggaaagctaggaggaatagcttggtaccaatgctcagccttgtcagcaagtgaaaatgagaaaagactaatacaaatgaaatcatcatccacttgatgaatcttcactgtattgcaaatatgcacaaaggtagtcaagtgggcataatgatcttcataatcaaagccatgtaacttgttttgttggaccaatccaatgagagatgcccttatttccacattgtgagccaccacttcatgttggaaaacaagtgaattgggctctagtctagctagcctctcta

SEQ ID NO: 14929 - DNA, 359 bp, Glycine max
tactcacgcttgcttgtggggcttctatggaggctggatttttgagcttctttgaggtcctttaatggtgattttccaccatgaagatgcagcggaagacaaaggagaagaggtgagaggaggcgccatccactaaggaataagccatggaagaaggagcttcaccaccaagatgagccttggaaaagaagcttagagaggatgcttcaatggaggaaaagaaagagggagagaaagagagagagggagcacgaaattgaaggaagaaaaagggagagaagttgaactttgagttgtgtctcacaagactctcattcatcaaagttacaataagtgttacacatgcttttatttataga

SEQ ID NO: 14930 - DNA, 411 bp, Glycine max
agcttatatacgggagccaatattcagatgagtactgaaaatatcaaatcagatttatcctttcataaagaacaactcgagtgataagcttatatagcttccataacatgcttaatgtgtcgacaattaaatttttagtttcaaatgtatttcaatgtgtggaatctttcctcaatttaaggataagcaggaatatttatgacataagttctaataggtaatagcactgtaggataagttattggcttgtattttagatgtcattagattatgatttttcgagaattctagcttctctatggaataataatacatttcaacttatctttttttttttggggcggcatggcgagaatcagcatttcagcttgaatataatttaatcaatggctgaatttggaagttctcatg

SEQ ID NO: 14931 - DNA, 365 bp, Glycine max
ctacataatactcaagctttactgatttgtctttaacgattgcttatttgaaggctttcttggatatatttgaaagaaatttgtttcacacacacatgaaaaggttagttcctggacctagtcatccacttaataaatttatggtttaagttcccatgcctgtttcattgcattcaacaattttagttgaaagctccttttgttattgaacagttgccgtttgtttttgcatggaactatgattctctaaaatggttctttttttattctgtgttttcatcttgaattttacctttgtgctatagtgtcacatatttgcggttggatggatcagttgagccagaaaagcgttttgaaattgtcaa

SEQ ID NO: 14932 - DNA, 389 bp, Glycine max
  unsure (1)..(389): unsure at all n locations
agctntaaccgtgcaaaaatggcaggtaactagacaatgcatattgtcttcttgatgttgcaggcaacgaggacaaacctcccccatagccagttgtatgcgctcttggtagtgtaaatacccaagacctccttttcccttacctacacaccattcatatcctccactatcattggattgacagcttatgccgcttcctccagaatactcgtaaataaccaatccacgttccagcaacctgattctgaatccatcctctagcactaccagcgccttctaaataaagttccaaattgatgacccatgcttagtcctccttttagccaaatttgggcttgcataaatcattgtgcaacatcaggcctggactcctcgtttatagacacagt

SEQ ID NO: 14933 - DNA, 287 bp, Glycine max
  unsure (1)..(287): unsure at all n locations
aaaaccccggaaaanaagagcgcataagcaacagcgccaccggnancgaaaacaaaagataaacgnaatgccatactctatgatgggacatgnctagcctcccaatgtagaagatgataatgtgatcagcttttattttcctagatagcataaagcctcaatgatttatgtgatggatagtattcgttgtaaatatgcatcttttattgcttggaaagtttagccttgttatagcttctaccctcctgaatgttggaaatatccaccttaatcggtggctctttggg

SEQ ID NO: 14934 - DNA, 347 bp, Glycine max
tgctagatatgtggctattactgtcaaaatacaaacatgatctcgcttataggtaagggatgagtttatcgcaattggggttagaatgaacatatgtagggatccttagaggaccaaattggggtttattttggtatgtttattgtgtttgaattattcctatatgattgtgtgaaattttttgaggggttttactcccatgttgtgagaggcatttttgtttaaattatttatactttggacaagattttctagattgacatgataaattgttatattgagattatgaaattgtgattcaaattgtgagtaagtgacaaattaaacctgtgatgaatggagaaata

SEQ ID NO: 14935 - DNA, 350 bp, Glycine max
  unsure (1)..(350): unsure at all n locations
taaagagttaagtctcatattggtttaatcttttatagttctactttaatcgatttgagacaatgactgatttttcaagagtctctggtttaattgattaccaggtggatcaatcgattacttctttcttgttaaattgttcaaagccgaacaaagaacactttaattgataacttaggtcatctaatcgattacattgttcttgagtggttttctagatgttggatgaacactttaattgataacttangatatgtgggacactctacaagttacacatgagggaacaactgatgtcaaaagatctaggataaatactctaactcatgagtatgaattatttaggatga

SEQ ID NO: 14936 - DNA, 402 bp, Glycine max
  unsure (1)..(402): unsure at all n locations
agctntaaataggctctgaattcacaacgttgcacttagcgccaccctcgcgcttagcgcgagtaagtggatttgagcttagcgccagtcgtgcactgagcctggctaaagacaagcgcattgatctcgcgcttagcgtgtggccttgatattgatgcactgccagattcttctaccgtgctaagcgagttgaagctgtgcttagcggtggatgcgcatttagcccactgatgagctaagctcaactgtcacttttagcacttcatgacttagcctcattttcacctgaaattgcacatatttcatcattaaatccaatggacatattctagagacaacttanaccataaaacaagatttattacaaaaatcactacaaaataaccataaattgggcaacta

SEQ ID NO: 14937 - DNA, 341 bp, Glycine max
tgcttgtggggcttgtatggaagcccgatttttgagctacattgaggccttttgagggaggtcatacaccatgtagatgcaagggaatacaaaggagaagacgtgagaggaggctccatccagtgccgaattatccatggaacaaagagctttagcactaacactagccttggaaacgaagcctattagaggatgcttcaatggacgaaaagaaagagggatagaaagacagagagggttcacgctattgaaggaagaaaaagggatagaagttgatctttgatttgcgtctgacaatactctcatacatcaaagccacaataagtgttacacatgccttt

SEQ ID NO: 14938 - DNA, 407 bp, Glycine max
agcttcttccccatgagcagcctcatcacctatctccatatcctcttcagacattctcaacggaacaaaaattctaatgaagaggcaaatcaaacttgtgctgataacattgacaaagataacaaagataatcccaaggatttggacccccatttgcctgaacccggtactgaccttcttcgaacctaaaccataaaagaaaccaacgtattgaccatcagttccatagaacaatttgttaagtcttggatcagcaaagagtccagtgaggagtcctcctagggttcctgcaatggcatgagtgtggaacactgccattgtatcatcaaccttctgcagtagctttgatctcttatggaccaccatcatggtgaaccatggaattgagccagataacactcccatta

SEQ ID NO: 14939 - DNA, 333 bp, Glycine max
  unsure (1)..(333): unsure at all n locations
gacngatgatgcttatgaagatttttaatctttcttgtcggaggacaacacacggtggactcaatttcatgtaatatacatgtaaatacaagataatatcgttttaattgaaactgaaagttttcacttttcactgttttcaaaatgcagtcatcctattattgttgaagagatctcaacttctgctctagataaaaccattccaaaaataaaacctcctgcagaacttcttgagaatgcaaactttcaatttttacatgattattgttagtcctcttgtggcgaagctcatcttttaaggttcaaaattatgtcatctaattcaacatcaaa

SEQ ID NO: 14940 - DNA, 382 bp, Glycine max
  unsure (1)..(382): unsure at all n locations
agctttccctcttcatagaacaataggggcctaaagaaccattgccctgatgagattatgactatgtcaaagttttcaaccaggcttgtccatgcttcatctgcctcatccacatacagcttcatgatgctgttgtaggtgtggcctctggggtctgcatcactggatctcacaaaatatggagaccacaggtttccaagtgtgaaattgtaatcatgatagaaataacgtttgaagtataccacatctgaagagtatttgtgagaaacatcctcaggctcagacacctaaaaaaagtaaaaccacataagcatgttttaggattgttatcttcatgagtaggactnttttaacatgaccaaggtttaaaaaacagttcacg

SEQ ID NO: 14941 - DNA, 352 bp, Glycine max
ggacacttgaatactcagctgctgcattcacaaatatcatttctaatgattgtatctcaactaatgtttaactatttgaccatatatatcaagtgttgtgacatctaatcctggataaattagttttagctgcctataaagaggtgaccaaatgggctgcctgacttgatgagggttgtgggctgtaacaggctaggtaaaaaaaagtctagattcaattcaggcctctaaaatgaagcccaagcccaatgaaagtccaattttttggacttttgacgggttttgtgggctaagcctgaatcatgccatgatcagatagatcagactaaaaggtttgtgtttaacccaggtc

SEQ ID NO: 14942 - DNA, 370 bp, Glycine max
agcttgagcttattttagatgaccaattttaaaaaacaaacttgagtttaaagaaaatgttgtcattggccaaaatagattatttagtgaggattaacctatctagtaccaacttctagaataatatctgaatatgcccaaatatttttatgttcgaaaagttaatgagatatttttctttatgattcaacttaaagatagaacaatttaagtaaaatatttggaatcaataaaatgttgttggctgaaattaattatacgattaatttgttttagataaattgtatgattgattctttaccattattatttactagtcggtaacccgtacatacgcacgggtggttccgccaattgatttttgatgaat

SEQ ID NO: 14943 - DNA, 353 bp, Glycine max
  unsure (1)..(353): unsure at all n locations
atagaacctcaagctnatacagaaatacatattttccagcaacattttgatggcactacaacaatacaacatacatcacatggaaatattagattacagccagacacaatgcatagatgctactgtgttgggtgctttgctacattgccacatgattttctggtacaggaactgtttggaggggatcaaattcaataaagaatgtccgaatctccatcggagcaagttcaaccaccaacttcgtaggatcaacaggtcctcctctcaccaccttcggttcttcagtggagccttctaccttccaatctagcttcctcttttccatttgagctctttcttgattagcagacaaa

SEQ ID NO: 14944 - DNA, 187 bp, Glycine max
agctttctagctattcattggtgtatatttatctcctttgtttctctaaattgtgggagtgtgctcaaatatatggggccattttgatttgtcttcttgcttgattaggttgaattacgggttggtttgagatggccctacgtctatatgcattttgaacaattggacatatccctttttccccctt

SEQ ID NO: 14945 - DNA, 360 bp, Glycine max
  unsure (1)..(360): unsure at all n locations
agctntggagaaccaagccaatcagaatgctagacgaaatattatgggaatagaggtaacaatggcggtaatgacggaccgaggcagaaccgggttgagggagtaaagctcaatgttcctcccttcaaaggtagaagtgatccagatgcctacctggactgggaaatgaagactgagcacgtatttgcctgcaatgactacactgatgcgcagaaagtcaagctagcagcagctgaattctccgactatgcccttgtttggtggcataaataccaaagagaaatgttgagagaggaacggcgagaggtagatacatggactgagatgaatagggtgatgagaaaaaggtatgtgcccact

SEQ ID NO: 14946 - DNA, 354 bp, Glycine max
tacgagcgactcgatatataatgcacatggatcggacctgtgtttgaaaaggtttgaccatttgaatttctcgagagcgtcccttgttcaatttcgagcgtctcgatatattatgcgcctgagtcggacctccgagtgaaaaggtatgaccattggaatttctctagagcttccgttgttcaatttcgagcgtctcgatatattatgcgcatgagtcggacctctgagtgaaaagttatgaccattggaatttctcgagagcttccgttgatcaatttcgagcgtctctatatattatgcgcctgaatcggacctccgagtgaaaaggtatgaccatgcgaatatctcaagagc

SEQ ID NO: 14947 - DNA, 379 bp, Glycine max
agcttatggggccaaatgctttgcttactgcaggcaacacattgatagctagcatagctcattcacggaaaggccggtggaggaaccgtgtaattacttgttaacaccatatcttaaagagacacagttggtgtatcttgtcttgttgaattgaaaactgtgctatagacacccttaaaaaaggaattgcttgaaatgagcatgacttttttcttttctgcttctggggtgaaaagtctgtatataatatagactttcatagacaattgatttgcggccacagatagaggatttttggaggcttgactggagagatgattcaatttctgaaggaaatcttcagtctcattttgagaatgttctgttagctgatcatagt

SEQ ID NO: 14948 - DNA, 345 bp, Glycine max
tgcctgaaacttcctgggatccctttgtcgttgtcttccggttagggtgaagcttaaggagaacccaatctcctatctggtagttcacttcgcgatgtttcccatcaacttggcttttcatagcagcttaagccttgagaagcttatttcgaatagcttggaaagtgttatccctatcagtcaacatctcttcaatggcctcaatgttcgaagaccctgtaatatattctggaaagttaaagggtttttggcaaaaggcgacttcataaggagtggctccagttcccgtgttccatgaagtattgtgggaccattcgacccacgggaggagcttcccccacaagc

SEQ ID NO: 14949 - DNA, 402 bp, Glycine max
agcttagccgaattcagatcgaattgattttagcttagctcatccttggccagcttagcagaccaaatcagcctcagatgcaagggttgggcgctaagcgcttgagactcgcggcttagcgcatgaatagagatgcacttagcgcgaggcttacgcttagcgaaaggactatttttcagaaaaaaagttttcaaagttatttttcagtcttttttcccagaaattgaaacccttatgttaaacattcaaagataggctgatatactcctatgtacagattatatagcaagttccaaatgattaaatgcatgaaaaaaaaaagataacagaaattaaaaatgggttgcctcccaggaaacgcttctttaacgtcattagcttgatgcatagctaaataccttc

SEQ ID NO: 14950 - DNA, 348 bp, Glycine max
tcatgatgaatcaagattgattcatagaagttttgatgaaattataggtgatgacaaaaagctcaaaagtcaagaacacttcatgataacaaagatgatctcaagaatcatagaatgagttcaagattgaaggaagaacacttcaaggttcaaagaagaaatttgatttcaagaatcaaagaatcaagttccaagaaacaagatcaagattcaagactcaagattcaagaatcaagagaagacttaatcaagataagtattaagaagttttttcaaaaactgagtagcacatgaatttttctcaaaaccttttaccaaagagtttttactctctggtaatcgattacc

SEQ ID NO: 14951 - DNA, 391 bp, Glycine max
  unsure (1)..(391): unsure at all n locations
gtatggtatgttgatcataaatggataatggttggagagcctactgttggaaacattaaagaaatggaagaagatgatgaagttgaagctcaacatgagcatgcacctcaatggaatctttttgagtctcatgattcaaaagatggatggtatgcttcacctccatcaagagcactcagtcgaagttcatagctctttagagaatatcacatgtaggccaaaaaatagagaaacttggcttagccttagtgacctccctaacccggatgaggatgagacttagtcatgttttagtgcttgtttttgctgtttgtttgtcatttttggtttagttctggttttgttcctctcatatagtggtatgttttatcgngatatttggttttttaat

SEQ ID NO: 14952 - DNA, 365 bp, Glycine max
  unsure (1)..(365): unsure at all n locations
aaactcaagcttnggaaaatgatttctatacaaaagttagttttataaagngttttacagtggtcgacaaaagcggggcttttgctcctacgtatccttaatttgtgataaggaactcagacctacgtagttcttgcaagcggtgtgagactaaaatagtctcggtgttctttcactaaaatgcgaacatgctttagtaaagaaacaaaacctctaactaattagagcaacatattaattttggagaaaaacaatgtgtctattggagaaggagagtatgttgataaaaattttcttgtaaccacaaatgagattttggatgttagcgttttgtttctaaacaaccatttagaggaaacactggg

SEQ ID NO: 14953 - DNA, 412 bp, Glycine max
agcttctccatgcctcttggaaccacattgaatagtggtagtcctgtctgcttaaaacaaaacaagttatatcacagattatttcaatacctattcctttatcaaacattttagtaaacaccataacataatgaaagactagttggaagacataaagacaccgtatcaccaattcaaatgccagctagagaaccaaaaaataaaaaataaaaaaccactatgaatttactcttggaactgaaaaccacactgaaactgttccgcgaaaccctctggttcacaatcccattgacactattgttgctttgcatggtgccccgaatctgcaaaaaaatggtgccgtatccaccatgcccaaaaggcctacgtaccctaataggcaacatgaacatcatggagcaactcacacata

SEQ ID NO: 14954 - DNA, 317 bp, Glycine max
ataaatgaggaactgttttttggagaaactgtctactttgattcgctgaccagagaccggtgcccaatgatatgcgtcggcggttatgataccccggggacgtacgtgcggtggctattgccctgacccttgcttgtcctatcccgaccccaccggggcatagtcagccactgagaacctgtgatgcacctaatcaggtcagctactgacaatctatcactattgggatctatgaccacctagcattgatgcttgtgtggcggctggccatctgaggaccttgattgatatctgggatattggactctggtaatcta

SEQ ID NO: 14955 - DNA, 409 bp, Glycine max
agcttgagcacctatgtgcttgtactctttattaataaaaaaacacagtaacttactaacacacctaatattagagcactagaaacaaattagactaatacaaatactaaaatttcaagtttagataccagactcaatgatgctaagtaaaacagaaaatgattacaacataagatgtaataaaatagtaaaatactactaattaaataaaaataataataaacggggaaagaaaaaccatatagttaaaagacagagtttaaggtggggtagagctgaaagaagaaaaagcatggaactaacagagtttagtggttcacaattcagcattagttagcaaactatcaattaacaataattatcatcatcatcatattaaactttagtgcaccaatgtgcatgaagttag

SEQ ID NO: 14956 - DNA, 348 bp, Glycine max
atactcaagctttataaaagaaacaaattttactgcatgatttgaaatctctattaattatcgcgtaatttaactaggctcaagtggaataaaaagttcaaaaacaaaatgattaatttaatgaaagatattacgattaaaaatgaaagtatttatgctacctttttcttttaaaacaaacataacaaaaacaaaacaggagtttgggataattactttcctttcaagtgaaaaatatcaagagaagaaaaagacaaaaacagagggaaagtaatactaccaattaacaaaaaactttattcctacaaatcagaagagaaattcataaaaaagaaaagaaaatgaaac

SEQ ID NO: 14957 - DNA, 383 bp, Glycine max
agcttcgtctgtatatccctcatgtaatactaggcctaaactaaacagcattattgtaacaacataattaagaccaaaatttaacctacagatccctcatgtaaggctaagtttcaatcctgcttcgatcaagttctaagggaacagtgcatttcccaatgctaaagtcacttaactgtgcacacaaatgggtgatcagaccaaaagcatagaaacattaagcattgaaggaagcattgaacacaaaaaacataatcaattagatattaggtatttagagcagctgttcattagaaatccccaactagggtgtttagccagccattacaaagaaatcctgacaataaatgagattaaaagcagagaatgatagtttcttacac

SEQ ID NO: 14958 - DNA, 318 bp, Glycine max
tgagcttagctacacatacctctctaatatctaagctcacctccttgagatgaaaagctagagcttagctacacaccccctataatagctaagttcacccccatgacaaaaaacatgaaaatacaaaaaaagtccttactacaaaaactacttcaaaaggcccgaaataccaaggctaaaaccctatactactaaaatggccaaaatccagggccaaaacaaaggaaatacctattctaattttaccaagattaaccggcttattactaacccattgggctaaaaatctaccctatggctcatgaaaaccttagggcc

SEQ ID NO: 14959 - DNA, 395 bp, Glycine max
agctggcttgcactaagcgcttacacttttgactagttggctaaagagttcagctgagcacacatcactacactaagcctaacatcttcacaggaagtaaacttcaagcagtgggcttagcggagatgatgcgctaagcgccacttattctctgaaaaaatttattgtagcagcgcttagcacactgtgctgagctaagccccatacccattttggaattgaactttcacgagttgggcttagcggcaggatgcactaagcaccaatcccttattgtttttgaaatgcttggagttgcgcgtagcacatcggttgcgctaagcctgaactactttctgtaagttaaagcttgattcacgctaagccttacatctcaggctaagtgcatattacag

SEQ ID NO: 14960 - DNA, 315 bp, Glycine max
  unsure (1)..(315): unsure at all n locations
tgaacgaatgcaatacacatctgctgcaacttttgngattctcgacactattccatagaatcgcatatccacttgtaattccaacgtgtcaaacctttcaccaacaaaggtatgaagaccatcaaacctatccataatcttcgaaagaagagatgaatcttctacctcaggtccttcttcaccaacatttctagcacccttcttcacacaagagccatcatgctcctttatataaccaaaggatgctatgactaaagcgcctattaggaatgatcatttgattggaacataaggtttacaacaagagggatgttg

SEQ ID NO: 14961 - DNA, 370 bp, Glycine max
agcttaatgaaacaaacaaaagcataactctaatccataacaattcaaaatttaatgagaagaaaaagaaattaatgaagaattggttaacctgtgatgctaacaaaggaagaagaagggatgacaaaggatgattggaagagaaataaagaaaatggaagagagattgacgaacggaggaaggcacaaaaacacgtatattatgaggaacaagagagagaaattttgagggttgaaatttttttaggacataattgtccaagctatttaaggaacagattcccaaaaagttaaaatttcacaagctggatatctgagcttcaacaaaagatctactgagagcttttacttttataaaagctataaaaaa

SEQ ID NO: 14962 - DNA, 342 bp, Glycine max
taattatgcctcactttttcactaaggcattttagttatgtttacaatgttgagattttatgtttcttttattttctaccaagtacacaagaagtgatttgtataaatcaattgtgaagtgaatggaaagagacttttggctgattttatcattgaagtgtgtgaattgtctctactagggttcttccttgaaccatttgatcttatcaagaatttctcaattcttgtggcgatcctcaaggcttatcaggcatcattgtttgtggttcctatcttgttcttcctttcacattttttgtgtccttgttaatttctgcaatgctaattttgtaattctatctg

SEQ ID NO: 14963 - DNA, 379 bp, Glycine max
  unsure (1)..(379): unsure at all n locations
agcttctcccccattttcctataaatatggggagaggtgaagggaaaaaatgttcagccttgctggtaattcgagaatcacatgaaattagtgaaaaaaattgtttccgtgaagtaaatccaagcccaggcgcttccgtaacgtttccgtgggtgatttcgcgaagattttcaaccgttcttcggcgttcttcatcgttcttcggtcttcaaccggtaagttcccaaaattgaacttttcaattcattctatgtacccttagtggtcctcatttgtttcgcgtacttttattttcatcccatttactttccgtacccccttttgacgtgctntagtcatttacttaagccattttctcgcctaatcaagaaataaaata

SEQ ID NO: 14964 - DNA, 329 bp, Glycine max
tagcaccactatcgcgcttagcgcgagtttatggatttggacttggcgccaatgttgcactgagcctagcaagagatggacgactcgcttagcgagctgatctcgcgcttagggcgctgcttcgattcaggtgctcttccagattcctttttcacgctaagtgcactgaagccgtgcttagtgacggatacgcactaagcccactgagttcgcttagtgcgacaaccactttggcacttcaagaaattagctcctttttacctgaaattgtacagattttaacattaattccaataaaagagaccccaatgacagagatcaaaacacat

SEQ ID NO: 14965 - DNA, 199 bp, Glycine max
atcttgatagagagcgttatgttatgtatcaagggttgcggggatttgtataatgcctagagatagcgaatttatagtggggaggttgtcaaaatgaccttgttggtacagataattacttactactcactgctactgcctccgttttttgtaccaaagatataggtctattcatggctacatatcaatcctagatctt

SEQ ID NO: 14966 - DNA, 348 bp, Glycine max
cacgtgacgctctagggtactcaatcttgagacatttcactacgccattggcgaactcttgccgaggcaacccttgcgtccattgatggtgacggctctacgcatgcaaatatgtcaaagtacccgggcatactgagcagcccttacatgatatttacacgatgaacgattgagacctaatattgggtctgcggcgaatgattgactcaaagcgcctcttcggaaaaaaatgtgctagtctttcaaaatggacgtgtctaagcacgacacctaagctgataaaatatgacaccatagcggaaccagacgacttacaaacaatgggtgagccggtcctatgcagtgaaa

SEQ ID NO: 14967 - DNA, 421 bp, Glycine max
  unsure (1)..(421): unsure at all n locations
agcttatgcgcatatttccttacaaacgttctcttgcacaagacattctattaaccgaaaaaaaatgcacccatgtacaatcaaggcagcttcgttacctagattatttacacgtacttccaaggtgtatttgttacttacatcacacacatctccttggctaaattcacatacatgcatactcaaagcattttggggtaccaaaaattgcacatgtgcacctcttggtatttctaatacctatacatacacaaacttcatgatgaatcttgactatctacacaataaggtgctacatttcatgctcttttcaagtttttgctacctaaagccgcatgcaaattcaagtatattttcctttgctgactaaaatngtattcnaaataaaaggtatacattttttggtaatgtatcttcttta

SEQ ID NO: 14968 - DNA, 338 bp, Glycine max
ggcgggctcgggagacaaaggtttagcgttcgctatatgcgattatgatattccgagtacttcggatgtggtacgaccatgctctcttgatttccagctgggaaattggcgagtggaggaacgccccggcatttacgcaacaagcataatgtaaacctttacggttttaaaagctctatagttgggcctaggctttagagttttcattttgttaaggctttgtgtcttttgtttttgaatttataatacaaggatctttcttcatctgttcctggtctctacccattctcattcatttgcatgtttacttctttttctaaaacggcagattcgatgac

SEQ ID NO: 14969 - DNA, 368 bp, Glycine max
ctctaagtcacctgcggctgcactctacttatcaaatgaactctgatacccttgtgacatgcctctgattctaagaagaggggggggttgaattaagatatcacaacttatttccccaattaaaattctatttcactttctattcaagttataaattcccttaataatgaatttcttaaatattgattcaaatacaacaatttgaatatgaatataaaacaataataaataaaggagtttaagggaagagaaaatgcaaactcacatttatactggttcggccacacccttgtgcctacgtccagtccccaagcaactcgcatgagagttccactatcttataaattccttttacaagttctaaacac

SEQ ID NO: 14970 - DNA, 344 bp, Glycine max
tcttcttccatggcttattccccagtggattgcgcctcctctcacctcttttcctttgtcttccgctgcatctccatggtggaaaatcaccgttaaaggacctcattgaagctcaaagatccagcctccatagaagccccacaagcaagcttccatcagaaaggatcgaagcgagtctgaaaagaggcaaatttaatcatcctacttggacgaatgagaaaactggggcaaatgaagagggtgagaatgaaggagaaacacatgctgcaattgtcgttcctacatggaacttcccaccagccaaacaatgtcattactcagccaataacaacccttctgcttac

SEQ ID NO: 14971 - DNA, 362 bp, Glycine max
agcttccaaattagtgtaccacactaccgcagctccggccaagctatcctgaaagaagtgtatcaacagcttttcatctctagaatgagcgcccatcttacggcagtacatcttgagatggtttttgggacaagtcgtccctttatacttgtcgaagtccggcactttgaacttcgggggaataacaacatcgggtactaagcaaagatccgtcatgtctgcaaacggatagtccccaaacccttccacagccctcaatctttcctcaaggagatcgagcttcctcctttcttcagttgccgggggcagcccttccatagacaaaactattggcgatgctgcgatgttgggttggggcaacg

SEQ ID NO: 14972 - DNA, 353 bp, Glycine max
gcttgagaatggaggatttccttgagggtcctttcttaggcaattttggaactttactccaaactcaaaaatggaggacacatgaatgacaacgccattcattcatggggctccgaaaaagggtaagaatggaggatttgcttgagggtcctctcttaggcaatcatggaacacaactccatactctaaagtggaggacccacgaacaggcctaagcaatagcattcatgtggctccgaaaaaggatgagaatggaggattgccttgagggtcctcttttaggcaatcatggaacacagcttcaaactcgaaaatggaagacacatgaatgacaacgcaattcattcatgggg

SEQ ID NO: 14973 - DNA, 416 bp, Glycine max
  unsure (1)..(416): unsure at all n locations
caagcttgtggaattcggtctaggagggatctgcaattcttgtgttggtaattctagtgactttatcttcggtgatatcattatttcttgcctaatcgtctatcttatttacaaaaataacaaattttgagcagatccggccaattctgcaattgtaactacgtttggtgggatacctcttataatccaatgtttatcaagcccagttaggaacactgtaagtataagagcttttttgcttgttgacattgtttcactttgatggctcctaagttgtggatcatgtaacttgcagaccaaaggggatntgctaaaccactaatattcaaaaattttgttgatagcattttcctcccttctgttacaatcatgattgtgtnttctacttcatcactagatggtatttattatatatg

SEQ ID NO: 14974 - DNA, 350 bp, Glycine max
  unsure (1)..(350): unsure at all n locations
agcttgngcgcaaattttacacatgcatgttgattttaatggcatttgcttcttctgaagactagtagagggtcttatccttcaccttgctcatggtttaatttcactggctctcaatagcatgcttgtattatgttaataagaatgccaaggtttggttttgtgcactttggccagagtaaagttgataaaattcctggatggatgcattgagcttcaaatttcaattttatagttggaaaaacaagtgtctattcttttactttatttagctactttcgtacctggtattgtataactagtagcattcatgaaaattgactgctgtggcaaatgatgttaatttggaa

SEQ ID NO: 14975 - DNA, 385 bp, Glycine max
tgcaagcttgaatcggacctcagtgtgaaaagttatgaccatttgtatttctcgagagcttgcgttgtttagtttcgagcctctcgacatattatgcgcccgaatcggacatccgtgtgaaaagttatgaccattagaatttctctagagcttccgatgtttaatttcgagcgtatcaatataatataagcctgaatcggacctcagtgtgaaaagttatgaccattttaatttcacaagagcttctgttgttcattttcgagcgtctctatatgtgatgcgccttaatccgacatccgtgtgaaaacttatgaccatttgaatttcttcagagctctcgttggttaattacgagccttctcacatattatgcgcccgaatcgga

SEQ ID NO: 14976 - DNA, 366 bp, Glycine max
aagactcaatcttccatcaagtggtaatcagagcacaagagtttcaagtaggttctccttaaacctccattaattttttttctttaccttctcttccattgtcgattcttcatttttctccatgtatctcctcacatgtcttgttctaaatgttgttaacatgattctttaaagtttccaccgattaaacttgctatacaaggtagatttgattttctatggttcaaatttcttgttcttgttcttgaaccatgaattgtgttgagtttaggttcctttgagttttgtcttgttattttttgtggctgaaacctaaaccataaaattcttacaaaaatattaaagtagaagaaaacctcataaatc

SEQ ID NO: 14977 - DNA, 348 bp, Glycine max
gtctagtccaacaagagggaattgaggatgaagcctaatttgatgttagtctaaacctatgagggttgtctaaattgagcccagcccaactagagggatctgaggatgaagcttggattgattcaatctaactagggtttgaggattagtaatttacgctacaacataaaacaaaaaagcatgattgattatagaaacatccttgtatgcatcagctggtctgtcagaaaaaaccaacaattctacctactgctgtcaatttcacttacttgcaattttactggttttatcccagaccctatttaattctgtttaaaccatcacatatcaatgtgtcttctacaatgc

SEQ ID NO: 14978 - DNA, 334 bp, Glycine max
tgtccttggtttagacatgattgatacattatttgggacttgtaggattcaatttgggcaaaattggatgagggaaagtgtgatttcgaaaatctgcactttatgcagaatttttgctgtcaaataggtgcagcagaattttggctttgtgcaaaaagtgttgtgtttttgctggttgtggaaagagtagtacagattgggttctggacgttttctagcagatcccaacggtcataatgtagatttatgtgctagagacttccagtgaaatttttgagtcgatcaaacggttaacgaattggaacgaagagaatattactagggtctttaagta

SEQ ID NO: 14979 - DNA, 301 bp, Glycine max
agcttagagaggaaatttcaatggaggatgagaatgagagataaggggacgtgggaattaaagaaattagggagagaagttgaattttgaagtgaatctcacaagtttcacattcaccaaatttatgacaagtgttgcacatgtttctatttatagcctagcacacgggaagcttccttgagaagcaaggaaggtagcttccttgggaagctagaggaagaaaacttccttgagaagctagaggggggctactcacacccctccaatagctaagctcacccccatgccaaaaatataattg

SEQ ID NO: 14980 - DNA, 336 bp, Glycine max
tcttatccaagacaattcttcgtggtgaatctccttcttccttggcttattccctagtggatggtgcctcccctctcctcttctcctttgcctttcgctgcatctccatggtgtaaaatcaccattgaaggacctcattgaagctcaaagatccaacctccatagaagctccacaagcaagcttccatcaagtggtaatcagagcacaagagcttcaagtaggtgctccttaaacctccattaatttttccgttgttgtttcttcatttttctccatgtatctcctcacatgtcttgtgataaatattgttaacatgattctttagagtttccacc

SEQ ID NO: 14981 - DNA, 401 bp, Glycine max
  unsure (1)..(401): unsure at all n locations
agcttcgatatcgaaaactaaccggttgaagctcgaggaacgatgaagaacgaacgaagaacggcgaagaaactttcacaaaatcgatcacgaaaatgtcttggaagcattacggaagcatctcgacttggattttttccttccttcttcttctcctcactaattttaagtgatttcttagttatcaaattgctgaacccctaaaactcagccccctcatgccattttataagaaaatgggggaggtggttgccgcccagctcgcccagatgagctaggttgcttccacctgaagcaatcccctttctggaatattccagatgggcccagatgctaggtacacccncagtttgattactacacccctatttttgtgttntagctgattttttttgaacgtc

SEQ ID NO: 14982 - DNA, 338 bp, Glycine max
tggattgattgagtctagctagggatcgatgtttagtaatttaggctacaatgtagaacacaaaagcaggattaattagagaaatatcttgatatgcatcaactggtctgttagaaagacccaacacttctacctactgttgtcaattttacttacttgcatttttactatttttagcctagacttagtttaattttgttctaaatcatcaattatcaatgtttctgtcatcaatgccttatttctaaatttaaccctatctaagactagttccctgagttcgatacttggattcatccattttaattttaaatacttgacgatcttgtgcactttcc

SEQ ID NO: 14983 - DNA, 393 bp, Glycine max
  unsure (1)..(393): unsure at all n locations
agcttgagtcacttatgcttaatgatgatatttaaaagcatagcaatccaaaactgtcactatagtgtgagcatgataataactgttgatggataatctatcatgataataaccaattttgttttgcttttggttatcttgagataaatctcaccaagaagcatacactgagagtggcttctcatcatttgggaaattgagtgcgtttgtcaaccttataaatgcaaactattaatggaaaaaaattgagggattgcagctcaaaaactaacttcacttggcggcctaccttttctggcctttactttcttcctgagattttttatttttttattttggtagggtgcttnttcttttttgggtaaaagggcactcttttttaagatatataat

SEQ ID NO: 14984 - DNA, 342 bp, Glycine max
tgtaagatttgcaagatcatcttccttgattactccttgaaaattattgccatcaatccaaagagatgacaatttagagagtgatccaagactttcaaatggatttccactgaatttattaatagagagatcgagaaatgttaaatctatctcccttgagttgcggagatttcccaaaaaagtcggaattgttccttcaagttgattatatgacaaataaagtgcaacaagagaagtcaaatttcccaaagaagttggaatggttccttcaagttgattagctgataaatcaagttcaacaagagaagtcaaatttcccagggcatcagaaatagtcccatg

SEQ ID NO: 14985 - DNA, 305 bp, Glycine max
agcttattgtgtaaaaactctgagtaattacaatacattttctatcaacatctactgtttgtgaaagtctagagtggcttcatgacaaaaaatacttgggtcttaatctctgggggagattaagggtatctagatgaggcataaagaatacttgattttaataaaaaatttgattagtggaacccttcaacttttaaaggagaattggacctagcccaaggattggggtggactagtataaaacctttgtgttttctttactacttctatataactagttcctttctacaaattatttcttcttt

SEQ ID NO: 14986 - DNA, 343 bp, Glycine max
tgctttctttgcggcacttataaacactgtggttgctaaagatcttgactaggtcagttgcactttcgtagcaggatgcttcattctgatgataaatattaaggatccatcataatggtattttttcagatatgaaaatcattatgctcgtgatttagaattgtttgataagcaaattttgttggtatagttttgtttgataatgcctcaattgggcttttcttttaacgtgaacatgggtagggaatcctcattatttacgcttgcatgatgggatttaaagaacaggttaccaaaaacaaaacacgcgattatgtcctgtcaattttttcttatggttagt

SEQ ID NO: 14987 - DNA, 373 bp, Glycine max
atcttcttccggaagttagttttttaaaaaaaatatattttattttgtaataatttacttttaattggataaaataatttataaaataattaatactattatacataaataattaaataattagtgaacgtaattatgactaatatttataatttgttttctacgcgcatgtcaaatattaattgtgtgacaatttagtataatttaaatcattaaaattaattaatgcgtacattttattaaaaaatataaatatttattatgataacattaattttttattacaaaagttatattttcttaacaaaatgatatttttttgttaccaaatggagaataaaagaattttcatttttattattaggtaaaataa

SEQ ID NO: 14988 - DNA, 327 bp, Glycine max
tcaccttttggtcctcctcatagttgttgtatgagaaaacatgctctattttcatctcccactccaagtaggcctccggatcattctttcctttaaatggaggaatgttgagtttaataccatcaattcggttttgtctaggaacaccatcattccctcttctcctcctttcttcttcattatgatctctattctccatttgatccaacctctcatggagcgcatcatctcgttgtttcattaacctctccaaatgttgcatcaaagcttgcatttggaattgcgaaagccccactccatcattaggattagtacctgacatctcaa

SEQ ID NO: 14989 - DNA, 350 bp, Glycine max
  unsure (1)..(350): unsure at all n locations
atctttacagcagatgccactctactccaaattcttgaaggatatgttaacaaggaaacataagtacattcaccaggaaaacattatagtggaaggaaattgtagcgctatgattcaaaagatcgttccacataggcataaagaccctgngagtgtaactattccttgttcaattggagaagtcactgtgggaaatgctcttatcgacttaggagccagtataaatttaatgccactctccatgtgtagaaggttgggggagttggagatcatgcccactaaaatgactntacaactgactgaccgctctattaccataccatatggagtaattgaagatatgctggtca

SEQ ID NO: 14990 - DNA, 330 bp, Glycine max
gctagccttttggacttaccttgaattaattccttagatggcccttatgagcctagatgacctttccttgagtggaagctcactacaagcctgatgtgaaaaaccatgatattaccatatacttaaagaatgttggagctttggaattgatttgggaataagtgtggggggagtttgattcattggacaacttggattgtaggatatgcttcatgatgtatgatgggccatacttgatgtacattgtatattggttaaatgatggacatgctgaatgaaatgttgtttctcaaaggctgtagagttcccaaggcatcagaaatagtccca

SEQ ID NO: 14991 - DNA, 364 bp, Glycine max
agcttgcaagtctccacccatcatcatgttcgaactgaacagaaactacccacaaacatgcactaaattgcctataaactcaaaacgtgtttaattgaatttattttaaactctttcatatgtgtttcattacaattatgaggcatctcactgctgaatttggttcagcttggtccttctgcccttgctgccaatggcctgcataatggtagtttagtgcagtgtcgtttctcttctagggtcaatctctagtaggattctaaggtttttattttttatttatgacataaaggttgattggattaagatatttgaaaactggaacttcaaaagagtcaaattactctccatgccttattctgga

SEQ ID NO: 14992 - DNA, 343 bp, Glycine max
tcaagaattatggcctcatcaaactacttgtttcccgagggtaattctattaatagacctcccatctttaatggagtgggttaccactattggaaaacccgcatgcaaatctttatagaggcaatagatttaaatatttgggaagccatagaacaaggaccttatgttccctctatagtggccggaagtgcaacaatagaaaaacctagagcagattggactgaggaagaaagaagattagtacaatataacttaaaggccaaaaatattattacatctgccctaggaatagatgaatactttagggtttcaaattgtaaaagtgctaaggatatgtgggata

SEQ ID NO: 14993 - DNA, 341 bp, Glycine max
agctttatcatattgtggatggacaactctaccttcttactgaatgggcacaattagagagaagaaatcaagaatccgtaggaagattgacaaggaagttgacagcattgtccaacatactgcctttaactcacactgttaaggtatacatctcgctaattacttttacatgttgaaaaattattagatactctaggactaggttgtataagtgaattgatcatagtaatatggtagcccgttcatccattctactaataaaattaaattttaacaaactaacgttctgcaataaaaaagtatgggagcttaaaatttcctttctatttgattctctttac

SEQ ID NO: 14994 - DNA, 349 bp, Glycine max
tgaagcttctatggcagcatgcttgagtgtgcacaattatgacctacattttgttccgatttatacataaagatgtaatatacggagatgcatgcagtgattgttcctctgcgctgggcggtcactcgcgggggaagatcacactcattgcggtcttggttcaggctttctgttgtcactctattcgtctactgactgacagctctctttgcaggtttggattgagcagctttctgtgtcttacttacacgcttgctgctactcttgaacagacacacggattccatcgtattcatgcatgctatacttcatcaccccatactgctatttttactaatagatagacgtg

SEQ ID NO: 14995 - DNA, 255 bp, Glycine max
agcttctcgatatgcgatgcatctgaattggagatccgtgtgaaaagttatgaccatttgaattgctccagagcttcgcgagttcaatttgagtgtgtctacgcattatgcgcccggatcgggcatcgctgtgaaaagagaatccctactgaattgtctcggaaccctgcgaaggtgaatttccagccgcctggatgataataaaccgggaaaaggccttaatgtggaaaggtatgaccttttcaattttcccag

SEQ ID NO: 14996 - DNA, 307 bp, Glycine max
tgaattggaattcaatgtgaaaagatatgattattataatttcccgagagctaccgctgatcatcttccagcgtctatatatgagctgcgccttaatctaacatccgggctaaaagatatgaccgtaaagatatctccagagctatcgctgttgagcttcgagcgtctagatatgagagtttccttaattgaacatcccggtgaaaagctatgaccattaggatatgaccagagctatcgttggagaacttccagcgtctcgatatatgctgcgccctaatcggacatcctggttaaaagttatgag

SEQ ID NO: 14997 - DNA, 236 bp, Glycine max
agcttaactcggatgtccgagccgcgctcataaataatcgagacactcgatattgaataacagacgctctcgagaaattcaaatggtcataacttttcacacggatgttcgattcgggcgcataatatgtcgagacgctcgaaattgaacaacggaagctctcgagaaattccaatggtcataacttttcactcggaggaccgattcaggcgcataatatatcgagacgctcgaaa

SEQ ID NO: 14998 - DNA, 350 bp, Glycine max
tgtagcaaatgcaaacggcaataacgtttttctcggatgttttattgagtcacgtaatacatcgaaacgctcgaaattgaaaacagaagctctgtgcaaattcaaacgacaatacattttaactcggatgtccgattgagtcccgtaatatatcaagacactcgaaattgagaataaaagctctgaacaaattcaaacgacaataactttttactcggatgtccgattgagtccagtaatatatctagacactcgaaattgagaatagaagagctgagcaaattcaaacgacaataactttttactcggatgtccgatggagtcccgagcgtctcgatatattatgcgcc

SEQ ID NO: 14999 - DNA, 340 bp, Glycine max
tatgaatgcatatgctactagcattcctgaggcttctaatctagcaactggagcatatgtctcctcataatctattccctcttcttgattatatcctttggtgactaatctagccttattccttataactatgccattttcatctaatttatttctaaatacccattttgttccaatgattgggtagttttagggtttctcgactaactcccaaacattatttctttcaaattggtttagttcttcctgcatagctattatccaattttcatttattatggcttcatttaaatttttaggttcaatcatagatacaaaatcatgttattgcataaatctt

SEQ ID NO: 15000 - DNA, 355 bp, Glycine max
tatgacgttctagaataatcgatgatcaattgtggtaatcatttatttcgtcacacgaagagcttctaaagttttcagacacaatctaattgattactaaatatggatatcgatgatctcgatctacagagcattccttattctaaaactagctttataatcgattactaaaactaataatcgattaatttgatgactttagccaaatttcaaatagaagtgagttctgttgcttgttctaacactttgccattgataacataaccttgtacattgagtatactgtgatgaactcatcgcttctaagaaactttaggatcaatccatctatctatcatgtttaattcaccctaag

SEQ ID NO: 15001 - DNA, 339 bp, Glycine max
agcttatggacgtgtatcttagcaacccttgacttgtagtcaaatggtatctaaaaaccacatcctaatatgttgggtttgtttgagttttattcctcggtgtatgtttctatgcaatgcttctaatgtgatgtctcgtatcacatgtaatatttcacattttctagaattgaactccactccttcaacaaaatcactcatttccccatcgtaatggataatagcctgaattgcttgcttttgagtaaacattattttgggaatggactaatgacaaaattgaaaatgtattttggtgatatttgtgaatacactagtagacattataaaatagatata

SEQ ID NO: 15002 - DNA, 334 bp, Glycine max
tctcaatcgagtggattgcctactcctcgtagacgtagcctctgaaggatcatctgaatgcataggggaccttcggggtattgccatgactccgtgcaaataaaacaaattcattaatgtaatatgatatacattacttttataatgagcagttatgtcggaatgctctcccttaaaccttcatcatgatcattacgatttgcatgtacatcatccacctcatgttcttcatttatggaaggcattcatggggagaaaccaagtgtctcacaaatatcaagggtcaaagcatcattttggtgattgataccgctagttcttccttgtagaacca

SEQ ID NO: 15003 - DNA, 375 bp, Glycine max
  unsure (1)..(375): unsure at all n locations
agctntgacttgagttatcaagagattataaatatgtggtcatggcatgaatttaaagaactacattatctctatcaatcatctttaaatcatctatctttcaatttatctttcaatcttctctcgacatcattcaatacctttcaactctttctacagaaatttctcttcatctttataaaagtttttgttcaatactttctctttcaagaaaagttcactgatcaaaaacttgtgttattgatctttttcattctcttctccctttgccaaaagaacgaaggactaactgtctgaattcttttgtgtctcttttctcccttacaaaagattcaaaggactaaccgcctgagaattctttgtcccaacacattg

SEQ ID NO: 15004 - DNA, 334 bp, Glycine max
tcttttatgatttttttttagactagtcattcattttggtccttaaagtagttagtatgtattgtcacattaatctcttaaagtaaaaaaaaatggtaaataatttcttgagatgtcaaataagttcttaaacttaactatttaatgtcatttagtttttaaatatatgttaatagtattattttagtcatacactttttttttaattttgttgtccacttttgatcttaaaaaaaatctcagttatattcatttcatctttatctcccagtctttgatgaactatacaaaatctaaaaatactcttaatcctagtttatagtgagatcacttt

SEQ ID NO: 15005 - DNA, 347 bp, Glycine max
  unsure (1)..(347): unsure at all n locations
agcttatgctgcattcatttataatagaccccctcagtagcaaaaccaacaacagcagaataattatgatctttcaagaaacagatacaatccaggttgcaggaatcatccaaatctgagatgggcaagtcctccacaacaacaacagtctatccctcctttctagaatgctgctggtccaagcaagccatatgttcctcctccaatgaagcaacagcagcaacaacaacaaagacaacaagcaattgaggcccctcctcaaacttccttagaagagttagtgaggcaaatgaccatccagaatatgcaatntcagcaagagacatgagcctncattcagagtctga

SEQ ID NO: 15006 - DNA, 340 bp, Glycine max
tgcttctacacctaggatttcaatgagggttccatggaaaaggcttagtttttgggtttgagtctgactttgatttggttttgggtatggataatgctcttgtagagtgaattgctaatggagttgaagaaagcttccttcttggacccaaatttccctcatttcttccttttcttcatctcaaagcaagttctttgggtttgacgagtaagaaaagctttatccttttctatgcttaggttgttgtgaattggtttcaaggttgcttgaaaatgaatcttgtttaaaaatggaaggccctgttcaaggtggtttccatttttttgttttaaaatacaat

SEQ ID NO: 15007 - DNA, 343 bp, Glycine max
agcttgcctcaaagaggtccaggaaggacaaggcagccgaaggaactagttccgctccggagtatgacagtcaccgctttaggagcgctgtacaccagcagcgctttgaggccatcaagggatggtcgtttctccgggagcgacgcgtccagctcagggacgacgagtatactgatttccaggaggaaataggacgccggcggtgggcatcactggttactcccatggccaagtttgatccagaaatagtccttgagttttatgccaatgcttggccaacagaggagggcgtgcgtgacatgagatcctgtgtaaggggtcagtggatcccgtttgatgccga

SEQ ID NO: 15008 - DNA, 281 bp, Glycine max
cgcatctaggcatgatcagagagaccatacaagtttcctagcggtttataattatatgggccattaagtctatcatatgctgacaatatgcgagaagcccatgaatttcatctggggcggagtaagtgtccgctattgccttggtcttggctaacaatctgggaagttcttgactagcgttcaacgtaagagtaaaccgatacatgcacatggttgcctcttggcgtaaagagagaataacccttcctatagcctctttttacgagtatacttgggcatac

SEQ ID NO: 15009 - DNA, 336 bp, Glycine max
agcttcattcaggtgatagagttacacggacaagtggtcattatgagaaaatgctttcatctgctgcacctgataagcatacttgtacatcgggcagctcaaaaaattggatggtgttgtcaatttcaggggataagcctactcctagatcctatgtatgtaaatttgtgattcttgttatattttacatttgttcctgagtctttttctggaagttttatgacttctgagcaattttggcaaatgacttaactatcactatttgtgaatagcatgctacagttgtcattcaaaaaaaatgaaaatgggtggtggtgaatccgggagtggattgtt

SEQ ID NO: 15010 - DNA, 334 bp, Glycine max
  unsure (1)..(334): unsure at all n locations
taataatattcctgaaactttagttttttttagaaccgngatggatgacgtcttgtgatctatgtatccgatctcacctattgggataaaagcttagttgttgtttcaattatcatattcagtttttatttgacgatttctcatttttatgcctttggtattcaattttattccatgtgcctaaccaaagtatcttggtatgtatttaaattttgttttcaaggcaaggttcctctattatctgtggaggcactgcatcaccttcatacatttatttttgtcctaacttgggcccatgtcacattttgtgttctcactgttggttttggagggc

SEQ ID NO: 15011 - DNA, 334 bp, Glycine max
  unsure (1)..(334): unsure at all n locations
agctttgatttcctttgttccggaaacctttgttttctcatgtgcacccaaacccaatctccgggttcgaagacaaccttctttctccctttgttggcttgtttagcatagcttttacttttcctctcaatttgatctttgactctctcatgatgcttcttcacatagtccgcctttgcttgaccttctttatgcttaaaaacagaaacattaggcataggcaaaagatcaagaggagttagtgggttaaaaccataaacaacttcaaaaggaaaacaattagtggtgctatgaacagctctattgtnagcaaattcaacatggggtaaacaag

SEQ ID NO: 15012 - DNA, 329 bp, Glycine max
tatgcgcacacttctttactaacgttcacttgcacaagacattcttataactaagaaaaatgcacccatatacaatcaaggcaccttcgttacctagattattcacatgtacttccaaggtgtatttgttacctacatcacacacatttcctttgctaaattcacatacatgcatactctaagcactttggctatcaaaaattgcatacgtgcacatcttggtatttctcatacctatacatacacaaacttcatgatgaatcttgactatctacacaataaggtgctacatttcatgcttttttcaagtgtttttactacctaaagcc

SEQ ID NO: 15013 - DNA, 331 bp, Glycine max
atcttgatcaaaacaattatctaatcattccaatccactcaaatcatacaattgttcattcaaatcattctcaaacactcatttcatacaaaacaatccattgcatatcattttcaatcatttcattgttcaaacaagctttttggtacaagcaaacaactcaaagtgttgaaatttaaataactggaatttaaagaattgaaatgtaaaaactgaaattaaaatgactgaacataaatcataaaataattgaaaataaaataaactaaaaatgttcaagatgcactaatttatatgtcctgctcttgtggttgttcttgtgcatgctcat

SEQ ID NO: 15014 - DNA, 360 bp, Glycine max
actaaagaacaccgaagctatatggagtgcacacatggtaccaactcattttagttcataaagccgtgtctagtgatgagcagctagaccatacaagtttcctagcggtttatatgggtatcggccattacggctatcctatgctgacaataggcgctaagccgatgaatttctatcagggcggagtaagtgtacgctattgccttggccttggctgacaatctgggaagtacttgactagcgttcacggtaagagtaaaccgatacatccacatggttgcctcttggcgtagagagtgaatcacccttcctctcgcctctttttacgagtatacttgggcatactagtgcgcgacccta

SEQ ID NO: 15015 - DNA, 393 bp, Glycine max
agcttgtaactcttggaaatttctttattactagtcacttataaagttatgacttttgaaagaatcttcagaaacaagtcacttgaagaattgtgacttttggaaatgtatttttcgaaatcagtcactggtaatcaattaccattaaggtgtaagcgattacacatcaacagatgtgactcttcattttgaattttgaaaatcttaacgttttaaaacactggtaatcgattacagctttgtaaatcagtttgaaaaacaatgctggctactggtaatcgattactaccttttggtaatcgattaccagagagtaaaactctttggtaaaagaatttgtgaaaacttcatgtgctacttaatgttttgaaaagctttttaatacttatcttg

SEQ ID NO: 15016 - DNA, 389 bp, Glycine max
  unsure (1)..(389): unsure at all n locations
agctnttaaaattactttcgcctctntcttctagtaaaagattaagggcagttagtctttggtaataaagtttggaaggtgttttccaatgtttggcatttactttttcaaatattgaaccttcttttgttatttgttctaagttntgggcattatcatcatgaatgacattgattagtttggaggtgtttctggttctcattttggacgattcttccgaaggttaaggtgtttcagggatgactttaagtaaattatcaatcttactaaataattcacttttgttatcacctatatcctctataagggatttgtgcttcctaagttccctaatntttttgtttgccttttcactaatcttgaatggtttgataaaaggttctctatct

SEQ ID NO: 15017 - DNA, 341 bp, Glycine max
ttagtaaaggtttgtcctagagcttcaagttcatttagaatatcttgtaatcccccaaacatattgtcgcaacgtgcccttcgcgggcgagcgaaggcgaggctcacgggtgcgctttccaaaggaggaaagatgcgcagagtcgccaccaaagtttatttgtggaaaacgtcggaaaaaccgaaggaaaccggtcaaaataaaaattctaagttcgggagttgtatttatgcttgaggaaggtattagcacctcttacgtttgtctcgaaagacaacagcctattttttagaattgtggaaattgtgttaccttaacttttatttctttttattttttga

SEQ ID NO: 15018 - DNA, 332 bp, Glycine max
gagcttgttacaattgtcataggcattgattgaaaaacatgcgttagatgaggaactcgtgttagcatgtcatcaatgtcattgtgtttgagaaacctttcctttgtcattgatgtatggccatcacacaactatcaccttcgttctccctctcatgcgtgttattagagtcgttagagatcacatcgagcgttgtctaaaacttatgatgccttccatatagctttgttgcaacactagcataaatctacgttattggtccctctaacaacacagatctcgaactcaaattaaacatgtgtttatgcttttagagaccaaaccctcatgat

SEQ ID NO: 15019 - DNA, 345 bp, Glycine max
aatataagaaacatcttcttcgaccttggtgattcttgactccatctcattgaagcgcatgtccacttgtaactccaaagtatcaaacctttcaccaaaaaaggtttgtagaccatcgaacctatccaaaatattttgaagaagagaggaatcttctccaccatgtccttcttcatcaacaggtcgagcaccctttttcactcaagagccatcatgctctttttgataaccaaaggatgcaatgacaaccacacctattagaaaggatctcttgattgggacataaggttcaaaatcaagagggatgttaaagtgttgaaggaagcgggtgactaggtgtgggta

SEQ ID NO: 15020 - DNA, 310 bp, Glycine max
ctgttacctatatttttgcccttttaatttttaactcttacaattgttttgccctttcaatttcttgccctttctttaatatttttcttttaattttctccatttttatgcgtgagtaaaattatttgataatggatatataagtatttatttattataaattataaattttagttatataaaataaacattcactaaaatactagtaattgataaatgtacaacttagatttatagaacaacatcacatgatatttgctttaagctcatagtaaatttgtgaaaaagctgaccaataataatgaattca

SEQ ID NO: 15021 - DNA, 353 bp, Glycine max
tgtaataaataaaatgtaggctatgcctaattctacatttctcccatttaacaagtccctgaattcaatatagccatttgaaaacagggaataaaatctaactgaggtaactaatatcaacttaaatataccaagaccaagccagtatacaatcaagtcaaaaccataagcatccactatccacatgcatgcaacaaccagagtcatgattcttgagatatgtcatttggctctaccaaactagagcaatgatttatcggagcaagactagcagagcaatagtacaagtgaccaaaaaggtcaacatcaaaaaatcatttgagaaatgtaaatagtccaatacatgtgaattc

SEQ ID NO: 15022 - DNA, 360 bp, Glycine max
agcttagcgtgcaaccacgattccacttacagagagtgattcaggcttagcgccactacatgcactaagcgcacttccaatgatttaaacacagaacagtgatggcgcttagcgcctccatccccgctaagcccagctagagagctcaacttacagagtgaatctggggcttagcataggagagcgcgcttagcacaactataataaattttcacaaagaggaagtggcgcttagcaaatcatccacactaagcccactacttaaggtgaaacttacagtgaagatattgggcttagcgcagcgatgtgtgcttagttgaaccattcagcttaatcaatcaagggccttgcgcctatgaa

SEQ ID NO: 15023 - DNA, 336 bp, Glycine max
tgctaacttatggaagctcctaatatctttcacactttttggggtgggccattcttggatggccttgattttctcagggtccacttggaccccatttctaccaactacaaaacctaagaaaactatattatctacacaaaaggtacacttctctatatttgcatagagggtgtttttcctaaggactgaaagaacttgtctgagatgtcctaagtgatcatctagcctcctactatacactaaaatatcatcaaaataaacaactacaaatctacctatgaaatcccttaagacatgatgcataagcctcataaaggtgcttggtgcattagtgag

SEQ ID NO: 15024 - DNA, 267 bp, Glycine max
agcttggagaggatgcttcaatggaggttaagaaagagggagagaaagagagaggggggagcacgaaattgaaggaagaaaaagggagagaagtttaactttgagttgtgtctcacaagactctcattcatcaaagttacaacaagtgtcacagatgcttctatttatagactaggtagcttccttaagaagctttcttgagaaaactttcttgagaagcttctttgagataacttccttgggaagctagagcttaactacacacac

SEQ ID NO: 15025 - DNA, 137 bp, Glycine max
ggacactatgaatactcagctttctagcttttcattggtgtatttgatcttcttttggtgctctaaattgtgggaatgtgctccaatctatggggccattttgggttgatttcttgcctgattacggttaattaagg

SEQ ID NO: 15026 - DNA, 261 bp, Glycine max
  unsure (1)..(261): unsure at all n locations
agcntttatagaattctttataaaaaaatacttctgagtttataattgatgatgcacaccacgctgagtaaatattatttataacaagcacatcagtttatcttaaaaaaaaaaatattcaatgtaccgtcgaaaatagaaacaactatcaaaaggctatgttttttaatttggtgggtgtggggaacataacactcatgattgagaattagatagatgaaaacatcattccatcatattaatggtgcaggtttataaaat

SEQ ID NO: 15027 - DNA, 322 bp, Glycine max
gtgggttgtgaaaatgctttaaggcctatttatggattgatagaaaggaacaaaatagtatgaaatgaaaggggatgatacatgggtccattgtttggattgcttaaaataggatgaaatggaatggaacattaaggaatatacattccattccattaaacacccctttttcttccgttcaatttggtgagtataagatggaaccatctattcattttactctattatgaaccatcgcattccacaatccaataccattagatagaaaacgaaccggtactgtgccacgttaacaacctttggtattggaggcatatttgta

SEQ ID NO: 15028 - DNA, 307 bp, Glycine max
agcttgttcatgatataaaaagaggtgattagagtgatgctagctaggaaacctatgtatttactaatgcctcatgattattgtttatcttttattgctagttctttgcctataggtgcgaaagaattattgaaggagtttggggatgtctttcccaaagacacccctcatgggttacctcctttgagagggatagagcaccaaattgatctcatgccgagagtttccataccaaatagaccaacatatagaagtaatccaaaagaaacaaaagagagccaaagacaagtggaaagcttgatggaaa

SEQ ID NO: 15029 - DNA, 245 bp, Glycine max
tcacaaaggtagggttttttcgtggcttgtttctcaccaaaaagatgcaagaagggttaaaattgacaatggttctcgatctgctattgctacttctacttttagtttatattctatctaattttattaaacgcattctaataatgtgttttgttttattgcacaacgtgaaaggaagatggaatcctctatggaaagaggaagattgtgagttgcttattgacccaaataggctattactacaa

SEQ ID NO: 15030 - DNA, 373 bp, Glycine max
  unsure (1)..(373): unsure at all n locations
agcttatcatttaataatttcatgaaataattaacaaaaaccacactggaagatggacttaatagtgtgttaatcaaagataaatcattttgtaagcatttatcacaaagcatactgcatatgtatgttgagtagtccactaaaaagaaaaattagttttgataaagacaagtttcatcattaagtgattgaataagataaactttcaaaacagattttcaaacaagtactcagtatgagaagaatgataaaaaaatgctacgagaatacctaatatacctaataaatagataaacaaattaacaaatgttcatttcactaccctaaatntaattttttaacatctacagcgggaaggagatgacgatgatga

SEQ ID NO: 15031 - DNA, 404 bp, Glycine max
  unsure (1)..(404): unsure at all n locations
ggtatccaaaggcgttgagacttgatgacncntttgacacattgaaaacgncnnngaaaataaaatgtaagccttgccgtattccacacaaatttcatgccttgtttccccgaatgcgacaaaggcattcgataacacggactgaaatcaaactgaggtaactattatcaacttaaatattccatgaccaaacaagtttccattcgagctccaacgatgaggctacactattcacaaaatgctaccaccagagtcatgagtcctgagacatgtcatttgggtttaccaaactctggcaatgattccttggatcttgactacctcctccatattaccagtgaccaagaatgcccacatcaaaatatcattagacaaatgtaaatctgcgcatacatgtgaagttc

SEQ ID NO: 15032 - DNA, 307 bp, Glycine max
  unsure (1)..(307): unsure at all n locations
agctntagatacaagattaataatttattaattnatatatttatattataaaaatataaatataaataatttatccataattaagaaattcacaattgaaaataaaaagtcacggtctaaattaattatacccccaattagactgaatagggaacgataatgaacagtgatagaatgaatagacttctaaatgattggattaatggattccaattatattaaatgctaactgatgtttcttttttgaaacgatatctagttcttgatagaacattatggcggaagttgatccatgtagccgaccccc

SEQ ID NO: 15033 - DNA, 196 bp, Glycine max
cagaaactttctatgattaattttctaatttatatctaacacttggagcacgaccgatgatgcccggagattttttcgtgcacacaaggaagtttttttcacgttgaaaattcgtacaataattcttctgcgtctatacactcactaccacacttcatgctttatacatttgactgacatgaggagggagtttcaa

SEQ ID NO: 15034 - DNA, 362 bp, Glycine max
  unsure (1)..(362): unsure at all n locations
agctttgacgaataaggtgatgcacttataaaacacaacaacaaacaagtataagaattatccttttttttattaggtttttggacttaatggatacaaatacttgtatttgttttttttttgtgtatttcatatgcagggttggatctgctcattgggctttaaaaaaactattacagaatagccttagagacctatgtagtgtttgggaagccatgaacaacatgatcacgttgcaacacactgaaattaagatatcttttgagacaagtacacatatggttggacatgtttttaaagttaccttatacaagagactatntggcatggtatcaaggtatgctttaaatcagattgctatt

SEQ ID NO: 15035 - DNA, 211 bp, Glycine max
tgtgcggaacaaaaatctcattgatcaaaaactctacttgggtccctccatcgttgatgcctatactctgcaacaaacttgacatacttcctatataggaccatcaccttattcgcactgaatcaaagacaactgtagaaactaccatctatactcctcacatccttcacttgagcagactcaacgaccacccattgaatcttgatatcat

SEQ ID NO: 15036 - DNA, 277 bp, Glycine max
  unsure (1)..(277): unsure at all n locations
agctatgagatctaaacnggacttactcatgttcaataaaagaaattaaatgagtgatcatattattcttgaacttatttttaacaattcattttttaaaatgaatataatatagagaaaagggatttgtttgtattacaccgagagcgtagatattaaatttataaaatatacacaacaattaaatagtttatttataattaaacacatggattaacttatacaatattattttacttaattagtaatagtttcaaatttaaatttaaatttttac

SEQ ID NO: 15037 - DNA, 372 bp, Glycine max
tgacatgccggcttagcgggttcatatgaacttagaaataaaaactgaaaatttaaacgctcgctaagctgaagtgcagtggcttagcgagttcatacagaaatgcataaattcaaaaaaaatgatgagcacgcttagcaggataaggccggcatagcgagttcatcagaaatcccaaaaattcatcagatattgatgaactcgcttagcgagcaggctcgcttagcaagtacatcgaaaattccagaaaaattgggggcttgcagcccttattaggcctaaaaaacctaagcaattcacaccaaaacaacctacattatacgcagagtaaaagccctaacaacatgcattctaataactaaccaaacagca

SEQ ID NO: 15038 - DNA, 324 bp, Glycine max
agcttcacaaggagttacatcattgaacatttaatataaaccccaatttgatactctaaggatccctacacatgttcatttaaacccaaattgcaataaactcatccctttatctctaagcgggctcacgggtgcagctggcagggatatcaacgtctctagtggttccctaagatttctgaaatttttcctctgtttgctttgttagggtttccaagtgttagagagaaggagaagaaattggagcctacaattcactgtatatgttcaatgagaatttctccctccatagacattactttacaaatcccaacactacacatg

SEQ ID NO: 15039 - DNA, 251 bp, Glycine max
aacgaccgaagagtccagaagcaaaaacaagggccggtcccacgcacaacaaacagcacaaaccagccaccaaacccgagaaacctgcagcacccaccatacttgccgcggcgaaacacgagaagccccatccgcacaccaaccggggaccacagggctaccaaccaaccaccttgaaccccacgagcaccccgagaccacaagcccgccgcgaacgcacccgcccccccccccggcgccacaccccccgc

SEQ ID NO: 15040 - DNA, 300 bp, Glycine max
cttaagctagaacggccatggtgattgggaagaagataatttcatttgttgtatgtaaactatgtttctaatgttctttccaaaaatgatctttgcttcaataacatgatttgtaagtcttgtgactattaatctagttccattgcagaggcctttagattgatctagattcctcaacaacattattggagttccatttttaatttgattctatgattacgaacccccaatatctctaattctttcacaaacttcacaacaactacctctacccaggtgttatcaattgcatcatacatg

SEQ ID NO: 15041 - DNA, 360 bp, Glycine max
agcttgcttctacaatctccctttttttgattatgacaaccctgaaatcaagaaacacatacacattcttgttcttagtcgatcactcacttaattctagatattctccccctttgtttttgagtttaagctttacttgaaattaagttatttaattatgtgagttcttgatttaatccctattttctctccccctttggcatcaacaaaaagccaaaatgcataacaaatataaaacatgtttaaatgactaatcatacacaagacattgattaaacaatttaaaccaatcatgaagcaagaaacatgaataacccaaattcaaatataaaccacatagtcttataacataaatcatag

SEQ ID NO: 15042 - DNA, 388 bp, Glycine max
tttaagatatgaagcatgattttgaagcactcattgtttcattcttttcttataaagctctttgtttaaattcttgtaaagtttagaaaatctctcaaaacactttgttcatgttgagaggaatgactaagtgctaaattttttatctgtttataaggcaatagaggtcattgtacaatcaaaccaaaaaaatttcatatttgtgttaagaccaacagtggctttgtaggacaaagaatactgattgtaacaagcttggtgtatagcttgagttaaggaaccaaaattgatagtgataaatatttgtaacttgttgaagccaatagaacttggtggttaagacaaactaatataaatcctttgggtcttattttgtttattttctctc

SEQ ID NO: 15043 - DNA, 344 bp, Glycine max
agcttcactggcatttgaaatgttgaaacattatggcctactgaacaattgcttctaactaccatgctttgggatgtcaaacattatgtgaaattgatttaatgtcatgtttcttctcttttttttataaattatacactgtgttggatttggagttggagtaggaccacctagtttagtgctacttcaataaattcaaaaggttatacaacaacaaattatatttaataaactgcaaatttcagcaacaaatttcaccaacagattatatttaattgaaatgggtaattggcagtagcaacaaattacttcctactacaaattcttcagcaaaacaacaatta

SEQ ID NO: 15044 - DNA, 360 bp, Glycine max
tgctcaatgtttctagttgcttggctaagagcttatttttggcttatggtgtgtcttgtgatgtgagctgaagaagactcttctttataggtgtgtaaagctcgatcacaaaggatggcatggccactagctgccatgttttcaatcaactccgtaacttcatcaagtgtcttcaatttgatctttccaccagtggaagcatcaagtaattgctctcaatggggtcgcaagtcatcaatgaatatatttaactgaatcgactcgctaaacccgtgggtaggagtcttcccgagtaaaccatggaagtagtcaagagctttactaagtgatttcactcgggaattgatggaataaagagat

SEQ ID NO: 15045 - DNA, 267 bp, Glycine max
tttttatatcaaaataagcttgatcgatacataagcttatttatgtaacttatttttcataaactacttcaattagtttattttggtaattcacttaaagtaatttatggaaattaataagttagttgttactatttttttcttaaccttactcatattagtttattaaattcaattttaccattttatttaattaaagacactcattttacccttttattcgatttagaaacactcattctttttgctttgtaactaaaaaaaccc

SEQ ID NO: 15046 - DNA, 348 bp, Glycine max
  unsure (1)..(348): unsure at all n locations
agcttatagtcattatttgntgtgaaccataagccanagctgattattcccttgagataagcagtggttggagtctccatgtatcgactgatgagtctagtagcatatagaatgtttggtcttatgcacatcaaatatcataaactagtcaccaaactcttgaaatttgtagcatccaccttttttgcttcgtcgaaatttgataacttcattttgcacaccatccgtgttccaattggcttccaactatccatcttgaatttcttgagcatctctttatcatagttttgntgngaaatgaaaattccatcttccttctgctttacctcaatgccaagatagtatgac

SEQ ID NO: 15047 - DNA, 375 bp, Glycine max
  unsure (1)..(375): unsure at all n locations
tgtagaacggctggacatgatatatgtcagagtgttggtttggccagcggttcaaggataaaggagatatcccacattatttccatgacacacatgcaacaatgatgattaggaaattttatgcaaaaatggtcatgcatgcacccatgtggacactcaagcatcaagtttttatggtcatgtgacactaggactcangattcatttttcctattaaagtcaacccaatgtttccaaaacatgttcttttatcaattcatgcattcatccgagtccattttgggcttttttttttggaaattttttacagcattcacccttaaggtgcatacacattttttcaacaaaaccctttgttttgatcggtgaatcttt

SEQ ID NO: 15048 - DNA, 296 bp, Glycine max
  unsure (1)..(296): unsure at all n locations
agcttgaaattgaacaacggaagttctctagaaacanaaatggncataacttatcacacggacgtgcgattcacgcgcataaaatatcgagacgctcggaatcgaacatcgggagctctcgacaaaagacaacggacaataactatcacacggaaccccgattctagcgcatcacgtatcgagatactctgaagtgaaaaccggaagctctcaagaaactcaaacggccataacctgtcacacggaagacccaatcaggcgcataatatatcaagacgctcgaaattgaacaacga

SEQ ID NO: 15049 - DNA, 69 bp, Glycine max
aaactcaagcttgaaattgaacaacagagctgtcgagaaatttatatggtataacattgacacagaagt

SEQ ID NO: 15050 - DNA, 267 bp, Glycine max
actcacttgattctagagattctccccctttgtttgtgagtttaagctttacttgagattaagatatttaaatatgtgagatctagatgtaatccctatttactctccccctttggcatcaacaaagagccataatgcctataccatataaaacatgacaaagtgactgatcatacacaagacattgattaaaccttttaaaccacacatgaggcaagatacatgaatagcccggaatcaacaataagccacatcgtcttatcacat

SEQ ID NO: 15051 - DNA, 188 bp, Glycine max
tatcgaaagctttgattctagaaaaaccattgaagtttcggaagtccacatgtggataattgccatactggcctaatgcgacatggccccttagtcggccaaattcctgcatctccagtagggcctactctcaatttataagattactcaaaatcttaatacagggcgaggtgaagagcccaatcttt

SEQ ID NO: 15052 - DNA, 333 bp, Glycine max
  unsure (1)..(333): unsure at all n locations
agcttggattgattcagtctaattagggacagnggtttagtaatttaggctacaacatagaacacaaaagcataattgattagagaaacatccttatatgcatcaactggtttgttagaaagacccaacacttctacctactgctgtcaattttacttgcatttttactgtttttatcctagacctagcttaattatgttttaaaccatcaattatcaatgtttctttcaacaatgccttatttctaaatttacccgatcttagagtagtttccctgagttcgatactcagattcatccgttttaatttttaaatactggacgatctagtgca

SEQ ID NO: 15053 - DNA, 343 bp, Glycine max
agcttgcttttatggatttattttgacactcttctttgaaaggcttttgaaaacaactggggccacctttttataaagaaatgagggctctgggccaaacattatgggcccatcttggaagaaatcttacagtctcaatcttttagaatgaatcaatacaacggttagggaagacacatcaaaaggagttaatatcaatcattatttttccacaaatgccacatatgaagcgcacacataacaaagcaacacacctcatcgtcaacataaatcacaaggcgacacaattaaagtgatgtgacttactccatgatgggcatcccgggtagactattgggtcttg

SEQ ID NO: 15054 - DNA, 303 bp, Glycine max
  unsure (1)..(303): unsure at all n locations
gctggaggtggatcaattctcttttagtcttcaacgctctttatgttatctttgtggctccttaggatttaagaaatgtttggatgaatactttattctattgtggcccaaatggagtctcgtgtctcccatattttccgagatactcatgtatgcgctaatcatttggctaactatggtgtanaactactctattatctgggaagataaactctaaatttcatgacgcttcatngggagatacttcgtgttgcaagggtttaaaaatcaaggtcacctttgcttttggatagacaagccttg

SEQ ID NO: 15055 - DNA, 361 bp, Glycine max
agcttgatagatttctagggtcttctgagtgtgatcaccaaatggcctgcaaccatgcaatgcaccttggacagaaatttctcagatcattgtccaaatatccttaggtcgaaagttattgattggggacccaaaccttttagggttctggattcttggcttctagacagttcctttataagagttgtgcatgattgttggtcatccacccaacaaagtggatgggcaggcgaattaaagatacacattacattagagaatgagagagagtgagagagagagagagagactaacagagagcgagagtggaccaccgtcaagaatagaaagagagggaaatcgcgagcagaactaaatgtga

SEQ ID NO: 15056 - DNA, 218 bp, Glycine max
  unsure (1)..(218): unsure at all n locations
tttttcaccnnctactattcctatctggttttttagcgatcgtccgctaatcgcggcactcatgggcttagtgtccggaacactctggattaaaatgagttatacaagttctcttggccaaccccttcctctcactaacccaatccccctctctcatccactatcccatagaagaacaccccnngcccaaatccaccaagggcttcttatccccccct

SEQ ID NO: 15057 - DNA, 355 bp, Glycine max
agcttctctctcgaaaaccctctcccccaatttttcttccagccatatctcactcaattcttgtccaaatcactccccacaaagcccaaacttcatttttttcaatctctttcatttgaaccgattgaagaatgatttgaagaaattttggtatactgcatttcacattgttctccgggtgtatatttgactgcggtgattatgacacattcatctctttcatcttgtgtacctgaagaccaatgcaaaatgctgccaaaatttcatcaaatcacccaaaagacattttacctgtacgtttgattcaactataaaaaatgtcttcctgaatgggataaggccacacctttaatgc

SEQ ID NO: 15058 - DNA, 292 bp, Glycine max
gttctcaatgctctgttcaagctctcccatttcctagaggtttatctaggatctctatcagatactatgctagatggcacaccatgtaacctgacaacctcacttatatacaaggtagtcaacttttccaaggaaaatctgatactaatgggaatgaagtgagcagacttagtcaatctatcgacaataacccatatagaatctaaacctctacgggtcctacgtagtcctaccacaaaatccatggaaatactgtcccacttccactggggtatctctaagggttgtaact

SEQ ID NO: 15059 - DNA, 326 bp, Glycine max
ctaaggaggaaacattgtgctgggtctcatctgattcaagctcactaacagtctgcataaacacgctatgatcatatcaaggtgatccttcgcatggcggcgcgtgactcaacagacttgtagctcacaaccctttggagataaccgctgccgacacctcagacaatgatacttgactgctctcaagatcaatgactgtctccacagatcaatacaagacttttcaacatgttttagccttactcacacgctttctaggaaactttccggatgatcacccatcccataattgcttcaagtcaagtacctttaaccataaaattctt

SEQ ID NO: 15060 - DNA, 376 bp, Glycine max
  unsure (1)..(376): unsure at all n locations
gaagcctcttaatgaagcttctagttaaagctacatgaagctgcctctgtaaaaatgctaccaagccttcgttaaacattggatcctcccaaaatttggtctgcaacttcacaagacatttttccatgatctgaccgntgggatctttgagaagatatctagaaggtgctcgaagcttccgttcccgagagcatttcttatttaagcacttcaacctttgctttcgtatagcttaggaaaaacgtcatttcttcttctttctttcttccaaagccatttctaaagttctaagcactttcttcatcacccacagccaccattagccaccacaaaccatcgttgttctccattgaaaatccacaacgagaggaacccg

SEQ ID NO: 15061 - DNA, 356 bp, Glycine max
aggcatgcaaacttctagagactctgacattgccttcacaccgcctgcagaaacatgctgtgtgctggccacaggtcccttacatccctgcgcaactgagctcactattgctaccccagagagctcacccaaacctgttccggccatactctttcgtgcgagccatcttggtctctcgatcaagggctcttgcggtaattgcattctcttcccgtaacccggcacactccttccgaacgtgcgtagcagccaacttgaacttctccttggcgagttttgcctttcctaactcgctttcgagagcttggacttcctcgtcctcttccggagcttcaaaattctcttcgctgacgact

SEQ ID NO: 15062 - DNA, 372 bp, Glycine max
  unsure (1)..(372): unsure at all n locations
tcggaagaaagtgatgaggtttatagccctaattgctgagcttgaaagagcctgggtagtcgaagagaagttcaagtccatagccatcaaagtctgaaaagagtatgatgaactaagggatgtcaatatggccaccgatgaanccttggaatgagaaaccaagaacgcccgaaaggaagaacacggccaaagcaaanttttgaggggctttatanggcancaatagtgagctcaagctccgaagaggtgaaaggaatcatcacgggtcaaaggcatgatcttgaaggacgagctaaaggtctgccttatgtcgaaaagaaatttgtccaacagttaagcgagactgaagggaatatgtgggccatcatcgat

SEQ ID NO: 15063 - DNA, 344 bp, Glycine max
  unsure (1)..(344): unsure at all n locations
agctttnggctatatgggctattataggttaccacaggggagggatctaatgcagccccgcaagcagaaattgagtttgatggacaccatttccgaagcaacgagcatcagtgccgtttcaaagcgattaaggattagtctttcctcaaagaatgacgggtccagctagcagaaggagagtacacagaattccaagcggaggtttctataaggcgttagacccacctgatagagcccatggctaagtatcaccctgaaatagccatggagttctacgtaaatgcctgaccaattgaagaagaggtttggatacgcattcctaagagcgggggcattggaaccca

SEQ ID NO: 15064 - DNA, 330 bp, Glycine max
  unsure (1)..(330): unsure at all n locations
ttccagttatggaaagctaaatcctctgnngtatcttccttgtatgtacttgatgtaaatatcttttttatctatttaatgatgttttgtgtgttcactgtgctatcagaacttcattctaccatgcattgccttgatcatgtagatgcatgtgtttttaggatcattcaacagtggaaactggtctgattcttaaaacttgatangatanggctagtttgtcatattttcacaaggaatcngggtacggtaacctaattgntgtatgtttgtcttaatgcggtcctggctaagtttaaaccaacaagaggaatctgtggatgatgcttg

SEQ ID NO: 15065 - DNA, 350 bp, Glycine max
  unsure (1)..(350): unsure at all n locations
agctttgcggantttgtcttcttcangaaaggancgatgngggtccgaaaagaggcaaatttgatcatcctactaggacgactgagaaagctggggcaaatgaagagggtgagagaaagagggagaaacccatgctgtgactgccattcctatacgaccaagtttcccaccaacccaacaatgtcattactcagccaataaaaaacctcctccttacccaccaaccagttatccataaaggccatccctaagtcaaccacaaagtctgtctaccgcacttccaatgacgagcaccacctttagcaaaaccaaaaacaccaacaaaaaatgaaatttgcagcgagaaagcc

SEQ ID NO: 15066 - DNA, 286 bp, Glycine max
  unsure (1)..(286): unsure at all n locations
tgcttcctnnngnntttcgacttgtctcgggttttcacatatngngcggcaaatgatgccaagtatctcaaagcggcccaccaaaggttgcatgtcatcaagtaataatcccaggacgaaattagggtatgacagntacccctctttacttaccttttatcggagataagaggaaagcaaagataagacactgatttcgtccgtcttgccctttccgtgattagtccgtgacaactctcgtctctactccttcttttttctgcccacacataacaaaatacaaaca

SEQ ID NO: 15067 - DNA, 351 bp, Glycine max
  unsure (1)..(351): unsure at all n locations
agcttacgttggagttctaagttttttacctgnnagccatgtacaagcaagagttataaacttgtcaacttagaatttcaatccaaaggcctaagaattctctcagtaaaaagaccacagattaagtgtcattaccatgaaagtgatggtgactatttctaagtgacttggttgcccaaatcatctcgaaattgcctaagtaaagaaatcatatagtttccccctttgaagctatgcagttaggtaattnttttcctgagactcactaaactaccacaaaagaatctagtgccacagagtccttcctcgcatccttagttttggtggtaaaccatgggcattgatacatct

SEQ ID NO: 15068 - DNA, 293 bp, Glycine max
tgctctggacagataacaaatggttatttgaaagtctccgcattaaaattacttgccaacattatgcaatccctacaaaggttaattgaattctttgcgatctgtcatttggatatgctatctttggaatcagtttacatacacatcacctttgctactaatgtttgatctaaccacaacttaaccatatcataacttctgatatcaactattattcctcattatgggtttgcatatggaatatacgttgtgtaatgactggctattggaagtcttcaatgatatagtgacta

SEQ ID NO: 15069 - DNA, 108 bp, Glycine max
  unsure (1)..(108): unsure at all n locations
agcttggaggngcattatagcttctgnttctggaggcagaaacaccatattggcgacaattaacttgaggacctgtcttcatgatatttaaactcaatgtgctaacct

SEQ ID NO: 15070 - DNA, 313 bp, Glycine max
cccacattttttcaccatttctatcaatgttaagaaaatgtcatcggcagaaatgcccttcataaaaaaaaggggcctatgctttacttgtgatgacaagttttcccctagccatcgttgtcctaataagcaatattttgttccacagtgggaagaagaggatgatgctggcttacaaccagatccaccagacgaggttgagacagctggcgaccctcagttgcaagatcatcatttgtctcataatgctttaaaaggctcatcaagctttggaacaatgaagtttcaacgatcaattaatggattgggagtg

SEQ ID NO: 15071 - DNA, 327 bp, Glycine max
  unsure (1)..(327): unsure at all n locations
tatgttggagttgttgggtgcttcagttattggagactttataccttggctggatttgttgggaagagttaatgggatgtatggtagagcagagagagcggctaaacagattgatgaattctttgatgaagttgttggtacgtacgcaagattatatatatatatatatatatatatatatatatatatatatacacacacacattttgatgagtcagttactttcatcttattgtcgataaaaaatgatgtggaaaaaaactaaaagaaactgatattttatacatcagggacaaaattaaaggttntgaagagttaaggagattg

SEQ ID NO: 15072 - DNA, 348 bp, Glycine max
  unsure (1)..(348): unsure at all n locations
tgccatgtttacgggtaaaaattaaaagagtgtggatctgaaataccttgtgatttgtgattggaggacccaaatgttattgaaccactggcggggaggcctgatgagtttctttggaaacaccatcttcttcttggagtccctcaaacgcacattgaacattctatttcctaaatctttgatgacgtggccttcgcatcanccgccgttgaagaacagcaccaccttctcgccggactcaaatttccgatggcgggtctcgggtggcagcagtggtcggagctggtgaagacttacgaattctcttacattgtgatgattatggtactcgacctgcaagaatctgtc

SEQ ID NO: 15073 - DNA, 344 bp, Glycine max
agcttctttgtagccatttcctttaaggacacgttcataaagttagtttgcatgaaatgccaaccatcatttcatttatcgtaaacacaacaaaagccaaacaaatttgaacggtgcatatttattttcaccaaatgcaagtgtcaccgtgcaattagaaaataatcatacatcggtgcatatgttattttatgatatatatttttttgaaaagcattttagctacctagatgcaaggtgcctatcatactgtagcaagatcaaatattagtctaaatccaaacaatcactctcccacatttatgtaactcatacattttgcatcccagacaaagtttagattt

SEQ ID NO: 15074 - DNA, 341 bp, Glycine max
  unsure (1)..(341): unsure at all n locations
gcttcagctgctcgatgctccatgttgctgcatttgtaggcaagtctgttggtggcagcatagagcacaaaccacaaacccttggacggtacagattctgattcaaggccagctgggttaccaagttgaccaacgcatccatttgcttcaagcttcttagtttcagatgagcaaatgggtttgtgctacctcatgcactcctctaatgactatggcatcatttctggcactaaactgctgggagttggaggccatcttctaattaattctagcttcagcaggagtcatgtctccanggctcaccactgtgtatctatatttttcctccatattctgagttt

SEQ ID NO: 15075 - DNA, 345 bp, Glycine max
  unsure (1)..(345): unsure at all n locations
agcttgcattttaaagcataatttccccactctatangctgataatctaaccaacattccctcactaccttctgaaattgcttgttcattagccatccatcataaaccttaaaaggtttagggccccaatcactgcatttagaatgcatgataatacgacagtgatcagaataattcctctcaaggttaaattgggagctatcaggccatttggacaaccatccatcagagacacacactctgtccagtttgcttttgcaggaaccattacgcctaacccaagtaaagggtttacccacacaaggaatatcatcaacctccattgcagcaagccaatcattgaaa

SEQ ID NO: 15076 - DNA, 276 bp, Glycine max
  unsure (1)..(276): unsure at all n locations
ataaatttaatataggaaaaaatccttttacaactcaacactcaaatataatacaattgcttaggtgatttttattatatttctattatataataattataattcaaaatacaatcatttcttaaacaaacacaacttaaaaatgaccgacntccctattanncnctcctccccanctcccgctccctnccccnnncnactcatcctnnntttctctccctcttctctactttctgcatcctactcgatttttaatactcttcatttcctctttgc

SEQ ID NO: 15077 - DNA, 321 bp, Glycine max
agctttgaacaaattcaaatgattataactttttattcgcaggtccgattgagtcccgtaatatatcgagacgctcggaatggaataccgaagctctgagcaaattcaaacgacaataactttggactcggatgtctgattgagtcccgtaatatatcgagacgctcgaaatggaataccgaagctctcagcagattcaaacgacaataactttttactgggatgtttgatcgagcgtcgtaatatatcgagacgctccaaattgaataccgaagcttttagcaaattcaaacgacaacaactttttattcggatgtctga

SEQ ID NO: 15078 - DNA, 290 bp, Glycine max
  unsure (1)..(290): unsure at all n locations
ctcctgttctagctntacccgattttactcaaccttttgaagctgaatgcgacgctagtggagttggcattggggctgttttgatacaaaacaaaaggcctatagcttatttctcggagaaattgggaggagccagattgaactatcgcacctatgacaaagagttctatgccattgtgagagctcttgatcattggaatcattatttgcgttctaatcactttatatcgcattcatatcatgagtcattgaaatatatcaatgggcctcacaagttgagtccaaggcct

SEQ ID NO: 15079 - DNA, 351 bp, Glycine max
  unsure (1)..(351): unsure at all n locations
agcttttcgattcattctatgattccgnagtggtccacattgngtttcgggcatttttattctcgttttgtttactttttataccccctgttgacgtgcttaagccattttacttaagtcatttctcgcttaacttaaaaataaaataaatttccaccgaacgtttgaattatattatccgttaacttcggttaaaataaattccgaccgttcggtcgtgccgtaaccacgttggaaatcaaaaagaggtagaaaataatataataatcaaaaagacatcttttagtaaaataaagcggaaaatcaatcggacgttttctctttgggatttctcatttttaatcgaattga

SEQ ID NO: 15080 - DNA, 205 bp, Glycine max
  unsure (1)..(205): unsure at all n locations
agctnacagtgaaaactgggacctttccatggcttttgtccccacagaggccgctgcctggctcgctccaggattatgaccagccgtttatgtgcttcacctctggggaccttctactatcacccatggttcaagaatttgaacaaatcctacgatgccctctatggggaaggaaaccataccttcctctatgatctcatccctc

SEQ ID NO: 15081 - DNA, 268 bp, Glycine max
caaaacgcactagagcgtgttcttggatatctaaatcaaatcccatcatacggacatcgagaagttctgatcttataattcgctctcagtacatgtgatcctggtgatctcatggaaaccatccagaaatgcaaaaagagtaaaataaggtgctcagtcattggtcttgcagctgaaatgtttgtgtgcaaacatctctgcgaggaaactggagggacttattctgttgcactacatgaggttagcttgttgattttgatgatcccct

SEQ ID NO: 15082 - DNA, 320 bp, Glycine max
  unsure (1)..(320): unsure at all n locations
tgggatgattctcattctcatcttagtagtaggcgtttgcatngnatggactcatcgttggcattatactntcttcacgtgctggccaatccagagctgattagtataaaatttcctgtttgctgcgcacagaaccatgaattggatggtgaatgtcgccggggactaagtcatgtcaagagtgtaactttgtgatgctctgcatccgtcttatgataaaattgaggttatctctgaaataaagtgcctcaaacgacttattttccattcattggatctaatttgagtcccaactacattagagatctctgtaataaaac

SEQ ID NO: 15083 - DNA, 355 bp, Glycine max
  unsure (1)..(355): unsure at all n locations
agcttataagaactttattgccttattcattnccaaatatgcatgtgaattaggacgcatcaacaagaatcaagccaaggctattgtgcaagcaatcaatggggcaaaacacaccaaatgattataatgatggatggctcaaattctcacaaaggtaaaatcatcactttcaaattgagctttcaaaactatcatgacatgtagagaagaatcaaggatttcaagtcacaaaatgtcaagaacttttattttcaaaacaattacccatttcttgaacatatcctataattcaaagaaaaacatgcaaagtcgtacgtgcacatgaaattgacccagaatattaaactgaaaatcc

SEQ ID NO: 15084 - DNA, 371 bp, Glycine max
  unsure (1)..(371): unsure at all n locations
taaagagttatgtctcgtatttgtttaattgatatatgtagtactttaatcaattacattgttgtttgagacaatgactgttttttcaggagtctctagtttaatcgattaccagatggattaatcgattacttctctcttgtttaacttgttcactggctaacaagaaactctttaatcgattacttaggtcatctaatccattacattnccnncnannnntttttcccaatnttggatgaacactttaattgattacttagataatataatcaaataattcattaaataatcgattaccttatagatttaatccttacaggcgggtataaccattctctttataaataaccaacttgtgttcacatcta

SEQ ID NO: 15085 - DNA, 280 bp, Glycine max
agcttcttatacatttctcatctcggttttgaagctccttcttccatggctcattccctactggatggcgccttctctcatcgcttctcctttgtcttccgctgcatgtccatggcggaaaatcaccatttaaagacctcattgaatctcaaagatccaacctccatttaatccccacgagcaagcttgcgccacttatccacttcaatggctcaatgatagataaccaaaagtgaagggaccttttttcattgggacatataaggatgaaccttattgt

SEQ ID NO: 15086 - DNA, 321 bp, Glycine max
  unsure (1)..(321): unsure at all n locations
agcttgangagntcttctatcttttgagcacaacattcttccattgagtggccacgattgcggtgataccaacaacatttagagaagttggcttttggcgaggtgttggctcttttgggcatggtcaaaatgttgacaactatggtctgatccatgatataggatctactggcagtaaaaagagtgtattgggtaaataatgactcctacggtggccaatccctccttccttcatcacgggccttgctggagctgggtttgtcatcatctctcttggccgacacgacatcgacccatgtctggtttccatattcggccaat

SEQ ID NO: 15087 - DNA, 293 bp, Glycine max
  unsure (1)..(293): unsure at all n locations
tgccctaagnagggcaaatatccccatctttgtcaagatatgtcgccctcatggggggtcatgatacttccttcgactcaccattgattgctcatgatattgacatatcaattgatattatctgaattctcatctcttaaagacttctcttcattgaaagtcagaaatataatgaatatgctttcccaatccattagtatatccaagattcataatccaaataatcatgttcggcaagatttatagaatcatgtttgatatgactcattcaaaacatcattataaacttagac

SEQ ID NO: 15088 - DNA, 345 bp, Glycine max
  unsure (1)..(345): unsure at all n locations
agcttttaagggaatttttgtttttgttatcgantacaatgcctggtaatcgattaccagtggaaaaatgtcttttttagaaatgttaaaaactttttgtaataaatttaaaaattatgtttttaggctaaaacttttcaatctttaaaagattctaacaaaaatagactaaggcttatcttctctcttgatctttgctttcttgatcttgatttggaattgaagtaaacttgtgttgcttctgtcttggcatcattaaaatgttcatacacttatatactcacagagtttttgtaaggtttaattgaagtgtttgaatgcaatactttttggcttattggaatg

SEQ ID NO: 15089 - DNA, 269 bp, Glycine max
  unsure (1)..(269): unsure at all n locations
atagtcaaattattctcatttctatatttttaatgaccactgattatgataaaatgtaaagaacgtaccttatatatgcctcctcttgttttactctttcttgcctgaacattctttntctctgctttaattctaaatttatattcgtcaaaatctcaattgacaacaatatatataccattttaaagcaccttttattaacatatcttccatccatatgaaattctatatctttaaaatatanctcgacaaaaaataagaaaataaaa

SEQ ID NO: 15090 - DNA, 340 bp, Glycine max
  unsure (1)..(340): unsure at all n locations
agcttgtagaanggttagacattantcatgtcagggtttggtttggttcaaggataaaagggatgccccacattatttccatgacacaaatgcaaaaatgatgatttggaaactttatgcaaaactggtcatgcatgcgcctatgcggacgctcaagtgtcaaatttttatggtcaggtgatgctagggttcaagattcatttcctctattttaaatcaacccaatgtttccaaaatatgttcttttatcaatttgtgcattcctccaagtccatttcgggcgtccggngaaatttttacagcattcacccttcaggtgtagacacggttttttcttaaa

SEQ ID NO: 15091 - DNA, 345 bp, Glycine max
agcttggttttgggcaatagctttccacctgacgtccccaaggtctcctgacccccgcgacatatctccaggtaccactctgtggtcaacaataaaagcaggaagtttcacccttcaacacttcctcatctcaagcttgtaggattatggggtacccatcacatgtggtactaggtggcggtcgggcgatggtgcacaacaagttttccacatccacaatgcgcgcataaacccaccatcccctgttgcccacctccatctgagctcacgtactcccacgtagctcatatcctcgtttctctcaacaccgggtccccatcaatcctcccaagcttccacaacatc

SEQ ID NO: 15092 - DNA, 363 bp, Glycine max
  unsure (1)..(363): unsure at all n locations
tgaaggacatgcacaaagtgtgactatatgatgtggcaatggggtgtagcaagcaaatgctcaccttccccttaggctggaccaaactttaattgggttgggcttctcccaattcaattaaatttatctcccaacacacatcaaatagggcacttaatgcatgtgaaattacaaaactacccctaatccanaaactantctaggggccctataatacaagagctaaaaaatcctacattactagggtaccctccctacactatggagccctaaatacaagtcccaaaaataatgaaatcctaatctaatatgtaccaagataagtggtctcatacttagcccatggacccaatcttcttggag

SEQ ID NO: 15093 - DNA, 340 bp, Glycine max
  unsure (1)..(340): unsure at all n locations
ncaagcttggtttttgnttctcaattagnnatgcaagtctaaccaagttttttttttattaaagactaaatgaaggaaatgcatcattgcaagttgcttactccatcaatctcttctcatgcctactcaattcagacttctacctcctttcgtcttggcatcaaagactcggtcatcccattcacctctcgtgtccttcatcgtgcgcctcaagtccaacaaaatttctattcttgtctcatctggagtcttgtaattaataagagtcataaattaccattcaatgaatcttctttgacccgcaccaatcctttagatattatatatatagtctgatgtt

SEQ ID NO: 15094 - DNA, 76 bp, Glycine max
tcctaacaaaaactgcctaacccaaacccccttgaattcctttagggaggggctaccaaatattcctaactaacca

SEQ ID NO: 15095 - DNA, 257 bp, Glycine max
catatctctacggacccccttgtggactacaatcacagctggaatgttcacccttcaacagttgcttatttcaagcttgtaagatttatggggtacccatcatatgtggaactatggggcggtcgggcgaatctgcacaacaagtttttcacttacaaaatgtgccgcttaaacccaccatcccctgttgcccaccttcatttgagctaccgtactccacggggattatatccttgtttttctcaaaccgggatctc

SEQ ID NO: 15096 - DNA, 357 bp, Glycine max
  unsure (1)..(357): unsure at all n locations
agcttttggagttttccccaattttcatgttatacatagactnatttccatccttaatcaccatccagttggcattggtgactcccgagaagatttaccagtctcccttcccaaagtggtacaaccccaacacggtattcgatcgagcagtgcgtggcccttaagcccaaagtgcaaagcttgattgacgcgggatggctaactttccaagaagataacctaaatgtaaagatgaacccactcgccaatcatggagaattgatgtgccattattttctcctatttcttaaaccattttgtcaccaatttaattattgattaactctaattgtcaaatttattattcagttttatcaa

SEQ ID NO: 15097 - DNA, 123 bp, Glycine max
gcactgaattgttggaagtcatcttctcaatcaaatccctagtcgcagcaggggtcatatcaccaacagctccaccactggcagcatcaaacatactcctctccatgtttctcactcccccat

SEQ ID NO: 15098 - DNA, 351 bp, Glycine max
  unsure (1)..(351): unsure at all n locations
agctttataagtgcgggtctggtatacattgtttttgnncgcgatatgcgaagatgatgttccaagtactttggatttggtacaaccatgctctcctgatttccagctgggaaattggcgagtggaggaacgccccggcatttacgcaacaagcataatgtaaacctttacggttttaaaaagctctatagctgggcctaggctttagagttttcattttgtcaaggctttgtgtcttttgtttttgaatttataatacaaggatctttcttcatctgttcctggtctctacccattcttattcatttgcatgtttactttcttttctaaaacggcagattcgatgacgag

SEQ ID NO: 15099 - DNA, 319 bp, Glycine max
  unsure (1)..(319): unsure at all n locations
accactcccagggtgctggaatttcttcacattgtctcgatgggtgcctatgcatgttgaaagccttggaggaaagaggtatgcctatgttgttgtggatgatttctccagatttacctgcgtcaactttatcagagagaaatcacacacctttgaagtattcaaagagttgagtctaatacttcaaacacaaaaacactgtntcatcnnnanaattnnnantcaccattgccnanactttnaaaatagccagtttactgaattctgcgcgtctgaaggcatcacctatgagttctctgcagcccttacaccacaacaa

SEQ ID NO: 15100 - DNA, 353 bp, Glycine max
agcttgcttctcttgaatatcttattcattttgggaaaaaatggacaaattaggtttaattagtagggcactaactgaaattaaattgaatttgaatttgggaatgtaagcaacattatgcaagactaagatgttggtaaagcaaactgaaccaatggcaataatgggtataatgtcactattaggcagagttacatttttatcaaaaacaagctggtaggatctaaaatgatgaagagagcaagtaatatgaatgcttgcaccaaaatctaaaagccaacaatcatgaagaaaattggaagtagaaataagcatactacttgaggaatgacaacattggtagcatgactttc

SEQ ID NO: 15101 - DNA, 204 bp, Glycine max
  unsure (1)..(204): unsure at all n locations
agttcacgcaaggaactttctttcttacactttctgnnattttaaaacaagtatccttcatgcctaaagaaaccttgatgagaccctttttcacattactcaaacaatttatagaagtcatggtcctgacaatacaaatcttttatgtgatctaatccaaacatctttntttcaaccatgganaattnaccatatctctcttaa

SEQ ID NO: 15102 - DNA, 237 bp, Glycine max
ggccgcccaaggaactaattccgctgccgagtatgagagaccacgctttatgagcgctgtacaacaacagcgctctgatggcatgaagggaatggccatattcctggagcgacgcgtgctactttgggaccacgtgggtactggattcctagtagagataggaccccggcggtgagcatcattggtgtctgacatgggcaatatggagccccatgcaagacttgctgtttatgacga

SEQ ID NO: 15103 - DNA, 315 bp, Glycine max
  unsure (1)..(315): unsure at all n locations
ttcccctattcgtgttgaacccagtgtctcctattatgctctttaagaaatcaaatgcagatgtcttatatctcattattggttaccagaaattatatctgtatgctttcattcctccttcgtcccattatttctaacaaaaaaatgtgtgtttgatgtgccatcatgttcttctatttcctaaaccctttatgcaccactttaagtattgattggtcttaattgtcaattaattaggcagnattattatttgggctcatttaacctatntgatgtttttgatctaatttcacgaagtaatgaaacattgggctt

SEQ ID NO: 15104 - DNA, 211 bp, Glycine max
tcttcatgacaggtcggatcaaatggacaatagaaatcataatgaacaataattgccgagaagagggaatgatcacgttcctatacaaaccccaattgatggtattaaactccacatttctccatttaaaggaaagaatgatccggacgcctacgttgagtgggatattaaaatagagcatgttttctcatgcaacaactatgaggaggac

SEQ ID NO: 15105 - DNA, 441 bp, Glycine max
  unsure (1)..(441): unsure at all n locations
agccatggcnntttgaagcattgtaggacacttgatgagcaagngactctgtaaaaactcagcnngaattgaacaactgaagcttttgagaaaattgattggncataaacggggcacactagaggtcctattccgggagaataatatatcgcagactcactcaaattgaacaactggaagcttctctacaaattttaattggcacaacattctcactcctatcgttccacccccgggacataatttatccacaccctccaatttancaaccnaanctctcccccccttncattcnccncaccttttcaccccaatgttcnactctcgggcataactatttccaccctcgatatttaacacctgaagctctcatgaaattcgaatggtcataacgttttacaccgatgtccaattccgaacataatatatcagacactcaat

SEQ ID NO: 15106 - DNA, 347 bp, Glycine max
  unsure (1)..(347): unsure at all n locations
agcttggctcagcgtttatgctatacagtgaccaacatgtnagctatcatcgccaagtaccaagaagagttaggtctagccacggcccacgagcatagaatcgcggacgaatatgcccaagtatacgcggaaaaagaggctagaggaagggtgattgactctttacaccaagaggcaaccatgtggatggatcggcttgctcttaccttgaacgggagtcaagaacttccccgattgttagccaaggccaaagcgatggcagacacctactccgccctgaagagatacatgggcttctcggctattgtcagcatatgatagacttaatggcccacataattagaaat

SEQ ID NO: 15107 - DNA, 228 bp, Glycine max
  unsure (1)..(228): unsure at all n locations
catgtctacttgtacctccaaagcgtcaaaccttggaccaacaaaggtatgaagaccacataacctgtccaaaatcctctcaaagaagagatgaatcttcttcatcaatgtccttcttcacccacctttccaccacccttctttacccagagccancaccctctttttgntnacctcncgatgctataactgaatcgcctataaagaaggaccactcgattgaaacat

SEQ ID NO: 15108 - DNA, 347 bp, Glycine max
  unsure (1)..(347): unsure at all n locations
agcttagagacacttttgccaatattagagncaangnggcagaggccattaaagaccccattgtttctccccccagcctcactacaaagtggggttttgttatgatctttgtgatccaagtgccaccctttatatagattttttccttactcctttcaacaccaactaatcattttggtaaatttgttttcaaccacactaaaatgcgcaagcatttcctagctagctggcagctgttctctttcttgtagctgccttaacttatattgtttctaataaaaacctaacaattcatcaactaaaatagaagatatttccaattaattctttattctaaagtgttactt

SEQ ID NO: 15109 - DNA, 337 bp, Glycine max
  unsure (1)..(337): unsure at all n locations
agctttataagcgcttggtncggtagatttaggccaagcgcgcgcgatatgcgaacatgatactccgagtactttggatttggtacgaccatgcccttctgatttccagctgggaaattggcgagtggaggaacgccccggtttttacgcgacaagcataatgtcaacctttacggttttaaaagctctataggtgggcctatgctttacagttgttccttttgttaaggctctgcgtctttttgtttctgaatcaatgatacaaggatctctcttcatctgttcctggtctctacccattctcattcatttagcatgtttacttctttttctgaaa

SEQ ID NO: 15110 - DNA, 300 bp, Glycine max
agcgcgggagagcacgcaaaatattgaacatttcttatgcaacccagccagacggagtgacgagactctaatggagctccacacgaagagacgggagaaacagacatacccactcagacaggccaccacacttgcgatgtggggcacaagtgatggacagaaatcaccgagatagctgtctcacgcggagaccaaggacgcacgcgcagggagaggacccaacccagcgcagagagaaaaagacaacgcgcctgagcggacaacagccgaaagtcccacccaaacaggaaaaggagggga

SEQ ID NO: 15111 - DNA, 313 bp, Glycine max
  unsure (1)..(313): unsure at all n locations
agctttgcataggncatgctnctacctacatcgaacatggttgttactagatctattagtgttgcaacactactctacacttgcattggaggtggtgaagggagttgcaagataacccatttaagtatatttttgtccatacaaataaaataggaggtgcaagattcaaatgtcatggttattcaatgttgggtccattactattgttgttttcaacattttgttgcatggacatggctcacacaagtttgattaaatataatgaaacaaaccactaatatgacctgccaagtgtcacctgcttgttcttgaa

SEQ ID NO: 15112 - DNA, 363 bp, Glycine max
  unsure (1)..(363): unsure at all n locations
tcgacattctctctatgttctctttgatccttttctctctgacttgctcgtaaccttcattttttacccttcttcactttcactcttggagttttcattattatcatcatcatcttcactcttggatttgatgttttgttagggttaaaagagaaatatagaggaaataatacaaaagaaataatgtgaaaaatgtggattgttggatgaataaaaataggaaaaaattgtnaaaaaaatcattacttgtttgtacaagtagaaaagagagtgaataaataaataaacaacataaaattaattttgtaataattaaatataaatttttactccattgtttttcataacacaattattttttta

SEQ ID NO: 15113 - DNA, 337 bp, Glycine max
agcttgttattcgagtattctttcccgagaacgggggcgttgacgacgccagttgaaatgttgacactgttacctaatgcattcacgtttagtggaagccttgcagggtcttttccagccactgtctgcacagggttgcttaaagaatcaaagtttgagctcgacacaaactcgggcaataagtggaactgcacaagttcgattttctggccttcgtttaaggagttgaggaagccagctttgaggttggaaaaggcaaaatcatctggtgcaaggatggttatgccaccactcttggctgttatgagctgtgagatgatgttgctcatgatttctg

SEQ ID NO: 15114 - DNA, 285 bp, Glycine max
aagatttttgttctaagatccttacaactaacgaattcagtaataacttccttagaaaggactttctctcggaccaaatgacaatcaatttcaacatgcccagctccctcatggaatatcggatcagaacctatatataggactgcctgattatcacaacatagcttcattcggtgagtatttccaaaacttcaactcttgaagttgtcaatccaaatgagaccacctgtgactacaaccataactctatattcacccctctgcactaaaccttgcaacaacatt

SEQ ID NO: 15115 - DNA, 302 bp, Glycine max
  unsure (1)..(302): unsure at all n locations
ataaatgtcatgacaaataattatgaaaatactttaatcccttcaaagaataattgtcgtgtatttatttttatactccgaaaatgttctatgagttttttttcattttcaatactatataaaatgaaaagaattaantctttaaaccaatatcaatttattcactttatttcatctctgatctttttcattacacatatacaattggaaaaaaaatcttnnnngggcccctntcccccccgccccncccatcatcctccactggttgtaatgcttgtgcttgttcatagcctaataatctt

SEQ ID NO: 15116 - DNA, 254 bp, Glycine max
agcttttccaccaacacttgtctgaaattcccatcatcaggaatccaagttctccacatggaatcattaaagggggtaactttaacacccccaacagtgaccctgtgaacaacttcaagagcctgttggttcaaaccctcaaatttctctaatttcgacgaactcaaatactgtgctgtgtcagggacaaggtccttgggcgcggaaataacctcaatggcgttgacgaacgccaatttggagcctttgttggg

SEQ ID NO: 15117 - DNA, 374 bp, Glycine max
tagctctgaagactcaagaaatattaaaactccatttgaatctatgcaagaacccactggtgctcaagtcataaagtcaagtctgagacttagtggaaactgtactgaactattgaaagatggatatattattgctctgtatgcaagagactgttctgcacttcatgtctcaaggcaaagggttaaaggtggaggttggatcatggattccatgtcaaatgtgtcaaaaagagaccctgctgcacagttcctcatcatcttcagaagcaaggttcgtctcaaaggaactttgcattatccaaggcacttaatattattatatgccagcatgtgcttcaaaatagtagtttagaatggtgtaacatgtattttta

SEQ ID NO: 15118 - DNA, 358 bp, Glycine max
agctttatgcttttcaaacggatataatacaatacttctaccagcaacactgaaataagtaaacaacagtgccacggaaagctgacagtattacactaactagttttgaccagaaacaagatatttaaggaaaatgttatgaatatatgatatttgatcaagttgagcatcattctattgttctgcaaagtaattgacagtagatagacccaaatcaaatttcaaatgaaaaacttgaggaactgcaaaataactgacaataacaacaaaaacttgaggaacttcattcacaatatttcttcagcaaaacaatacttataatatcagaagatgctactacaaatttttcctaaaatat

SEQ ID NO: 15119 - DNA, 315 bp, Glycine max
  unsure (1)..(315): unsure at all n locations
aagcttacggtaaaatctgggacttatccatggtttaagtctccacagaggccattgcctgccttgcccagtattatgatcagccattgaggtgcttcacctttggggacttcaagctatcacctatggtagaagaatttgaagagatcctangatnccctctagggggaaggaaaccatacctcttctcagggttctatccctcattacctaaaatttccaagatagtccaaatctcnntntnngaattagaccacaggaagcaagtccaaaatggggtggttggaataccaagaaaatatctggaggcaaaag

SEQ ID NO: 15120 - DNA, 279 bp, Glycine max
agcttttagaatttataataaattaactatgattactgaagaatcaatacatgttttttatgatactaaccctataaggccaagaaaggaaatacttaatgatattacagattctttagaagatatgcatattgatgaaaaaggtcacaaaggcaaagaagatggaaatagtagggactctcaattcaaagaaaatcaaacaaatgtggatcttccaaaggagaggagaacttcaaggaaccatcctcttgataatgacatatttgacatcttaaccgg

SEQ ID NO: 15121 - DNA, 380 bp, Glycine max
  unsure (1)..(380): unsure at all n locations
aatcagattaggcaataaagtatccacattttctcttgtgtcttttgttgtacaattccttttgcaagctttgcctgtagcagttccttgatcaactccaagttgcttaaagacaaaagaattatagtaagttttggtagaaatgcagtagtgacataataagtgcattagtgacacacttcttttaatcttggccatgtatctccaaaagtagatatgggtattctggtcatcaactagtacataataagggcattagtgacacttcttttaatcttcctatcaaaaacgctntttgagctataataagtcatggatcctgctgagaaaatgattgagtcttatggggttgttggttggatagcaaaaacagaacatgc

SEQ ID NO: 15122 - DNA, 359 bp, Glycine max
  unsure (1)..(359): unsure at all n locations
agcttgtaataaaactcagaattttgaacaattttcatgcaaatcaagcatacacattttttttattctattggtgntctagacgtgtattttgacgttcatctttatcaccttttcttgctcatttatttttcgtttttgttcattatttttccattgttttcatttagatgtctattttacccagttaaaatttcagctcaaaacttgaagtattcaagccatagcagagttaagaagacaatgtgcctgaactgacaacaaccaaaatttcaacctagaaatcaagagtagtgtttatgttgcttaaggcttggatagttacaatttgtatttgcttatgctcaattgtctcggat

SEQ ID NO: 15123 - DNA, 398 bp, Glycine max
aagcttccattcaaggcattgttagaaagatctagagttttaagcctttaaaggtttcctatttcatttgggatagctccactaaactagttatgactaagagaaatgtctgtgagttcactgaagccacccatgtggaagcaatgccttccaaggttattttgatgatgccaaagaatcaagagttaagcaaattccaaagattcaagaatgaatttttcaagaatcaagtttcaagaatcaagattcaagaataatcaagatcaagattcaagattcaagatttaagaatcaattaagataagtattaaaaaagtttttcaaaacattgagtagcacatgaagttttcacaaaatcttttaccaaggagttttactctctggtaatcgattactag

SEQ ID NO: 15124 - DNA, 347 bp, Glycine max
agcttggaacaaatattttgaattctttgtccccttagagattttgtaaagatgtttgctagttgatcattagaactaacgaattcagtaataacttccttagaaaggactttctctcggacaaaatgacaatcaatttcaatatgtttagttctctcatggaatattggattagaagctatatataggactgtctgattatcacaacatagtttcatttgttgagtatttccaaacttcaactcttgaagttgtttaatccaaatgagatcacatgtgactacaaccataactctatattcagcctctgcactagaccttgcaacaacattgtgcttcttactctt

SEQ ID NO: 15125 - DNA, 376 bp, Glycine max
  unsure (1)..(376): unsure at all n locations
gctttagatgcctttaaagttttttatgccgaagtttataaacaatgaggagagcaaattaagatcgtgagattcgatagaggtggagagtactatggtagatacacagagaatggacaaacacccagtttatttatgaagtttcttcgaaaacatggaattgttgcccagtacattatgtctggttctcttgatcagaatggtgtggcanaaagaagaaatcaaactttaatggacatggtaaggagtatgaagagtaatagaaaacttcctcaattcttgtggattgaagtactaaagacaattgtgtatatattaaatngagttccaacaaaggttgtctcaaaaacaccttttgagttattcaaaggttgaa

SEQ ID NO: 15126 - DNA, 327 bp, Glycine max
  unsure (1)..(327): unsure at all n locations
agcttgaaatgatttcggaatctgtttattatncaaagggcataacttaataacacggaaagatcggattcaggcgcataatatattgagacgctcgtgattgcacaacggaagctctcgagaaattcaaatggtcataacttttcaaacggcagtccgattaacgtgcataatatatcgagaagattgaaattgaacaacggaagctgttgagaaatttaaatggtcataacttatcacacagaagtccgattcacgcgcataatatattgagactctcgaaattgaacaacggaagctctcgagaaattctaaaggtcataactt

SEQ ID NO: 15127 - DNA, 350 bp, Glycine max
actactcatatttgctgcattagaaaacattctctattctcgcctgccactccaagtaggcctccggatcattctttcctttaaatggaggaatgttgagtttaataccatcaattcggttttgtctaggaacaccatcattccctcttctcctcctttcttcttcattatgacctctattctccatttgatccaacctctcatggagtgcatcatctcgttgtttcattaacctctccaaatgttgcatcaaagcttgcatttggaattgcgaaagccccactccatcattaggattagtacctgacatctcaaacaaacaaatcaaacgtaataagacaattatagtt

SEQ ID NO: 15128 - DNA, 244 bp, Glycine max
agataatttaacggaaaagtgttactgaatgatcatcatattccgatcaagctgagcatcattctattgctctgcaaagcaattgacagcagatagacccaaatcaaatttcaaatgaaaaacttgaggaactgcaaaataactgacaataacaacaaaaacttgaggaacttcattcacaatatttcttcagcaaaacaatacttataatatcagaagatgctactacaaatttttcctaaaa

SEQ ID NO: 15129 - DNA, 337 bp, Glycine max
agcttgcttgcactatgcgctttgatctttgactagttggctaaatagttcagctaagcacacatcactacactaagcctaacatcttcacaggaagtaaacttcaagcagtgggcttagcggagatgatgcgctaagcgccacttcttctctgaaaaaatttattgtagcagcgctaagcacactgtgctgagctaagccccatacccattttggaattgaactttcacgagttgggcttagcggcaggatgcactaagcaccaatcccttattgtttttgaaatgcttggagttgcgcgtagcacatcggttgcgctaagcctgaactactttct

SEQ ID NO: 15130 - DNA, 378 bp, Glycine max
ctagaaccaatgtaagacacatcttcttcaacctttgtgattcttgactctatttcattgaagcgcatatccacttgtaattccaaagtgtcaaacctttcaccaacaaaagtttgaagaccatcaaacctatccataatcttcgaaagaagagatgaatcttctccctcatgtccttcttcaccaacatttctagcacccttcttcacccaagagccatcatgctcctttatataaccaaaggatgctatgactaaagtgcctattaggaatgatcttttgattggaacataaggtttagaatcaagagggatgttgaagtgttgaaggaaaagggtaacaagatgaggatagggcaatggggaattcaatcgcaat

SEQ ID NO: 15131 - DNA, 195 bp, Glycine max
  unsure (1)..(195): unsure at all n locations
aaataatgggaccgcatcgttttgacaagtattctattgagaataaatttagaattaatccttgtgtccatcatatccataantcacggaagttgttgttagaaaatgatgaaaagcagcctttacaaattataaccccatctcatcatagtgagtcaggtacttatttagcactcgacaaacaaaaggttaaac

SEQ ID NO: 15132 - DNA, 269 bp, Glycine max
  unsure (1)..(269): unsure at all n locations
agcttgaaggactcttgctgacttctgatatggnctttataactcaggttagacttcatttattcccattgttgagtgatntaatttggaaatggtggtcgtcttatgtcttgttgctgatttttgtatttttttctctttatgtttcggagtactggacatcttttgcgagctctttttgagattgtcttgaaatatggatgggcacaattggctaataaggctttgaacttatgcaaaatggtgaccaagaggatgtaaagtgtcta

SEQ ID NO: 15133 - DNA, 299 bp, Glycine max
  unsure (1)..(299): unsure at all n locations
ttcatgcactcctctaatgacaatagcatcatctctggcactcaattgctaggaagtggaagccatcttctcaattaaattcttggctttcctaggggtcatgtctccaaaggctccaccactggcagcatccaacatacttctcttcatgttacctgantcccccacaaaaatattgcaaaaaaaactgctcacaaatatggtggtgaaggcaattggcgcttaggtttttaaatctctcccacgattcatataggctctctccattgagttgcctaatgcctgaaatatcctttctg

SEQ ID NO: 15134 - DNA, 347 bp, Glycine max
agcttctatataagctgttccattttatcaataaacacaagttgagttttattcagaaaattagagtttatctcttttatcttagcgagagtgattcaagaacaccctggctgtatcaaaggactttcacaacctttgtgtgttgccctcgccggaaagagtgattctttccttcctttcatcttcaatcttgttctttcaaaccacaattccagaaaatccacttctgcccagaattatctcgtggccataactcccattttacgcactcaaattaagtgattcttgagcctaaattgaatttcaaaatgagacctttcacctcgttttggaatcacctcatttgg

SEQ ID NO: 15135 - DNA, 366 bp, Glycine max
  unsure (1)..(366): unsure at all n locations
aggcatcatatcgccttttcgtattttaatccaatttataagttttcaactttgcattcctgctttccttttccacaatttctaaggaaaaaataaaatgagatttgtcttttggccccacgaagcttcgatcatatgcgtatgcaatgggctattaattacgatttctcgtaacttcttatcggaaatcttantccatgtnnncnttcccngggncnnntcttctaaaatggattgaacttttgaatgtgccagagaattatatgtactaacaaaatgccccatccatgattatacattctttgtcgaacataatcaccttataacttatagttatatacctgcgtataaccattttacattctt

SEQ ID NO: 15136 - DNA, 365 bp, Glycine max
ctgcggcatgcagcttaagaaaagaggcctttcaaatttcttatttccagaagggaattctatcaatagacctccaatctttaatggagagggttaccactactggaaaacccgaatgcaaatttttatcgaggcaatagatctaaatatctgggaagccattgaaatagggccttatatacccaccacagtagaaagagtttcaatagatggtagttcatcaagtgaaagcataaccatagaaaaacctagagatagatggtctgaagaggatagaaaacgagtacaatacaacctaaaagccaaaaacataataacatctgccctaggaatggatgaatatttcagagtttcaaattgtaaga

SEQ ID NO: 15137 - DNA, 401 bp, Glycine max
  unsure (1)..(401): unsure at all n locations
ggtttagaccatcgattgatacactgatttgtggactctgtatgtgaattttatttcgggccaagattgcgagttagagtgaagtggtgaactttccgaattgtctgtgcaaattgtgccagcagggatttctgcacatagtgctagaaaaatgcctaatgtttttgctggtctgtggaaangagtagtgcatnaatgagtctctggatgtttgctantanaatcccaacngncacaatgtaggcttatgcactataaacttccagtaaaattttggagtcnatccaaccgttaacgaattggatcgaaggaattgttactggggtctttgagtgagaaaagctgtgattttggttggtgtgttgagcagagttttctgcccttgccctgttttgcttggc

SEQ ID NO: 15138 - DNA, 356 bp, Glycine max
  unsure (1)..(356): unsure at all n locations
agcttatggngccaaatgcttttcttactgtangtttcacanngatagctagcatagctcattcacggaaaggccggtggaggaaccgtgtaattacttgttaacaccatatcttacagagacacagttggtgtatcttgtcttgttgaattgaaaactgtgctatagacacccttaaaaaaggaattgcttgaaatgagcatgacttttttcttttctgcttctggggtgaaaagtctgtatataatatagactttcatagacaattgatttgcggccacagatagaggatttttggaggcttgactggagagatgattcaatttctgaaggaaatcttcagtctcattttgaga

SEQ ID NO: 15139 - DNA, 387 bp, Glycine max
  unsure (1)..(387): unsure at all n locations
tgccttatgacttcctgcgatccctttgtcgttttcttccggcgagggtgaagcttaaggagaacccaatctcctatctggtagttcacttcgcgatgtttcccatcaacttggcttttcatagcagcttaagccttgagaagcttatttcgaatagcttggaaagggggatccctatcagtcaacatctcttcaatggcctcaatgttcgaagaccctnnnncatattctggaaagttaaagggtttttggcaaaaggcgacttcataaggagtggctccagttcccgtgttccatgaannattgtgggaccattcgacccacgggaggagcttcccccacaagcctggcctgcgatggacgaaagcttgcatatattgctcaatt

SEQ ID NO: 15140 - DNA, 356 bp, Glycine max
  unsure (1)..(356): unsure at all n locations
agcttgaaggaaaannggatgctttggntatttnnggaacccagctggccttgaaccagaaatctgtacctgtcgcaagggtttgtggtttgtgctcctctgctgaccaccatacagacctttgcccttccatgcagcaacctggagcaattgagcaacccgaagcttatgctgcaaacatttacaatagacctcctcaacctcagcagcaaaatcaaccacaacaaaacaattatgacctctccagcaacagatacaaccctggatggaggaatcaccttaatctcagatggtctagccctcagcaacaacaacatcagcctgctccttccttccaaaatgctgctggcccaagc

SEQ ID NO: 15141 - DNA, 379 bp, Glycine max
aaatagatgcattggttaacttgtgttatcccagcttttcttgaatcataaatctgtacctgtcgcaagagtctgtggtttatgctcctctgttgaccaccatacagacctttgcccttccatgcagcaacctggagcaattgagcaagctggagcaattgagcaacctgaagcttatgctgcaaacatttacaatagacctcctcaacctcagcaacaaaatcaaccacaacagaacaattatgacctctccagcaacagatacaaccctggatggaggaatcaccctaacctcagatggtctagccctcaacaacaacaacaaaaacaacctgctccttccttccaaaatgctgctggcccaagcagaccatatatt

SEQ ID NO: 15142 - DNA, 320 bp, Glycine max
  unsure (1)..(320): unsure at all n locations
agcttgcggcacaccagactgttttataactttaatgttnggaaccaagttcattgtgtcaccatatgtaaaaccaaatcgggaatttgttatagctctaacaacttcctgatcatcaccaagtacacgtgtgaggatctcataacgtgggatgaagaattttttcaagctcctgttcaaggtatggttagcaattaaaatcttacgcatatcagtgttggaaagcccaatagaacggaagaacttgagtttaggcaaaagggtattctctgcatccgcaacaagcaccaaagggtgtttctccacaagttttgcaagat

SEQ ID NO: 15143 - DNA, 364 bp, Glycine max
  unsure (1)..(364): unsure at all n locations
cccacattttttcaccattattatcaatgttaagaaaatgacatcggcngaaatgccttnanaacaaaaaggggcctatgctttacttgtgatgacaagatttcccctctccatcagtgtcctaataagcaatatttcgtgccacagggggaagaacaggattaacactccttacagtcaaattcacctgtacatgtggtctcaaatccaacaactgcagaagtgtaattaatgttggtgcaagttatcttaattctggaccccaatggatggccaaaatgaagcatttggaggagcttcaactgggtcgttggctgcaatgttaccaaaacatcatattgaagtggagagtgaagaattcttg

SEQ ID NO: 15144 - DNA, 341 bp, Glycine max
agcttgcagccattataagagttatacatgtgattagtagtatgactgaaaatgttagttagtttgttagattgattgtaaaggaatgcattgattgtatcccggtgagagtatgatccttaaattttgagaaaaacgactatcattaagtactaatttttgcatgaatctttgaagtatggactgaatgcatgaaattgaggatgatgaaggtcatgtttgattgtgatagccttgtagccaaagagctgaccacgtgcttgaatgatttatcctttgcacccagttttgagttgaatgattgattgattgattgaatcctaagccaatacagttttatc

SEQ ID NO: 15145 - DNA, 367 bp, Glycine max
  unsure (1)..(367): unsure at all n locations
tataagaacaaaattgcctcttttcattccaattatgcatgtgaattaggaagcatcaacaagaatcaagccaaggctattgtgcaagcaatcaatggggcaaaacacaccaaatgattatgatgatggatgactcaaattctcacaaaagtaaactcatcactttcaaattgatctttcaaaactatcacnacctnttnangaaaatcaaggatttcaagtcacaaaatgtcaagaacttttattttcaaaacaattacccatttcttgaacatatcctataattcaaagaaaaacatgcaaagtcatacatgcacacaaaattgacccaaaatattaaactaaaaatccaacgaaactaacaaca

SEQ ID NO: 15146 - DNA, 348 bp, Glycine max
agcttggtgccatttgaatgctctattatctagacccatgcttgccatcttaaccttcatgccattaggggtttcatccagctcaaagaatctttcacacttgagtatccaagcaataacatctcccctctgaaattttgggaataccgtctttgtaaattgatggcagccgatactcccttctattagaatcatgtctatctcgaaagtgatctagattgtgtgtacgatgatgcccatttctttgattattttcaagattgatggaagcattatcccttttgcgcattagcccttgaagcagatcagaaatgccctgcacggacccaccatgtctgatagtgcatc

SEQ ID NO: 15147 - DNA, 324 bp, Glycine max
atgaatgaacggagaggaagagaagagcacgaaattttatgctctaaaagagctctgaaatctgaagtttaatattcaaatgatcaaagttcaaaaaatgcacacacatgacctctatttatagcctaagtgtcacagaaaattggaaggaaatttaatttcacttgaatttgaaattgaatttgtggagccaaaatttcactaattatgatcaatgaattttagttatggttcagcccactaatccaagatcaattctaagatttccactaagtgtgcttaggtgtcatgaggcatgtaaagcatgaaggacatgcacaaagt

SEQ ID NO: 15148 - DNA, 222 bp, Glycine max
  unsure (1)..(222): unsure at all n locations
agcttgggagggctttcctccctatttgagacaaaccnagcgagcattggccactggaaaccggataggatcccaagatcaataatatgaacgggttctgcctttgccgctgctttgataatcattgtatttgcaaagaaaagtataaacttcttgaaagggctggaggaagagaaaacctgctatgccttgagataattagcaacagtgacgctcctagag

SEQ ID NO: 15149 - DNA, 240 bp, Glycine max
  unsure (1)..(240): unsure at all n locations
agcttccggagtctttttcgatcttcttgacacgngacgcgcctgaatatgacctcgttgtgaaaagttctgaccatttgaatttctcagagctcctgttgttcacataccagcgcgtctatatgtgaagcacctgaatagcacatccgagtgaaaagttatgaccatttcaatttctcgagaattttcgtcgttcaatatcgagcatctctatatataaagagcctgacctggacctcc

SEQ ID NO: 15150 - DNA, 169 bp, Glycine max
aaacccaagtgggcccgcctgccagatcgggcaaaagaccaacccacccacaacaggcttactcaaccgaaaacaaacccacgcttacccacccccccgttaccccccaaagccacccctcaaacaacccccacacccaccgaccacccctccaatgaccaacaccacc

SEQ ID NO: 15151 - DNA, 377 bp, Glycine max
ggagtagaaacatggtattaactcattttatttcagaaagtcgtatctagtcaagatctgagagaccatacaagtttcctagcggtttctaattatatgggccattaagtctatcatatgctgacaatagccgagaagcccatgaatttcttcgggggcggagtaagtgtccgctattgccttggccttggctaacaatcggggaagttcttgactcccgttcaaggtaagagtaaaccgatccatccacatggttgcctcttggcgtaaagagtcaatcacccttcctctagcctctttttccgtgtatacttgggcatactcagtcgcgaccctatgctcgtgggtcgtggctagacttaactcttcttggtact

SEQ ID NO: 15152 - DNA, 344 bp, Glycine max
agcttcaatctcgctttatttatgtttattgtccaaatttagtgaaatttattggaagtacatttattattagtgaacatttattatgaaaatctgttacacttaatgggtgtactatgaagtagtatgagtaaatgaatagttattagagagataaaaaaaatatattacgaagttatataatattttctatgaaattcaaaaaattaattatattttttaatacttgtggtataaccttaaacattatgtaaactgaaacggagggagtagtatataatggttgtttcttttcttaaagtttcgctcacttttcaggcaggtttgcataattaatcatgtga

SEQ ID NO: 15153 - DNA, 347 bp, Glycine max
ttatcaaagatttgataatctttaagatgatttttactcagacttggattttgctggttgtgttgactctcgcaggttgacatctggatacatcttcataatgactaatggagcaatatcttggagaagtgcaaaacaatcattagttgctacttctatcatggaggctaagtttatttcattatttgaaacaacatcacaaggtatttggttaaaaagtttcataagtggtctaccagtgattgattccattcctagactgttaaagatatattttgataattcagttgctctttttttggctaaaaacaataaaagtggaagttgaatcaagcacattgacatta

SEQ ID NO: 15154 - DNA, 343 bp, Glycine max
agcttctcgatatattatgcacttgaatcggacctccgagtgacaagttatggccatttgaatttttcgagagcttccgctgctcaatttcgagcgtctcgatatattatactcctgaatcggacctccgagtgaaaagttaagaccatttgaatttctcgagagcttccgttgttcaattttgagcgtctcgatatattatgcgcctgagtcggacctccgagtggcaagttatgaacatttgaatttctcgagagcttccgttgctcaatttcgaccgtttcgatatattatactcctgaatcggacctccgagtgaaaagttatgaccatttgaatttct

SEQ ID NO: 15155 - DNA, 364 bp, Glycine max
  unsure (1)..(364): unsure at all n locations
cagannnggncttcgccagngaaaggatctttgtgggtctgaaaaaaggcaaatgtgatcatcctactaggacgactgagaaaactggggcaaataaagagggtgaggatgagggagaaacccatgctgtgactgccattcctgtacggccaagtttcccaccaaacccaacaatgtcattactcagtcaataacaaacctccttcttacccaccacccagttatccacaaaggccatccctaaatcaaccacaaagcctatctatcgcacttccaatgacgaacaccacctttggcacaaaccaaaaaaacaccaacaaaaaggaattttgcagcaaaaagcctgtagggttcaccccaaatt

SEQ ID NO: 15156 - DNA, 355 bp, Glycine max
  unsure (1)..(355): unsure at all n locations
agcttctaaactttatacaagattgaagcctgataccactngntagacaagtggcctcagatatattaagaagggggggttgaattaagatatcccaaactatttccccaattaaaaaattatttcactttcttttcaagttatagattcccttaacaatgaacttcttaaatattaattcaaatcaaacaatttgaatatgaatgtaaagcgataataaacaaaggagattaagggaagagaaagtgcaaactcagatttatactggttcggccacacccttgtgcctacgtccagtccccaagcaacccgcttgagagttccactatcttgtaaattccttttacaagttcta

SEQ ID NO: 15157 - DNA, 342 bp, Glycine max
  unsure (1)..(342): unsure at all n locations
aaaggacttcactnggcagcagatttagaaattctttttgatgctcgacgctatatatgggatgatccacacttgctcaagatagaagctgacaatctcctactaagatgtgtgacacaagaagaggccaagaacatattatggcattgccaaaattctccatgtgatggtcattatggttcaaatangaccgcngncaangntttnccctcttgattcttttnncccacactnttcaaaaatgctcataacatgtgcctctacagaatattaccgaggttgaggtgttctattgctcgggattgattttgtaggtcctcttccttcttcctttggcatgaa

SEQ ID NO: 15158 - DNA, 355 bp, Glycine max
  unsure (1)..(355): unsure at all n locations
agcttttaactgtaacactgtatataactatttagttcannnaaactaacttgctactccaatgaagacttagacatgtatcttggtaaccttgcattctccataactctgcaagtaatgttttattctatctttatttggttcaattttaattattttctgttcggttagtgaacctactaaataaatattagaaattaacgaaaataatttaatttgattgatgaacatgaactattgaacttactaaagttggtttttttcattccgtttggataatttgctaagtttattttaattctttaagcagccttgcaattctcaaattgtcagccaagttaacacgtagactgac

SEQ ID NO: 15159 - DNA, 364 bp, Glycine max
aaggataacctattgctcatagatgagagaaattttgtggtcatcaactactggcttggcttgaatgagtttgctgatttgagccaccgagagttcaataacaagtatctggggctgaaagtggactactctacaaggagagagtcccctgaagaattcacttacaaagcatgtgagttgcctaagtcagtggattggacaaagaaatgcgctgcaaccccattcaacaaccaacgttcatgtggtaagcatatttttatttattacctaataatactgaattaatccaacatgatctcattcttattataacatgtattagctagtattatttcaatattgaacgaaccacacatactacaaa

SEQ ID NO: 15160 - DNA, 360 bp, Glycine max
agcttgcatatattttaaacatgtttataattattctttgacttcccttagaatttgaaggaaaaaaatatatttgtaagtcgtagtttgtggcaactggcaacaacttacgtataaaaaacttaacagtagttatggtttatgaccataagctaaatataaaaaaaactttgtatcccattgtccggaggctcttcgctatgtgaaggtatggggagggatgttgtactcgaacccatgaccaacaagtcaccaagacacaactttaccgctgcaccagggttcaccctccccatgagctaaatataaataaaaaatattatttaaccttaataagtcacagtttaagactatgtgaaa

SEQ ID NO: 15161 - DNA, 276 bp, Glycine max
ctgtgataataccaattttacatgactgtttgtggacaatgggtattacttttgtaattgcaatctgcattttgagtttctttttatggtctttcaattcatattttgaatcatccagcgataaatacagcagagtcacccccaactccatttggtgactatgatattgcgctctaacaactcgtctcaatgtctacggatcagaattttactgctctacatccatatggaggggcaagtcttccacatgttggctggttgcttttacaaatgttg

SEQ ID NO: 15162 - DNA, 347 bp, Glycine max
agcttgtccatgctttataatgtatatgataaatcttatctccaagatgtactaactgttatactactgaatggtagaattttacgcacatgcctaataaatgaacaaccttatgattctgtctgcgcctccaaattcaacaatttattataaagaatatgaagttaattagggaaagatgttggaagagcatatatataatgggctcttttctataccaaatgttgtcctgtatatttacggctatatttattttaacatttacctgagtgcaatgacagtcttcttggccttgtcctgcaaatccacgtttaagtgaagcaactttcaaccatcttcctgaatat

SEQ ID NO: 15163 - DNA, 369 bp, Glycine max
  unsure (1)..(369): unsure at all n locations
tgtaattcaaaagtgctagacttggaaattgttttgatngttagatccgtgcatgactgatgaatgaaattgtgtggctttagcagcaacatcacgttcatacagatgaggacggttctgaaggtggttgataactcgggggagaaaaaagtaacctgcattcaagcattgaaagggaagaaagtgacacaatcatcccctcacttaaggaggcacatgcaaaaggggagggtgtgatggaaatgaggtcaagtttgatgacaagcaaggccaacccattgggactagagtgtttgggccagtgcctcatgaactcangccnaacaaccatgtcaagattcttacttttgccggccatattgcttaatt

SEQ ID NO: 15164 - DNA, 348 bp, Glycine max
  unsure (1)..(348): unsure at all n locations
agcttgaagatctattangaaatgnttttccaggactcagaatgcaattgagttatagccctattataggaaaatccaggtgatgtactctttttcctacttcagtatttttttcccaaatgtaaaaaaaagtaaggattttgactaaagaaattttaacaaggcacacctaagtatcaatgtaaaaggatgatcttgcatgtacatgtcggttaagatctaaattatcaatgaaatgtttttacattgtacattacatctgagcgacaattatttttgattaattacatttttttatcttattatcctacttgattccacatgtatataattctaaacttaatatca

SEQ ID NO: 15165 - DNA, 330 bp, Glycine max
  unsure (1)..(330): unsure at all n locations
ggattggtcctaagttttgtaacaagtttataacaataaactcggccttctgttaattgtctttgggcttggcgatcacgatcaacaaagtactttcggcacctactatatgttgacttgaccaacgctgttattggaatgctgcgacaatctttcaacaccttattcacacattctgataggttggttgtcatgtgaccatatcttcnncccaatnnntcntaatccctgctccatttttcttttgaaatgccatcaatccatcttgctatggctggactcaattgacgaaatctttctaatctttgatcatacacatgcttgcaagga

SEQ ID NO: 15166 - DNA, 348 bp, Glycine max
  unsure (1)..(348): unsure at all n locations
agctttttgataaattgtccagttggaagangnggcaaccaaatatttccagcatgatctcgacgatgctctctaaaaagaaagagagcactttgaagtttcagattttggtaggatcacattgttggaatccagaaactgctgtttgtttcaataatgattttgattatgatcacacaagaaggacaaggtaaatggcaaataaaaacacaaactttagtcccacatccggagcgtatgcttcaatagacttagaagttgtcctatataaaagtacacatcagttagcttgacttatctttgcgcttggggcaatgacgcagctagtgaggttctaactgaggcgcg

SEQ ID NO: 15167 - DNA, 260 bp, Glycine max
  unsure (1)..(260): unsure at all n locations
aagcaccgcagctgcggcttcccccattttgttttttatggggagaaangaagaagatgtgggttcancccctcnggcacttctctctttctagaaattgctcaggaaaagtattttcgtgaagaaaatccaagcccaggcgccttccgtaacggttccatgaataattacgtgaagattctcgaccgtccttcaagattcatcgctcggtcttcgttttcttcagtccttaacgggtgaggactctaaaccaaactttt

SEQ ID NO: 15168 - DNA, 334 bp, Glycine max
agcttccttttagtgcgtcacgtttaaaaccgagctcgatggtggtacgagcctttgatggaactcggcgggaagtgatgggggaaatcgacatccccattcagataggcccccacacttgcaatgtggtgtttcaagtgatggacataaatcccgcctatagctgtctcttggggagaccatggattcatgcgctgggagtggtcccttcaatgctccaccagaaattgaagttcgcagtgggtggacttttggtgatagtatcgggtgaagaggatatgttggtgagctgcccctcctccgcaccatacgtagaagcggcggaagaatcatt

SEQ ID NO: 15169 - DNA, 390 bp, Glycine max
aatactcaagcttctaaactttatacaagaatgaagctctgatttttcttgttagacaagtggcctcagatatcttaaaaagggggggttgaattaagatattccaaactacttccccaatttaaaaatttatttcactttcttttcaagttatagattcccttaacaatgaacttcttaaatattaatttaaataaaacacattgaatatgaatgtaaagcaataataaacaaaggagattaagggaagagaaagtgcaaactcagatttatactggttcggccacacccttgtgcctacgtccaagtcccaagcaacccgcttgagagttccactatcttgtaaattcttttacaagttctaaacacacaaagacaatccttcctttt

SEQ ID NO: 15170 - DNA, 337 bp, Glycine max
agcttcctatgtactagtctgtttatagaattatgtgtaacacttgtcataactttgataaatgagaaacttgtgagacacacttcaaagtttaacttctctccttttcttccttcaattttttatgccactttctctctctctctctctcattctcttcctccattgaaacttcctctctaagcttcatccaaggcaatctcttggtggtgaagcttctccttccatggattattctctagtggatgacgcctcctctcacctcttctcctttatcttccactataactccatggttgaaaatcaccattgaaagacctcattgaagctcaaagat

SEQ ID NO: 15171 - DNA, 295 bp, Glycine max
  unsure (1)..(295): unsure at all n locations
caactattcggttgcgatgaccattagaatcaatggccttacctcattctccaaattaatctgcactgaatccaactgggcaataataactcccaatgcttaccacgatactggtattctgaacccctcccaaataataaccccccgcaaaannctgnntccttccccccttattaaaaccacnacaaaaccattttcccccagggcctaatttgaaaagccagggatttttttcatgctccccatgtttttaatcccttaattgaaaaaaaactacactctttatatttaaaaa

SEQ ID NO: 15172 - DNA, 318 bp, Glycine max
  unsure (1)..(318): unsure at all n locations
agcnntgttttttttttttttgttagngaaaggatcaatgtgtgtatgaaaaaaggcaaatttactcatcctgcttggacgaatgaaaaaactggggcaaatgaagagggtgaggatgaaggagaagcccatgctgtgactgccattcctatacagccaagtttcccaccaacccaacaatgtcattactcagccaataaactaaccttctccttacccaccgcccagttatcgacaaaggccatccctaaatcaaccacaaagtctgtctaccgcactttcaatgacgaacatcacctttagcatgaaccacaacac

SEQ ID NO: 15173 - DNA, 150 bp, Glycine max
  unsure (1)..(150): unsure at all n locations
aaaacaagaagaaaaagaagatttagagccccttaccaaagctttgatggaagaaacctcaagagtacttgtatgaagcttggaaaatgaagaagaatgacttcctctnactcttggtgaactcgtgcaaatgaagaaaaaaacggtccc

SEQ ID NO: 15174 - DNA, 76 bp, Glycine max
ggaaggtgttttccaaggacaggcataaacttagccacacgccgaaccttccttagatatgtatgccactttctgg

SEQ ID NO: 15175 - DNA, 271 bp, Glycine max
  unsure (1)..(271): unsure at all n locations
aaggtttgtcctagagcttcaagtgctgttagaagattttgtaatcccccaaacatattgtcgcaacgtgcccttctcgggctagcgaatgctatgctcacgggtgcgctttccaaaggaggaaagatgcgcagagtcgccaccaacacttatttgttcaaaacctcctaaaaacccaatgaaacccgtctctcttaaaattctaanttccccacccnttttatcctccccgatcgtattcncccctctcacatttgtccccaaaaacaac

SEQ ID NO: 15176 - DNA, 306 bp, Glycine max
  unsure (1)..(306): unsure at all n locations
ccatatgtgggttttttattacacagcgcatattntgaattcaaattttaatagctgttgtaaatcaggtttggccactggtaattgattacatcctctggtaatcgattaccagagagtaaatctcttgaaaaagactttttttaacttaaatttcttggccaaaccttttgctacttcaattggaattcccttcctatataatgtaatcttcctaagactctagagactgtcttgatcatccatcttgaatatctttgatttctttgtcttgaataaaactttgagaaacatgtaatcctttgg

SEQ ID NO: 15177 - DNA, 208 bp, Glycine max
  unsure (1)..(208): unsure at all n locations
aacccaggctagactctagngcatgcagattgcttcaactataaaaangccaaactccctttgtaagggtgatttcacgcttaaatacggggccttgttcatgctcgtgcgcttagagcacgtatggaccgcttagctcatgttaacgattcctggcttaccatccttctctcgctttctgattagctcaaaacactccccttgatac

SEQ ID NO: 15178 - DNA, 356 bp, Glycine max
  unsure (1)..(356): unsure at all n locations
agcttcaacaacaacaacagngtgtaccatctcttctccaaggcgnctccgaattgggatgctaatggttccactggacgctccaacttctgtgccatagctagcatgaatctatccacaggtatgtgcatgtgttgtgtgtatcatgaacataatactagtgctaagtgctttttttcaaacctgctattttgatgatatttacagttctataagtcttcaattttcagggcttcaaatctttggaaagtcttgggaggagtgcatcaatccacgttaatttgcactagagtgtgtgtgtgtgatagcttttcccttctctctctttttattttacttcctttttcagcatcatc

SEQ ID NO: 15179 - DNA, 170 bp, Glycine max
  unsure (1)..(170): unsure at all n locations
cagttaagtgaacaaatgaagtgtcgacagttttntgatggtcgcncgggcgatgggcgatgtttttaactaataacactccctgcttgttaagtataatnattaataacacgcactatatatatagacttttatatataaatctcattacactcttaacacaatctcca

SEQ ID NO: 15180 - DNA, 343 bp, Glycine max
agctttggtttcgatggtccctatgacatctatcccccacatggaaaaaggccaaggggcggacatgacattcagaggatgtggcggaacattgacattgtctgcgtacgcttgacatttatggcatttccttacatgggtgcagcaatcgctttccatagtgagccagtaataacctgctctaaggatcttcctggccatagcatgcccattggcatgtgtcccaaatgaacccccatggacttcctcaatcatgtaattcgcctctttggcatctacgcagcgtaggagggtcatggttttgtttgtacaggacggtaccactcacaaagaaaccagtagc

SEQ ID NO: 15181 - DNA, 436 bp, Glycine max
  unsure (1)..(436): unsure at all n locations
gggggaattgatagaactcgtacacatgtgtacattgaacttcgaaagactcggcanncccaacnaccaccgatttactacacttatttaaattttcgcaagcacttaagagctgtgagacccttcaaggttccgaaccgcacttcaagccttgagcgataaactatgatatctgcagactcttaacgaatattggcagcaatgaattgggggcggagaaaggaggcgggtttgccgtgcactggataaacaatttgggaaggcctgcaccaccatataatgtgagccatacccgatacacactgcatattggctaaatgtgggaacagctgaatatgatgctgtactcaaaaggtctcaaagcctaaaaaaaaaaaaatcccaccctactaacataagcctaaagttgagtgaactgaatagaccacgatggagg

SEQ ID NO: 15182 - DNA, 346 bp, Glycine max
  unsure (1)..(346): unsure at all n locations
agctngactcactttttggcggttaaggtgcgaaaccaaccatacgtagaaggatggtttacaacaaacattccttgtactgctcttttcacatcttcggtcgaaggtgtcatatagatcggctaggatagcgacaatcgggcttttcttgcggtcatgaaaggcgagaaaagcgtcgatcgcctctaggtccaccaacccatccacatttggaaagagaactcctccgaagatcaaaagtgcgaggatgtctatgaacggggcccattcgcctctacctaccaagattcttgcttttgcctccaaacaatttctcggtactccaaccaccccattatttacttgc

SEQ ID NO: 15183 - DNA, 340 bp, Glycine max
  unsure (1)..(340): unsure at all n locations
ttaatcttcatgtcgttcatgttgtttgatgtgtcatcattttctcatatatcttaagcctttttgtcaacattttaattactgattagccttaattgtcaaactaattatgcaattttatctattgggcctactggattaattttgtgcttttaatttaattctatgagaactataagtaattgaccttgaatccacaattgggcttggacttcaaaataccacgcaattntattctaccaaatcttatcttatctacattttatctcatctagatattattttatcttgatcttatcttatcttatctagattttatttcatctacatattaattcat

SEQ ID NO: 15184 - DNA, 170 bp, Glycine max
  unsure (1)..(170): unsure at all n locations
taaccccacccccaaaaaacacaagaaaaaaaaaccacaacccaccccagncccccacacccccactccccccccccccctaccccccccccccttcncccccccccccccccccncnnnccccccccccccccccctccncaccccaagcccacactgggacaaaaaaa

SEQ ID NO: 15185 - DNA, 278 bp, Glycine max
tgcttgaactcaggatcctttccctccaaatactataaaacaaaagttaataaataaaggaaaacaggcactttaaaaaattaactaaagcaatttaaaaatcaaaagactactatccataaattatgaaggggaaatgcatacatttacactgtaaataattcttagaaaaaggaacttttggttaaacaactagttaggaaaaaggattggttggacgattgtccataaaagttagtgatttatatttctgataaaacaaaaacaaagaccatatg

SEQ ID NO: 15186 - DNA, 220 bp, Glycine max
  unsure (1)..(220): unsure at all n locations
aactcaagcttgtgaatcatctatatcaactgttgatcaatttatacctatgcggatgagactcattgcatatgcggatcaacctgaatgagctggatgcaaaaaaatatttttaaaaatacacaggaatatttttaccttttcacgttaagtgctgggtgcaccancaataatgctgggtgcacctagcaacaccctttanntaagttnatatantaac

SEQ ID NO: 15187 - DNA, 329 bp, Glycine max
agcttcaatttcagcttttcagttatatgcccttcctgtgactgcgaggtatttttttgcctgtcatcatttacatacttagtatattacgaattctctaaaggtgaaaagaagagagttaactctcattattgaaaccaatataactatgtgtgctaaatttctaaagcagtaaatatgagtgtccataatcttttgagtgaaaataagttcttattctatggctttgaacagagctcaaaagaatacttggaaaaacagatggcagaggtggaaaccaatttgagagaactgttacaacaagatcctggtcttgctaggcaaataat

SEQ ID NO: 15188 - DNA, 336 bp, Glycine max
  unsure (1)..(336): unsure at all n locations
tgtggactgccaacatgccatatatgaaatttaagggtagttgggggactctgtccattgtcagttcctcatcgcccttgggaggatccgtcactggatttcatcaccggcttacctctattccgaagtaacaccacaattctggtggtcgtcgatcgcttctccaaaggcatccatttgggcattttgccaacgnctnactcctccctcactgctgcaacactattcattgaaatccttggaaagatacaccaaatgcctcaaagcttggtgtccgacagggatccacttttcctgaagatgagcttcccttatcaccctcacagtgatggccca

SEQ ID NO: 15189 - DNA, 349 bp, Glycine max
  unsure (1)..(349): unsure at all n locations
agcttccttttaagattcntttaaagctagagcttagctacacacacctctctaatagctaagctcacctccttgagatgagaagctagagcttagctacacacccctataatagctaagctcaccccatgacaaaatacatgaaaatacaaaaaaaagtccatactacaaagactactcaaaatgccctgaaatacaaggctaaaaccctatactactagaatgaccaaaatacaaggcccaaaagaaggaaaaaaaaacctattctaatatttacaaagaagagtggatccaaccttgacccgtgggctcaaaaatctaccctaaggttcatgagaaccctagggcc

SEQ ID NO: 15190 - DNA, 123 bp, Glycine max
  unsure (1)..(123): unsure at all n locations
gcattgttgacatcaagctgaaataacttccacccttgacaaagagctagagtgagaacaacacgaattgttacaggcttggccctacaagaaaatgtctcatgaaactcnaaaccctnaacc

SEQ ID NO: 15191 - DNA, 382 bp, Glycine max
agcttaaaccccaaatagatgattgaatctatataggcatcctcaaatgaatcttcttcttctatcacatccattagcatcaaaggctcttgtgtaacatctctactccaactttattacacgtacaaggtcatccatcatcctttaaaaatagatgtataggtgaattttccatcctcttcatgccacaagcaaaataaccaaaatagtttgacatacaaaatcaaccactttacaatggttcaaaattcattgcaatgcaggatgtcctaattcctctttctagggtttctctcatttttcactctgggctcacgattccttatgatccctaatctgaggtcttacacttctatggcagtacataccattggtgcaacac

SEQ ID NO: 15192 - DNA, 394 bp, Glycine max
ctgtgtcatacgaaaaaaattaccttctggaattattcatttattatatatataattactttgttaacacctgtcatattaaatacatgctgattttttttgctcatacatttgtttccctgcatttttataaatatcaatattgcttgtggacattcagtaaacaaaaaataatactttggctgtctgcatcaccacaaatacattcacaatgattcagatgactctccacgttcaatcttgccatactacattcaatgctcaacaattttgaaaccccttcttattccgcgacttacacattttcaccaaccactgtgtcacttcaacatgtattctccacagagcacttctttcacatatattcagtcttcattcctttaagaagaaaata

SEQ ID NO: 15193 - DNA, 357 bp, Glycine max
ggctggaacagaacccgaagtagtttaaatgtgtctctgaaactctgctaccacttccttggttggaattgtaatacagcggggatgcaaattgctgaatattaagattacccactggaacccagtttgaattctcagtgctccattaatcagatgtattaattagtgttttggcgaagtgtgcaagaacaactacaataaagtcttatctcattaggtgaggtaagctacatggatcacatgacaacattcagcttggttaaataccagagctttaggcatattatttaccatgagaactcacttgacaacttctttcaaagtcctttggtctcctcctccaaagtgtgcaagaac

SEQ ID NO: 15194 - DNA, 192 bp, Glycine max
gtgcctgtatattgatgcgccttattcatgcctcagcctgattatttgatagaacaaacacgaatgctctccagtgaaaaaaacatgagtgatcgccttgtgatactcaccatgaatacattcttgtgattctatctaacgtgaatttatacacttagcacagccgacattttatgcagtaaccttttattt

SEQ ID NO: 15195 - DNA, 349 bp, Glycine max
agctatgctgcaaacatttataatataccccctcagcagcaaaaccaacaacaacagaataattatgatctttcaagcaacagatacaatccaggttggaggaatcatccaaatctgagatggacaagtcctctacaacaacaacagcctatccctaccttccagaatgttgctggtccaagcaagccatatgttcctccaatgcagcaacaacaacaacaacaacaaagacaacaagcaactgaggcacctcctcaaccttccttagaagagttagtgaggcaaatgacaatccaaaatatgcaatttcagcaagagacaagagccttcattcagagtctgacaaatc

SEQ ID NO: 15196 - DNA, 402 bp, Glycine max
tttaagaaggcaatttccaatcatgctatcttatgcaatgacaattaacaagtctcaaggccaatcactttctatggttggactttatttgccaaaaccagtctttcgccatggacaattatacgttgcattatcaagggtcaattcaaggcaaggattaaaagttcttattcatgataaagaccaaaaaaatatgacttatactaccaatgtagtcttcaaagaggttttcaaaaatcttacaaggtaactctaaattttgaaacaacaaattgtactatttattggcaacaattcctaactgttatcttactcatatacattctaacatacagcccaagatgatatcatatattacaatcttaaaatttacattgtcatgtatgtaatcttaattaccac

SEQ ID NO: 15197 - DNA, 363 bp, Glycine max
agctggtgccatttgaatgctctatcatctagtcccatgcttgccatcttaaccttcatgccattaggggtttcatccagctcaaagaatctttcacacttgaatatccaagcaataacatctcccctctgaaattttgggaataccgtctttgtaaattgttggcagccgatactcccttctattagaatcatgtctatctcgaaagtgatctaaattgtgtgtacgatgatgcccatttctttgattattttcaagattgatggaagcattatcccttttgcgcattagcccttgaagcagatcaaaaatgccctccacggacccaccatgtctgatagtgcatcaatctttgcaagcttt

SEQ ID NO: 15198 - DNA, 391 bp, Glycine max
taccaccataggaggccatggataagagcctggatgaagaatgagatgaatgaacggagaggaagagaagagcacgaaattttatgctctaaaagagctctgaaatctgaagtttaatattcaaatgatcaaagttcaaaaaatgcacacacatgacctctatttatagcctaagtgtcacagaaaattggaaggaaatttaatttcacttgaatttgaaattgaatttgtggagccaaaatttcactaattatgatcaatgaattttagttatggttcagcccactaatccaagatcaattctaagatttccactaagtgtgcttaggtgtcatgaggcatgtaaagcatgaaggacatgcacaaagtgtgactatatgatgtggcaatg

SEQ ID NO: 15199 - DNA, 358 bp, Glycine max
agctttttttttcagtaaatgaagatgaattcttggccacctcatggactcctctaaggacaatagcatcatttcttgcactaaattgttgggagttggaatccatcttttcaatcaaattcctagcctcagtaggggtcatatcaccaagagctccaccactagcagcatcaatcatactcctctccatgttgctaagtctctcatagaaatattgaagaaggagttgctcataaatctggtggtaaggacagcttgcacacaatttcttgaatcttttctagtactcatacaagctctctccactaaattgcctgatgcctaaaatgtcttttctgatggcagtggtcctagatgt

SEQ ID NO: 15200 - DNA, 407 bp, Glycine max
tctagccaaatggacttaccttgaattaattcctttgatagcccttttgagccttgtttccctttccttgttttgaagctcactacaagccttaagtgaaaaaccatgatattaccatatccttaaggaattttggagctttggaattgttttgggaataagtgtggggggtttttgtttcattggacaacttgttttgttggctatgcttcatgatgtattttgggccatacttgatgtacattgtatattggttaaatgttggacatgctgaatgaaatgtttctcaaaggctaaagagtaaaaaaaaaaaaaattcgaaaaaagaaaaagaaaggcaataaagttgagtgaataagatcttgaatggcacaaaaatgatgaaactcttggttctactcttcatg

SEQ ID NO: 15201 - DNA, 302 bp, Glycine max
aagcttgccacccagctcgttcaggctatcatggttgcttcctccagaagcaacagccttctggaggaatcttctggagggcccaagtgggcctggtcgctatttgcacccccatttttactaagtacaccccgacctttttttggtgattcttttttcgtaaagttacggaaacttacgaatttcgtaacgatacttgttttctttccataatgttacggaaccttgcggattacataatcatcccctttttgacttacagaatgttacgaaacctcactaattgtgcaacgatgcttcca

SEQ ID NO: 15202 - DNA, 339 bp, Glycine max
agaagtgaggaagtgtggaatggtgagactttcttcttttattcgttgaccacagagtggtacctagagatatgtcgcacgggtcaggagaccttggggatgtcgggtggggtgctattgcccaaaaccaagcttgaccaatcccgacccaacccgggcatagtcagtcagtgagaacctgtgatgtacctaaacaggcgagctcctggcagtcaaccgataaaagaacaaagaccacaaagcaaggaggcttgtgtggtggctggccagctatggatcttgagtaatatgtggaatatagcctctggtaatcgattaccaagggtgggtaatcgatta

SEQ ID NO: 15203 - DNA, 363 bp, Glycine max
gcttctaaactttatacattaatgatgctctgataccacttgttggacaagtggcctcagatatcttaagaagggggggttgaattaagatattaaaacttatttccccaattaaaattctatttcactttctattcaagttataaattcccttaataatgaatttcttaaatattgattcaaataaaacaatttgaatatgaatataaaacaataataaataaatgagtttaagagaagagaaaatgcaaactcagatttatactggttcggccacacccttgtgcctatgtccagtcctcaagcaacccgcttgagagttccactatcttgtaaattccttttacaagttctaaacacaca

SEQ ID NO: 15204 - DNA, 256 bp, Glycine max
gtgcctgtatattgatgcgcctgaatcagacatacgagtgaaaagctatgaccattagaattatttgagagcttcctatgattaatttcgagcgtgccgatataatatacacctgaatcaaacctcagtggaagaacgtatgaccatttgaatttcttgcgagcttccgacgttcattgtttagcgagcttatttgtgaggcacacgaatcagacctccgcgtgaaaagaaaggaccatttgaatttctcgagagc

SEQ ID NO: 15205 - DNA, 360 bp, Glycine max
gcaagcttgctaagaccaattccaacaattttaaaaatagagagataattgcacttagcgtgacagggcacgcttagcgcacaaaaaacacaaaaatttctaattgtctgagaacacattactcgcttagcgtacagacgcacttagcgagttcataagcaattgaactttcactcaaagaagatgaacgtgcttagcgagacaagatcgcacttagcgagttcatctggaaatctagatgttcaacagaaacgatgaactcgcttagcgcaacaaggcgcttagtgcgctcatcgcgatttccaaaaaaagcgagggctaagttaactagcctaaagtttgaaatgtggaaataaaatg

SEQ ID NO: 15206 - DNA, 394 bp, Glycine max
ttgtgtggagcttcaatggagaatgaagaagaagagaatggcaacgtgagggagagagagggctgtctgaaatttctgttttgctgagtgaggagagagaaaagctttttggtcttaaataaaaggttttcctctttttctattattttattcaagctctgccacatgtccctatttgattggagcaaaaagggctcactttctctttttgactgtgacccatactcagtcacaaaagtgagaaaaatctgacctttgaaacgctaaaatcctgcctcgatttgcgtgccgtttctctgattccagtttctcgcgtttctctgcgtctgtcggggccagttttcgaaagcaagccatatatatatcaaaacgctcagaataaaaccccgagcgt

SEQ ID NO: 15207 - DNA, 221 bp, Glycine max
ggcagcaagctacacacgagcgtcaattgtgtttgttttggtcaacatgaaggcaatatttacgttgagtgacaaaagcttccttgaatagtttgtcctgtttaagaatatcccccctgaccattatgccttgacaaaaaatcactttcgggaaaagaaaatattatgccctatgggtttcaatcccaccaaatacttgcatcgcctaatggttgcataat

SEQ ID NO: 15208 - DNA, 299 bp, Glycine max
tctcccccaattttctataaatagggggagtattgttatagtgaataaaggttgagccccttaggcacttctctctctttcgaatctgcttagaaaaattggttccgtgaagaaaattcaagccgaggcgcttccctaacgtttccgtaacgtatccgtgagtgatatcgcgaaggttttcgaccgttcttcaacgttcttcattcgttcttcatcgtactttggtcttaacgggtaaattcctttaaccaagcttttcgattcattctatgtcccctggaggtccacattgtgtttcg

SEQ ID NO: 15209 - DNA, 379 bp, Glycine max
  unsure (1)..(379): unsure at all n locations
gcttcaagaaaaagatggtctcatctaactccttatttccagaagggaattctatcaatagacctccaatctttaatggagagggttaccactactggaaaacccgaatgcaaatttttatcgaggcaatagatctaaatatctgggaagccatagaaatagggccttatatacccaccacagtagaaagagtttcaatagatggtagttcatcaagtgaaagcataaccatagaaaaacctagagatagatggtctgaagaagatagaaaacgagtacaatacaacctaaaagccaaaaacataataacatctgccctangaatggatgaatatgtcaaagttcaaattgcaagaatgcttaggaaatgtgggacact

SEQ ID NO: 15210 - DNA, 404 bp, Glycine max
tgtctctctaagttggttgccgtcgtgaagcacaccagtactgtcgtggttgtcgtcaatgattatacaggccaaatcgtcgacgattatgggtaagcttgtctccctaagggagaaaggaagcttgtctcccttttcttctctctgttgcgtggttggctttctttttgtggcttcattgtggattcctagggtttgagggtggaaagagtttcgatcttgatcaatggaagccgaggcaaagaacaaatacgtgaagaaggaagaaaacaacaatgataacaacaacaataaaagtaacagcaaaattgggaattcaagtgagggtctgagcaagcccaagtgtcaaatgaagacactgtttcagcttgaaacgctcgagaaagcttatgctggtttgttat

SEQ ID NO: 15211 - DNA, 369 bp, Glycine max
agctataggaatattattaatagacatcattcttttaatagaattcaaattcacatgtccaagcctaacacgccacctatcaaaacattcaacatttgcaacaaaagaagaaatgctaaatattttattaatagaaagaggcataagacttaacttgaacaaaccatcacaaatgtagcatttaccaatgtgtagcaacaaaatacttacaacaacaactgttaaaaacagaaaataaaaaatgagcaacaaattttctaatgttaaagacttgtaacgttcacaaagaaaattcaccaagtaaaagataatttcctataatatatgaatagaagttgtgggatgtttctagtttctcacaaaaactaa

SEQ ID NO: 15212 - DNA, 367 bp, Glycine max
ggagtttttccttgaacacataagctccctttccttgtatactgaatgaatcataatacttcttgacaaaaaccatgaacctgggctccttgattcacccattgaaaattttaaatggcgtaagcccccaatcattattattatctctaaggataattggacaatgatatgacaatgacctctcttgaacatattgagtgacactccgacttccaaagagccatcctttcaaaaccatcatataatcaatcctacgcattacattggcattgactatcaccctaacgaaacttctctccactgaaagtacatccaccatttccatattatccaagacagtattaatttcttctatcgccttgcttct

SEQ ID NO: 15213 - DNA, 287 bp, Glycine max
  unsure (1)..(287): unsure at all n locations
agctnggtagttctctcatatagattgtgaccttgatcaagaggttgattggatggacccccttaatctttgttgaagttgttccccaaatggaattttcacccttgaccttgattttgagaaaagttaccaccctgatggtagccttgacagtttggtttgccatgtaaatgacctccatagatgcttcctcttgaaccacacatagccctactttaatagcctcaccacacagggtgcatctctcaactttcatagtggaagaattgattggttgaagggaatgc

SEQ ID NO: 15214 - DNA, 368 bp, Glycine max
tgaagctcaaggaaaagattgaaggagctttagatatatgtttggattttacatgcctaactcccttgagtgacatttgtattggttattatcttggtagttgcatcttagtacatttgatatctgttttgcattgtgcatcatcatagtgtatgaaggaaattttcttaattagaaaaatttcttcagaggataaaactatgttttaatcgattacaaagttgttgcaatcaattacaataagttgtctgaagcttaaagagtcaagtctcatatcgatataatcgattactgtagtactttaatctattacactgttgtttgagacaatggctgtctttttcaagagtctctactttaatcgatta

SEQ ID NO: 15215 - DNA, 373 bp, Glycine max
agcttgaacaaatcttctacagttgtgagtgataacatgcagtcttcttgaacccttaccgcccactttgtcgtcatgccgagactcgagaagcccatcaggtttagccttttcaatgtactctgaacaaaatccaatggcttcttctgcaatgtacctttcaacaatagatgcttcgggacgatgtagattcttcgtatacccttttaagatcttcatgtatcgctcgaccgggtacatccatcgcaaataaacaggaccacaacatttgatttctctgaccagatgaacaattaagtgaaccatgatgtcaaaggaagcaggaggaaaatacatctccaactaacacagtataattgcaggctcgttttct

SEQ ID NO: 15216 - DNA, 382 bp, Glycine max
  unsure (1)..(382): unsure at all n locations
ttggctggaggtggattaattctcttttagtcctcaaggcttttaatgttatcaatgtggctccttaggatttaagaaatgtttggatgaatactttattctattgtggcccaaatggagtttcgtgtctcccatattttccgagatagtaatgtatgcgctaatcatttggctaactatggtgtagaattactctattatgtgggaagataaactttgaatttggatgaggtgtacaaggggagatacttggtgttgcaagggtagaaaaataaaggtaacctttgctatttggatggacaagccttgaagagaaaccatgattgcaaagtgaagaagaaaatgaagttntctaatattgtagaagtgttgggagatactt

SEQ ID NO: 15217 - DNA, 384 bp, Glycine max
  unsure (1)..(384): unsure at all n locations
agcttncacttgataatggagacacttgaacttcgctaggcaacgacattcatggcgctccgaacaaaggtggagtatggaggattgccttgagggtccgcacttangcaatcatgaaactaagctccaaactcgaaagtggaggacacatgaacaaccctaagcaataatattcatgtggctccgaaaaaggatgagaatggaggattgccttgagggtcctctcttangcaatcatggaacacagctccaaactcgaaaacggaggacacatgaatgaaaccgcaattcattcacgtggctccggaacaagatgagaatggaggattgccttgagggtcctctcttangcaatcatggaacacagctccaatcatggaacac

SEQ ID NO: 15218 - DNA, 345 bp, Glycine max
tggttcgaggtacttacccgttgaagatcgaagatcgatgaagaacgaatgaagaacgtcgaagaacggttgaaacctttgcgagattcctcacggaaaacgttacggaaacgtttcggaagcgcctcggcttagattttcttcacggaaacaatttttccaagcaaattcgaaagagagagaagtgcctaaggggctggacccttttctacttcacttctccccctatttatagaaaattgggggagaagcttgccgcccagctcgcccaggcgagctcagctcgcccaggcgagcagggttgcttcctccagaagcaaccgccttctggaggaatcttctgga

SEQ ID NO: 15219 - DNA, 375 bp, Glycine max
agctgtatactgaattgagtatggtacacacattgcatgtctgatatgccttttaaaggcttgaaaagtgcgagaaaacgagctgtgttttctacattttctggaaaaatgcgatgaactcgctaagcaagaaggctgcgctaagcgagttcatcaatactcattgtatataagctttatctgaagaactcgccaagcgcacttactgcgctaagcgagttcatcctttgaggatgaacattcatcctcttgctgaactacctatggccaagcgaggctgaatcgctaagcccaggtaacttaaccatttttttggtgatagccacgtgctaagctgagcattcctaagccaagcgcaattggctgcggcatccg

SEQ ID NO: 15220 - DNA, 366 bp, Glycine max
ctaagcttagggatttcaaattctgtctgacaaacaataaattaggttttattgttagtaaattataaattttggctactaaagaaaatcaaagaagaaatctataatacttgaatatcctcccatatcaaatcctctgagcagtagagacttccttccaagtcttgtatgtcacgtcgaccttgtcacaagcgacaatccctaaatatgttcttaatttcttcttgagaggaccgtcggccttgtcggtcacaggatcgatgtggaccactggtctctctgccccaggtggtctagtggccaaggatcatagccgtgtggctttgcatgtttgcttcaaggtagatggacacgctgatgcttctg

SEQ ID NO: 15221 - DNA, 375 bp, Glycine max
  unsure (1)..(375): unsure at all n locations
agcttacagcagattntagtaatgacccactaacttagaattaaaataacttaatgccattaatctagggaattaaaaaaacttaatggctgagtgtaactgaaattgtggcaaccaaaagtcacccccaacagccaacaagtcagccaccatttggtctcccaaaaggctgatgcctangttgccaattgggcccttattacaacttgaactaaacctactaaagcccttttagttgattaacccaaaacatatttttggtcagccaactttacaaggattgggccattatttagacaaactaaacactctaaaattgagacaaagtggtgccatttagtcctcatccatttgggccatgatacaactcacaac

SEQ ID NO: 15222 - DNA, 342 bp, Glycine max
  unsure (1)..(342): unsure at all n locations
tctcgaganattcgaatggttataacttttcccacatatgtccgattcggggacataactcatctagacgctcgaaattgaacaacgcaagctctcgagaaattcgaatggtcataacatttcgcacaaatgtccaattctgggacataatatatcaagacgctcgaaattgaatagcggaagctctcgggaaattcaaatggtcataacttttcacatggatgtccgatttgggaaaataatatatcgagatgctccaaattgaacaacgaaagctatcgagaaattcgaatggtccgaacttttcgcacggatgtccgattccgggacataactcatcta

SEQ ID NO: 15223 - DNA, 360 bp, Glycine max
agcttcattatggttcttggttcattatgagtaaccaaattcatgttattgcataaaatcctaaatctatagcgagtagatactccctttgatatttctccaataatgttgtccaaggagaggtctctttgagttctccattctcttgggaggtttttaggaggtatggcagtgatttctttgctttgttcaacctctttaactttagtttcatcttcaagtgcattatctatatcctgaaagcctgcatcttcatctttcgaagagtcttcttgaataatagagttagtttcatcacacatcatgtagagattcttccacacacaaagttcttctattaaacactcttatgctttcttt

SEQ ID NO: 15224 - DNA, 411 bp, Glycine max
tgcttgagaaacttctatagaggctgaatctttgatctttaataaggtccctcaatggtgattttcagtcatggagttgcagcggaagataaaggagaatagatgagaggaggcaccatccactaaagaataagccatggaaggagaagtttcaccaccacaagagtgccttagataagaagcttatagaggaagcttcaatggaggaagagaatgagagagaggggggcatgggaattcaaggagattagggaaaaaagttgaactttgaagtatgtcgcacaaataggggtgggaataggtcaagccaagctttgaaaggtctgagcctagcctacgatgaatctctgagatctgaacctggcctatagcctatcaaaggcttttattttggcttggcctggcctaata

SEQ ID NO: 15225 - DNA, 371 bp, Glycine max
gcttgtggaatagctcattttaatttcttcccaaacttaaccaaaaggtattttaaatttttggtctatgcctatcgtctagcaactgtgtcaaatttacttgtggttttggtctctaaatgtattgagaaggaaagttgattttgtaactattcattttgtattcaaaacttcaaatcccttctcccactttaagaagtgaaaccctagagaagaagcctcgtgctgtttaccaaaggtggttttagttctccaagaaacactggcaacttaatatccttccagtttccttctatatacgccactaccacttacaagttattttttggaaaatagcactagcagctatttgctcttctaagcataataat

SEQ ID NO: 15226 - DNA, 391 bp, Glycine max
tcctgtaagtaaaattatgttcaagatgtattggtttgtgataaatacttaaactaaacacacactaaaaaggtcgcaaaagcataaatagcaattagctacacttgttatattttctttttttatcaaaaaatattagttattagttttgttagaatcttaggaagagaacctaaaaactttcttctttcatttttcatttaaaccaccaagtcaatcttataacttcatctacacatgttctatatgttcatgctttttcatagatgttgtgatcattttcttttttcatctacctccgagaactcgcgaatcgttgcaaacagtgccaaatgaagcaataaactactagaacaatgaagcataggagaaattccatacagaatacaga

SEQ ID NO: 15227 - DNA, 364 bp, Glycine max
gcttggtccccaacgctttgttcatgctctcccaaaatctagaggtaaacctaggatctctatcagacactatgctagaaggcataccatgtaatctaacaatctcactgatatacagggaggtcaacttttccaaggaaaatttgatattaatgggaataaagtgagcagacttggtcaacctgtcaacaataacccagatagaatcaaaacctttgggggttctaggtagtcctatgacaaaatccatggaaatactgtcccatttccactagggtatctccaagggttgtaacttcccgaaagatctttggtgttctatcttagccttctgacagactaaacatgcatacacaaactcact

SEQ ID NO: 15228 - DNA, 410 bp, Glycine max
taataaatctatatatggtttaaaacaagcctcccgttagtggaaccttaagtttcatgagataattttttcatttggttttaatgaaaatcccatgaatcaatggatataccacaaggtcaataggagtaaaatatgttttcttgttttatatgtagatgatattttacttgtagccaatgatcagggtttgctatatgaggtgaaacaatttctctctacaaaatttgacatgaaggatatggatgatgcatcttatgtcattggcattaagattcataaaatgatagacctcgaggtattttaggtctatcacaagaaacctatattaacaaaattttagagagatttcggatgaaatattattcaccaagtgttgctcccattgtgaagggtgataggtttaattt

SEQ ID NO: 15229 - DNA, 372 bp, Glycine max
gcaagcttttcccttgatgatgaattttacattgtttatgtatgacttgcgtgtatgtcatgtatgttgctttttccttttcaacgctctgtagttgtggtcgtacgaataggccatcgtgatgtagacaaagtaggaagtaagaccttgttgatgtaaaggtaggagtgtggtggtcttataaagagtagaatgacatgaagtcatgtcaggtttgatttcaacctggttaaaggtcttgtcaccatctggtagggcttccttctatcttgtggagcctttcccctgatggttgtgaggagttacgttgacttgcccctggttgaaggtcttgccaaccagtcgaggggtagatcgctcgacctgttgagt

SEQ ID NO: 15230 - DNA, 394 bp, Glycine max
tgatgtcattcaaaagacactatgtcgacctatatgaagactaaacatgcattgtttatgtaattatattcactatgcgatataatttgttgtaagccattactaaccaattaatattattaagtactcgtttggtgaagcaaaaaaattattggtccaacaaaaatcatttgcgcgtgtagcatacatcattgtcataattgacaacacataatgacatgcatgcgtattaaagtttgagcgcgacaatacattgactgacttgactacatattctcaaggaaacataaacacgaaacatgttcacgcatgcctatttttttgtaaacaaagtgaagcaattgtcggtcacaaccatctattttatagcagacacggctaataaatcacacat

SEQ ID NO: 15231 - DNA, 377 bp, Glycine max
  unsure (1)..(377): unsure at all n locations
gcaagcttataagaacaaaattgcctcaatcatttccaaatatgcatgtgaattaggaagcatcaagaagaatcaagccaaggctattgtgcaagcaatcaatggggcaaaacacaccaaatgattatggtggtggatggctcaaattctcacaaaggtaaactcatcactttcaaattgagctttcaaaactatcatgacatgtagaggagaatcaaggatttcaagtcacaaaatgtcaagaacttttattttcaaaacaattacccatttcttgaaaatatcctataattcgaagaaaaacatgcaaagtcgtacattgatcgaggtcgtacccgaatcaaataaacatganaatgcagtaactaggaagtgat

SEQ ID NO: 15232 - DNA, 386 bp, Glycine max
tgaatcttaaaacttgattcttgattcttgaaatcaaatttccttttgaaccttgaagtgttcttgattcaatcttgaactcattctttgattcttgagatcatcatctttgttgtcatgaagtgttcttgacttttgagctttttgtcatcacctttgttatcatcaaaacgtctttgaatcaatcttgattcatcatgaagcttgattctacaagatttagtccaagaatccgattggtctacttggatctaatgttcctgattagtcgatcttgatctagtcaaaattgatttagtccaagaagctaatgggtttacctgaatcaaatattctcgactagctagtattgatgtagtcatagtccaagaaggtgattagtctac

SEQ ID NO: 15233 - DNA, 345 bp, Glycine max
acttgtgaaataaaagtgtcaatatatgtgcatatatacagtgcggcgtcgaaaattttagaaagtaaaaaaaaactcaataagattgaaaggccaatatatcaagtatgaaaaaatcattgccacacaattttcatgcattcactttataaagtgtaggaaattgagttatcacgacaataaaatatatgtgaatttaaaatcaaaaggattcataaaggggggaaatacaaattctactcaggtttatgtaaagaagagaaactctttcactcccccttatcttggaaaaaagaaagcgtggagaatagacattattctgactccgactcacaattcaatggg

SEQ ID NO: 15234 - DNA, 408 bp, Glycine max
tcttgtttgaacaaaaaatgatgtattgactaatgtattgttttatcctatgaataaaattttaaatcaagaaaaaatagttttagaacataaatttgaaaaatgaacatacatataaaaaattgttgatcatgaattaagtcacttaagaataagcaaaaaacattgtaaaggaaaaaaaaaagaaagaggagaaaatgaagacagaagggacaaaattaaatttggaaacacataaagatggtacattatctatatccaaagtacactaagtttatacatatgattgctggtgatgtcaaatcctaacattttgctatatatctactcttctcaaatgtgtggactcttctggatcacgtgatccccaaaatctgatttgttgttgcaccaccaaaattgatcttt

SEQ ID NO: 15235 - DNA, 370 bp, Glycine max
  unsure (1)..(370): unsure at all n locations
agcttgaccaatctcgacccaaccctagcatagtcagtcagtgagaacctgtgatgtacctaaacaaacgagctcctggcagtcaaccgataaaagaacaaaaaccacaaagcaaggaggcttgtgtggtggctggccanctatagatcttgagtaatatttggaatatggcctctggtaatcgattaccaagggtgggtaatcgattacaaggcttaaaaatgaagacaggaagttaagatggtctctggtaatcgattcccaatgttttgtaatcgattaccacgcctaaagatgggatcaagaacgtgagagggcttctggtaatcgataccaatgctgtgtaatcgattaccaggcttagaaatgg

SEQ ID NO: 15236 - DNA, 349 bp, Glycine max
tgtgactcttagcaatttctttaaatctagtcacttaaaaagttgtgacttttgaaagaatcttcagaaataagtcacttgaagaattgtgacttttggaaatgtatttttcaaaatcaatcactggtgatctattaccattaaggtgtaatcgattacacatcaacagatgtgactctttattttgaattatgaaaattaaaacgcttagaagctctggtaatcgattacaagtattgtgtaatcgattacacaagtttaaaatactttaaaactgtttaaacataagttgtaactcttgaaatttgaaatcttaacattttaaaacactggtaattgattactacct

SEQ ID NO: 15237 - DNA, 364 bp, Glycine max
agcttctcttacaaagatgaaaaagtgaaaatgaaagattaggaagtacaagtggtgaggatgtctccttcacctctagaaacctcacaatcactcaaactctcatccaatactccgcatgataatctcctctttaatctctattgtccctcaggatcttcacaccaaatgttctctccgcccctcagccactcagaggaatgcttccaagaacagagaacacgccaaaaattgagaactccctaccattttttatttcaggctttaaatagtgttgctgattttttgtcattcgctcagccgcattctatttcgcttagccaaattaagtgacatttggcatagtgcacctcttcttcgctca

SEQ ID NO: 15238 - DNA, 375 bp, Glycine max
  unsure (1)..(375): unsure at all n locations
tgtaatactttgtggacaacttacaactcatgttatcaatgttagatattgtatagtaatttaaattcttgcaaaattgtagactatcattaattatgtaaatttttgtattatgtaattaaatgattntataattgttgaaaatcatgtctacttttgctacaaatcagtgtttagaaaaaataaaacaccacctaacaaaattacaaataatataaccgcacctaaaaaattaaaaaaaataatcattctaagttggttatctagaaaaccgtcttaaaaagtcagacatactaagacgattgttgagaaaaccgtcttagtttgtcgttgttgcacatgagaatctacgacggttatgctaaaaaccatctt

SEQ ID NO: 15239 - DNA, 381 bp, Glycine max
agctttggatcaaacttttttttctctctttttctctcaattgttcttcattcttcttccttttttcacatttgttcttcctttttcttgcacaaattttgtggcttttccactggtgatgatcatggaaggctaaatactcaatcaatccaagtaaggctaaattggagttatggtttagtatttataatatgtgtgaatattcatcttttcttcaatcctattttcggttttcatgattatgaatatgcttgggattgaaacaaaattaggttagggattcctttcctaatttcaaacttaataacagattgtttggatgatattccaacctaacttgtgatctcaatgaatttagggattaatttgattgaactaact

SEQ ID NO: 15240 - DNA, 409 bp, Glycine max
  unsure (1)..(409): unsure at all n locations
tcatagacctgcaactntcacacttgtagaggttactgctctcgaaaccaaacaacacttgtccatgcgtggggggcttgacaaacttgtcaccctcctacttgtcaaggctattaccccagacattagacaaactcccttgacacgggattacctcattcaacactggacaccctctttcgcctgtaagtcggctcagagcttcaggggcttatatactgtccagggtccacaaaatacacatagcatcttacgtggtacttcgagacacacatcaatcctctatgtcagtcctagcacaagagcatgagcgtcctgcccttagcagtcagtctccctaaccaacagattatctttaacctcctattattcaaatacactgtcatattntatctcttggtagatactc

SEQ ID NO: 15241 - DNA, 378 bp, Glycine max
agcttaagggtcaccattagatacttatggattgaaaatgacttttgcttgagagagagattatcatgtgggaaaaactcatacttaagggagagattgttcgagtataagtgtgaggtcaagtttcacattggataaaaattaaaaagttaagcaacatgtaagtgaagaaaagacctataaaactaagtcttaaggtttttttttgtttgttaaagtgtgctgtcaagtccatttgtgtgatgtgcttaaaacccattggtgaagatttctcgtgtgtttacccccctccattgcacaaaaaaatgattttattttagttctttatattttaaatggttctattttgatactttaagtttttttgaatgatttcat

SEQ ID NO: 15242 - DNA, 414 bp, Glycine max
  unsure (1)..(414): unsure at all n locations
tgctagctataatagggcagtacaaagaagagttaataccattctttgacccatgagcaaaagctagtagaagacttcgcacaagcatacgtcgagaaggaagcaagagggagggtgattgatgcattgcatcaagaagcgaccatgtgaatggataggttcgccttgaccttaaatggaagtcaagacctcccacgactactagccaaagaaagggccatggccgaagtatgttcagccccagaggaaattcacgggctaatcaattactgtcaacacatgatagatttaatggcccatataattagaaaccgttaggttctgttgtaacacttttgtaaaatcttggctagatgaaagcttttttgcctttntataaaaacagaagttctgaaacccatcacgttgtctaaa

SEQ ID NO: 15243 - DNA, 373 bp, Glycine max
  unsure (1)..(373): unsure at all n locations
agctgtggttcaacatccacaacatggtgtgataatcaacaactcaacactatggaaggtgggctgtggggacaggtttaaattttgggaagatgcatggatgcctggggaggaatcgctgctaacaagataccccaggttgtatagtatatcttcacagcaaaatcaatacatacagcaaatgggggcctttaaagataatggatgggaatgggatttcagatggaggagacctatgttcgataatgaagtagatatggcggcctctttcctaaaggaggtcgagtgtctcaggattcangctcagcaaggtgactagtgggtgtggaaggcatatccgagtggccaatacatggccaaatctgcctattgc

SEQ ID NO: 15244 - DNA, 313 bp, Glycine max
tgtcttcttggaggcgtgcgagacccgcggcttgcacaagggtcataggctgcaacgcctgaacctcacggcgtatttcgggcgtgaggcccgaaatgaagcaactcaagaggaattgcgcaggaagaccaacgattctgttggctaagtcctcgaagtcggacaaatattgagccaccgtgccggtctgcgtcaacttgaagagggagcccgtagggtcctcgtacgtggtggcggcaaatcgagtttgcaaggcgtggaggaaagagggccacgatgtcagttgaccattgctggtcatccactggaacca

SEQ ID NO: 15245 - DNA, 184 bp, Glycine max
agctaacgaatcactaggaaatagcttttatatttcttaatcatcgacagaattcacacataagctctcttggaggtaatggattagtttctcactattgtggttataaacaacatgtggacggaatcttccatgaattaccttgtgtttatctttagatctttattgaatgatttttcttcct

SEQ ID NO: 15246 - DNA, 395 bp, Glycine max
tgtagtcttagaaaacactttcgacggtcggtgaatataccatcaatttagatcttttattatgatacttatattttagatatcactcgtgctggagtgtccatttcttcattgtatccagagtctgtgctttgtagcatgtcatgatatcacaaattgctatgtgtgataagtttgctaatttttgtgataattactttaaaagtcatatatcacatgattaacgggataaagatagatgaaaattgcattattatgattcaggttacagagtgggttgatagcatttcgcgagattggaggttcaagagaataatccctgctcactttgctgctccaataagtgcaagtaggtctgatttcacggctgcatttgcatttttggatgagttttt

SEQ ID NO: 15247 - DNA, 361 bp, Glycine max
  unsure (1)..(361): unsure at all n locations
agctttaaaaatgtcttcacaaataatcatcacacagcagaaacctagcaagactacccatcatatctccccaaaccccatacctacgaaaatcaaaggagaaagaagtccacccaaacctgaattttcgaagtcccactcgtagccatgcacttcacgactccaaaaatactctcctttcgcgatttggagcagaaatgatggccaaaggttgaagctttgtttggagcttcaatggagaatgagggagaagaaaatggcaacgtgagggagagagagagctgtctgaaaaaagtgtgggggctgagtgaagagagagaanagctttttgggtttaaataaaaggggtttctctttttct

SEQ ID NO: 15248 - DNA, 409 bp, Glycine max
tctgaaatttgctgaaggaagagagagaagatttgggcttttttataaaaaaataattttcttttctttttcattttcctttctaaaagcaattgcgacatgtcccattttaagtggagcaaaagggcccacctttttcctttgatttgacatcatactcagccataaggaagaaaaaaaaatgaacctttttggatgctgagatcctgcctcggtttgcgtgccacctctctggttccagttcctcgcgtttctctgcacctgtcgggggccgttttcaaaagtatgcaatatatatatcaaaacgctcagaatgagaccctgagcgtggttctgaggttggttttgtaaattttaagttgcacgccaaacgataatttttagactaattaattgcgaattaatctat

SEQ ID NO: 15249 - DNA, 371 bp, Glycine max
aagctttgcctttcctaactttcttttgagagcttggacttcttcgtcctcttccgatgcttcaaaactctctttgctgacgacttttaacttggcgagccaatctaaacctcgtatatgaactttcagccattcatggtacccaccaatgatgccattacgaatgcctctaagctcttgatctttctttaacggggtttcccacgccttatggattctttgtatagtcttggaattttgtgcgccgaaatccctcacaaggaaaggagacatgctttctcccgtcggtgctcccctcatggggtaccctagttgtcttatagcgagcgcgggattgtagttaatacaacccctcgttcctaccagcggaa

SEQ ID NO: 15250 - DNA, 361 bp, Glycine max
tgtaatcgattacacatatactgtaatcgattacttgagcagattttcagaaaatattctcaacagtcacatctttttatgtggttcttaaatggctatcaaaggcctatatatatgtgactggagacacgaatttgctaagagtttttcagaacaaaaaagtcttatcctcttataaagcaaaattgttttatcctcttacaaattccttgtccaaattacttgtgattcaataaggaatttttgagtgctcaaattgttcaatctatctctttcaagagagatttcttcttttcttcttcttcattctgaaaagggattaagagaccgagggtctcttgttgtgaaagaattctaaaca

SEQ ID NO: 15251 - DNA, 377 bp, Glycine max
cgcatgaagctttatatggacgaaagtgtcaaaactcctatttgttggtatgatgatggagaagcagtacttcttggacctgaaatgctacaacagattaactaacaagtgaagttgattcgagggaagataaaagcatctcatgataggcagaagagctattatgattgaaggaggaagccactatattttcaggaaggagaacatgtgtttttgaaggtttctcccgtaaccggagttggaagagctctcaaggctaggaagttgacacccaagtatctaggtccgtatcagattttgaagaagattgggcctatagcttatcatatcgccttacctcccgatttatcgaatttgcatcccgtgtttcatgtctt

SEQ ID NO: 15252 - DNA, 398 bp, Glycine max
taagcgaaatgacctgcaggggaaaatgggttattggttttcaagcttaagtgtaggttaagccatgcttaaacgtgactaagcttaagtgtgggatagaccaggcttaagcgagatgacctacaaggaaaaatgagctattgtatttcaagcttaagcatggaatgagtcaagcttaagtgtaaaacaagtttgacttaagtgtgaaaccttgcaaaatatgtatgaatgacttccaaatggatttgaattggaatttccttagtttataagaattatgagatgcataaataggtttctaaggttatgttatgagaatctacttttactaagtatatatgagttgagagttgaatggatttaagtatggatttcttgcactttaattgatattgact

SEQ ID NO: 15253 - DNA, 338 bp, Glycine max
caagcttggtttgaggtacttacccgttgaagactgaagaacgatgaagaacgaatgaaggacgttgaaaaacggtcgaaaaccttcgcgaaattcctcacggaaacgttaccgaagcgccttggcttggattttcttcaccgaaacaatttttctaagcaaattcgaaagaaaaagaagtgcctaaggggctgaaccctttttcacttcacttctccccctatttatagaaaattgggggagaagcttgccacccagctcgcccaagcgagctcatctcgcctaggcgagcagggttgcttcctccagaagcaacagccttctggaggaatcttctg

SEQ ID NO: 15254 - DNA, 382 bp, Glycine max
tatgcacggaaaatgtaattatgaaattgagatgctcgaagaaacaccatttccagttaaccatgcattaggtaccatgttcaattattttgttttgttgttgtgtgttttttttttagaaatgggtttatgatcccaacatggttggctcatggtgcctaacacatgcaactaagaatgtagtgtgaagtttcatgcttccccttttttgtttttgttttgtagaggaaaacgcaaggatgagcaaacatgaaaacaaatggtatgcaattttgcagatcaaaaagtttgttgaacgcatatgcatgatgatgccatgactcatgcaaaatgtgaggctgttatatgataacagacaaatgcaggaaccatatgttcattt

SEQ ID NO: 15255 - DNA, 354 bp, Glycine max
caagctttttggagtagaaacatgggactaactcattttatttcaaaaaggaagtcatatctagtcaaggtctaagagaccatacaagtttcctaacgatttctaattatgtgggccattaagtctatcatatgctgacaatagtcgagaagcccgtgaatctctttcggggcggagtaagtgtctgccatcgctttggccttggctaacaatcggggaagtttttgactcccgttcaagggtaagaagcaaccgatccatccacatggttgtctcttggtgtaaagagtcgatcacccttcctctagcctcttttccccgtatacttgggcatatttctccgcaatcctatgc

SEQ ID NO: 15256 - DNA, 382 bp, Glycine max
cttgcttctacactaacaatgttcctgtgttctatgtagtctcctggactactaaaccttgatgtctcgtgcatttttagcctaatcctagccaagcgtcatcctcagatccctcttgttggactaaacttgaccagaactgcattaagacatacataccaacaactaggttatcgtaccccgatccctcgtgaaaatacgataaactagccccgtcctatcaagttctaaggatcaaaccatttcctaatgttgaatgaccctaactaagcatgcatctacgtgatcaaggcaaaagcatactaaaaatgaagtactgatagcacagagaacacatgtaacatcattagatagatataagaggttttacatcaagtacacc

SEQ ID NO: 15257 - DNA, 277 bp, Glycine max
acttgtgttctagaattttatactttcttgtgactgaaattggaattgtaacactctgtgatgcacatggcttgatggtactggcttatatatagaaagagaatgctttacgtctggacatatccatacatattgaggctatgtaacggagtccttatgaaaaccatttccactacttcataattaattggagataggcttgtgagaaaaaatactatttaattgttttcttaaatgcttaatttgttctttgataaaagtgaataatgcttgtaaa

SEQ ID NO: 15258 - DNA, 405 bp, Glycine max
tatgactaaccttcaatgtcaaagccaccttatttttaaatctacaagaaaatatctattaattaacatgcataaacaacaagggcaccatcttgtgcttgttgtagttcttattcggactaataagaaaccaatgcaaggtggtgtcccatcttacaggtagtcaaaagcttgaattgatccctaacccataagttgagtgatggtgagtaatgttcattatcctataatccttataaatgttttttctagtatttattagaatatattaaataaaaggaaaattcatttaatattttaacatttcgaaagcatagaacgaatgtttaatcagaaaaaagtttgaataattgaactgaatatatcctttatgcaaatccttttagttaatgctcttattattct

SEQ ID NO: 15259 - DNA, 292 bp, Glycine max
agcttgccactggatctgatccatcaactgccctaactcctttagactggtggtccctacgctcttgaccttgacttggtagaacctctttttaagtgaaggcatttgacttgatcccatgttttactaaagtgaacaaaaatcggtgcaaatcaaaactccgacatctatcatgggtggaatggatgaatgcatgaagaaatgcgtatgacatagatgcaatttatgaatacgagagcccgggaaattgttttcgtatttaagaacgtggcacggacccctcttggtttgc

SEQ ID NO: 15260 - DNA, 335 bp, Glycine max
ttttattttcaatagatgaagatgattccatggccacctcatggactcctctaagaacaatagcattatttcttgcacttaattgttgggagttggaagccatcttctcaatcaaattcctagcttctgcaagggtcatatcaccaagagctccaccactggcagcatcaatcatactccgctccatgttgctaagtgatggaagcttacttgtggagcttctatggaggctggatctttgagcttcaatgaggtccttcaatggtgatatttcaccatggagatgcagcggaaggcaaatgagaaaaagaaaggggaggcaccatccactatgg

SEQ ID NO: 15261 - DNA, 285 bp, Glycine max
agcttgcctgtccgatgcagcagttatgatggcccgagttatgttggggaacggttactaactctaaatgggtttaggcaaagacaacggcggcataactagcctgataaatgccaaaggaaatcgtgggaagtatggtttaagctataagcccactcatgcagatgtaaagagaagcatcgcgggaaagaagggcggtggtcaaagctcgcggttgagacaaaaatgtgaaggaagcccgccctgccacataattagaagctttataagcgcatgtcttgggga

SEQ ID NO: 15262 - DNA, 335 bp, Glycine max
  unsure (1)..(335): unsure at all n locations
tgttgccgtatgctaagtgtgtgagctagctatgttgaagggttctcggacttcttcggtggtttcaagttccaccctcatatattcttcattttgttgtcgtaagaacaatagtctccttagtcgacggcttcccaacttcaacaaaaaatcatggcgtatgtgtcatatgttaattcggttaggacattaattggtggttatctanggtgtacattggtatgctcagagtatgctatagagtgctttttttcataagccccttaaacttgtcaagtctagttcacagggctttgagaatgacttcttttagttgtcttctgcctgtccgttaa

SEQ ID NO: 15263 - DNA, 379 bp, Glycine max
agctttcgttaagatcatgcatattttgaatcaaatcaactaatagatcagttccaccaacaacagtcgacctatgaataagttcatcctgtttttgtggatgaatctatgaatgaaattttgtaaataaacataataattgacctaatgggagtcatgtgatattaacattaatacaatgtctaaattatatttaccataaataaatacctcaagtgaaacaagtttcactagatatctcgtccatgcaatgaaagtgtgaagtgtttgcctaacatactaaacctctgacataggaaaagggatttgagcatcaccatcataaactttttcaacactcactcttatgacatcatttgcataagggatgttgtgtatg

SEQ ID NO: 15264 - DNA, 418 bp, Glycine max
tataaaactcagcttctcaggaagctacctagtctataaatagaagcatgtgttacacttgttgtaactttgatgaatgagagtcttgtgagacacaactcaaagttcaacttctctccctttttcttccttcaatttcgtgctcccccctccctctttctctccctctttcttttcctccattgaagcatcctctccaagcttcttatccaaggctcatcttggtggtgaagctccttcttccatggcttcttccttaatggatggcgcctcctctcacctcctttcctttgtcttctgctgcatctccatggtggaaaatcaccattaaaggaccccattgaagctcaaagatccagcctccatagaagccccacaagcaagcttccatcaggtaggttacatgcctttgagtttt

SEQ ID NO: 15265 - DNA, 313 bp, Glycine max
  unsure (1)..(313): unsure at all n locations
ncaagctgaataagcttgacatttctttgaaattggtgaagggtctcatatgaagttttgtcatcaccttcgttctcagtgtccccttgtgttgggctctacttctcttactcaagcattacaaattaaaaaatatttgaagtaaaattgtaaaagtaaaatagtaaaatttgttcctaaccattaattttaatccaacggttataattttttaaattgagattctacatttttttttataaattaaagagatccattcccggtatgtaattggtaagatagtgtacctaattttntntaatttgttcaaagc

SEQ ID NO: 15266 - DNA, 362 bp, Glycine max
tagaccaattccctatgaagtctggtatttttcctgtgagttccgtgtctgaagctcctctaaaatgaacagaaaattttttatcattatagaagttcctttttagtctattatcatattaggtgcattagttaggaatatcttacacgtgcaacaaattcttaaggtttgcaaatgtggaaggaattggaccgctaattcctgaactatcaaagtaactgtaggcaaaattctttgaaattagtattgtatcatgataaagatatacaactttgcaacaaaatgtaatttcgaataaaaaaaaacctaacactttacattatccaagaccaattcattattcaaaaaaatgtatacttatg

SEQ ID NO: 15267 - DNA, 374 bp, Glycine max
agcttcccagagaaggagtccacggttgaaatgcttaccacctcaaaagactggaaaaaggtctctaatgactcctctacggcttcgacataaggcatagaggatgggcagctcaccaagatgtcctcctcgcctgatacgataaccagatgcccttccactacgaatttcaacttttggtggagtgttgaaggaacaacttctactgagtggatccacgggcgccccaacagacagctgtaggggggttaatatccattatttggaaagtaacttgacaggtgtgagggcctatctgtattgggagatcgatctctcccctaacctctcggcgggtgccgtcgaatgtgcgaaccaccattgaactcggcttt

SEQ ID NO: 15268 - DNA, 402 bp, Glycine max
tgactcacaccaaacatgacaagtttagcatgctttcaacaaattccttcacaaataacttccataaggcataaacctagtaaaactacccatcatatctcccaaacatccaatacccacgaaattatgtgagaaagaagtctacccaaacctggaatttgaagtcccacaacgtagatatgcgcttcccgactccgaaaatggcttcctttcacgatttggagcagaaatggtgtgcaaaggttggagctttgatggagcttcaatggtgaggaaaaagaagagaatagcaacgtgagggagagagggagaaaagcttctgaacttttgggctgagtgaggagagagaacatggctttgtgttttaagaaaaggcttttctttttttttttaaaaaaaaaa

SEQ ID NO: 15269 - DNA, 362 bp, Glycine max
  unsure (1)..(362): unsure at all n locations
agcttctattaagctgaaccattttatcaataaacacatgttgagttttattcagaaaattagagtttatctcttttatcttagtgagagtgattctcctaaattcttgagtgattcaagaacaccctggctgtatcaaaggactttcacaacctttgtgtgttgccctcgctggaaagagtgattctttccttcctatcatctccacccttgttctttcaaaccacaattccagaaaatccacctctgcccaaaattatctcgtgaccataactcccatttcacacactcaaattaagtgattcttgagcctanattgaatntcaaaacgagacctttcacctcggtttggaatcacctca

SEQ ID NO: 15270 - DNA, 277 bp, Glycine max
  unsure (1)..(277): unsure at all n locations
tcctctgccgtaaaaaagatattatcggccagtgtttgtaaaaaaattgcgcaatgtcggctgaaaaatatccgtcggggctatttaactaccgatgtcggctattgttttttctattccacccctgaattatatttggatgatgcctattangaaatgttcggtcggggtcatccggtcatgcttctttttgaggcctcgatctgtcgtctttcctagccggccgacgtcggctagcatttttttcgatccatatctgtgtgaatcatgttttttt

SEQ ID NO: 15271 - DNA, 358 bp, Glycine max
aagcttgttaagcctcccattctggacaagtgttgaccgggctgcttctgttaagttgtcctggaggacatactttttgttttgcaggcgaggtttaatgtgtcaagtgaggaaagcctctgtatttgacaactctgttcttttttgacagttggagaacacattgaagacaaatgttatgttttctccattgatacaagcctgcgtggcgcacacacaacactcatgcatacgtgtcactcgtggagtgggcacgtactggagacgtgatgatgtaagctccattggagcttgttatcctaggatcttcttcatcaatggattcctttgtttcttggaagatgaatggtagcggaat

SEQ ID NO: 15272 - DNA, 354 bp, Glycine max
tgtaaagtaaaatacttcttagatagaagtgtgattttgtaatagaaactgcaagaaacacactaaaggggggggggttgagtagggtgtttaccgaagataaaagctttttgcaataacacagatagtatgaatcatacaaagataaacattggtcgtccactgaaaataaaaaattatgtagtgaagaacaaagtaattgtctagtgacaagtaaaaagatctttaaagagtttcaaaataagcacttggtgtaaagtgatgttagaaaatataataagaatactcgataaaacaatatggagagaagtagaaacacttggcttatactggtttgctcaacctgagctacgt

SEQ ID NO: 15273 - DNA, 284 bp, Glycine max
aagcttgggaggattgatgtttacctgttgttgacagaaacgaagatatgggctacgtgggagtacgtgagctcagttggaggtgggcaacaggggatggtgggtttatgcgcgcattgtggatgtggaaaacttgttgtgcaccattgcccgaccgccatctattaccacatgtgatgggtaccccataatcctacaagcttgagatgaagaagtgtttaagggtgaaacttcctgcttttattgttgaccacagagaggtacctgtagatatgtcgcggggg

SEQ ID NO: 15274 - DNA, 400 bp, Glycine max
tctatataagctgaaccattttatcaataattctttttgagttttattcagaaaattagagtttatctcttttatcttagtgagagtgattctcctaaattcttgagtgattcaagaacaccctggctgtatcaaaggactttcacaacctttgtgtgttgccctcgctggaaagagtgattctttccttcctatcatctccacccttgttctttcaaaccacaattccagaaaatccacctctgcccaaaattatctcgtgaccataactcccatttcacacactcaaattaagtgattcttgatcctaaattgaatttcaaaacgagatctttcacctcgttctggaatcacctcatttggagccctgtagcttccgttattgccatttctatatttc

SEQ ID NO: 15275 - DNA, 347 bp, Glycine max
caagcttctagcgtacccgctattggtgctcaaaaaatcccaaaaacaaatccctcttattactagctattttgaattctttagttcctgaatgtacaaccttcaaattgttgctcattcccgtatttgttttctgcaaaaaagaaaattaatctgaaacaattcacgctgaaatgttattcgtattattactcgaaccataaggaataacagctaaacaaggtatttataatgtaacttttaaattatgtggtatttttttaattacaattttacttcaatatctaattttgctaatctacttacgtcgttttttaaatataaatatgaatttaaggtgatctact

SEQ ID NO: 15276 - DNA, 366 bp, Glycine max
tgacatgctattgaacaagcagttatatactctgcttcacaagtagagagtgcaacaacatcctgtttcttagagcaccaggagatgggagcacctccaaacaataaaacatgccccattatgctttttctgtcaagaacatctccaccacagtctgagtctgaataagccacaagttgtggctcaaccttctctttctaatgtggaaatagaacaccaaagtctagtgtgctctcaagtatctcagtatccttttagctaccatcatatgtgaatgtcttggatcactcataaacctactgataactcccacattgaaagtgatttctggtctggaatgacaaatgaatctgagactcccaacaa

SEQ ID NO: 15277 - DNA, 338 bp, Glycine max
caagcttcaaaccacagcaacacaaaatctatgtgtccaaaacccctcaatttaatggattttctaggcttgagaagtcaaattgagaatgggacaaatttgaagcaaactctcacctcacacaagtctattacatccatttaaacttgtttaaactggatttacgcttaaaatctcaccgaatcaaaatttgactcttcaacacccaaatttaccctacaaatggctctttggtcactttgggcatttgtttttctctctagcacagcctaacctttttcattagtcctaaatggaatttaaagctaaaattaacctcctctaacctttaaatacta

SEQ ID NO: 15278 - DNA, 291 bp, Glycine max
tctagccaaatggacttaccttgaattaattcctttgatagcccttttgagccttgtttccctttccttgttttgaagctcactacaagccttaagtgaaaaaccatgatattaccatatccttaaggaattttggagctttggaattgttttgggaataagtgtgaggggtttttgtttcattggacaacttgttttgttgactatgcttcatgatgtattttgggccatacttgatgtacattgtatattggttaaatgttggacatgctgaatgaaatgttgtttctc

SEQ ID NO: 15279 - DNA, 301 bp, Glycine max
acttcagaggtaaattgacatgttttgctttccatattgctgtattttctgcataaaatatgtaaataaccaatctatctttcttattcttaaatagataaatagaataggatagcccctctgaatcatcattaatttaagcgctggtataatattataggctgcttcaaaagaaagtattcatgattgctataagtcgtgaatatgtgaaggaagtagataaacaacacctacatatataggccttcgtttgaagtattgcgattgtcaccccctaaagacatatgcatcaatacataca

SEQ ID NO: 15280 - DNA, 403 bp, Glycine max
ttgagagagaatcgggtatttgaccaaccaacttgttttgatgcagcataagttcagttagttcttttaattcagagagcttatcaggtattggaccttctaatacatttgcatatagagagagcccctgaaggtgagaaagtttggacagttctggaggaatttgacctgaaaacctattttctgaaagggataaagtgacgagttgattcaagtttccaatctctggtggaattggtcctatgaaagaatttgcattcagctgcaggcgtatgagtttagacaggttctggatacctgattttatcaatccactgaagttgttcattgccaaacttagagtgctaagatttgagcagttatagaggtcatctgggatttccccagtcattttgttggatgt

SEQ ID NO: 15281 - DNA, 363 bp, Glycine max
gcatgcagcttttagattatagtttttctaggcctatttgggtctgaaccaacccacttctccttgggtgagaaggcacctccttcaacatgagcaccgcacccaccataggtatcaatgatgatcttcctcccaatgagtcctgcatctacatgaggttctcaacgcaagctgcattaattctcacatattcaaaaccatgcccaaaacatatttattcgatatcacacagatcaaactaacttatatatgatcaatacaacatatattatacaatacgaattatatataatattgtgcttatttcttatttggctgatcttaatactacacccttcatccacaaagcagatatgaataatt

SEQ ID NO: 15282 - DNA, 383 bp, Glycine max
ttctacatcggtcgtaaaaggaccgatgtataacatgtgataaacaaagtcgtttctttgaaggtagcgatgtagaaatcataactttctacatcggtcataaaaggaccatcgtagaacacatcataaaagaagtcgtgtctacaacaccatcgatgtagaaaatcacgtgtttctaagacggtccttttacgaccgtcgtagaaatctgccctctacaacgacactcgtttcaaagacgggcgtccacccgtctttgaaatacgttttccaccgatgtaaaatgagatttttctagtagtgcaggcttgtggtgcatgatatactgcccattctcggaagctcttgtgagagcttaagagattggaaaagttggatatagt

SEQ ID NO: 15283 - DNA, 368 bp, Glycine max
agcttgcacagagaagcactaaacattttttgcccagttgccaaggcaagaacaatagtcttttccattaaatcctagcaatagataatgttatcaattttatagcagcaatattagtaagtgggaattttataacagttacaacaagagggtcaatcttacctgcagaaagtcaacttaatattttccttcgtgctcatttgatagctcattgaccaaatttcgacagttttattaatatttccagcacatatgtaacacataattgtagctaatgtattactagcccccatgagttttgaagcaagtgtgtcacaaagcatagtccattcatctctctcagcaaactgttaacatgtgataacatg

SEQ ID NO: 15284 - DNA, 393 bp, Glycine max
tataagaacaaaattgccttaatcatttccaaatatgcatgtgaattaggacgcatcaacaagaatcaagccaaggctattgtgcaagcaatcaatggggcaaaacacaccaaatgattataatgatggatggctcaaattctcacaaaggtaaaatcatcactttcaaattgagctttcaaaactatcatgacatgtagagaagaatcaaggatttcaagtcacaaaatgtcaagaacttttattttcaaaacaattacccatttcttgaacatatcctatagttcaaagaaaaacatgcaaagtcgtacgtgcacacgaaattgacccaaaatattaaactgaaaatccgacgaaactaacaacattaacaatataacacaactaacaaat

SEQ ID NO: 15285 - DNA, 372 bp, Glycine max
  unsure (1)..(372): unsure at all n locations
agctcgctgcaagctcctgagggtctggatgagtatggcaaaattgggagtatgttgaatacctctccccaggctccaagaccactggggtctttaaaaattcatttagtgtagtagcatcgaacttgatcagcttcccctgcaccttacattgcttcggggagcgatcctctggatcatagaggtttggataaaattccttgaccagggctgagccgtagttcaaaggcttgctaagccgtagtgtagtggcttagcaagttcatacgaaattgcaaaagtttaaaaaaaaaatatgatgaactcgcttagcggatagggtgcgcttagtgtgttcatcaaaaacccaaaagatcacaaanatggatgaac

SEQ ID NO: 15286 - DNA, 376 bp, Glycine max
tgtgcatccaataccatgatgaggatgtcccttatgttcttaaaactggactgatccatttgcttccaaagtttcatggctttgcaggtgaagacccacacaagcatctgaaagaattccatattgtctactccaccatgaaaccacaagatgtccaggaggatcacatatttctgaaggtctttcctcattctttagagggagtggcaaaggactggctatattaccttgctccaaggtccatcacgagctgggatgaccttaagagagtattcttagaaaatattttccctgcttccaggaccacgaccatcagaaaggatatttcaggtattagacaactcagtggagagagcctatatgaatactgggagag

SEQ ID NO: 15287 - DNA, 364 bp, Glycine max
agcttgaacaaattcaaatgacaattactttttactcgcatgtccgattgagtcccgtaatatatcgagacgctcggaatggaataccgaagctctgagcaaattcaaacgacaataactttttactcggatgtctgattgagtcccgtaatatatcgagacgctcgaaatggaataccgaagctctaagcaaattcaaacgacaataactttttactgggatgtctgattgagtgccgtaatatatcgagacgctcgaaattgaataccgaagctcttaacaaattcaaacgacaataactttttactcggatgtctgattgagtcccgtaatgtatcggaaccctcgaaatgaatgttgagc

SEQ ID NO: 15288 - DNA, 383 bp, Glycine max
ttgtgaagctcctgttttagctttacccgatgtttctcatccatttgaagttgaatgtgatgctagtggagttggcattggggctgttttgatacaaaacaaaaggcctatagcttatttctcggagaaattgggaggagccagattgaactattgcacctatgacaaagagttctatgccattgtgagagctcttgatcattggaatcattatttgcgttctaatcactttatattgcattcagatcatgagtcattgaagtatatcaatgggcagcagaagttgagtccaaggcatgctaaatgggttgaatttcttcaatcttttaatttctcttcataatacaaggatggtaagagtaatgtggtggctgatgcacttt

SEQ ID NO: 15289 - DNA, 340 bp, Glycine max
agcttcaacagtacaatggaaaactttactctgagctttcgtcggttgaggatgaacttaaacgcgtagaaaaggagaaggtttttgtagtggagaacatcaccttgttaaggggtcaacttactgtatccggtgtgagtttgctttcacatgtgaactgtttcaattttgaactgaactagactatatacttaatacttgctgtcatagtagatacctaaaaaagctttgtgatgagcacaaaaatattggagctgcaatttttgtggacatggattgattattaaagagaatttggtgatttttaccctcttcgcatcaactggtttgaatgagtgat

SEQ ID NO: 15290 - DNA, 393 bp, Glycine max
  unsure (1)..(393): unsure at all n locations
taaatntagttaaatttgaaagtgtacttcttaggatttatctagcatactactatatgatctatatcaactgttcatagcagttgagaaagttaaattttgtatacctgtaagaagaatgcctacttaggatccttattgagttggagttgggtatataaatagatttgtgtttacttctacttctatatgcctctctaaattaagtcttattttttttaacatttacaactaccttctttttaagtgaacacaatgtaatgttnttcaaacaattaaggaagattagtataatgtataagaggtattggaataatatttttgaaataattgaggggttagtgtaggggtaaaaaaagtatgaaaagaatgtgaaaatttcactaaatctaa

SEQ ID NO: 15291 - DNA, 296 bp, Glycine max
agcttttttggaccttgaacaggcaactaactcctctttcaaaaccatgctatgtgctcgcgactggtccctctcttcccttcgcagcttgagttcatttttgctaccccacagagctccgcgaaatttattccggccatactcttccttgcgagccctcttggtctcttgttcaagggctcttgcggtagttgcattctcttcccgtaatccggcacactccttccggatgtgtgtagcggccaacttgaacttctccctggcaagtttcgcctttcctacttcgctttgagagc

SEQ ID NO: 15292 - DNA, 392 bp, Glycine max
tcttatccaaggctcatcttggtggtgaagctccttcttccatggcttattccctagtggatggcgccgcctcttacctcttctcctttgtcttccgctgcatctccatggtggaaaatcaccattaaaggacctcattgaagctcaaagatccagcctccatagaagctctacaagcaagcttccatcaagtggtaatcagagcacaagagcttcaagtaggtgctccttaaacctccattaatttttttgctttaccttctcttcgattgttgtttcttcattttttctccacgtatctcctcacatgtcttgtgctaaatgttgttaacatgattctttaaattttccaccaattaaacttgctatagaagctagaattgattttctat

SEQ ID NO: 15293 - DNA, 384 bp, Glycine max
agcttatgtgcaaatatttacaatatacctcctcaacctcagcagcaaaatcaaccacagcagagcaattatgacctctccagcaacagatacaatcctggatggaggaatcaccctaacctcagatggtccagccctcagcaacaacaacagcagcctgctccttccttccaaaatgctgttggcccaagcagaccatacattcctccaccaatccaacaacagcaacaaccccagaaacaaccaacagttgaggcccctccacaaccttccctcgaagaacttgtgaggcaaatgactatgcagaacatgtagtttcaacaagagaccagagcctccattcagagcttaaccaatcagatgggacaattggctacccaattg

SEQ ID NO: 15294 - DNA, 401 bp, Glycine max
tctccactaatctagtgcttgcaacattggtataacttccaccatcaatgattagagaacaaacctttccattcaccaaacatctagaatgaaaaatgttttcattttgtgtatcatctctatctttgcacaagcttcccatgagtctccttaccatcaaaagatatccctcttccggtggaagaaaaccatcatcctccgcttcactagaggaactatgagaactcttagatcactatccacctctccattcttcaacacaatcatgttccttttgttagaatattgggatgaaatatgattatttcccaaacacttaaagcatttaatggaactagttttattggaagggggttgagtagcagaagtaggattacctcttgaagacttccttttaagat

SEQ ID NO: 15295 - DNA, 370 bp, Glycine max
caagcttgcctgtccgatgctttattttgatggcccgagttatgttggggaacggttactaacccgaaatgggtttaggcaaagacaacggcggcataactagcctgataaatgccaaaggaaatcgtgggaagtatggtttatgctataagcccactcaggcagatgtaaagagaagcatcgcgggaaggaagggcgatagtcaaagctcgcggttgagacaagaaagtgaaggaagcccgccatgccacataagtagaagctttataagcgcgggtctgggagacgaatgtcaagtggtcgcaatatacgaagataatgttccaagtacattggatttggtacgaccttgccctcttgatttccagct

SEQ ID NO: 15296 - DNA, 397 bp, Glycine max
tctcccccaattttctataaatagggggagaagtgaagtgaaaaagggttcagccccttaggcacttctctctctttcgaatttgcttggaaaaattgtttctgtgaagaaaattcaagccgaggcgcttccgaaacgtttccgtaacgtttccgtgagaaatttcatgaaggtttcgaccgttcttcaagattcatcgttcgttctttgttttcttcagtcttcaacgggtaagtacctcaaaccaagcttttcaattcattctatgtacccatggtggtccacatttcgtttcatgtatttttattccccttttcatttactttttatacccccttttgacgtgcttaagccatttatttaagtcatttctcgcttaatgtaaaaataaaataaa

SEQ ID NO: 15297 - DNA, 335 bp, Glycine max
caagcttgttcttgattttccctcagttctttaacaagctttgaacaatatacttggcctttatttaactgtctttgggcttggcggtcacgctcaacaaagtactttcgatacctactgtacgttgatttcaccaatgctgttatgggaatgttgcgacaatcctttaaaaccttattgatacattctgagaggttcgttgtcatgtggccatatcgacgtccttctctatcataagccatcgtccatttttcctttgaaatgcaatcaatccatgtggctatggctggacttacttcaagaaatatttctaaattttgataaaaaatgtgctt

SEQ ID NO: 15298 - DNA, 387 bp, Glycine max
  unsure (1)..(387): unsure at all n locations
ttagttgttggtgctgatgttagtatgattggaccgtttggtgtggggttctactctacatatcttattgtcgaaaaggtcattgttaccaccaagcacaatgatgatgagcaatacatttgggagtcccaagctagaggttcattgatttttacctgcttccatgtgctactcgtgccaaccatattctctatctccctctacttttccttacctctcacatgattcattataatgttatgaatcttgttatctcaattggattccttgattttcattttaatagtcgagaactaactctgttgtatttgtatagatggatattntgagtatttgtgctttataataactattctttcttcattacacaactctagcatatcctgg

SEQ ID NO: 15299 - DNA, 150 bp, Glycine max
tcatacaaattgctcaatcaaatcatttctcaaccactcattttcatgcaaaaaaactcactgcatatcatttcacaacaattactgttcaaacacgcttttgtgtacaaagccaacaacttcatatttctgaaatttaaataactctaa

SEQ ID NO: 15300 - DNA, 393 bp, Glycine max
  unsure (1)..(393): unsure at all n locations
tgaggttangtgttggtgatcaaaggagactatttttatctccctttcatgttggttgtgtgagccatgggatggtaaacatctcttcttccttccttggattccatttttgtttttctcatagagcatccattggagctcatgaaaaagttttgtttttggatttttttattccgtttgtggtcgttttcgggtttagggcgatgttgttgtgatgggcttgccattggagtcaaggaaaactttcatcttgaatccaaagccctctttttttttcctttctccctctcanagtttgtttcttgggttatagagataagtgaagcttaattcttatttatgtgtcctattgcttggaattgttgatttgcaactttgaatctcatatgttga

SEQ ID NO: 15301 - DNA, 318 bp, Glycine max
gcttctcgccattgacaatggtgactcccgtttctccccaatgcttgtaacagcatcaatggaaaaacagaccccctttacaaatacttcgaaaagggaccctgtttgataaatagtttataaaaagtatactacttactcatcaatgccaccataaaagtcttttgccattaatggagtttgctaagttcttccaagcgttatttaaattgaaatacttattaataacttcaatcatttttttgttgttttaaataaatttactttccctaaactagttgactattttgtttttttaattttaacaaccattttgta

SEQ ID NO: 15302 - DNA, 363 bp, Glycine max
  unsure (1)..(363): unsure at all n locations
tcaaacttacaacaaaggagttgagcaggtaaaatagattcgtcttcaaactcttagaggtgactttgagtgtttgtttatggaggagtccgagtcaatttatgattatttttctcgagtattggccgtagtcaatcaacttaaaagaaatggtgaagatgttgatgaggtgaaggttatggaaaaaatacttcgaactttaaatccaagttttgacttcattgttaccaacattgaagaaaacaaggatttaaagaccatgactattgagcaactcatgggttccttacaagcacacgaagaanaacaaaagagaaaaattaaacaaaaggaggctacggagcaactactacaactcaacgt

SEQ ID NO: 15303 - DNA, 126 bp, Glycine max
ggcgtcgggccgtgaaccaattcttatgttgagggcttatcattaattttgtcattaggacgatagatccattattcagcgtaacatcaagcgataaaggcaccaatactggcttaacaaattacc

SEQ ID NO: 15304 - DNA, 350 bp, Glycine max
agcttttctttcctacattgaaccacgaagttgccaatatgcttttcagagtaaagttgtatataatatgcttgataatctattaacttgaatgattaaaatgattatttcaacaagtcctctatttttttctttgattagctatgaacatttaactatatagtcaatgtatagtatacatactaataccattgcaaatataaaatgggaaacaaaatccattatactcacttagcacttccatcatttgaatcatcatcaacccttatgggcactgcctcactggtgcctcactatctaaagtttattcattcaccaattcaacttaagattaattcaaattaaaacat

SEQ ID NO: 15305 - DNA, 364 bp, Glycine max
tgacaagggggtcatggtgagtcattttctctttatctttctttcattcacaaataattaataaggttaattaaatttttaatcccttaaattttttagcctccaatttttaatctcttaaattttttttataaattttaatctttcattaatttttttatcactttacttcttctaaattattttatctatttttaattcctcatttattttttattattcaaaattaatcttaaatataaaataaacgaggaattaaaagtgagcaaagagaataattttaaataataaaatggaaaaaattttgtgattaaaatatttagcaaaaatttattaaggacttaaaatttgaatttgaaaaatt

SEQ ID NO: 15306 - DNA, 309 bp, Glycine max
agcttctgttatgaatttcgagtgtctcgatatactacgggacacaatcggacatccgagtaaaaagttattgacatttgaatttgctcatagcattcgttgtcaattacgagcgtctagatatattaaaggattcattcggacatccgagtaaaaagttattatctttttattttgctcagagcttctgttttcaatttcgagcatctcgatatattacaggactcaatcggatatccgagtcaaaagttattgtcgtttggatatgctacgagctttccgtttcaattacgagcgtctaatatgcta

SEQ ID NO: 15307 - DNA, 377 bp, Glycine max
agctgctaacccatggaagctcctatatatctcccacactttttggggtgggccattcttggatggccttgattttctcagggtccacttggaccccatttctaccaactacaaaacctaagaaaactatattatctacacaaaaggtacacttctctatatttgcatagagggtgtttttcctaaggactgaaagaacttgtctgagatgtcctaagtgatcatctaggctcctactatacactaaaatatcatcaaaataaacaactacaaatctacctatgaaatcccttaagacatgatgcataagcctcataaaggtgcttggtgcattagtgagcccaaaaggcatcactagccattcatacaaaccaaac

SEQ ID NO: 15308 - DNA, 400 bp, Glycine max
gacctatgaaactcagctttataggtgaaatcaggtgtagccatttcccttataatcctttcacggggtggaggttgtgccatgtttctcagaatgttcaaaattataatgctcaggatgctcaaaaggtactaaatgatgtctaactaatctatgaaatgtcctatctatcttaggatcaaagggttgtaagtcaaatggatttcctctagtcatacactaaattcagcatgcagaattagttaccttcttaagcaagtaacaatgtaggtttgaactacagctaccatcaaatgatgtccaaatgacttgaaatattgtgagcaaccttatacaatgatgagaagatagcacataaaatttcaaacaaaaattcaaagtctaactatagaagctaaaa

SEQ ID NO: 15309 - DNA, 370 bp, Glycine max
agctctggtgggacatcttgacttgctttccaatctgacattcaccacagattctgccttcttctattttcagattgggaatgcctctaacagcacctttgtcaatgattttcttcatgcctcttaagtgcagatgtccaaatctttgatgccatatattgacttcatcttctttggagactagacatgtggaggagtaactggtttcttgaggtgtccataggtaacagttgtcctttgatctgctgcccttcattaagacttcactcttctcatttgtcaccaagcattctgactttgtgaagtttacattgagtccttcatcacacaactgactgatgctgatcaagttcgcagtcagtccctttac

SEQ ID NO: 15310 - DNA, 406 bp, Glycine max
  unsure (1)..(406): unsure at all n locations
ctttcgattcattctatgtacccgtagtggtccacattgtgtttcgtgcattnntattctcgttttgtttactttttataccccctgttgacgtgcttaagccattttacttaagtcatttctcgcttaacttaaaaataaaataaatttccaccgaacgtttgaattgtattatccattaacttcggttaaaataaattccgaccgttcggtcgtgccgtaaccacgttggaaatcaaaaagaggtaaaaaataatataataatcaaaaagacatcttttagtaaaataaagcggaaaatcaatcggacgttttctctttgggatttctcattcttaatcgaattgattaataactaaagtgaaactaaaggctaaaatcaattcgcctagtcaagctcgtccat

SEQ ID NO: 15311 - DNA, 293 bp, Glycine max
agctttcgaatcattctatgaacctgtagtggtccacattgtgtaacgtgcattatcatactcgtcatgtttactttttatacccccttgtgacgtgcttaagccattttacttaaaacatttctcgcttaacttaaaaatgaaataaattttcaccgaacgcttgaattatattatcccggaacttcggttaaaataaattccgaccgttcggtcgtgccgtaaccacgttggaaatcaaaaaaagggtgaaaaatatataagtatcaaaaagaaatcttttagttaaataa

SEQ ID NO: 15312 - DNA, 286 bp, Glycine max
agcttcaagggaagagagagaccattcacgatctcatagcatggtcttgaaaaaggagttagctgcttgctcaaggtccaagagaagcttgtctcaacgtttatgcgaaacagagaccaacatgttagccatcgtcagcaagtaccaagaagaattaaatctagccacggaccacgagcacaaagtggcgtacgagtatgcctgagtgtacccagaataggaggctagaggaagggtgatcgacttgttacatcaagaggcaacaatggggatggaccgattgctc

SEQ ID NO: 15313 - DNA, 395 bp, Glycine max
  unsure (1)..(395): unsure at all n locations
ntaacctcatcgtccctcacagtctttagatttgtgagccaatccaatccttgtgttcggactctcagccacttatgatagctgccgatgatcccattactgcttcccctaagctctctgtcctttcttcacgccgcatcccatgccttgcgaactccttggagtaccctcgcgttgtggtcactaaaaccccgtgcgatgaaaggcgtgatgctttcgtctaatggcgctcctctcatggggtagccaagctgtcttatggcgagaacgggattataattaatacaaccccttgttcccatcaaaggaacatttggacatccttcgcatgaagatagaatcttgattcttccttccttctagcgagggaaccaattaacagacgcccccccatg

SEQ ID NO: 15314 - DNA, 346 bp, Glycine max
  unsure (1)..(346): unsure at all n locations
agctngcttaaatttacattgatgtttgtatttattggaggaggttgtatgccatttttgttttaagggtagcatttcttggtaaaactaactttccaaatgtttgccttcgcaggaaatggccccaaggaagcttgcctcaaaaaggaccaggaaggacaaggtggtcgaaggaactctttctcgctcctgattatgacagtcaccgctttatgagcggtgcacaccagcatcgcttcaaggccatcaagggatggtcatttctccgggagcgacgcctccagcttagggacgaaaagtatactgattttcatgaagagatatggcacccgccgtggacattact

SEQ ID NO: 15315 - DNA, 391 bp, Glycine max
tcatgagagagtcaaagatcaaattgagaggaaaagtaattgcttgctaaacaagccaacaaagggagaaagaaggttgtcttcgaacccggagattgggtttgggtgcacatgagaaaacaaaggtttccggaacaaaggaaatcaaagctttatccaaggggagacggaccatttcaagtgcttgaaagaatcaatgacaatgcttacaaagttgagctgcccggtgagtataatgttagttccaccttcaatgtctctgatttatctctttttgatgcagatggagaatccgatttgaggacaaatccttctcaagagggagagaatgatgaggacatgaccaagagcaagggcaaggatccacttgaaggacttggaggacctatga

SEQ ID NO: 15316 - DNA, 363 bp, Glycine max
caagcttaatcaattgaaaattgacggtgtgggattttccctggactctactaggggcaatattccttggcacccttaatcatgttcaatttgttggtaagtttaggtcttttaatccaaaaaaggaaacttggttaacatgtgagagtaatttggataaatgaaaatagttttggatgttatatgcatgagtatttcaatgcttgcactactacgaaagtgtgttttttatgacaggtgttctacttttgtaattatgtgtctgaaaaatccttttatgatgcacattctaagacggttattgaaaaccgccttagaatgtgtgttcctcataaaaaattatgacgggttttattaaaaact

SEQ ID NO: 15317 - DNA, 381 bp, Glycine max
  unsure (1)..(381): unsure at all n locations
tgaatagcagatccagtgcactcagcataatcatgttcaaccacaatgttccctaaaaattttgtgggattgagtaactaaaaagtaatgacaaaattgattagtttactaattaatggatgcctttttttatcggttaatgaatatgtacttgttgcatgcattactctaagtaagttggcataggaaaaaataaataaaaaagaagcacaatcattactctaagtaataattatgtccacttcaagatggagttggatggaattatggaaaacaaagtaagaaaagatcaagagaaaataaagtgatggatataatattgcaatgaanagattaaaaagagaaaataatgcaaataatatgacagtgtaaatagaagta

SEQ ID NO: 15318 - DNA, 377 bp, Glycine max
aagctttataaaatcatccgattacaatttatatatgataagttaattattgagttttaaaataattattttaaaccaattaaaacaataatttgtgattagataaaaatatgaaattagtttacactttattaatttaagaaaacaattcaataattctatatatatcactaaacgaagtacaacccacaataccaaagacatacaagcaaatggaaatattaagtgacacctcatccgcatcgatgattaggtacaaaatccttgaaccgaacaaaaaaaaacaatgtcttccatccacataaaccgatcagagacaccaacaacttattttccaagtcaactttttttatgttttattggatgaaaatccatat

SEQ ID NO: 15319 - DNA, 384 bp, Glycine max
ttgtgtaatcgattacatggttttggtaattgaataccagtgacaagttttgaataaaaatcaaaagatgtaactcttccaatggttttcaggttttctcaaggtcataactcttccaatggtgttcttgactagacatagagagtctataaaagcaagaccttgacttgcatttcaactaacttttccaatttacttttgaatatcttcttcttcctttgccaaaagctttcaaagttttctagtttccaaaccttgttctttcacaaaaacaaaagtgtgttattcatcttttcattctctcttctccctttgccaaaaagaattcgccaaggactaatcgtctgaattctttttgtgtctctcttctccctttgccaaaaa

SEQ ID NO: 15320 - DNA, 330 bp, Glycine max
aagcttgtctcagcgtttatgcgagactgagaccaacatgctagctatcatcgccaagtaccaagaagagttaggtctagccacggcccacgagcatagaatcgcggatgagtatgctcaagtatacgcggaaaaagaggctagaggaagggtgatcgactctttacaccaagaggcaaccatgtggatggatcggtttgctcttaccttgaacgggagtcaagaacttccccgcttgttagccaaggccaaagcgatggcagacacctactccgcccccgaagagattcatgggcttctcggctattgtcagcatatgatagacttaat

SEQ ID NO: 15321 - DNA, 401 bp, Glycine max
tgaagtgagaaagcatggaagagtcagtcttcctacttttgtttgttgaccatagagtggtacctagagatatgtcgcgggggtcaggagaccttggggacgtcaagtggggtgctattgcccaaaaccaagcttgaccaatcccgacccaatccgggcatagtcagtcagtgagaacctgtgacgtacctaaataagcgagctcctggcagtcaaccaataaaagaacaaaatccacaaagcaaagaggcttgtgtggcggctggccagctatgaatcttgagtggtatatggaatatggcctctggtaatcgattaccaagggtgtgtaatcgattacaaggcttaaaaatggaggcaggatattaatatggcctccggtaatcaattaccaagggggt

SEQ ID NO: 15322 - DNA, 325 bp, Glycine max
gcaagtggaagctcataatccttcacgtgcccatattgttgctccttcatttgggcctcgtaacctaatgttagaagttactatttgtaacaccgaaggacttgaaactttgttctcaagcaatatacctaatactagcacgaaaataccctaaactaagaaagctaattggactgatatgtttatatattaaaattttttcattaattgacaatttggtaagcctgaatatatgagatttatggacgagttaagttagtgctgtgggggttcaaaatgctagacaaggtagacattattacttcaaaacagaacgcacttacct

SEQ ID NO: 15323 - DNA, 408 bp, Glycine max
  unsure (1)..(408): unsure at all n locations
gtgagccaaaatcccaacttatcataaaccttgacccagggtgagaatgtcaatccttgccctcggaagaaaacaaaaaaagagaaaaggaaaattcccaatcaaagagtgggagaaagtaaaaaaaagaaagtccccgatcaaagatcgaaagaaaacataagaaacatgcagaaaggtctttggaccagacaatatctgaacaatacagaattgtcaccaaataaacaagaaaaaaggaaaccacgacctaaagtggccctctccctttgattgccaaccaaaatcctttgcgctagcgactntctcgccccgcactaaacaaaaacagaaaaggaaaagggcaaaacacttcaaagccaaattcccacctaaaaatcattctcaaaaaagtcctattgatccatg

SEQ ID NO: 15324 - DNA, 356 bp, Glycine max
  unsure (1)..(356): unsure at all n locations
agctntatgagtgtccacatggatgtatgcatgatcagttttgcataaatttctaatcatcattattatatgcatgtcatagaaatgatttggggcattcccttattcttgaaccgctggctaaacaaatatactgacatgcgtaatgtctcgccatccgtaggccttttgagccaaacctcaacattttggccataaccttgacctatgatggaaatttccaaccttaccattggaagaaagaatggaagaatcttccaaaaaaaaagcctattttaccttgggttacaaatgtgcttcaaaaggaaaggaataaagtccaccaatcaaagatgggagaaaaacaaaagaaaaaa

SEQ ID NO: 15325 - DNA, 369 bp, Glycine max
  unsure (1)..(369): unsure at all n locations
ntaacctcatcgtctctcacagtctttagatttgggagccaatccaatcctcgtgtttggactctcagccacttatgatagccgccgatgatcccattacggcttcccctaagctctctgtcctttcttcacgccgcatcccatgccttgcgaactccttggagtaccctcgcgttatggtcactgaaaccccgtgcgatgaagggcgtgatgctttcgtctgatggcactcctctcatggggtagccaagctgtcttatggcgaggacgggattataattaatacaaccccttgttccatcaagggaacatttggacatccttcgtatgaagatagaatcctgagtcttccttccttcttggagaaaa

SEQ ID NO: 15326 - DNA, 359 bp, Glycine max
agcttgagatgaggaagtgtataagggtgaaacttcctgcttttattcgttgaccacagagtggtacttggagatatgtcgcgggggtcaggagaccttggggatgtcaggtggggtgctattgcccaaaaccaagcttgaccaatcccgacccaacccgggcatagtcagtcagtgagaacctgtgatgtacctaaacaggcgagctcctggcagtcaacagataaaaggaacaaagaccacaaagcaaggaggcttgtgtggtggctggccagctgtgaatcttgtgtgatatatgggttatggcctctggtaatcgattaccaagggtgggtaatcgaatacaaggcttaaaaatg

SEQ ID NO: 15327 - DNA, 390 bp, Glycine max
  unsure (1)..(390): unsure at all n locations
tgaaggtgtgtaacccactatttccgtaatagaatattggtaacatgtctactatcattgngataatctttttctctgttattgggggcgctacttgagctgccaagtctctccatctttgggcatatcctttgaaagatctgtgccctctttttgcacatgttctgtagttgcatcctatccaaagccattatactgacacagcctaacgaaggcaaccattaggttcttccaagaatggactcgggaaggttccaagttagtgtaccaggtaacagctacctcagtaagacattcttggaaggaatgtatcagcaattcctcattttttgtgtatgcccccatcttccgacaatacatctttagatggttcttggggcaagtagtccc

SEQ ID NO: 15328 - DNA, 364 bp, Glycine max
agcttattctatgtttctgcatcaaatataacataaaatagtataaattcatccgtttaaacacttaatggacaaaaacttagatgatgtcaaaattttaatcattcacacaaaaaaaaacaataaaaaagataaaatttgataatttttattgacttaattacaagatatacttatacacataagttatcaataactttgaatttcatatttaaagttgtaattaaattgatttaataaatttcttacgtaaccatgagtgctttagaaataattgtaaaaaaaatgttttcacggacagtgaaagttgtaacgtgacaagggactgaagggagtgtacaacccgtgaaatttaaaaagcaag

SEQ ID NO: 15329 - DNA, 404 bp, Glycine max
taaatatgtccactagactatgttgaaaataaaattttaaagctgggtttattaaaattcaacattatgtacaacttatcaagaatgtcagtaacccaaagaagaggattatgacagcaactccgcccccccccccccagcatgggtcaacaatatttcagatgaagagagcatatatattctacaacacctgaaagcaataagattcatatagttttttatactcgagtggtaaaatttgtgaaaaagtgacaattattagtctaaatcatttttaaaaatgcaacaattctttcttcttttggatgggtggactgaaaatataagctacacacagaacatagtgacataccaaggtgtagcaataaatcattggactccaaagttgacgattttctatgttt

SEQ ID NO: 15330 - DNA, 373 bp, Glycine max
  unsure (1)..(373): unsure at all n locations
agcttaaaagattggctaagattttgttaaaacataagcacttagacaatgaaggaaagctggagttgctgcacatgatgtccaatgttatgtcaaagaataagatcgggctgcacaatgcacaaggcaagataaagtgtcaaatgaagaattgaagctgcaggattcacgatgtcggatataatgtccaggacatcctgcctgaaaatactggaattgctaaaagcattgaagctgcaggatccacgatgtctgatacaatgtccaggacatcctgcccgaaaatactggagctgctaaaagcattgaagttgcaggatccacgatgtcggatacgatgtccacgacatcttgcccganaatactggacata

SEQ ID NO: 15331 - DNA, 348 bp, Glycine max
cttcgattcattctatgcacccatggtggtccacattgtgtttcgtgcatttttattctcgttttggttactttttataccccctcttgacgtgcttaaaccattttacttaagtcatttctcgcttaacttaaaaataaaataaatttccaccgaacgtttgaaatgtattatccgttaacttcggttaaaatgaattccgaccgttcggtcgtgccgtaaccacgttggaaatcaaaaaagggtaaaaaataatataataatcaaaaaacatcttttagaaaataaagcggaagatcaatcagaccgttttctctttgggaattctcattcttaatcgaattgagt

SEQ ID NO: 15332 - DNA, 362 bp, Glycine max
agcttgggaccaaattgaacatttttaaactttaaaatcaaattgaatcttttacaataatttgggaatcaaattaataatcaagcctaaatgtaataactaacaagttatataataatacagaaaaggagatataaaagaaaataaaatagaaatgagaaaaaaagaatgtatttttttatcatttttcatttaattatatttgtacattacaaataagtaaatgaatgcctatatatatatataaaaaaaatagtaaatgaacattataaataacctttaataaaaaagcttaactataaatagacttaaataaccttttgattcctacaaaataagagattttttatttctagttcttt

SEQ ID NO: 15333 - DNA, 401 bp, Glycine max
tatgcgaaatacttggaaaattaaactcttatctttacaataatttattttcacctcaaccaataatgtttttgttatattgatgagaccacttataataagtataaatatataattaattatggaaatgagtactatggttattaacgaaatatgaagtaataggattacatattaaaatttaattatgtttttgttatattgattatgcattaattatactatttattaaacataataaatatttaagttttaaagatttatgaaagtttacctctttattattgcatatcatgaatatgagatatgtacgcattaaatgtatgacagagatacatgttaaaaaatctaatatttgatagagttatattatatttattaatggaataaatatcacattc

SEQ ID NO: 15334 - DNA, 354 bp, Glycine max
  unsure (1)..(354): unsure at all n locations
agcttcntatttggtatctttcgagtatgaatgttanggtgtacaagttaaaaaaacatagcatcgtgccaaagtcttttataaccattcattttgatcaaagggttcacattttttgctctttatcttttttttctttcaattttctttgtttttcccaacttgtcgggtgttgtggattttgcgatgcttcaagtttcattttttttggtctaatttagatttgtttctttaagttttttatttttttggtttgcatcaattctcagatctaattctcatttttattatgtttcatgtgtggtgttgttatttctatgaaagtcattgacgtatatgacagagagacatggt

SEQ ID NO: 15335 - DNA, 404 bp, Glycine max
  unsure (1)..(404): unsure at all n locations
ntagccaaactgtaaaacttggcaataacactagaatggctgttgtgggaaaaggtatcattcatatgcaagtgaatggatttacttaggaaattgcaggtgtctattatgttcttgaacttaagaataatctattgagcatagggcaacttcaagaaaaaggcttgactattttgattcaacatgggaagtgtagggtatatcaccctgagaaaggattaattatgcagacatatatgagtggaaatagaatgttttctttgttggctaccatgataccaaaatctttttcatgtttccaaattgtatcagaaaatgaatctcatctttggcattgtcggtttggtcacttaggctacaatggattgaggacactttttgataagaagatggtaaatgggctg

SEQ ID NO: 15336 - DNA, 325 bp, Glycine max
agcttctcgggcctttttatgactctcaaatgaatatttagttatgttatttattggcacacattaatttgaagcctacaacattaaataatgaagcaaatactccaaagcaggcccaaaacaacagcagtacatgtaaatgcaacagaaagcagtgtttcactgattatatatactatcaaaacttgaatttaattcatgggtccaactatttgacatgctcctttattctcttgacaccacttgtgtgttttaaactcctatactacccatgtccctttgtagggaatatcccttctatttctctcctaccctctagtctctc

SEQ ID NO: 15337 - DNA, 366 bp, Glycine max
  unsure (1)..(366): unsure at all n locations
ntctagctnttcattggtgtattttgatctccttttggtgctctaaattgtgggagtgtgctcaaatatatggggcaattttgatttgttttcttgcttgattaggttgaattaggggttggtatgagatggccctaggcctataatgcattttgaaacaataggacatgccacattgtccccgttctcttgctattgatgcctaaacgcgcgcccaccaagtgttcggtgaaatgcctcaatggcattagcgtgtgacttttgtaaggagacaacccatggggtattttggtttgtgcatattttctattntgttggaatatgtattcattcccgaaaaaggctagagtaattgccccacatatg

SEQ ID NO: 15338 - DNA, 378 bp, Glycine max
gcaagcttatcatcctttattgctccagatacataaggagaaattgcggaaggccaaaaagaatgtcaatcttgctacttcagttaagtcacagatgacatgtgttgaatttgaaggtggaggacgaggaataaaaagaaaatgatctatagaatgaaacgcctttcttattcaaaagaaagtagtgcatagtttctgcattgcattcatatatgtagactcttatagacttattcgagactattccgtaggattataagtgatgcaacccttagacactaataccatgaacactaaattcatttaaacatgagatacatgaaaaactatttctaagtacattaaagttccattggttttgaacacacaaaaactact

SEQ ID NO: 15339 - DNA, 394 bp, Glycine max
taatctacataatatgatgctcggcacaaaatatgtgaggtcagtacactgtagctgatgctacactttgtcttgtagctctttgtaagtatttactctagcacaactgccatagattcagcaagcatctgaacagttgcatatgagtttaatagccttgtcaccccacttggtactgtttttacacgaaaaaaatcatgatctccgatatatatatatatatatatatatatatatatatatatatatatatatatattaatttctttcgtgaagtagataatgatacagtgtgtcactttgcttgttaatttttattaggtacaagtttttttttttttttctctcaacactcttctgagttctttctttgggggttgggaaagcaaaattt

SEQ ID NO: 15340 - DNA, 351 bp, Glycine max
gcaagcttctagccaaatggacttacctttaattaattcctttgatagcctttttgagctttgtttccctttccttgttttgaagctcactacaagccttaaatgaaaaaccatgatatcaccatatccttaaggaattttggagctttggaattgttttgggaataagtgtgggggtttttgtttcattggataacatgttttgttggctatgcttcatgatgtattttgggccatacttgatgtacattgtatattggttaaatgttggacatgctgaatgagatggtgtttctcaaaggctacgtaccgttaaacaaaattgaaaaagaaaagaaaagcaataagttg

SEQ ID NO: 15341 - DNA, 396 bp, Glycine max
  unsure (1)..(396): unsure at all n locations
tctctgaagggcatggttatttccagtttcctgattatatctaaaaatctcgccaaatggcggtccttctccttcttggaaggtaccataggatatggtacttccgcaccttcattcacaactttttctctttccctttctctagcttgttcacttctactcctctcttcattcagattttttttcatctttttcattnttttcattttctttttctttttcttggtcatttaatttctttttcttgaccattatttgtttttctttttcctgatttctttcacctctcacatcatctttcatatcatcaatacctttcttttcagcagctntcttcttggatacaacactattctcattctctttctccacaaacctcttattccttgtcattac

SEQ ID NO: 15342 - DNA, 353 bp, Glycine max
aagctttaggagaaaccatgaaaactttgtagttcctaaacaaaaatcaattgaagaagcttcgccaagtatccccattgaaaaacctttattcaaacctttcaaagttagtgagaaggctaaacgaaaaattagggaacttagaaaaactaaatccttaattgagggcgtaggtgataaccatagtgaattacttaacaagattggtagtctacttaaggtcattccagatactccccaagcctcggaaaatacttccagaatggtaacaagaagtacctccaaattgattaatgttattaatgaagatagtgaccaaaactcagataacacaactgaaataggatcagtgt

SEQ ID NO: 15343 - DNA, 374 bp, Glycine max
tgtcaaatccaatatagaaattagaaatcaacaatgtcaagtacagttgtttgcagaaaactttacctggcagcacgtaaaatacgacaccaagaggcttccacttatgctgctcttcgagcctccattcccttatgtgccgcttctctagctgccattttctctctcaacactcttgaataatgtgggttagaactaccaagagtctgatcaagcgtcaaattcataccatctacttcctgaaaagggcaaatgtgtcttagcattggaattcaaaagtaataaacgaaatatcagtaacaaatatatgtgtgtatgccaaaacctgaagcatcttaattttcctattcatgtaggtatcccatttttttacg

SEQ ID NO: 15344 - DNA, 370 bp, Glycine max
gcttcttttggaccttgaacaagttatcaactcctctttcagaaccatgccatgtgctcgcgattggtccctttcttcccttcgcaacttgagttcactattgctaccccatagagctccgcgaaatttgttccggccatactcttccttgcgagccctcttggtctctcgttcaagggctcttgcggtaattgcattctcttcccgtaacccggcacactccttccgaacgtgtgtagcagccaacttgaacttctccttggcgagttttgcctttcctaactcgcttttgagagcttggacttcctcgttctcttccggtgcttcaaaattctcttcgctgacgacttttaacttggcgagccaatct

SEQ ID NO: 15345 - DNA, 377 bp, Glycine max
tgcatgatttacattctccccctttctcaagcaaattcttaattcttcttcacatcttcaaaatcttcatgatttacattctccccttttttgatgatgacaatataagtcctgaaatcaagattgaagcaagcaaagcaagcaacgtatatatataaaatttgcgtttactccccctatcttttggagttgatgatcacttgatttctaagctttttctaagcttttctacaccccatttttctccccctttggcaacatcaaaaagccaaagtacatgggaatcaaaccagatataaaatgaagtggaaacaaatcaatatcaaagtataaagcataaccaatcaaactcacaaataagacaatcaaaccagaat

SEQ ID NO: 15346 - DNA, 369 bp, Glycine max
tgctgaagccttctcttaccttgaaacaaaccgagcaactggaaaggttgttatacatcccatcccttgaatcaagtaaaagggataggcaattttgccgtgtctgtctagtaaacttcatattctatgtaaatcagagtttagattaaagctaaaaaacaaaaataaagaacttcatttttacattcttagtgctttaaacttaccattacaattgtttgaaagcaaaacattcttaaaatttgacctactcattcagttaatttgaaaacagcaatatgctctctggtggttatgttggatagttggattatacatgttaacgagtgttgctgtagtctaggatccatacaattaagaattatgttt

SEQ ID NO: 15347 - DNA, 349 bp, Glycine max
agcttataatgaaatgacttacttctactctatatctacaaaaaatccaaacaaaatatttgttaaccataagatatagaacataagtaagactctcactcaactaaggtactatcatgaattacacccatatgagtattgtgctcatgaaaaactctaagtgtcatacctttagtaagtggatcaacttgcatgaaatgaatccttatatgttctatacaaatctatatcttctggattctttatttaacaaccaaatactttatgtcaacaaatttttacttagttgaatccttaataagaccgctaagatattgtgccaatcaacacctgatggctacttaatgtt

SEQ ID NO: 15348 - DNA, 380 bp, Glycine max
tgaaataacaagattctctgttgttacatcaatgatatctgaatcattgaatcaattatgttgcctgagaccagttccattaggagtctttactgaagcttttcaaattcctggatattgcattggtatagtagttgtgttattataataggatctacgtataatgttatgagcatgttggtgattttatttgcttaatactgtatgtgataaagacatagctgggtgaatttcatcaatatcattggtggaaaagtttgtaaaaaatggcaccactattcaaaggatatttgctcacgttactgatggaaagtatgaatcacttttttaaggatacattctgtattatacccaatgtcttatactcaattgtatgtatt

SEQ ID NO: 15349 - DNA, 196 bp, Glycine max
gagctgatagaatgtttcaacttgacttaagaaacatactaagtagtagggatgttagcttcacggagaatgataaatggagctggatacgatgaaaaaaatagtcaactaatggtttgaatcaagaacagttagttgatcaatctcctgttcgccacactagatttattgctgacatatatatgaggtgcaatgt

SEQ ID NO: 15350 - DNA, 280 bp, Glycine max
ttaccatattcttaaggaattttggagctttggaattgttttgggaataagtgtgggggggtattgtttcattggataacttgttttgtggctatgctttatgatgctatttgggccatacttgatgtacattgtatattggttaaatgttggacatgctgaatgaaatgttgtttcttaaaggctattgagtaaaaaaaaaatttaaaaatagaaaaagaaaagcataatgttgaattagatcttaattgcaaaagaatgatgaaactcttggttctac

SEQ ID NO: 15351 - DNA, 371 bp, Glycine max
  unsure (1)..(371): unsure at all n locations
agctgtcgctggagctgacccatatttgcttttctctttcaaactgatgatccctaggctcttgaccttgacttgatagaacctttttttaagcgaaggcgcctgactcgatcccatgttttactaaagtgaaacaaaacccagtgtgaatcaaaactccgacatctatcatgggtggaatggatgaatgcatgaagaaatgcatatgacacatatgcaatttatgaatatgggagcccgtgaaattgtccccatcttagatacaacaattgggcaagatggcgccggacgtacgtatntaaaaaagcgacacagaccctccttcggttttgacaaagtgaggggatcaagacgcaattcgtgcatgatgc

SEQ ID NO: 15352 - DNA, 365 bp, Glycine max
cttgcagatttggtcttcgccagtgaaaggatcaatgtgggtccgaaaagaggcaaatttgatcatcctactaggacgactgagaaaactggggcaaatgaagagggtgagaaagagggagaaacccatgctgtgactgccattcctatacggccaagtttcccaccaaacccaacaatgtcattactcagtcaataacaaaccacctccttacccaccacccagttatccacaaaggccatccctaaatcaaccccaaagcctgtctaccgcacttccaatgacgaagaccacctttagcacaaaccaaaaaaaacaccaaccaagaaatgaattttgcagcgaaaagcctgtatgattcaccc

SEQ ID NO: 15353 - DNA, 346 bp, Glycine max
agcttgaaaagtgctatttttcaccttctcgtttagccaatctgctagcttagcgagcatccgctaagcgctacactcatgggctaagcgggaggaagactctggaagaagatgagctgtacaggttcgctaagagcaccgcttcatctcactaagctcaccgcttcagttcatccgctaagtgagaaaggcacgcgctaagccgaaattcactaatgtccgctaagcggtccataagtgcgctaagcacacgagcacgaacaagaccacctatttaagactgaaatcaaattttgggatggaagttggactggggttcagagctttgcatgtctagggtttatag

SEQ ID NO: 15354 - DNA, 184 bp, Glycine max
ggtagtaagaacccggcggacgcatcctatcaacatttcccacccaatgcttatcaccataaactttcttccacgccagtatccaagcatctaacacaaaactcctcgcttcagacaaacccttactaccaaccccctaagattgcgcaaaccgaaatcaccctccggcttctattgcccattt

SEQ ID NO: 15355 - DNA, 370 bp, Glycine max
  unsure (1)..(370): unsure at all n locations
agcttctatccaaggcacatttttggtggcgaatctccttcttccatggcttattccctagtggatggtgcctcctttctcctcttctccttttccttccactgcatctccatggtggaaaatcaccattgaaggacctcattgaagctcaaagatccaacctccataaaagctccacaagcaagcttccatcatctagtgtcaatggaaattgtcttgtgttaagggagattgttccgtgtcgaaggtggttacctctactagtgtaagagttgtatgtttgtgaggcatgtcaagctcccctagcttggacgactgttgtataagctttctctggcaagatggctggggtggacatgnttttgatctt

SEQ ID NO: 15356 - DNA, 406 bp, Glycine max
  unsure (1)..(406): unsure at all n locations
tgtaactcatcatttttagttgaaattgtcaattttacatatgcaatcttaattctcaacacactttttggatgagtcttccaaggattgtgttgccttctctaacttttcttccttttccagcgataaggtaaaactacaaaatcnnnnnctcttccccccccccctcctnntcccccacacacttaccctgaaaagtggcttaaaggtgtaaatgcacagtccttccaagcgagcaactcaaaggtgtaacaccatcttagaatttcgtatgagcatcttcattgaaaatggaagacttgaacgaaaatggttggcttgctcctcattgttctgggaatagataaggatctatataatgagcacaatgtatgaaggatggaaaaactccaatttatgtaatccc

SEQ ID NO: 15357 - DNA, 380 bp, Glycine max
ctgcagcttaaatatacaagcattaacatattgttttacattgatcttcataatagaagtactttcagtttttctttaatgtgatttctcgtgtaattcattctgatttactgaggttgttagatggaaacttccttattggacagttacctgacattaacaaacttatagacctaaattgtgtaagttcttgagtttgacgcatgccactccttggagggttggagaacaatcaaaatttcagctcatatttcaaatttcttagtttttaaccccaaaaattcttctttctatgttttcctttttattaatttcatttcttggtgacctgcatgcatttagagaacaacaaattgacaattcgacttccatcatacatg

SEQ ID NO: 15358 - DNA, 282 bp, Glycine max
tcatgagtgacattcgtggttgatgatgtgagagaatgtttataataaggatatctcttattaaacgaggaataggttaaaatcaaaataagttatttcttctagaaagttatgcttacgcatttgtgagttatttgccaacaccttttatttataggtagaaggtaattgctactcaatctaattaagaccaactttgtcgtgactatgcatgttaggtttttccaagagttactagcttgattctctactttctatatgatgacattcctaatcatattc

SEQ ID NO: 15359 - DNA, 331 bp, Glycine max
tgcaagcttgtaatctattacacatatactgttatcgattaccagagcagattttcagaaaatattctcaacagtcacatctttttatgtgggtcttgaatggctatcaaaggcctatatatatgtgacttgagacacgaatttgctaagagtttttcagaacaaaaaggtcttattctcttataaagaaaaatcgttttatcctcttacaaattccttggccaaattacttgtgattcaataaagaattatttgagtgctcaaattgttcaatctatctctttcaagagagaaatcttcttctcttcttcttcattctgaaaagggatta

SEQ ID NO: 15360 - DNA, 384 bp, Glycine max
tgagggaaaacttgatgccttggtcaacctagtaactcagcttgccataaatcagaaatctgcatctgcacctgttactgtttgtaagagtctgtggtctatgttcttctgctgatcaccatacagatctctgtccttctttgcagtaatttggagtcaatgagcaacctgaagcctatgctggaaacatttataatagaccccctcaacagcaaaaccaacaatagaataattatgatctttcaagcaacagatacaatccaggttggaggaatcatccaaatctgagatgggaaaatccttcacaacaacctatttcttccttccagaatgctgctggtccaaacaggtcatatgttcctccttcaatgcagcagtagcagt

SEQ ID NO: 15361 - DNA, 366 bp, Glycine max
gcaagcttggttcgaggtacttaccagtttatagatcgaagaacgatgaagaacgaatgaagaacgtcgaagaacggtcgaaaccttcgcgaaattcctcacggaaacgttacggaaatgtttcggaagcgcctcggcttggattttcttcacggaaacaatttttccaagcaaattcgaaagagagagaagtgcctaaggggctgaaccctttttcactttacttctccccctatttatagaaaattgggggaaaagcttgccacccagctcgcccaggtgagcagggttgcttcctccagaagcaacagttctggaggaatcttctggagggcccaagtgggcctggtctctatttgcaccccc

SEQ ID NO: 15362 - DNA, 398 bp, Glycine max
tcctcggggccattttctgcgaaggcaaacatttggaaagttagttttaccaagaaatgctactcttaaaacaaaaatggcatacaacctcctccaataaacacaaacgtcaatgtaaatttagagcaaactcatgcacatacttccttatgaacattcactcgcacaagatattcttctaactaagaaaaatgcacccatgcataatcaagacgccttcattacctagattatttatatgtacttccaaggtgtatttgctacctacatcacatgcacttccttggctaaatttacatatatgcatactcaaagcatcttggctaccaaaaattgcacacgtgcacattctggtatttctaatacctatgcatatacaaactttgtgacgaattttg

SEQ ID NO: 15363 - DNA, 350 bp, Glycine max
gcaagcttttgcgattccaatgagagaattgcataaaatgatttttatgttcaatggggaaagggcccactctattgacccatcttaaagcctcccaccataaattcctagtcattctgcatgagaacatgatggggccaatatcttcctcttcactatcacataaccggcacctataccaaggcaaagtgatgtgtctctttctcaagttagccttagtaggcaatctgtttctgaaaaatctccaacagaaggcaatctgtttctttcgtaaaattagtcaataataatttaatatgtaatttctattttttaatgtgttgattaataacaatgaaaattctcccaca

SEQ ID NO: 15364 - DNA, 388 bp, Glycine max
ttaggagaaaccattaaaactaaggtagttcctattcaaaaatcaattgaggaagcttcgccgagtgtccccattgaaaaacctttattcaaacctttcaaagttagtgataaggctaaacgaaaaattagggaacttagaaaaactaaatccttaattgaaggcgtaggtgacaatcatagcgaattactaaacaagattagtagtttgcttaaggtcattccagatactccccaagcttcggaaaatacttccaaaatggtaacaagaagtacctccaaattaattaatgttattaatgaagatagtgaccaaaacttagataacacaactgagataggatcagtgtcagaaaagaatataaatccattaaactccaaacactgga

SEQ ID NO: 15365 - DNA, 215 bp, Glycine max
gcttctagcgagcgcgatatatcttctcgaaaggacccataaacgctttgctcttcttaccaactattggggattgattgctgtctgcgtgcacagccattgggttggggtgcacctgcgaaaataatggtctgcggaacaaaagatattctgactcaactcaggggggatggaccattttatgtgcactcgagacataatgactatgctttcaa

SEQ ID NO: 15366 - DNA, 160 bp, Glycine max
tgctatgcgccagaactgccaaggctaacctctgttcgctagttgaaagagcggcaccttactgtttattaaagcacggcgaatagggtgctcctataaacactaacatctgcgccaatatgcagcatgcgtatgcaccaatttccttacaaacggagtc

SEQ ID NO: 15367 - DNA, 365 bp, Glycine max
  unsure (1)..(365): unsure at all n locations
gcttcaacatcagaccacttccagtttgctggaactactccacatggatttgatggggcctatgcaggttgaaagccttggaggaaagaggtatgcctatgttgttgtggatgatttctccagatttacctgngtcaactttatcagagagaaatcagaaacctttgaagtattcaaagagttgagtctaagacttcaaagagaaaaagactgtgtcatcaagagaatcaggagtgaccatggcagagaatttgaaaacagcaggttcactgaattctgcacatctgaaggcatcactcatgagttctctgcagccattacaccacaacagaatgggatagttgagaggaaaaacangactttgc

SEQ ID NO: 15368 - DNA, 382 bp, Glycine max
tctattttcaatttcaagcgtctcgatatattactttacttaatcggacatccgtgttaaaagttattgtggtttacaattgctatgagcttctgttttcaatttcaagcatctcgatatattacgggttttatttagacatccgagttaaaagttattgtcgttggaatttgctcagagcttttagattcaattttcagcgtctcgatatattacgggacttaatcggacatccgaggtaatagttattgtggtttgcaattgctatgagcttctgttttcaatttcgagaatctcgatatattacgggattcattcagccatctgagtaaaaagtaattggtcgttgaatttcctcagagcttctattttaaattcgagc

SEQ ID NO: 15369 - DNA, 296 bp, Glycine max
  unsure (1)..(296): unsure at all n locations
tgcaagctttttggctttgaagaacaataaagatgagaagcaaaggtttcaagatttctcaaaagttgttcaagtagttctaaaaagttattaaaatgcaagtcaaggtcttgcttttatagactcttcatgtctggtcaagaacaccattggaagagttataaccttgacaaaatcttagagaaaaccattggaagagttacatctcttgactttttattcaaaacttatcactggtaatcgattaccataaccatgttatcgattacacaaagaattttatganaagatgcgac

SEQ ID NO: 15370 - DNA, 392 bp, Glycine max
taagaggtatggcagtgctaagggatgtttcccttgataggataaggtagaaagattgtttaagaaggagtgctattttaatatcaccttttcttgcaaaatgattttccttcttaacaatcttcttggaggaatccttttcctccttttccttccccttggactttgaagacaaggccttactatccttctttttcttttgtttttctagtttttcttcctcatccctcttatctttcatagttagttgatctttggccacctgtgaaggtgtttgaggatgcaacacaaatttagtgccaagatgggtgagggtaatctcattagttaggccattgtaaatgatcttcctatcaaattgccaccgtcttcctaaaagaatatgtcctacc

SEQ ID NO: 15371 - DNA, 351 bp, Glycine max
agcttgtatcttttcccattattaataagacgagttcttttcctttttctcttgttcatactgatgtatggggtcctgctaatgtccttaatatctcatgtgctaaatggtttttaaccttcatagatgattgtactcgagcaacttatgtcttcttattaaaataaaaatctgaagtcagctttgtttttattcactttgtgtcaatgattaaaaaccaatttggagtcaatattaagagaattaggtttgacaatgccagggactactttaattttgtgctaaaatctttttgtcaaaaggaaagaataatccatgagtctttaagtgttaacacacaccaaacaaaat

SEQ ID NO: 15372 - DNA, 380 bp, Glycine max
tttaactttcaaatctaattggacaagtctttgtattttcaactcaagatctttatatattgttacttttaccattgacttcatcacattttcactttacctttcttcctcttatctcgattcttttttcacctttcaccatattgcaatcagagaacagttcataattccatcttcactagtatggtggtgataaatcaacttctgaatctccgaacacgaatgccccaccatctcttaattgaactacttctttcaatcatgatgacataaccagtccagatacaatccagcctcttcatgaacatgaaggccctttcttcttgaaccctaggaactattatcttggagatgacacaactttcttggactaatatctt

SEQ ID NO: 15373 - DNA, 347 bp, Glycine max
  unsure (1)..(347): unsure at all n locations
agcttgacaaacctacatttttttcctatcgnggttgtctccctgttacactaccgtaataactcctacaaacaaggaactgaagctcccatccaactctataaatactaggttctatttcacctttttcaatctcattcacaactcattcacatatttacttgagtgtcggagacttttgttttgtaggtccctcctattgttctcctaacagaggatacctacagtcagacatgtgaaatcgtggagttcatccaggctacttctatcctgacgttagtcagttgcagattttggtaaatacaccatgtttcttcaatacaccctgaatcacatttctattcata

SEQ ID NO: 15374 - DNA, 396 bp, Glycine max
tgacaaatgataaaggttccatggagatttattacataacaaagagggatggaagtgtccatttgtttgttttgcatccagttctaaagcaagctaaaaatgtccaagtgccaaataacctggtaggtaaacaaaatgtgacattaattcgtacttttgcttcattgtaaatagacttatgtttgattttacaaagagggatggaagtgtccattctgtagttttttttatgacattgtggcagaggacaacaatggggcatcccacataatggacctataccacttaatagtccacttcaagtcaatggaccaatagtataggatggagcaagtaaatgtattgggtctattgaagttaatgtgtaacatccctgcttctaggatcaatgactaa

SEQ ID NO: 15375 - DNA, 395 bp, Glycine max
  unsure (1)..(395): unsure at all n locations
agcttgttggcaaatactntggtgacgattgacatgtaattgtaaccgacacgctcgaagaggtaccacaatgcggtggcataaacgagcaccgcaaccgctccacgccaattcatccacaacaccacatcatattagcaactaagcctttgccgagaacacgatgaaaggatgagaaactaaggtaatgccaagattgtcagaagaatgatgaaggagttagaatcatcaatggcagccatggccatgagagagaaaaaaagaatcaaccagacatccgaaaggtccccttaaaaaatgattcataagggggggggctatccaattatataagatcttaagcatcaatgacatccatggccatgagagaagaaaaagaaccaatcaggcattcg

SEQ ID NO: 15376 - DNA, 439 bp, Glycine max
  unsure (1)..(439): unsure at all n locations
atgctgctatggngtgtctgcaggcaaaatcctttgtttatgtngttggaaagagggatcgagctaaacctaacaatttgngctccaaatgttntcaaggacatacaanagttaaatggacggttggcagaaataacaaggtttatggctaagttgctgagaaaactttacctttttcaaaattttgaaaaaggataaaaattcaactggaaaaaagaatgtgaagccgccttccagcaattcaaagaaacactatccacccccattgactctaacaaagccagagccaagagaaacactatacttgtgtctggcgataatagaagaagcaactagtgttgtactggtcaaagatgacaacaaaattcanaaatcggtgtgctttgtaagttgagctctttaaaacatcgagttatgatattcaaggtggaaaaagtaa

SEQ ID NO: 15377 - DNA, 477 bp, Glycine max
  unsure (1)..(477): unsure at all n locations
ttgacccttgagacttcgagaccccgngagcccacagacgcctgcggcatgcacgcttgttagccacacaagattataagttcttgatgaacganacgaagacggaagcttaataacaagaatggaattagagatctcggaatccaaaccttacctagggtatatcgaatgactttctaacaacgtttggtgaacgagatactttcatttctgatccgctcacacacgcatatgtgacacgctaccgatgcacctgggtgaggagctaatccacaggatcatgtttgtttccctgaagacgctgagaggcgatactatgcggaaccgtgatgcttacgcttcctcctacttatatgagggaggtggaggatggtgtctccgacacagtcatcctcagccgagaagtttcaaatagaagcagcccaagcctcactgtactcagagacggccgagccgaagaagcctgagaacttatgt

SEQ ID NO: 15378 - DNA, 235 bp, Glycine max
aaacatggccatcctatttgagaaattgagcagttgctacggcttaataccagagggtcagaggcccctgttccatgtgcttgtgaagaagctgtggagatatagaaaagagaactccggcctgtggaaacacattgaatgtatgaaccgagcatgtgcagcagataggaaacagaagggaaaatcaacagtctattattgaaggcaactgggagaagcacatggagatgagata

SEQ ID NO: 15379 - DNA, 215 bp, Glycine max
cacgagagcactgaaaaccgccaagaattttcttttgtttagcacgaaacacgcgcctgtggtggggtgccaaataactggactgggaagcttggaaacacgaaacgatgctgttcagctcagaaaaacgtgcacatcaggctctactctgcaaagcacttttacatctactcttataatgcacgtcagtgcgcattgccttagcatcctacaat

SEQ ID NO: 15380 - DNA, 259 bp, Glycine max
atagcattaaaatttccaagcaccacccaaggacgttgattattatcactccaccttctcttgaagttccaaatggtatgtctaagagcctgaatgggacttccataaacaatagtaataaaccataattccttatttttcacactaacctccatatgcacaaattgagatgactggtccaacactttgacattccaaaccttggagctccaaagacaccaaatgccccctgcttactcattataaccaaccacatgat

SEQ ID NO: 15381 - DNA, 420 bp, Glycine max
  unsure (1)..(420): unsure at all n locations
agcttgccgctggagctgacccatcaactgtcctaattctcttagactggngatccctaggctcttgatcttgactggatagaacctccttttaagtgaaggcttttgacttgatcccatgttttactaaagtgaaacaaaacccagtgcgaatcaaaacaccgacatctattatgggtggaatggatgaatgcatgaagaaatgcatatgatacagatgtaatttatgaatacggnggcccgggaaattgtctccttctttgatacaacgtcttggggtcgcaaagtgcccaacatatgtatttaagaaggtgacacgaaccctttgttggtttgttaaagagaggggattaatacagaatccgtgcgtgatgcatatgcgaatggcgcaacacaggaatgtacatagtatgacaatat

SEQ ID NO: 15382 - DNA, 444 bp, Glycine max
actaagcttgcggattggtcttaccgacaaaggatcgaagtgtgtctaaatatatgaaaatttaaccatcctactttgatgaatgagaaaactggggcaaatgaagaggatgagaatgaggaaggaacccatgttgaggctgtcattcctacatggccaaacatcccaccagcccaacaatgtcattactcagccaatatcagctcttctcattacccgccacccagtcaaccacaaagcatgtctattgcaaagcctgtctactgcacttccaatgatgaacaccacctttagcataaaccaaaacaccaaccaagaaatgaattttgcagcaaaaagcctgtagaattcaccccaatttcggtgtcctatgctaacttgctctcatatctactttataatgcaatggtagccataacccctgctaggtttcatcaacctcca

SEQ ID NO: 15383 - DNA, 438 bp, Glycine max
  unsure (1)..(438): unsure at all n locations
aactgcccatggatgaggaaagataaaatttgtgcttttactatttcctaacacgaatggacattttctttttttgcagtaaatctgtatccattttgaaaaaatgtgatgaatgcaaaagtaataaatcgggttaaccggaacggtttaagtttgtttgttttcagtttcaggccatattgngccgaataaaaaaatattctgtgcatgggcccccaaacaaaagtccgaatgacttaaaaaaagttttttttattatttattaaaagtgtctcaagtaaaaatgttttaaagaaatggcaccgttgcagtggtaatattgtggttctgggaaagcgtagattacatagtgatagtagcggcgggcgaaggtttgatactgagtgtttgagaatggcatcatcgaaggtaatgtgtanngtgtcgtgtcggatacag

SEQ ID NO: 15384 - DNA, 231 bp, Glycine max
  unsure (1)..(231): unsure at all n locations
agctntgagccaactcanacttttatatctttttactcggangacngancgagacccagcacatttcgagaggctcggaaatgaatgttgaccctctgagccaattcaaacgacaataacttttttcacggatgtctgattgaggcccgtaacatattgtgacgctccaaactgaatgttgaacctctgatcctattctaatgacaataactttttactcagatgtgtgat

SEQ ID NO: 15385 - DNA, 345 bp, Glycine max
ttggctcagagcttcaacatttcaatttcgaccgtctcgatatgttaagggactcaatcagacatccgagtaaaaagttatggtcctttgtattggctcagagcttcaacattcaatttcgagcgtctcgatatgttacgggactcaatcagacatccgagaaaaaagttatcgtcgtttgagttggctcagagcttcaacattcaatttcgagcgtctcgatatgttacgggactcaatcagacatccgagtaaaaagttatggtcctttgtattggctcagagcttcaacattcaatttcgagcgtctcgatatgttacgggactcaatcagacatccgagaa

SEQ ID NO: 15386 - DNA, 412 bp, Glycine max
agcttgttaaaacggaagattataaatcttaatatgaacgaaatgaagacgaaagctaaaaaacaagaaaggaattaaaagtctcggattcgaaaacttacctgttgaagaacgaagaacgaacgaagaacgaatgaagaacgacgaaaaaccttcacggattcgctcacagaaacatctcggaaacgttacggaagcacctcggcttggattttcttcacggaaacaatttttttcacccaaaatagctgaaatgcatagctaggcggatctgggatccttaccctttcgcctatttataggaaaaagggggaggaggttgtcgcccagctcgcccaggcgagctgcattgcttcctctagaagcaaccctgcttccaaaatactctagaaggcccaaattcaaaattttg

SEQ ID NO: 15387 - DNA, 397 bp, Glycine max
  unsure (1)..(397): unsure at all n locations
ctcagcttagcttctaagggaagtttctcanagaagcttctcatggaatttttctcaagaaagcttctcaaggaagctacctagtctataaatagaagcatgtgtaacacttgttgtaactttgatgaatgagagtcttgtgagacacaactcaaagttcaacttctctccctcttttattccttcaatttcgtgctccccccttctctctttcttttcctccattaaagcatcctcttcaagcttcttatccaaggcaattcttagtggtgaagctccttcttcctcggcttattccctagtggatggtgcctcccctctcctcttctccttttccttccgttgcatctccatggtgtaaaatcaccattgaaggacctcattgaagctcaaagat

SEQ ID NO: 15388 - DNA, 413 bp, Glycine max
  unsure (1)..(413): unsure at all n locations
agcttgaggcacctgccttttatcctattccttcaagnggccttacccaaggatcttgttttccatacattangaaaattggcacattgattttttgacatctaaatggaaaattaacttaagtagtattagttatcagtttttgaatttactttcagaaaccaaacttcattcctgaaaattcaatagcatgttatgtcaaagaacacttgttgcatctgatcccacatccctataaggaataacttcaaattttcacatcacatccctataaggaataacttcaaattttcacatcccttacgatatattttgctaagtttcacaacctcacacacaaaagatgaagtagtagattcaagattataacgtgctcccatagtaatacaaagaaaatcaaataacatataact

SEQ ID NO: 15389 - DNA, 283 bp, Glycine max
actaagcttgaaagctttggacatagaagaaaagatttcaatgatattaaggcttgaaaggatgcatgaaaagtgtcaagatgactatgcaaacaaagcctttcttatagactcttcatgtctggcaagacaccatttagaaagttataacttttagaaaaacttataaccaatctgaaaatgtcaaaaactatttgaagagttacatcttttgattttattcagaaacaatcactggtaatcgattaccaaatcggtgtaatcaattacacaaagcttttat

SEQ ID NO: 15390 - DNA, 284 bp, Glycine max
  unsure (1)..(284): unsure at all n locations
agcttgcattaggaattgcgatgtgctcatacttttattagngagagcacctgacttctgatactaactggtcagacgcctccttacaattgtaggctgttggatgaatacctcacccactctagtgtgtcacacaattatgggttttatctaatgaaacactcttgtctttgaccactctaatgacccttgagttcttaggctattctagagattatggtcacgactacgagcactccaccaatatgtgtcttgttaggttagacaaggagaaggttaacaca

SEQ ID NO: 15391 - DNA, 170 bp, Glycine max
atttgaattcgctcatagcttgtcgattcaattacgatcgcctcgatatattatgggattcattccgacatccgagctaaaattcactgccgcatgagtttgcttccggcttctggtttcagatacgagtgtctccatatactaccggaaacaattggacatacgagtaa

SEQ ID NO: 15392 - DNA, 394 bp, Glycine max
agcttcagtggcttagtgaagatgaagatgttaaagtgactcaacaggttgaggtgtgtctcaccattgggagatataatgacaaggtgctgtgtgatgtggtcccaatggaagcgacccatgtgctgttaggaagatcgtggcagtatgataccaaggcagtgcatgatggcttcaccaacaacatctctttcaagcaagctgacaagaagattgttctcaaaccgttatctcctcaagaggtttgtgaggatcagataaaaatgagagaaaagaaaaagagtgagacacttgagaggaaaaagagtgagacacttgagaaggaaaagtgaggaaagaaaaagagtgaaacactcgagagggaaaagagagaaaacaaaaagagtgaaacact

SEQ ID NO: 15393 - DNA, 430 bp, Glycine max
  unsure (1)..(430): unsure at all n locations
tcctcgggccattcctgcgaaggcaaacatttggaatgttagttnttaccaagaaatgctacccttaaaacaaaaatggcatacaaccccctccaataaatacaaacatcaatgtaaatttagagcaagcttatgcgcacacttctttacgaacgttcacttgcacaagacattcttataactaagaaaaatgcacccatatacaatcaaggcaccttcgttacctagattattcacatgtacttccaaggtgtatttgttacctacatcacacacatttcctttgctaaattcacatacatgcatactctaagcactttggctatcaaaaattgcatacgtgcacatcttggtatttctcatacctatacatacacaaacttcatgatgaatcttgactatctacacaataaggtgctacatttcatgc

SEQ ID NO: 15394 - DNA, 180 bp, Glycine max
  unsure (1)..(180): unsure at all n locations
cgcttccaatttcattctggagcgaaattatcatttcttgtttatcgagnagacgacgaaagctagntatctaatttggataaaagtctcggattcgaacacttacctgttggaaacgagatcagcgaataaccatgaggaacgacgaaaaaccttcactgatgcgctcactaaatcatc

SEQ ID NO: 15395 - DNA, 519 bp, Glycine max
  unsure (1)..(519): unsure at all n locations
atgggctagactgacacntcgaancgcgcactatgatactacgctgcangccagntcatcgnagaagttcttnnatgaatcttacncgagaaagctcttcttgtgaagaagaccttcacctatccacacagcaaacatagagagaaacagcttgggtcgaccccctttgtacgttatgtttatgtttgagtagcagagactaacaccagaagaaacattcggaaccgcaccgtactttataccgttttaccgttactctggctccaaaccgtccttaaactttagcatttattcgtgcagtggatcgtgaaatcatagcgcatacctttaaagtggatcaagggaatgacattctatcattgataaaacctaccatatagctcttctttttcctaactattatacggattcggatctgtgaaaattctgcgcccttacagcttcaccccttatatatatcactatggctgtacgagtggaagagaagagctcataagttttgcttaacgcatagccaag

SEQ ID NO: 15396 - DNA, 374 bp, Glycine max
  unsure (1)..(374): unsure at all n locations
agcgggcgatactttttctttttnatatttatgnnnncgcccctctaaactttctaacaaaaaagttaagattgcacagctgatggttattttctttaatcataaacaatggtattttgaattatttttgtgtgtgcgtgccaaatggacctaatttataaaataagtcaatgttcatcaatcttctatcgcaattgtactggattattactaaattacaattagctaccaggaaagagtttcaattacttaaatcatacagcagtaaatacttataatattctttatttttttgttgtgattaataaaacataatntttaaataaaattatgcacatatcctatctccactttaaaatatattgcaaaccatg

SEQ ID NO: 15397 - DNA, 387 bp, Glycine max
  unsure (1)..(387): unsure at all n locations
actacgcttgtatgagagactagcgagctgaaattttgattcatccatggcnngcgccatcacgaattccaacaccagagatcggaagtaagtaaaaatacaagtcttcactcgtcaactctagtctttgtggccaatggctaaggcggtccccaggagcaataatatcatttacagctcatgtaattgacaaacaaaacacgtgggtgggggtacttgacaatcaaaaataaacatataaataatatatatttgcatacaaaaataaaagggtgaattttgaattaaacatgatccttaatttgaaaattttctattaatttcatttcacgacatatatattcgactcatttgcatttctaatacgcaatatcctatagacaatca

SEQ ID NO: 15398 - DNA, 357 bp, Glycine max
  unsure (1)..(357): unsure at all n locations
ctatngggcatccgagtaaaaagttattgtcgtttgaatttgatacgagcttccaatttcaatttggagcgtcgcgatatattacgggactctattggagatccgagaaaaaagttattgtcgtttgaatttgatacgagcttncgttttcaatttggagcatctcgatatattacgggactaaatcagacattcgagttaaaagttattacggcttgaatttgctacgagcattcgttgtcaattttgagcgtctcgatatattatgggactcaatcggacatccgagataaaagttaatgtcgctttaatttgatacgaacttccattttacaattggagcgctctcgaatatta

SEQ ID NO: 15399 - DNA, 435 bp, Glycine max
  unsure (1)..(435): unsure at all n locations
cgacaatacttttctcgaggttcttatattccttaatatatcgagacactcccaattgaaattggaagctcggatcaaattcaaacgacattaacttttgacttggatgtccgattgagtcccgtaatatatcgcgacgctccaaattgaaaacagaagctctaagacaattcaaacgacaataactttttattcggatgtccgattgagtcccgtaatatatcgagacgctccaaattgaaaacggaagctcgtatcaaattcaaacgacaataacttttttctcggatgtccgatagagtcccgtaatatatcgcgacgctccaaattgaaattggaacctcgtatcaaattcaaacgacaataacttttaactcggatgtccgattgagtcccgtaatatatcgagacgctccaanatgaaaacggaagctc

SEQ ID NO: 15400 - DNA, 425 bp, Glycine max
  unsure (1)..(425): unsure at all n locations
gcttatgcgcctatttccttacaaacgttctcttgtcattacactnaaccgaaaaacatgcgcctatttacaatcaaggcagcttcgttacctagattatttacacgtacctccaaggtgtatttgttacttacatcacacacatctcctcggctaaagtcacatacatgcatactcaaagcattttggggcaccaaaaattgcacatgtgcacatcttggtgtttctaatacctatacatacgcaaacttcatgatgaatcttgactacccacacaataaggtgctacatttcatgctctttttttcaagtttttgctacctaaagccgcatgcaaattcaagcatattttcctttgctgactaaaattgcattcaaattaaaagggatacattnttctggtaatgtatcttctttacataaca

SEQ ID NO: 15401 - DNA, 308 bp, Glycine max
  unsure (1)..(308): unsure at all n locations
attttactaaaagatantttntgattaatatattattattttacctctttttggtttccaacgtggttacggcatgaccgaacggtcggatttcattttaacagaaattaacggatattacacttcaaatgatcggtgggaatttattttattttttgattaggcgagaaaatgacttaagtaaatgacgaaagcacgtcaaaagggggtacggaaagtaaatgaaacgaaaataaaagtatgcgaaacanatggngatcaccaagggtacatagaatgaattgaaaagtttgatttcgggaacttac

SEQ ID NO: 15402 - DNA, 417 bp, Glycine max
  unsure (1)..(417): unsure at all n locations
agcttgggtgatgttgcgcgtactgagtttatcattatgtgtttgctggggttngacccacgccggtgtngaagagacggcatgggcatctccttccttcctttttgcccctgttgccccgaatcttttggcgttcacgtttgtggaggaaaccgaatcaaactttcctctcttcaatccaacctcgattctttccccggcaaacaccacatccgcaaagctggacggcatgtaacccactagcttctcatagtacaacactggcagagggtctaccatcatggtgatcatctctctctcaaccatgggaggagctacttgtgccgccaaatccctccatcgctgcgcatattctttaaaggtttcaccctctttcttgaacatactctgcagttgagtaccgtcaggagccatatc

SEQ ID NO: 15403 - DNA, 440 bp, Glycine max
tcaagcttgacggtgcgtagcccaccatcttttatagtagagtatctataatgtgtctaccatcacgattatcgtctccctttccatcattgggggtaccacttgggccgccagatccctccaccttttaggcgtgttctttgaaagatccgtccccctttctgcaaatgttctatagttgcatcctatccggaaccatatcaaaattgtactgatactgcctaacaaaggcaaccattaggtccttccaagaatggactcgggaagattccaagttagtgtaccaggtaacagctaccccagtaagactttcttggaaggaatgtattagcaattcctcatcttttgcgtattcccccatcttctgacaatacatctttagatggttcttgggacaagtagtccccttgtacttgtaaggtccagcacctttgacttgg

SEQ ID NO: 15404 - DNA, 413 bp, Glycine max
  unsure (1)..(413): unsure at all n locations
gcttgaagtgtccataggagggagggattatacccttatttgcatgcagncggaagagaagagggttcctctaaccccaaggccctagtgatatgctttactagaaaagggatcggctccacacccatatacccccgggtggcgcccaagccaatgccatttgcgtatcaaagtaataaggccgttccgtggaagtatacccctctcgcgtccagcgaaagagttgcaaccgaagttgactccctatcagctaaagtaaccaacatcaccggcctcagtggcgtaacccgcagtgatcgagtgttctcttcccctcacccggcggaattgccctctaaagggaaagcgcccatggtccaagagcccacagatatagccaccccctcaaaagaaatagatcctccaatggcaag

SEQ ID NO: 15405 - DNA, 433 bp, Glycine max
  unsure (1)..(433): unsure at all n locations
caattcttggtggtgaagctccttcnttcntgtttattccctagaggatggtgcctcccctctccccttctcctttgccttccgctgcatctccatggtgaaaaatcaccattgaaggacctcattgaagctcanagatccagcctccatagaagctccactagcaagcttccatcaattatcatcacaacatattcagaaaaccaaaaccccacaatctgatgtaagctccattggagcttgtacgcctaggatcttcttcatcaatggattcctttgctccttggaagatgaatggcagcggaatggagaacgaagagagagaggagacgccacttcaacgagaagatgagtttagaacaagcttaccaccataggaggccatggataaaagcttggaggaagaacgagatgaatgaacggagacggagag

SEQ ID NO: 15406 - DNA, 148 bp, Glycine max
acgcatcaacacgaatttcgccatggctattgtgcaagcattcaatatggcaatacacgccaaacgattgttctgatggaaggctcatgttctcacaaaagtaaaatcttcactatcatattgagcgttcagaactatcctgacatgt

SEQ ID NO: 15407 - DNA, 452 bp, Glycine max
  unsure (1)..(452): unsure at all n locations
tgggtaaaggctcacgttcactnncttcactatatattcaaacttgnccaaataaataataaagtcatctcgactcanagaaagtcatataagtctcatacaattaatatagaacctatatcctaatgtcacatcctatcagagcgtggtgttcccgtgtcctctagcatgaggttcttcatagtcatccacctattcatctgctcccccgaacacaagttcaagatcatcacaggatccaaacacaacaacacacagggagtgagttatcacattcctaactaatagagaaacaagacaattaaatatacatattatataaatgagataccacttgcttaaacatagctcatgtaacttcaccacttcgtcattcanaattcacttttcaattatcaatcacattacacaagaatcccacacttcgatcaagatataataacacatcaatt

SEQ ID NO: 15408 - DNA, 288 bp, Glycine max
  unsure (1)..(288): unsure at all n locations
actacctctataattcaaacatacgtccaaagagaattggctactgaccacacacacatccccgaagggaaaggcacatacatgcatactcaaagcattttggggcaccaaaagaagcacatgtgcacatcttggtgttcctaatacctatacatacgcaaacttcatgaggaagcttgaccacccacacaataaggcgctacattacatgctctntttttcaaagttttgctacctaaagccgcatgcaaatccaagcatattttcctttgctgacaaaaccgcttc

SEQ ID NO: 15409 - DNA, 65 bp, Glycine max
  unsure (1)..(65): unsure at all n locations
acggacgccgagagacggaaaccncggccggacccggaacccgccaagacgcncaggggaaggaa

SEQ ID NO: 15410 - DNA, 393 bp, Glycine max
  unsure (1)..(393): unsure at all n locations
agcttagcttaacaattttataatccatgtttctataattataattattttaagggcctgagttggtggattaattattattaccatatcaaatctaatgcaatacaagactgtataccaccaagtcctttattcaaagcatcacgtgatttatgtgttgattaatttctgctctccagttgtagtttgaatgtgagttatcaatatggaaaaacttattgataagtagagactgaaccaaaaatggaatatatgggaccaccggccattaaattattcctgtattattaacattcaaattcaactctaccatctctcttgtaattntcatcatatgaaaaaaattggaatctgaacgctgggttagtccggatcatttagagaatatatact

SEQ ID NO: 15411 - DNA, 413 bp, Glycine max
  unsure (1)..(413): unsure at all n locations
ctttcctctgnatgctctgatagggtttccatgtattatatagaatgagaanggattgaagcctccattccactatctacgtgcgatgagtatttctcccgccacagacattattttgcaaatcccaacagtgaagatgtgcgaaatgaattgcaaaccacatatcaaaatttcatgacaatctaacggttaacgaatctgggatcatagttttacggagacagttttggatttttacgggaaaaaaagctacgatacaaaagatatttctctcaactccaacatgttttcataattcccaatggtgagaatattcagaaatgagttctgaacctggtgctcaaatttcacgatgatctaacggtgaatgagtctgagagggttttggtggtatgcgggaaaagagatcgtca

SEQ ID NO: 15412 - DNA, 373 bp, Glycine max
  unsure (1)..(373): unsure at all n locations
agctntgagcaaatncaaacgtatttnattttttttgtcggangncngancgacccccgcaatatatcaagatgctcgaaatggaataccgaaaccctgagcaaatccaaactacaataactttttactccgatgtctgatagagtcccgtaatatatcgagatgctcgaaatggaataccgaagctctgagcaaattcaaacaacaataactttttactcggatgtccgattgagtcccgtaatatatcgaaacgcttgaaattgaatgctgtagctctgagcaaattcaaacgacattaactatttactcggatggccgactgagtccggcaatatatcgagacgctcgaaatggaataccgaatctctga

SEQ ID NO: 15413 - DNA, 392 bp, Glycine max
  unsure (1)..(392): unsure at all n locations
attccatttcgagcgacncgagatattactagtttcaatcggacatccgagtaaaaatttattgtcgtttgaatttgatcagagcttcaacattcaatttcgagcatctcgatatattacgggactcaatcagacatccgagtaaaaagttattgtcgttcgaatttgctcagagcttctacattcaatttcgagcgttccgatatattacgggactcaatcggacatccgagtaaaaagttattgtcgtttgaatatgctcagagcttcggtattccagttcgagcgtctcgatatattacgggactcaatcagacatccgagtaacaagttattgtcgcttgaatttgctcacagcttccgtattccatctcgagcgtctcgatatatta

SEQ ID NO: 15414 - DNA, 333 bp, Glycine max
  unsure (1)..(333): unsure at all n locations
agcgttgcggantgggncgtcttcggccttatgttttatgngagccagaaaagaagaaaatattatcatcctgctgtgctgaatgcataaactggtgcaaaagaggacgatgagaatgacggataaaccctggctgcgatcgagattcctacactggcatatttcacatcaaacgaacaatgtcattacataactcatttcaacccttgtgattacccaccacccaatgatgcacaaaggccatccccaaatcacccgcatgactgacctgccacatgacccatgccaaacaccacctttatctcaaactcaaacaccaactaaggaatgaat

SEQ ID NO: 15415 - DNA, 484 bp, Glycine max
  unsure (1)..(484): unsure at all n locations
tgaactatgcgtcgaggtcggaacttngaaantgacgcttgccggattggtcttcgccagggaaaggactanttgttatctgtaaacacgcaaanacaaccaccctgcctggacgaacgagaccactggggccaanaaagagggtgaggatgagggacaacaccacgctgcgactggcatccctgtgtggcccagagtaccacccaaccaacaacgtncacactcaaccaataacaaactctctcctcacctactgcgcatatatgcataaaggccaaccctaaatcagccaccaagcctgtctaccgcaccttcaatgacgaacaccacctttagcaaaaccaaanaacacccaccaaaaacgaattctgcagccagacagcccgtagaatcacccgcactcaagagcctacgctgacctgctccctagccacctgatcatcgaatggtagccatacacctagccaacggcaacaacaccccg

SEQ ID NO: 15416 - DNA, 421 bp, Glycine max
  unsure (1)..(421): unsure at all n locations
agcttatcctcacgtaaagcttattcaatatcataaattcctaaagagaatttcagatcttgcttccaattatggtaatttgatacattcaagatctcaatggaagcaaaacaattgttcacagaaaattttactgttaagtcaaaacaagaatgcattagaacatattacaggacaagatatagccaaaaaaataaacaagctatcaatgcgaggccaatataatagcacattcccctttgggcaaaatgcataaaccaaggttacaacctaagccaatacctaagatgggttaatccatgagaatacacaaagttcagaaaattgtcccctttgggcagacaaatccctcaactcggtgcattccccaataactacatncattcttaactcccaaccaaacacagaacaacctcctttg

SEQ ID NO: 15417 - DNA, 459 bp, Glycine max
  unsure (1)..(459): unsure at all n locations
tgtaggattgtggngtacccatcacatgtggtactatgtgtgggtcgggcgatggtgcacaacaagttttccacatccacaaagcacgcataaacccaccatcccctgttgcccacctccaactgagctcacgtactcccacgtagcccatatcctcgtttctctcaacaccgggtccccatcaatcctcccaagcttccccaacattcaagtaacacaacattcaaacagcacaagctatcacagccaagcaaaacagagcaagggcagaaaactctgccaaaacaccaaccaaaatcacagtttttctcatttaaagaccccagtaacaattccttcgatccaattcgttaaccggtggatcgattccaaaattntactggaagtctatagtacataagcctacattntgaccgttgggatctactagaaaacatccagaactcactctgcactact

SEQ ID NO: 15418 - DNA, 323 bp, Glycine max
  unsure (1)..(323): unsure at all n locations
agctntctaganatctatcatttactttatatttttctcagntattaatatctacccatttatgtttcacatgtttgcgcatattataagcttgcggctattgaattatagcaaacgctttcattagaacattctaaaattgaaaagctttacaggttgacctaactcagtatgtaaagaagcacgaatatgtttttgatgccgntttgaacgaggaggttacaaacgatgagataactataatgtatttgaatccctggctgaaagaataaacggacaaatacataggccaactcagctctatttttaatcttgtgatttcc

SEQ ID NO: 15419 - DNA, 419 bp, Glycine max
  unsure (1)..(419): unsure at all n locations
gacgcataatctcccatttcatgtttccaanacngcatatgataaaccattgtagntgttatacttaagacatttacggacctggtttcatctgatgtaatactatacccattttataaatgaatgttctaaactctcttgaatttacctttattcaacacaaatctcaagctttttttatccttaatttgctcatttcaaaataatgatagaaaaccaacttggtaccaacaatgataaaaaaacgtactgcgagaaaggtatgctcagatataatttctaacattcttgattgctgacttttcagaagtttgcactctatgacacatcacacggtgacactttcctcaacatccttgtcggtctgaaccctccgtangtaaccctttnttagacctcaataatcttcttcaatagct

SEQ ID NO: 15420 - DNA, 404 bp, Glycine max
  unsure (1)..(404): unsure at all n locations
agctttnggaggctgtgttcattttttcttgctctgatagcgcnngggaaagaacagtacaggtggttccttaaaaaggcggaatgacagtggtacgaaatgagatgaatgacttgataccaacactaactgccactggttggtggatgtgtatcgactatcgcacgttgaatgaagccacacataatgaccatttccccttaccttttatggatcacatgctggaaaggcttgcagggcacgcatactactgcttntggatggatattcatgatacaaccatatcgcggtataccccacagatcaggagaagacggcctttacatgcccctntcgcgtctttgcttacataaagatcgcattcgggttatgtatcccactaccttcttcagaggtgcatgcta

SEQ ID NO: 15421 - DNA, 414 bp, Glycine max
  unsure (1)..(414): unsure at all n locations
tctganactagcctatctaccattctatggtttaagactcctaannctcaccctagagttctgaacagggaaataattgcaaataataaaacctaactctaagcaatgtaatcaacaacctattcacaacttgtcttcgaaaatttatcacatatccatcttttaaattaaaagaactattgtcgcaacctacccttcgacaggggtgcgaacaggccaaaataaataggccaacgcgtttgtctccaagggagaaaacacatagagttgccaccaatgtttatttgaggaaaactttataaaaaccaaaaaggggtttgtgagttttgaaaataacggcttgggatttgttacacatggcgaacgtattagcaccctacgcacctgtcacaaaggacgacaacctttaatcga

SEQ ID NO: 15422 - DNA, 417 bp, Glycine max
agcttgtattacgaaattgttataaatacttactattttctttattaatcactaaatagcaaaataaaactaaaaattgtgacttttgtttctcgatcggttcaaaggtgtcaacttggaagcaatggacacatagttggtttctcagaagaaggttttgtttgaattcccagtacgtcttagggtcgttgcagatgatcatgaccccactattcttgataacattcttaatatgtgttctcgatgccactatcgcggtaatttcaattaattgttactatttcttgtacaaagatttgatctttttttattgatgaattgtaatatgttgcagctgtggcatactctgatgcctcacttgctattttgcgaggaaactctggagtcaaaatcaaccaccaaaaaaacaagattctg

SEQ ID NO: 15423 - DNA, 347 bp, Glycine max
  unsure (1)..(347): unsure at all n locations
gttttcacttagctagtcaaaatttaagctanctaanagtcactnaaaaaaatatttaagctttcataataaggctngactgcatttaaaaggagggggagtcttatttgcatgaattacagccatcgagagggaacttctttggctccactcttcatttttcctcctcctgtgtttgagctacccagaaagggtactaatctccaccatgggtagatcaaccaactcaatctcttctatctttgaatttaaatatatatatatatatatatatatatataatataatgtagatttgcttttatttaagttgtgggaattcaaccaggatgttttggactgattgtg

SEQ ID NO: 15424 - DNA, 447 bp, Glycine max
  unsure (1)..(447): unsure at all n locations
gagtcatagatgctggataanacataattatagatttgtttngcaacaggnatnattgagctcatcacctcacgaacgaattctattaattattttaatacgggtaattctttggacataaaacataataacttgcattttacatgcatttgaaggatcaaatcagtataaagtaaaataaaggaggtaaataaggagaaattgtttatctttgaaggacataatgagaaattgttaagaaaataatcaaatactactgcccagttagatactttgacttggtgcccaacagcaattagagtgcatcaacaatttctattttgacttagtgtgcatgtgcaacagcaattatagctttcaacggtcaaggttctcactgccacattaactattgttgcccaagtggcacttatatatctacaatagtattacacaatataaaggagt

SEQ ID NO: 15425 - DNA, 460 bp, Glycine max
  unsure (1)..(460): unsure at all n locations
tcaagctngtacgaatgtcacaaacatcttcttcgaccttngcgattcttgacttcatcttattgaagcgcatgtccacttgtaactccaaagtatcaaacctttcaccaacaaaggtttgaagaccatcgaacctatccaaaatcttttgaagaagcgaggaatcttctccaccatgtaaatgtccttcttcatcaacatgtcgagcaccctttttcacccaagagccatcatgctctttttgataaccaaaggatgcaatgacaacaacgcctattagaaaggatctcttgattggaacataacgttcacaaacaagaggtatgttaaagtgttgaaggaagacggtgactangtgtggatatggcaatggagcatttaatcgcacagccctatgcatgcaatatcgaactaagtgtgcccaatcaatttgtagacctttatgagaagcccacataac

SEQ ID NO: 15426 - DNA, 459 bp, Glycine max
  unsure (1)..(459): unsure at all n locations
ataccttgaactcaanccggaccnacagagactcagcttgcggctaacaaaccaaacattttctatgttcttttgagcgatcatcgcctgacactcgtggctcaccacatgaacaaatatgcgctcagcgcgaggctagcactctcctgaatgactgtttttcagactacgttatctaagttgttcacaagtccatgttccacaaatagaaacacctatgtctaacagtcctcgataagctgattgactcgattgcacagattataaagcatgctctcaatgatcaaacgcatgacaacaagaagtgctgaaattaaagacagagtttgctcccatgaagcgcttccttaacgacattaactttatggctatacctcaatgcgtgatcataggttgaggaacttactctgagaaccatctgacctcctgccatacactgaacagacatagtgtcgtggc

SEQ ID NO: 15427 - DNA, 468 bp, Glycine max
  unsure (1)..(468): unsure at all n locations
actcaagctggaatacaatgaaactcgctaacttagcaaagctaagattcattctttttgctcaagntnccttcgnctagtggactgacagcgttacaacacttattcgttntgtctcagaataatctcttttttttaacaatcttaacacaaacatcttcaggctttatataaacttcaaagcttcaagccattgaggaatcccagctagccgatgtataatagctttggcgcttgacacgaggttgctattgtgtaaagagagagtggggaccacaaatgctttctgcaccatttcctcatagaagtatagtttgtcggtgtggcctagtactcaaagctgactntcaacatatagattgaaagacacattaactacatatgacaaaaggaattaagaatgtcaagacaagacatnttaaatcttcccttttgtgcgttatagcacaagtttcttactgaatctat

SEQ ID NO: 15428 - DNA, 418 bp, Glycine max
  unsure (1)..(418): unsure at all n locations
atcctgactcaccataaaccgtgatncattgtgagaatgncaanccttaccctcggaagcgaaaagaatagaagggaaatttccaatcaaagaaaaggaaagaacgaagatttccaatcaaagagaaagccaaaaaagaaaagaaggaaaattcccaatcaaagagtgggagatagcacaaagaaaagaaagaaaattcccaatcaaagaatgggagaaagtaaaaaaggaagaagaagaaggaaagaaagctcctgatcagggatcgaaagataacagaagaaatgtgcagaaaggtctttggaccggacaatatctgaataatacagaattgtcaccaaatgaacaaaaagaaggaaaggaaaccacgacctaaaatggtcttctccctttgattaccaaccacaatcccgtgcgc

SEQ ID NO: 15429 - DNA, 402 bp, Glycine max
agcttgcaacagaggagttatgcaagcactatattattgattttggaattgagtgccgcattgtgaggttccacaacatatacggtccttttgggacatggaaaggcatgctttacactgaattgaaaacttttatagttttgtctttaccaaatgggtaaattggtagacattttatgttttggtaaccttttggatttaataagtttgtgttttgttgttttgtcatacaggtggaagggagaaggctcctgctgctttttgtcgtaaagttatcacttcctctgatagaattgagatgtggggggatggattgcaaacacgatcatttaccttcattgatgaatgtgttgaaggggtgctcaagtatgtcttggctgatttgtggctaataactaattt

SEQ ID NO: 15430 - DNA, 449 bp, Glycine max
  unsure (1)..(449): unsure at all n locations
cctaatttctgtanaaaataaagtttacctaattattagncttgtattaatcaaatctgtataacatggctttgggttccacacaataaaaagtaaatcatggcatttaatttccctaaagaagattattaattaatttatatattattgtaattttttatgcatatattattgccaatatatctagctatatatatatatatatatatatatgcgcatttagaattcaaatgatcacatgctacattcatgtttggtgcatattataatttacgtagaattccgtccagctagctaatcaattagaatcgttcatgtgatttaagaccattttagaaaatgactataaaactagaaaaaaagacttggaatcaaatgactaccattcgtctagcatttaaatatagttaactgcaaagttgtaattntaaacaagaaaataaaaaatg

SEQ ID NO: 15431 - DNA, 393 bp, Glycine max
ccgttatcatcagctaaggcccctaaatgaccgctcagtgataaaggaggtaggggtgcagagacaaccaggaggtttgcctagaagcagccacccttgaaagagtgcgtaatagctcactgatcgagcgctcttgcgccgaagatgaacggggctaagcgatctgccgaagctgtgggatgtaaaaaagaatcggtaggggagcgttccgccttagagggaaggacccgcgcgagcagtgctggacgaagcggaagcgagaatgtcggcttgagtaacgcaaacgttggtgagaatccaatgcctcgaaaacccaagggttcctccgcaaggttcgtccacggagggtgagtcacggcctaagatcatgccgaatggcgtagtcgatggact

SEQ ID NO: 15432 - DNA, 450 bp, Glycine max
tccataaaagccaaactaagcaataaagtactctcgtatttttccctctgcctccggttgtcgggcaatcccttctacagcttgccctgcagcagtgccttgaccaaccccaggtccaatagaagcaagccctacggccaacccagcagcaataacagaagcagcagaaataattggattcatgataatttcctcgtaacctaaatataaaataaagaaatagttaatgatataatcaaccaataaattatgacttaatttttcaattatcaagatttattcggtttaaagtaattaataagaattccgaattgaaaataataatagttattgaactctacgaattacttcgagatttattttttcgtctctacctacatacatagcttttttttgtgaatatgtagaacctctggtcttatcctaccttcaatttggaatcattctttg

SEQ ID NO: 15433 - DNA, 387 bp, Glycine max
  unsure (1)..(387): unsure at all n locations
tgcatgcacaaagtgccagtggaggacgacagtatctnnggttcatattgtccagagaagcggccagcaagactaacccacataccttattggctgacaaattctcaagttggaggttatggaaaacctgcccctgaagatcttactgctgattatggacactggaaacgtatagtgtccaagtcttcatttaatgggataagaattaattggtccaatatgccgaatgtcatggatatgagatcactctatggagggtgagtgaaatctgttcgttcccatgttactctgaattatattaaccggccattttgacatacttcactagctctttcggctacaggttngctgctgtcttgatagattagaatatttgggtcatgaatg

SEQ ID NO: 15434 - DNA, 423 bp, Glycine max
  unsure (1)..(423): unsure at all n locations
agcttagcagaccaaatcattctttatgtatgtgtgggngataagcgcttgagactcgtggcttatcacatgaacaaatatgcgcttagcgcgaggcttgcacttagcgaaaggactgtttttcagaaaacgttttctaagttgtttttcagtcctttttccaagaaattgaaacccttatgtctaacattcaaggctaagctgatatactccattgcacaaattataaagcaagttcccaatgatctaatgcatgaaaacaaaaattgctgaaattaaaaactgggttgcctcccaggaagcgcttctttaacgtcattagcttcatgcttttacctcattgggtgatcttatgttttggttcttactttcagaacctcttgacctccttccattacctgtaagcagacattgtgttctgga

SEQ ID NO: 15435 - DNA, 380 bp, Glycine max
  unsure (1)..(380): unsure at all n locations
gcacattcttggtggngaagctccttcttcatggcttattccctagtggattgtgcctcccctctccttttctcctttgccttccgctgcatctccatggtggaaaatcaccattgaaggacctcattgaagctcaaagatctagcctccataaaagctccacaagcaagcttccatcaagtggtaatcagagcacaagagcttcaagtaggtgctccataaacctcaattaattttcagctttaccttctcctccattgttgtttcttcatttttctccatgtatctcctcatatgtcttgtgctaaatgtttttaacatgattctttagagtttccaccgattaaacttgctatagaagctagaattgattntctatg

SEQ ID NO: 15436 - DNA, 327 bp, Glycine max
agcttcgaagcgcggggctgtcttcgttattggactcatcagcatcatgttcgtttctgcgcgcatcaacaaagccttgttcggtgtctaaccatctccggcgaatttcacggcgacgcccttgccgaggatcccgcggtcgaagttgcggtacacgtggacgccggtgtcgttcaccataaaactattatccagagcgcctacggttagggtttggaccccgccattcgcgggctcttcgaattcctccattaaatcgtttctccgccgcgacggcgacggcgaaggagacggttctccggagactgcgttctcccacacagaatc

SEQ ID NO: 15437 - DNA, 430 bp, Glycine max
  unsure (1)..(430): unsure at all n locations
tcgaactntggaatnncctagctgaaattcgtttcgttggttactgcgtcggnctccgagctatgcgtggagctgagggtggtgatggtggcttcgccgtcagaggcggtaacatctactgcgggagaaaagaggaaactgatttcagaggaatcgctgtaatcttcgcttgcgtttctgttccgcagaacctgttacaagaattcgttgatctgtgttcttctttgaagtggaattcccttgtttgttttgcccattatctatcagcgtgagttntttcttttctggattttgtctttgttttttgggctttcaatcgtttcatttatctctatttcatgtagttgcttttgtgttccttgagaactgctttgaccgcgtatcagatgaaattagtggatcaagtgatcaacaatttaataaaattgat

SEQ ID NO: 15438 - DNA, 450 bp, Glycine max
  unsure (1)..(450): unsure at all n locations
agaaactcacgcttctcccctatnttcctataaataggtggaggagtgaagtagatttatgcncaaccctcctcggatctgagattcacttaaaattagtaagacaaattgtttccgtgaagaaaatccaagccgaggcgcttccgtaacgtttccatgggtgatttcgcgaagattttcaaccgttcttcgacgttcttcgtttgttcttcgtcgttcttcggtcttcaatcggtaagttcccaaaatcaaacttttcaattcattctatgtacccttagtggtcctcatttgttttcacgtgcttttattttcatttcatttacttttcgtaccctcttttgacgtgctttagtcatttacttaagtcattttctcccctaatcaacaataaaataaatttccaccgatcatttgaattgtagcatccgttaatttctggttaaatga

SEQ ID NO: 15439 - DNA, 429 bp, Glycine max
  unsure (1)..(429): unsure at all n locations
agctnttaagtcccactcgttagttccttgtgggcttctagttatatgggccaattgtcataatttgtgttaacagcttgagtagtgcactaaatgtctaagtagtaaaaactcgaaagtctgagtgtcaaatttcacaagaactttgttttgttaatgtatcgtataatttttaatttataagaaaagaaataaagagagataaatgataaataacaagaataagaattaataacagataattgtagaaaaagaaaataatatgaagcaaaataatcagtagagaattcaatgggatcagaatgttaggacctagcatgtcttgtttgcctaagatatatggtttttagatttttctttatcaatcaagtaaatntatcctatccacatctattagattacttgccactgatgtctcacgatgcctat

SEQ ID NO: 15440 - DNA, 428 bp, Glycine max
  unsure (1)..(428): unsure at all n locations
ctacttcacatggatttgatgttgcctatgcaagttgaaagccttggaggaaagaggtatgcctatgttgttgtggatgatttctccagatttacctgngtaaactttatcagagagaaatcagaaacctttgaagtattcaaagagttgagtctaagacttcaaagagagaaagactgtgtcatcaagagaatcaggagtgaccatggcagagaatttgaaaacagcaggttcactgaattctgcacatctgaaggcatcactcatgagttctctgcagccattacaccacaacagaatgggatagttgagaggaaaaacaggaccttgcaagaggctgctcgggtcatgcttcatgccaaagaacttccctataatctctgggctgaagccatgaacacagcatgctacatccacaacagagtcac

SEQ ID NO: 15441 - DNA, 376 bp, Glycine max
gagggaacacgctgcagaagatttcaaaaataactaaagaagtaagaagatattacacaatgctatattaactgtaattgtcaatcatattatattcagaataaaagccattaaccacaggaatgcttttcaaaacaaaagaatgtttggaggtcacagtcacagtaatgaaaagcatggtatagcttaagcaaacaaaggagaaacgataaggtttggagaaaaaaattggtagcatataatatttaattctattaaaattaagacataatactgtgtgcatatgatgaaacaccattagattcagcataatgcaattgaataggcgaatcatcctacataactgacatggacaaagagtgttgaggagcaatca

SEQ ID NO: 15442 - DNA, 389 bp, Glycine max
  unsure (1)..(389): unsure at all n locations
tcactntctgagntnntatttccctggttttgagagcttcttttttagtgtatccttctttgtcttcttcggtcatccttgttttttggtacttcctttatcaccaaaagttcacccaatcggggagagtttaaatgatgacccctttcaccatcactgtggctttaatgctgccagtgactaagagtctagctcccagttggtggtgtcgccactataggtggcgcaatccaccctgacgctggcatcactgccactattcttccaaacattagaggggacaaggctaagtctcctttgccaaatcccatcacaaatgttattaacttggactcagaggctactgttgttcaagtcatagccctttgtcaattattcatccttcttct

SEQ ID NO: 15443 - DNA, 371 bp, Glycine max
  unsure (1)..(371): unsure at all n locations
agcttttcgattcattctatgcacccgtatagtgttttattgtttttcgngcagacccacccgcatgacganaactatatataccccctgctgacgtgcttaagccgcactacttaagtcatttctcgcttaacttaaaaatacaaaaaatattccaccgaacgttcgaattatagttatccgtgaacttcgcgttaaaataaataccgaccgatcggtcgtgccatatccacgttggaaatgaaaaagaggtactatataatataataatcaaaaagacatcttttacttaaataaagcggacaatcaatcggacggtttctctttgggatttctcattcttaatcgaattgattaactaactaaagaga

SEQ ID NO: 15444 - DNA, 232 bp, Glycine max
  unsure (1)..(232): unsure at all n locations
gcctgaatcggacctccgaagaaaaatatgaccatttgactttttaagcttcgttgtgaatttcgagctcctcgatatctgacgtgcctgaatccgacattcgagtgaacagtcgggacaacttccatttctccagagcttccgctgttcaattctgagcgtctcgatatgtgatgctcctgaatcggaccctcctgtgataacttatgaccattngaattgctctagatct

SEQ ID NO: 15445 - DNA, 420 bp, Glycine max
  unsure (1)..(420): unsure at all n locations
agcttctatataagctgaaccatnnatctataaacttctgttgagnnntattcagaaaattagagtttatctcttttatcttagtgagagtgattcaagaacaccctggctgtatcaaaggactttcacaacctttgtgtgttgccctcgccggaaagagtgattctttccttcctttcatcttcaatcttgttctttcaaaccacaattccagaaaatccacttctgcccagaattatctcgtggccataactcccattttacgcactcaaattaagtgattcttgagcctaaattgaatttcaaaatgagacctttcacctcgttttggaatcacctcatttggagccctgtagcttgagttattgtcatttctatatttctgtccagccaccacttaatcaatttccgcattcatta

SEQ ID NO: 15446 - DNA, 443 bp, Glycine max
  unsure (1)..(443): unsure at all n locations
tctagtcgtccatagacctcctctgtggtacgggctagttaacgtttcatctgngcattcatcgcatccactaacagacgttgagcgccgtccaactgatggtactcgtcaccaccaccacctgctccagccataattcaacaggaaaaaaaaaatgtgcaataaaaattattaaggtttcaggacctcacaacactctactcacgtctcttagatggtagtacactcgtgtttaatgctctcaataggctnttgtgtaatgtattccctcttgccttttaccactcgtgtttcctcttaagttcctggatggaccaaattagacacacaaggtaatataaaataaaaggaaagacaatataatgatcacaaacagatttgatttgggataacaacttggactttgattggataataatatattagatttggatttggataac

SEQ ID NO: 15447 - DNA, 449 bp, Glycine max
  unsure (1)..(449): unsure at all n locations
tgtagcagctgtactatgcttgcatttgacttanattattacttagtataaatagtaaatacaagtatgaaatgagattagtgttttgtatcacggcatcactattaggcatgagaatcaatttcccaaacaattacaagtgtattatggaaggaagaatgaaaagggaaattagttttaaaagggggcaattagaagaattagctggctaactgttagtgtgggggttctctattataaataggcatgtaaatactgaggcaggattatgttttgtaagaacttggatatacaactgggattatccagtgtgaaaggggagtgctcctttggttatagttgtgtacatttgtttgtccttattgtacacaattctgacaatgttttttgacttctttctctttgactctaatttgcctactggcaccaatttgtgtgtgtgataatca

SEQ ID NO: 15448 - DNA, 159 bp, Glycine max
agctcgccacccagctcgcttttcgattttgtttctaccgccagaaagcggcgccttctggatgaacttcctggaaggcacatgtgggcctaattgctattagcacccacgttgactaaatacaccccctaccttttttagctgattcttttatttgaa

SEQ ID NO: 15449 - DNA, 438 bp, Glycine max
  unsure (1)..(438): unsure at all n locations
tatgcgcatatttccttacaacgncactttacaagtcattctatcaactaagaaaaatgcacccatatacaatcaaggtagcttcattacctagattatttacatgtacttccaaggtgtatttgttatttacatcacacacgcctccttggctgaatttacatacatgcatactcaaagcattntggggtaccaaaaactgcacatgcgctcatcttggtatttctaatacccctacatatacaaacttcacgatgaatcttgactacctacacaataaggtgctacatttcatgctttttttcaagtttttgctacctaaagccacatgcaaattcaagcatattttcctttgctgactaaaattgtattcaaattagaacgtatatatttctttgtaatatgttttcttcacataacatgcaacatatctatata

SEQ ID NO: 15450 - DNA, 418 bp, Glycine max
  unsure (1)..(418): unsure at all n locations
agcttcagcacanaaatattatgactgtataatgtattaacctaaaatcaacacaaaaacatgattcaagagtagatctataaaatttgaaccataggaatgcaagaacaagtgtagatctaagatttaatcggtttatttttttgaatctactataaacaacaccaaaaaacaagacaatggaggatatacatgaagaataagatgaagaacaaggaattaaagtgaattgaccaaacaaaaagatagtggaagcaaaagaacatcacctagatgaagatgctcttgataccacatgatgtagctccatgtggagcttgtaggtcttggatcttcttcatcaatggattcccttgcttcttgaggtctgattgcagcagaatggagaaggagaaagatgaatagagatgccacttca

SEQ ID NO: 15451 - DNA, 451 bp, Glycine max
  unsure (1)..(451): unsure at all n locations
tatgggattatggggcacccgncttatgtggtactatgtggcgatcggggganggcgcanaccaactctcccacttccacaaaccanacagaaacacaccatccccagttgcccaccttcaaattgagctcatgcactcctacgtagcccttatcctcgttcctctcagcaccgggtccccatcaacccctccaagcttccacaatatccaaacaattcaattccaaatatcatgaaactaccctaaaccaagaaaacagagtagaggcagaaaactctgtccaaaactcactcaaataccacagctttccttactcatataccccagtaacattctcttcgttttgattcgttaaccggtggatcgccttgaaaantttactggaggttcctagtacataaatctacattntgaccttngggatctactagaaaacatctagaacaagat

SEQ ID NO: 15452 - DNA, 413 bp, Glycine max
  unsure (1)..(413): unsure at all n locations
agcttacacgtgccanctgttggctttagtttaaccnncngagaacgctggggaggacctttcccttcgaggactcgcactccttgcttactgcacctcctttgctattgacaccccttcccttacatttgccgtaacagaatccaaaatattaacatgcttggatactcatggaaaacccgttaaacgggaaaaaaaatataattttctagacatgaacgtagaagtgtaaagagtgctacttttgaaaaaaacgttgttacactgaacaaaacattttttcaaacacgcgttaagacattaggtctgtaaatcctttttagtcataggttatttaacttgtccttcatagttaataatgtgagacnttttactcacacatgcgctccaaacaatagcccgaatgagccaaa

SEQ ID NO: 15453 - DNA, 427 bp, Glycine max
  unsure (1)..(427): unsure at all n locations
tataacttacaagccttcaactaactgatctgttagttttatcaaacataaccatactgaagtttcattagttnttntatttcatatatttactagcaacattctaaactctagtttccacaacttacttgtttagcttctaaaaattagtttttaaacatatttacataattctaaaaaaacaaattatgaaaatataaccttttacttatagagtataatttcaaaaattttaaatttagtcatgtatacaagagcatctttagaagaaagttttttttttcttttataaaaaaaggtcaaagctgtatttaaaaaaaaattcaaaaaaaaaaactcacatatatacgtcatcattgatcgaagccttactatcaaaccaaaaattaggtgaattattcttacaccctatgatgttaactgcaca

SEQ ID NO: 15454 - DNA, 533 bp, Glycine max
  unsure (1)..(533): unsure at all n locations
cccattgaacnccttgangttcgaattcgnagnttgccncnnncaccncnnnnanagnnngacacnggcaggccatgcanagtctggcctagacccannnggaagtatatctaacatccnngtcttcacnnnnangggagagggaccatgacgttggactggctctntgatctttactccaggaggcgcacntcagagaacaccacacctgctactcgaactaatagaacacctacacaaacactatagtgagctacaccccaagcggacacgagtgctatatttccatcgagggtgctttacctaaggacagaaagaaccagcctgagaggacccacgtgagcccgaagctcttactggcactaaattctcatcaaactcaacaactagaagtctatcgatgaaaaccctgaagacatgaagagaccgtctcacaaggcgcggggcgcatcagtgagcccacaagggctcgataccatgcatacaaaccaaactcggcatgcaagacggaaccactcctcaccctttataaa

SEQ ID NO: 15455 - DNA, 216 bp, Glycine max
aaaaccttcagaagcacttaatctaactccttgacgacaaaaaaaaactgctagacatggagaaacttactctggctatgcaaatgcttattccgccattgaaggataaggcggttccataaaatgccatagctaaggatgcttattccactatgaactaagaaaatgactttgagtatgcgagagataaaaatgagagagtggtaggaacttaat

SEQ ID NO: 15456 - DNA, 419 bp, Glycine max
  unsure (1)..(419): unsure at all n locations
agcttagtgaattatttatacaatctaattgtcttatctggaccaatcccagcttccataggctacttggtccatttggactccttgttccttgatagaaatgaactctctgggtccattcctttcatcattggaaatttgtcaaagcttagtgaattatttatatactctaatgaactcactggatcaattccttccactattggaaatttatcaaatggcagggcattactattttttggaaatcaacttggtggcaagattccaatagaaatgaacatgcttactgctctggaaaatttgcagctagctgacaataattntataggccatttacctcaaaacatctgcattggtggaacgttgaaatatntttccgctgaaaataacaacttcataggcccaattccagtgagttg

SEQ ID NO: 15457 - DNA, 450 bp, Glycine max
  unsure (1)..(450): unsure at all n locations
tagatcgactacttgccatgaacctattntttaggtcttgttctggcttttatacaagcttgtctgccccttaattcatttaaaagtctgtttcatattaagaagtgtaaaaaaatatattnttttttctttaacaaagccaaagatttttgttaaaataataaagcaattttaaattacaagatgtggccaaaattaaacttacctacaaacattacatgtgataaaataccaaaatcttttactattcatctatgtttacattaattaacttattttaaacatttatcaaaccactacaattttattaaaatagatttataatttcattaatataattataatattatatatcatattagtaataatatatttaataaaaaaatattgtttctaaatgagtcaatctatcanatntaatagattnttcttatgactnggatcctaaca

SEQ ID NO: 15458 - DNA, 345 bp, Glycine max
  unsure (1)..(345): unsure at all n locations
agctngngcgaancntatcactcttgcattgtatctctaacatgcattcaatctttctttacccactccggacgcgtggttctttagagaaaaacaccataactaaacgcgccacaaggcatccctatcgcaccagatgcgaatctacaacgatgggtgatcaagaggagacacacgatctgatgagagcccacatgtctgctctgacagaacatatggcttacatgatggaggccatgtaacgaatgaggcagctcatggagactaacgaggccaccgctgtcgctgacattacggctgacgaagcagacccaactctcttggcaactgcgcaccatcctgcct

SEQ ID NO: 15459 - DNA, 408 bp, Glycine max
  unsure (1)..(408): unsure at all n locations
tgtagagatcctcattgtgctaatccgtaagtttgacttccccangcagnttaaagacttcagacctatcaatttatgtactatgcatcataaactgatttccaaggttcttgtccaccattttcgcccttctttagaagagatcataagccttcttcaacgaagtttcatgccttggaagggaacctttgataatgccattgtagctcaagaggttgttcattacatgcatcattagaaagctaagaaggggatcatggcttttcaaattggcctagaaaaggcctatgacatggttagataggatttcttggagatgtctctcatcatattcaacttctcgtgaatcattattgacctgatcatatggggtattcgatatacttctttgtcccgtatgtggaatgg

SEQ ID NO: 15460 - DNA, 356 bp, Glycine max
  unsure (1)..(356): unsure at all n locations
agcttgctcaaaacaatatcaatttttcttattcacncaangcagacaanngctcattcaactcaatcacaacacttcatttcatacgaaatcaaaccactgaatatcatattcaatcagttcactgttcaaacatgcttttgtacaagctacaaacactaaaacaacataaatttaaaagtctggaatttaaaagactaataaagcataaactaaataactgataaaataaaactggtcataatttgcaaaaaattttaaaaaaaaactatgcaaaatttaaaactcttggtcatcctactgctggtcttctgcatgctcgttcagatccagcactagagcagctggtggatcct

SEQ ID NO: 15461 - DNA, 380 bp, Glycine max
  unsure (1)..(380): unsure at all n locations
nggattaattcggcctgacgagggatcgatgtgttagttatttangctacaacatagaacacaagcgcatgattgatcagagaaatatatttctatgcatcagcttgtttgttagaaagacccaacatatctacctactgctgtcattttatttaccttgcattttatacgttttagcatacaagtttactttaaattctgtttgaaattatcacttatacatgttctctcaacaatgcttcaattctgaacttaattcacgctaacattagttccctgtgttcgatactcggattcatccgttctaatattaaatacttgacgatccggcgcgctttccggtanacccncattaaaatttccttgagacataaatgcac

SEQ ID NO: 15462 - DNA, 426 bp, Glycine max
  unsure (1)..(426): unsure at all n locations
agctntattgaaatgaaaaatagacagagaaattttatgcattgcgcatatcagagaatagaacctcatcatcattcttttggtctcgtgatccagaagacttcttcaaactatcattatccttacctgccatagaagcaaaacatacggggagctagccattagtataacttctttgatgaattgcactataatgagtgaacagaaaaataaattggtttaatttgttttatattgcataaatattccttaacaaaaaagacaacgatgataggcttcaaagtttaggaaactgctgcacattaattcacacaaattaattaatatatatgtacatgaaatcaaaaaacaagttttccactccgagactagtgatgaatgctgactagcacactcacaagagatttcaatgccttttcactcagt

SEQ ID NO: 15463 - DNA, 128 bp, Glycine max
  unsure (1)..(128): unsure at all n locations
tctggcattgtgttctgttgtaatcgattactgcctcattntattcaattacatgttatggtttatggattcttttggctttgtgttctattttaatcgattacaaaggcctttatgggggggggggt

SEQ ID NO: 15464 - DNA, 432 bp, Glycine max
  unsure (1)..(432): unsure at all n locations
acctgaggcatgcaagcttgtaaaaccaaattcttgtcttttaagctanttctgagnctaacaaaaataagaagatttgttggtttgattacacaatgactgacactctatcgtcttacaaacgaataagaaaattcaacacgtagtgttttctcttgatatgaacaaagtttttagacagactttctaaactttacaagaatttacaaagagagttttttatgcaaataatgaaatagtgaacacttcaaatcaaacttcatgtcttcaaatcttctagtatttatttgcctctttcaatcaattatatgtagtctctaaactgacatatttcctctctttaagcttgcatttgaagaaatggccattggggtattcaacaagtgtattaaatgcatgtacttcttcatgttgagaaaccactcttcgtcg

SEQ ID NO: 15465 - DNA, 454 bp, Glycine max
  unsure (1)..(454): unsure at all n locations
tgagatgaggaagtgtagaaggatgaaacttcctgcttttattcgtttaccacagagtggtacctggagatatgtcgcggtggtcaggagaccttgcggacgtcaggtggggtgctattgcccaaaaccaagcttgaccaatcccgacccaacccgggcatagtcagtcagtgagagcatgtgatgtacctaagcaggcaagctcttggcaatcaacagataaaagaaacaaaaccacaaagcaaagaggcttatgtggtggctggccagctgtgaactttgtttgatatgtgggttatggcctctggtaatcgattaccaagagtggataatcgattacaaggcttanaaatgaagacaggaggctaagatggtctctggtaatcgattaccaaggggtgtaatcgattaccaggcttgaaaacgaggtcaggaagctaggagagcttctggt

SEQ ID NO: 15466 - DNA, 282 bp, Glycine max
  unsure (1)..(282): unsure at all n locations
taatgctaaagagaagcaaaangacaaacacctaatggatctctttgatgggtggccactaggctttggtgctgtccacaattcaatatatgtggttattgacacagtgataaagagatgggttgaaacctgctttcttgtcatatgcaaatagagataatatggacagattgatggaattgtgtgaattatcaatctaaaactgcatatatttttttcttcgtgcaggatttattgcagatattattaactccaatctatcagtgtctaacattctaatgt

SEQ ID NO: 15467 - DNA, 283 bp, Glycine max
taccactattccttatggagatttcaagataactcttgcaccacacctagttttacgggagaactcatctttgaacaatttccaagctagttttcttgttccacgtttgactatgtaggcatcatttttgctatgaaatctgctaatcattgcacctttagttcttatcggggtggatattgcaaatcgtactctgatagttttattgtcgaagtcatcatgcgtcctgctaggttaggttggtgcaatatttgtctaattggctggtttgtgataacgactt

SEQ ID NO: 15468 - DNA, 416 bp, Glycine max
  unsure (1)..(416): unsure at all n locations
agcttgtaggattatggggtacccatcacttgtggattatgtggcggncgggcgaaggtgcacaacaagttttccacatccacaatgcgcgcataaacccaccatcccctgttgcccacctccaactgagctcacgtactcccacgtagcccatatcctcgtttctctcaacaccgggtccccatcaatcctcccaagcttccacaacatccaagcaaaacaacattcacacagcacaagctatcacagccaagcaaaacaaagcaaaggcagaaaactctgccaaaacaccaaccaaaaatcacagcttttcccactcaaagaccccagtaacaattccttcgatccaatttgttaaccgttggatcgaactccaaaatttactggaagtctatagtgcataagcctacattttg

SEQ ID NO: 15469 - DNA, 354 bp, Glycine max
ttgagaatctagagctaagctgcacgcattcttctcataactaggctcacttgcttgcgaagctcccgttgtaagatacctatcgaagctagagcttagctcacttacttctctaatagctaagctcacctccttgagatgagaagcctgagcttagctcatcccccctatactagctgatctcacccgcatgacagaacaacatgacaatgctataacaaatgccttagttcatagactactcactatgccccgtcatacaaggctaaaaccctatactactatagtggtcgatgtacaaggccctgacgagagctatacctatcctaatattcactatgagaagcgggctta

SEQ ID NO: 15470 - DNA, 175 bp, Glycine max
cgggcaagctgataccatagcagagcatgatggctgcaccaacaacatctatttcttgcaagctggcaagaagattgttctcaaaccgttatctcctcaagaggtttgtgaggatcagataaaaatgagagaaaagaaaaagagtgagacactcgagaggaaatagagtgagaca

SEQ ID NO: 15471 - DNA, 407 bp, Glycine max
ctcaaacaaacaaatcaaacgtaacaagacaattatagttgctgtctgaatacctcacccacttaagtgtatcacacaattatggctattctctaatgaaacactcttgccttttaccactctaattccccttgagttcttaggcaattcaagagattatggccacaacaaagaacaattcaccactatgtgtaaaggtaatgctagagagacacggaaaggttaaccaagaaaaaggctaacaatgtttttacgcacaaatgaaggaaataaaattcagaatttatgaattcaagtaacaatccttcatgcaaccaatatattaccttacagagatttttttaaagctcttcaagcatgaaccattcagcccaattttttttttttaatcttgcttatacaaaaat

SEQ ID NO: 15472 - DNA, 446 bp, Glycine max
  unsure (1)..(446): unsure at all n locations
tattaaacatacttaggctgtgcgaagagattgctgttttgtctttcgacaaaggcgccaacaaggagctcgagaaagtnggtctaaaaatctcgaagagctttcctcttactaggactactctggcatctatggagtctttgtccctgccagtggtactatgaacaccttactgtattttcagttttgagattgatcatgactttgtgtgtgatgtttgggttcatttgctgagaacaagttcaggaaattgttctttctgctgatatgcaatgtgagaagtgccagaagagggttgctgatattattactaaaatgaatggtaagtaacttgcacatgattgtgaaattcagacattgctcattgattgctcttggagctctatagagacataagagatctgactcgacatttttgagtgatagacaacttactgaatgtgtga

SEQ ID NO: 15473 - DNA, 385 bp, Glycine max
  unsure (1)..(385): unsure at all n locations
agcttgtctacatgacanaatatcatgattatgattatgcgtgtgcagaagacatcaatcatgcacgttgtagaagatcttggacttctcaaacgactactctgtattgcactaatttattagaattttagattgaaaaaaaaacaatctattaatatagagatggtgtccaaaacagaaaatatattttatatataattagattaactaatttatatcagaattgcgaattatgaaatcttttaagaaaaggaatacactaaacacaacacttttagatgaaattattttagttgaatatattgagtgggattaaaggccatcaaggtaaaaacctgttttgcatacaatttcaaaagccgcttgagaaaaagaaacattttca

SEQ ID NO: 15474 - DNA, 442 bp, Glycine max
taattgatactgctggtgtggctaaaccaaataatacgttattctcctacatattctctattgacatgtaactgtcttaagtaagggatcatataaattctgttagctgaaattctatgttgaggacaccaacagggaattggcagggaagattggagttgtgatattgggcataggctagcaatgaaaagtgttgcatgggcacgatggtggtgattcacggcaaagagaatgaaaatatctgttatggttcgcgacaaggtggcgcttatggttatcaagaaacaattgtttctttacagggaaggaagtaagtgatgagaatgtcgttgatatgattaaaggtgtttcctgacaatgagtatttgtataggaatgtgaccaactcgattatattctcctcattgtgcacgaattcgatcttgtgcgcatgatgaatgac

SEQ ID NO: 15475 - DNA, 443 bp, Glycine max
  unsure (1)..(443): unsure at all n locations
agaaactcacgctngcgctgagctcttttgaccctagaagaactcttgaaattttttcttcancgaancccatatatttcttgtcttgtccctcttgaggatcgcntcaaggacttcacgatctattgtttggaaaaggtaattatttacctttaagtccttcaacttctgctcctcgatcaatatgcattgcgtctccgtaggctctattccatctgccaccatcaatatcccattctcaatgagatcctaatattctttggagcggagaaaattctccatcaacattgcccaatgatcataatgaccattaaaccttggaattgcacgctgcacgaaactgctactcccaccttctgccattcttctcaactcgttctactcgaaagaaagaaaaactgcagtttctttcttgactcacactcactgtttttctcacatgc

SEQ ID NO: 15476 - DNA, 265 bp, Glycine max
cacttgtatcgaccgttctatactaggcatgatgtttgatatacttcaagtcttcttatatacatgcttacggtggatcaaagacggtagaaaaatagatacatctctaagccatgtaagaacaatgagtttacacagtgtcatcgattgcaaggttttataatcaattacaaagctttagaacaagcaacataactctctcctacttgaaattcgacaagttctgacgaattaatcaattaccactttcattaatcaattacag

SEQ ID NO: 15477 - DNA, 390 bp, Glycine max
  unsure (1)..(390): unsure at all n locations
agctttngttcctttntatatttaagagttgttctgaaactcatcacgttgtctaaaaaagccttaaggtggatccaagtgctctgatcattcattagcatattcatgttttggtggcatactcaccactgtttgtttctttagggaactcaccataactaaaaaagcccaaaggcacccctataacactcgatccagaaataagatggaatggcttctatcacagaggccatgctaaagcttcaaaaaactatagaagataatgctacggcaaccgcttccaatacagctagggaagcagaaccggtgctatagcccgcaataaacttgggccgagacagaaacacgatgggtttcaatcggaggtatagtcctcaagcctacccttat

SEQ ID NO: 15478 - DNA, 443 bp, Glycine max
  unsure (1)..(443): unsure at all n locations
tagccctagaggggatggaccttttcaggtcttggagatgatcaataataatgcctataggttggacctgtcagcaccacttttaatatttctgatttaattccttttgcaggtggagctgatatagaggaggaggaaccaacatatttgaggtcaaatcctcttcaagggggaggggatgatgcaatcctccctaggaaaggaccagttaccagagccatgagcatgaggctccaagaggattgggctagagttgataaagaaggccttagggttctcatgaaccttatggtagatttttgagcccatgggccaaggttgggtccactcttctttgtaaatagtagaataggttgttttcttcttttgggccttgtattntggccattctagtagtatagggttntagcctctgtatttatggcactttgagtagtctttgt

SEQ ID NO: 15479 - DNA, 296 bp, Glycine max
agcttggcgaaacatatcactttgctttttttctctagcacgcaacctttctttctttacccactcctcacgtttggacttttagggaaaaacaccataactaaacgcgccacaaggcatccctatcgcaccagatccaaatctataacgatgggtgatcaagaggagacacaagaacagatgaaagccgacatgttggatctgaaagaacagatggctttcatgatggaggccatgttatgaatgaggtagctcatggagaaaaacgtggacaccgctgccgttgtcagttctgc

SEQ ID NO: 15480 - DNA, 423 bp, Glycine max
  unsure (1)..(423): unsure at all n locations
tgtagagatcctcattgggctaattcgtaagcttgattctccaggcagnttaaagacttcagacctatcaatttatgtactatgcatcataaactgatttccaaggttcttgtccaccattttcgcccttctttagaagagatcataagccttcttcaacgaagtttcatgccttggaagggaacctttgataatgccattgtagctcaagaggttgttcattacatgcatcattagaaagctaagaaggggatcatggcttttcaaattggcctagaaaaggcctatgacatggttagataggatttcttggagatgtctctcatcatattcaacttctcgtgaatcattattgacctgatcatatggngtattcgatatacttctttgtccgttatgtggaaatggtcgcgtttgagtagc

SEQ ID NO: 15481 - DNA, 391 bp, Glycine max
  unsure (1)..(391): unsure at all n locations
agcttgctgggggggtttctatgttcgctttatcncngagctacaagggggacctttaatggtgattttncaccatggagatgcagcggaagacaaaggaaaggaggtgagaggaggcgccatccattaaggaataagccatggaagaaggagcttcaccaccaagatgagccttggataagaagcttggagaggatgcttcaatggaggaacacaaagagggagagaaagagggagggggagcaccaaattgaaggaagaacaagggagagaagtcgaactttgagttgtgtctcacaagactctcattcatcanagttacaacaagtgttacacatgcttctatttatagactaggtagcttccttgagaagctttcttgagaaaactt

SEQ ID NO: 15482 - DNA, 438 bp, Glycine max
  unsure (1)..(438): unsure at all n locations
ttctntgctatggtggtaagcaaagaaggcgttgatcttcgctagatctactaatccatccacatttggaaaaaggataactccaaataccaatagtgccatgatgtaaatgaagaaagcccattcaccttgatccgccaaagccttcgctttctcctccaagtggttcctcggtattccgaccaccccatttctattttgttttactcggtccaattcttgcgccgagattttgagtaccttggctattctcgccatagagggatagaacccagaaaatagatatgactttcttcctcctagcggacatcccaatatttcttcaaacttttccacggttggtactaactgaaagtccccaaacgtgaagcatcttagtggctgatcttaatcctgagtgagggacataatggcttcaacagagacttctatcatagt

SEQ ID NO: 15483 - DNA, 423 bp, Glycine max
  unsure (1)..(423): unsure at all n locations
agcttacagaggctgaagtgaagcaacttatggaagttgttttctgttctttagtcctctatattttttcttttaccttgtttgtttggggagaaatagaatggattgggaggaaataaggagggagacaagtagaaatattaaattttcactgtttatttgagaggggaaataggaaggagggaaattatttatgtgagatacactataaaacatcccccaaaaaaaaagaatgaaatgggaaggaaattatctttttctttcattttttggtttaatttttaaaaaaaaaattataataaatttttttcaaaaataagaaataattttatgttaagaaaaaacaatcatattaaaagttaagtctctttatataantcatttatttccttccactttctttttcaccccttcaaataaata

SEQ ID NO: 15484 - DNA, 422 bp, Glycine max
  unsure (1)..(422): unsure at all n locations
gtggctttgcttatttatttgcattcgngatggtgctataatatactataatatgaagtcatgaacacacatttttgtgatgtagtgggtgacaagtagcatatgaaaaagcattaaaataatggtcaaagattgcacaatctgtcagtgtcagcaatgaaaacacgtcttgttgctttgttgacaacttgtcatggacaagagtagttgccacgtaacgcagttggactactggcatggtagctgaatgtcaaatgaaggagtaaataaataaaataaccactttgttccttgaagacagtggatccatgctgttacattaatctgtgaaccaaagaaaattcacaaaaaaagttcttgaaaatataattcctcacttacattagtttaagtgtttaacacgtgtgattngagtgataata

SEQ ID NO: 15485 - DNA, 199 bp, Glycine max
  unsure (1)..(199): unsure at all n locations
accacagagaggnacccgtagatatatcgcggggggcacgagaccttggggacgtacaggggcgtgctatcgcccaaaaccaagcttgaccaatcccgacccaacccgggcataatcggtcagtgacaacctgcgatgtacctaagcaggcaagctcctggcagaccacagagaaaaggagaacaagaccacatagcac

SEQ ID NO: 15486 - DNA, 393 bp, Glycine max
  unsure (1)..(393): unsure at all n locations
ttcttcaacccggaagttttcaaatccgagacgttcaattcatttcttgttttgttggctttcatcttcatttcgttcacttttggttttcttttcttccatttttgacgagctttaactgatcgtttaagccgttatctcgcctaataaatgataaaatgaatttcaaccgatcatttgcgttgtaacttcgtttaatcactgttaaagcaaaatctaaccgattattcacgttgtaacctcgattaaataaaaaaggcaaataataataaaataatcaaaatatcttgaaaaaaataataataaaataatcaaaatatctttgaataaaataataaaanaatgaatcggacatctctctttgaaagtttccttgaatgaattgactaatga

SEQ ID NO: 15487 - DNA, 467 bp, Glycine max
  unsure (1)..(467): unsure at all n locations
ntgccttgacatcgtatccacaccnccngcagctgcagcttctaaggaagncnnccaacaagttctctttttattctccacncnacncnaagcggcccgtgtcaccactagtctgccacccttggctgaagcgagagtctgagcgagacactactcgcccgctccacttccctccctttttgattcctcacgaggtggagcgccccccctctctcttttctctcccttctttcatagcctaggatagagagcagctctgaccaagcgttctctactccaggctcatcttggtgtggcggctccttcttccctggcctattccctcgtggctggctcctcctctttccttttcttctttgtcttcccctgttcctccttggngcacaatccccattctctgcccctcttgaccctcctcttccctcctcccttttgccccactgctccctctctccagcggtcaccac

SEQ ID NO: 15488 - DNA, 370 bp, Glycine max
ggaataagtgtgggggattcttgtttcactggataacatgttttgttggctatgattcatgatgtatcttgggccatacttgatgtacattttatattggttaaatgttggacatgctaaatgagatgctatttctcaaaggctacagagcaaaaaaaaaaaatcgaaagaaaaagaaaagcaataaagttgagtgaataagatcttacatggcaaaagaatgattagactcttgggtctattctttatgtttaaatcttatctttagttctttttatttgttttccatttttttcttaatatgcacttattccccattgctcctttatttctttgggatttagccacttattccatatttttccatacc

SEQ ID NO: 15489 - DNA, 424 bp, Glycine max
agcttttcatagtagaacgtgggtaactgattctacctattattgtgatcatctccctctccgtcatgggcggtacaacttgggctgcaagatctctccatctctgggcatattccttaatggactcatgctctcgtttagtcataccctgaagctggttccgatcgggagccatgtccgtattgtactggtactgcctaatgaaggcagttgccaactccttccatgatcggatctgggaagcttccagattggtataacacgctacagctgccccggccaagctatcttgaaagaaatggaccaacaacttttcgtctgcagaatacgcccccatctttcggcaatacatccggagatgcccctttggacatgtcatccctttgtacttatcaaagtctggtactttgaacttgggagggat

SEQ ID NO: 15490 - DNA, 424 bp, Glycine max
cactaacctttacaaaagctacatgaagctgcctcggtaaaaacattttcttttctttgttaaccgttggatcttcttgaaatttggtctgcaacttcacaagacacttgcccataatttgaccgttgggatctttaagaacatgtctggaatgtgctagaagcctcttaatgaagcttctggaggaagcctcttaatgaagcttctagagaaagctacatgaagctgcctaggtaaaaaagctgccccgccttcgttaaccgttggatccattcgaaatttgatctgcaacttcaaaagacacttgtcaatgatttgaccgttgggatctataagaagatgtctggagtgtgctagaagcctcttaataaagcttctggaggaagcctcttaatgaagcttctagagaaagctacatgaagct

SEQ ID NO: 15491 - DNA, 171 bp, Glycine max
atattctgatcgatgggtactcaccactgtatgatctttagggacacgcaccgcttactgaacatattacgatggcagccctatctcactcgatacaaagattctatagcatggcttctatcatagaagccatgctcaagcgtcgaaaaactgtatataatgatgctacct

SEQ ID NO: 15492 - DNA, 379 bp, Glycine max
  unsure (1)..(379): unsure at all n locations
actaagctntattctcgatactttcccatattccttaagcacaatatttctnaattttatttttgnaggaccataagtgagtttggcaatattttccaaatcaataattttcttttttttttaaataatatttcaaattctccaattatcggtcccaacatagttatagtattcatgggatgtgcaaaatgcatgcaagaatatatactgcttcagctatcaatctggaaaattggagcatctaatgaaggtatgaaaaaacaacatttgtattatatgaaattatttgctgtgcttcattattgtctccaattctctcgttaacttgcattttcaatttcattcatacaccctgatctgttttgatattctatatgtg

SEQ ID NO: 15493 - DNA, 157 bp, Glycine max
  unsure (1)..(157): unsure at all n locations
gggaactgcggggaaagaacagcaggaggccnggacacacattagccactcaacgtctaattgagaggggaaacaggcctgacgggacacacttctatgcgacccgctaggtagcctccccccacaaaagagaatgagatgggaacgagattatctc

SEQ ID NO: 15494 - DNA, 175 bp, Glycine max
  unsure (1)..(175): unsure at all n locations
acactcaacaaagnactttcgacacctactgtacgttgatttgaccaatgctgttatgggaatgttgcaacaatcctctataaccttattgatacattttgagaggttggttgtcatgtggccatatccacgaacttctctatcatttgccactttgcattctacctttgatgtg

SEQ ID NO: 15495 - DNA, 418 bp, Glycine max
  unsure (1)..(418): unsure at all n locations
agcttgtgccattgttgcctttntaaaatttttgcattcactaatccttgtgtaagtacccttccaaccaaccaatgatgatctggttctatcttccaaacatgaccatattcacctagatctagaatcttaatcacatctccatcatcttccactaaaactttatttgtgcacaatccatgataacattcacgagatccacaccacaaaccctaatgagttgtgcatgtgagcgggattaaaccctaacaatcaacaatagtgctgagaaaagcaagaatacatatcttgggaatgtcaaaaccttaatgacacccctaagggagcatgtaggaagaataaacttangttttcttttgaattaaaagtttttgtggatttttcanaataaaggaaattntaaaaagtgcatttttat

SEQ ID NO: 15496 - DNA, 422 bp, Glycine max
  unsure (1)..(422): unsure at all n locations
tgaccctcaatctttcaatgattatagatccatcttccttatatggtgtgtctataaaatcgtggctaaagttctggccaagaggctggcccttgtgttacctcatcttatagatgaaagacaaacggattttatgaaggggaggcacattcttcatggtgttttgattgccaatgaggttatagctgaggctaaggctagaaataaaccttgcatggtcttcaaagaggattttgaaaaggcgtatgattcggtttcttgtggttttcttgactacatgttgatgaggatgggcttttgtgaaagatggaggaaatggattaatggtttcctgtccactgcaaccatatccattttaattaatggaagtctgtttttggagatgccactcaacataatgttagaaccttanaatgtatttg

SEQ ID NO: 15497 - DNA, 376 bp, Glycine max
actacgctaatatgcctacttaatactaagcatttatttttttttcatgccgagatttatgtttcttttattttctaccaagtacacaagaagtgatttgtataaatcaattgtgaagtgaatggaaagagacttttggctgattttatcattgaagtgtgtgaattgtctctactacgagtcttccttgaaccatttgatcttatcaagaatttctcaattcttgtggcgatcctcaaggcttatcaagcatcattgtttgaggttcctatcttgttcttactttcacatattttgtgctcttgttaatttctgcaatgctaattttgtaattctatctgaatttcctattagcatatctctcattttacttaac

SEQ ID NO: 15498 - DNA, 499 bp, Glycine max
  unsure (1)..(499): unsure at all n locations
nttgagcttcggaagtngcannntcaagacctatanccaactcacgctcgccggnantggcgtacccaacacaaggggttttangttgttgtttgacganagagcanaacanagtttngcttatccacaaagcgcgcataaacccaccattcnctggtgcccacctccaactgaactcacgtactatcacgcatnccatatcctcgtttatatcatcaccgagtccccatcaatcactccaagctttcacaaccatccaacaaaacaacatttaaacaacacaagctattacagccaagcaaaacagagccaacgcagaaaactctgtcaaaacaccaaccaaatcacagtctttctcacttaaagacctcagaaacaattccttcgatccaattcgttaaccgctggatcgactccaggatttcactggaagtctattgtacatcagcctacattgtgatcggtgggaattactagcatacatccaaactcattctcg

SEQ ID NO: 15499 - DNA, 411 bp, Glycine max
  unsure (1)..(411): unsure at all n locations
agcttagccctagaggggatttttttttatgttttggagaggatcaataacaatgcctataggttggacctcccagaagagtatggagtcagcaccacttttaacatttctgatttaactccttttgcaggtggagctgatattgaggaggaggaactaacagatttgaggtcaaatcctcttcaaggggaaggggatgatgcaatcctccctaggaagggaccaatcacaagaaccatgagcaagaggctccaagaagattgtgctagagctgctgaagaaggccctagggttctcatgaaccttanggtagatttctgagcccatgggccaaggttgggtccaattatctttgtacatattagactaggatgtcattatatttggtccttgtatatagggctccatatt

SEQ ID NO: 15500 - DNA, 447 bp, Glycine max
tgagatgaggaagtgttgaagggtgaaactttctgcttttattgttgaccacagagtggtacctggagatatgtcgcgggggtcaggagaccttggggacgtcaggtggggtgctattgcccaaaaccaagcttgaccaatcccgacccaacccgggcatagtcggtcagtgagaacctgtgatgtacctaagcaggcgagctcctggcagtcaacagataaaaggaaaacaagaccacaaagcaaggaggcttgtggtggctggccagctgtgaattttgtgtaatatgtggattgtggcctctggtaatcgattactaagggtgggtaatcgattacaaggcttaaaattgaagacaggaggctaagatggtctctggtaatcgattaccaaggggtgtaatcgattaccaggcttgaaaacgaagtcaggaaacttatggagtc

SEQ ID NO: 15501 - DNA, 163 bp, Glycine max
acatgcaagtgaagcaaaaatacgtataacaatgtcgtgtcgcggatggacgtgattgccctctgagacagtattggtgcgccattcaagataccttctactatatcctcaccgaaaagcctgatgtcttgtgattgcaagccgtatttgaccctatcactct

SEQ ID NO: 15502 - DNA, 444 bp, Glycine max
  unsure (1)..(444): unsure at all n locations
actaccgctgagaattaccccaatccgtgtcgatgttgactattcctctatctggncgataatgcaatggtagccataaccccagccaaggttcctcaacctccattttttcgaggatacaactcgaacacaacatgtgcttatcatggaggagtcccggcgcattccattgagcattgtataaccttgaaacataaggtgcaaaacctgattgatgcgggctggctaaaatttgaggaggataatcgctcgtgaattttgacgttggcaagcaacgctatgcatggggtaatgtgaaggttgttgttagatgtctccaatgactcattangattttcaagtttatgtcattactgtaaacaacagtcacaatgctaataatatggataaatttgatgtctttcattctctcacagttacatctttgcttatttaacttccact

SEQ ID NO: 15503 - DNA, 130 bp, Glycine max
  unsure (1)..(130): unsure at all n locations
tgtatatacgatgcgccatctacgtcggatctctgagattcgattnagaatatggcgcagtggcaatcttgtaaataggggaacaaaacattttttttacgtcggacattctaaggtggttataaataac

SEQ ID NO: 15504 - DNA, 403 bp, Glycine max
agcttcacaagtagaatcagaaacttgtcttccatgtgtctttatcagaaaaggttcacgaccctttagaaatgtggcggtacataatctaaaaatctccagaaggattgtctgtgatctatgaaattagaatatcaattcagttttgcttgataaggctagaacacatattgctattaacctattaaatattaaataatttttttcctaattttattgttataattttaatggttacaattaatatgtaacttgattacgtaattagtaacttggaattcatttagttggttaagtcattatataaacaataagaactattggtccaaaataatttattagatgaattgtgtataatttagatgtagttcaaataacgctcatttttggctcttgacttggg

SEQ ID NO: 15505 - DNA, 437 bp, Glycine max
  unsure (1)..(437): unsure at all n locations
gctntgagtcgactcgctggcaaaagaggttgtccaatgctttaagagtctgtttctggtcgactgagcttgtatgatgtccagggtgatagtcttgagaagtagagggtgacaagttggtcgagccccctagtataaacgagtgttttccggtgtggtaacatcgaagagtatgagagaattgtaggttgatatggcttgttaagcccctgagtctggacaagtgtcgtctgggctgcttttgtcaagttgttcgtgatggacgtgtctttggcgtgtcatgtaaggtaagtagtcaaatttgaatacactgctccttttctgaccgttggagagtgcattaaagaaaggatgtaacatttgcttgctgctgcaagcgtgtgcgatgcacgtgcaaaacccttgcatacgtgtcactcgcggagtangcacatact

SEQ ID NO: 15506 - DNA, 67 bp, Glycine max
  unsure (1)..(67): unsure at all n locations
agcttggggggccgcctctctagcgattttcatgaataatgaagcnccngagngaggggggggggga

SEQ ID NO: 15507 - DNA, 453 bp, Glycine max
  unsure (1)..(453): unsure at all n locations
tgattcgtgagttgantttagccttagtttcactctggttattagtctattcattcaaggaaacttccaaagaaaaggtccgatcgatttttttattattttatttaaagatattttgattattttattattattttgccttctttggtttaatcaaggtcacagcgtgaacgatcggttatattttgttttaacagtgattaaacgagattacaacacaaatgatcgattgaaattcattttatcatttattangcgagaaaacggcttaaacgatcggtcaaagctcgttaaaaatggaagaaaagaaaccgaaattgaacgaaataaagatgaaagcaaaaaaaaaacaagacatgaattaaaagtctcggatatggaaacttacccattgaagaacgaagaacggatgaagaacggagganaaccttcacggatttgcttacggaaaca

SEQ ID NO: 15508 - DNA, 244 bp, Glycine max
gactactgcgatttggcaagataaaccatggcgttgactggtgatggctctggctattagcttccatggctagtaagaggagatagagagttcaagttgacactaagagatcaacaaaaaatcaagagagggatacctaggcttgagagggttggagagagaccctgctcgagaggatttgaggcctctgacaagacactggacacataaatataaagtctgtacacctactgccgtgatctta

SEQ ID NO: 15509 - DNA, 402 bp, Glycine max
  unsure (1)..(402): unsure at all n locations
aagttcttgcttaacctacgacttttatctttgatttaaccagagaaccataccatatggtccagagaaatatttgttgctgtttaaattcaaaacccttggtgcctcaagtgctgcctgaaaattgntaaacacattgataatgtcacatccaaagtcaataaatgtaaatgtgttgtaattctcagctatcaaatactatcaccaaataagtactctcaacaaacattaaggtcattcaaattccagctaacataaatgtagtcagcaatgtccggatatacatgacccgttgcccattttttgagaactctttgtgcgtacaatttcttcgagaaattaaatccattgaaacagacagagtattgataattatgattcagaggacatgggaatttgagc

SEQ ID NO: 15510 - DNA, 421 bp, Glycine max
  unsure (1)..(421): unsure at all n locations
ctgcaagcttgaggatgtttctctactagcaattttatattcnttagttngagtagggaatcggataagagagaatgcagataagaaccatggaaaaggttaaatgttttttttttgggtacagaaaaggttaaaatggttggttgcaagcttttgacgatgttatcttttgacaattttttttagttatggagtgtgcgaagggactgagatataattagtttttaaatatatttgtaagtcattttatatttgaatttattttatgagtgtcttaaggaaatttttaacctgtataaaggtttttatgtgggaaaaaaaagacaattttgtctctagatctagtttacattaactatagtcttcataacttgtttaaattaagtttaaaatgaattttttttcaagtccgactcgagta

SEQ ID NO: 15511 - DNA, 453 bp, Glycine max
  unsure (1)..(453): unsure at all n locations
ttgcagtacctgatcgtcctcgagagattcggatggaattagcttattttttacagcagctttgtcagtcaaggtctggaatgtatcttatttgttattgttatttttacctggattctgtattttgaaaataaagcatagaattgattgttattacttgatgcagttctttgacattacaaatgtttatagcttgccgcggaatacctgttttagtgggatttcttgaagctgattatgccaagtacaggttagttgttgtttgtgaattgtgcttaatacagaagtactaacattttcactagatagtttgcaatgcaatgccaatatttgaacttctctggccctgttctacctaaaaatttcagaacattataaacatgtgctttcaccctgcttgaggcctganggcctttgtgtgagggtctttcttacatgtaaaatccattccct

SEQ ID NO: 15512 - DNA, 331 bp, Glycine max
tggaaaagatcaactcctcccatgtgccatgggacgctcgactaaattaattgctgacatgttatcaatcaacaaccggataggactacaatcccgtaagtccagttcttccattaaagctctcacacatagagcgtgacaagctgccatagcagcaacagtatattatgctctacatgttgacgaaacaactacactctgcttctttgagcaccaacagattaatgttgctccaaatttgaaaacatatccagcagtgcttatactatcatccttatcactacaccaatctgaatcattataaccaaacacttcttctgtatattcttac

SEQ ID NO: 15513 - DNA, 391 bp, Glycine max
ttactagatcaacattaattattgtatcctatacttaacttattaatttagttaattagaatgtcataatgcgaaaatcataaattcaagatttgcatgcatcattaattgtgaattatttcatagacatatttttaataatcggcatgagtatacgtaaagataatgttacaattatacaaaaaaaagtattgagtgtcagagacacaatgactgttataaaatccctcagatgcctctagcactgtagtacatgtacctaagcccgacacacattgaaccggttcaaatgtgcatataggaagctatcaccgttgcattttatctcactcgaaaaatagagattgtaataactacaaaagaaagtctccaatgctataaatatgactac

SEQ ID NO: 15514 - DNA, 271 bp, Glycine max
aatacccttaatctaaccgacaagcaatttttggatgagatttactaccggcagcctttcacatatgcaggtaatcaattgcggtatcaatgtttgcaactgacaaatgatgttggaggtaacacaatgctaatgtgtaatcatcaattttcgtgtgttggtccgattgagttattatgtaccattgctagaacaccagatggtattttaaacttacttcaagccactatgacccctactcatgatgtcctgctttatttacaagggaggt

SEQ ID NO: 15515 - DNA, 407 bp, Glycine max
  unsure (1)..(407): unsure at all n locations
gtgcatccaataccctgatgaggagggccttttgtncttattactggacnganacattcgcttncaaagtttcatggccttgcacgcgaacacccgcacaaacatttgaaagaatttcacattgtctgctccaccatgaaacccccacatgtccaagaggatcacatatttatgaaggcttcttctcattcattacacggagcggcatacgactggttgtattaccttgctccaaggtccatcacgagctgggatgaccttaagagagtattcttagaaaaaattttccctgtttccaggaccacagccatcaggacggatatcttaggtattagacaactcagtggagagagcctgtatgagtactgggagagatttaacagactatgtgccagcttgccccacca

SEQ ID NO: 15516 - DNA, 412 bp, Glycine max
agcttgaagcctctggtgactgtgatacttgttattctgttgttattccggatcgggtccttcaccgaatatgtgtatatgtgcatatgtatgctatattcgctgttctggttgttgattgtattttgctttgtgcccaagagaaagagaaggagtacagacgatagtcgcaccacgtagagggcatgacagacgaaatcagtgtcctatctttgctttcctcttatccccgatgagaagtaagtaaagaggggcaactgtcataccctaatttcgtccggagattattacttgatgacatgcaacctttggttagccgctttgagatacttggcgtcctttgttgcacaataaatgaagtcccgagacgtctcagaaatcaaaaggaagcaggcttgcgcgatccgtgaaa

SEQ ID NO: 15517 - DNA, 446 bp, Glycine max
  unsure (1)..(446): unsure at all n locations
agaatcgtaagccaatgcttagcaccttccttacatgtctttaaataagnctcgtatccttctaagtagtaacggcaaatcattagtagcattaagtcgaaaggacttagaacttgtttgttaaaacataaaaaaaaaataatgtcaagatatttaataattaaataatatttgaagttaaatgtataattttgattttattaattatttaattagcattataattatagtatgatttatgtaactattaaaataatcattatatatgttaaattattataaaaaaataatcacataattatataattaataatttcatatattatatataataataaaattatagataaatgtataattatattattagtaattaggtacatgcataagccacgcagggagtgatatattcaaatccgaccctaaccccaacctcaacccagctt

SEQ ID NO: 15518 - DNA, 414 bp, Glycine max
  unsure (1)..(414): unsure at all n locations
agcttattgtgtaaaaacccttattanttctatacattnncnatcaacanctactgtttgtgaaagtctagagtggcttcatgacaaaaaatacttgggtcttaatctctgggggagattaagggtatctagatgaggcataaagaatacttgattttaataaaaaatttgattagtggaacccttcaacttttaaaggagaattggacctatcccaaggattggggtggactagtataaaacctttgtgttttctttactacttctatataactagttcctttctacaatttatttcttctttgttttgtccaagtttggtgaatcgatttttaagcacaatgtatttgaaccccttggacgaagcccatggtccattgatgtctgtttaagaaatgtctttaaaagtttttg

SEQ ID NO: 15519 - DNA, 426 bp, Glycine max
  unsure (1)..(426): unsure at all n locations
tgctntctntgcggcacttagaaacactgtgtgttgctatatatcttgactaggncagttgcactttcgtagcaggatgcttcattctgatgataaatattaaggatccatcataatggtattttttcagatatgaaaatcattatgctcgtgatttagaattgtttgataagcaaattttgttggtatagttttgtttgataatgcctcaattgggcttttcttttaacgtgaacatgggtagggaatcctcattatttacgcttgcatgatgggatttaaagaacaggttaccaaaaacaaaacacgcgattatgtcctgtcaatnttttcttatggttagtcaatgaattataattgctacgtcattagttaatggtattatttgagtgagctagaccccttgctagtctcctggtaactagt

SEQ ID NO: 15520 - DNA, 345 bp, Glycine max
gaagcggataagagagaatgcagataagaaccatggaaaaggttaaatgttttttttttgggtacacaaaaggataaaatggttggttgcaagcttttgacgatgttatcttttgacaattttttttagttatggagagtgcgaagggactgagatataattagtttttaaatatatttgtaagtcattttatatttgaatttattttatgagtgtcttaaggaaatctttaacctgtataaaggtttttatgtgggaaaaaaaagacaattttgtctctagatctagattaaattaactatagtcttcataacttggttaaattaagcttaaaatgattttttt

SEQ ID NO: 15521 - DNA, 359 bp, Glycine max
agcttatgactcggatcttggtttcttattctatatgacgatgaggatgggattttgtgaaagatggagaaaatggatctatggatgtctatctagcgcaactatatcaatcctaatcaatggcagccctactagagagtttgtgcctgagaggggactaatgcagggagacccccttgcacctttcctattagacataatagctgagggccttactggtttgatgaggacaactgtctctaaaaacatcttcagccgttatcaagtggggaggcaaaaggaagagattaatatactgcaatatgcagatgataccattgtgctttggaactgcgactacaactaatggtagagtcatg

SEQ ID NO: 15522 - DNA, 422 bp, Glycine max
tcaatgttaatgtcacatcaaatattgtcaattatctttcaaattatggagatggaacttgtattggctgatgtaatgagatatcaaaggaatttgggcaacaagggcgacagaggttggttggaaaaggtcagcattgaatgttgcagccacagtgttgtctacaagcttcaatgttaatgtcacatcaaataatgtcaaaaatcgtatcaaattatggagatcgtgatatggtattgtaagtgacatccttggccaaagtgagtttaattgggatggcactaagcacatgatcacagttgagaatgaaaatgcttggaatgaatattgcactgtaaatattctttaatatatgctatctgttattcaaagcagaatgaatttgactttctctttttccagtacataaatcggctaactgt

SEQ ID NO: 15523 - DNA, 454 bp, Glycine max
  unsure (1)..(454): unsure at all n locations
ctgancttgatgactcattgagnnncccnnnnngnagactcacctgaggcangcaagccgacatggacttttatattaattgtgtagcaccgggaggggaggcacgaccattaaagatagcattccttaacttgactacattacagggagtcactctctgaaagatattaccatagcagccactggcaggaaacaaaaggagatatgatggtttcaccataactagtagtatcctactcaatgtatagtacaattacaccagtgcaactccctagcctaataataagttatcagcatgccattgcttggagtccttaataaacttcgtctctagagcaacttatcattgtatgcctctgatgctctggtaagaattatgaggcccaaatctggttgaggcttgaactaacaaaggttatacatttatgcttcttggcattcaaatcaatatttc

SEQ ID NO: 15524 - DNA, 403 bp, Glycine max
  unsure (1)..(403): unsure at all n locations
cgcttgagaagagaaaacgagaacggcttatattttagctttctctcacctcacacaagnctataaccttaatctaaacttgctcaaactgccaccgaatcaaaatttgactcctcaacacccaatttaccctacaaatggctcttgtcttcactatggtcactcattttcctcctttgcacaacccaagctttctcacagtcctaaatgacattacaaactatgattacctcactctaacctccaattaccactaaatacagatttggcttttcaaatcctcaaagcatcacacttttgcactcatataactacattgtcacttattaaccctaggctaactctacccttcatctctatcagatctccatcagccattttagcacacaagcatcatcataaa

SEQ ID NO: 15525 - DNA, 155 bp, Glycine max
cacagaccaccaagagagacgctcgccccgacgaaaacaagagcagcatagccagcagccacgcctccgccaagaagcacacacacaaaggcacgccccaaggacccagcggcacacccacacaacgcaacgcaacgcaacacaacaaaacaacg

SEQ ID NO: 15526 - DNA, 423 bp, Glycine max
  unsure (1)..(423): unsure at all n locations
agcttgtgacatgaggccattaagtgcctctgccactatgttatatagaagaggngatagagggtctccttgccttagtcctttctgaggtaggaactcagctgagggactaccattcaccaaaaatgaaacagatgctgattttagacacccctcaatccattgaattcatttgctgcaaaagcccatcctacccatcatataagtgagaaactcccaagacacaaaatcatatgccttttcataatcaaccttgaagacaatgcaaggcttttggcatcttttggcctcttcaactacctcatttgtagtcaccacgctgtgtagcatatgtcttccttctataaatgctgattgcctctcatgaataataaaaggcatgaccttcttcaatctattggccaatattttagccactatctt

SEQ ID NO: 15527 - DNA, 447 bp, Glycine max
  unsure (1)..(447): unsure at all n locations
gtttcttcacaaataactatcatgaagcagatatctagcaagactacccatcatatctcccanaaccccatacccacganaatcaaaggagaaagaagtccacccaaacctgaaatttcgaagtcccactcgtagccacgcacttcacgactccaaaaatgctctcctttcgcgatttggagcagaaatgatggccaaaggttggagctttgttgggaaacaatggtagaggaagaagagaagaagaaggctgcgtgagagagagggagagcttctgaatttttctgctttggctgagtgaggagagagaaaagctttttggttttaaataaagggttttctctttntctattattntatttaagcaatgccacatgtctncatttgagtggagcaaaacgggcccactttcccttttgactgtgacccatactcagccacaaaagt

SEQ ID NO: 15528 - DNA, 420 bp, Glycine max
  unsure (1)..(420): unsure at all n locations
gctttacgtcgttcaatcgcttcagatttttgccatattgttaaaaggnctatgggcgggggggtagaggatcataaaccacagagtctggcgacaggtgtagattttcgattcatggccaggtgggttaccagggtaaccaaggcatctagtttaccttcaagctgtttagactgagctgatgaagatgaattggtggctacttcatgcactcctctaatgacaatagcatcacttctggcactaaattgctgggagtttgaagccatcttctcaattaaatttttggcttcagcaggggtcatgtctccaagggctccaccactggcaacatctatcatacttctctctatgctggtgagtccttcataanaatattacaggagaagctgcttataaatctggtggtgagggaaactg

SEQ ID NO: 15529 - DNA, 448 bp, Glycine max
  unsure (1)..(448): unsure at all n locations
tctcaatctagaagcactgacaccgtgattgatccttctcttcttcatacgacacgngaagtggaagatggcctacaccaagaaaactggccaaatgacgtttgaagcagcaaaggaaattgctaacaagattggaagtcactctaaatttttaattgcaattatttatgtttattatgtgattgagtaaaccaataaatttgttccaaacacgattcgttggaggagcacgcctcatagggttcctttatcgcccacggacgtcaggatgtactaactgctaccattgggcgaccagaacaccctggtcgtgtgtgtgttgctagagctgatgtcatgttcaagcaatactttggactggctccaacgacctcccacacatctntgtccatggctcccgaagacatggagcaattgatgcaaaaaattaacgaccagttggaggagt

SEQ ID NO: 15530 - DNA, 372 bp, Glycine max
  unsure (1)..(372): unsure at all n locations
agcttaatattgaagaagaaaaagaagggttatatttttttatactggnncatcggaaataatacacagttcaccatgagagactcctttcttgacgaattcaagagcagcatagccagcagccacgcctcctccaagaatcacatacacaaaggctctccccattctcccagcttcacacccacacaacgcaacgcaacgcaacacaacaaaacagcgccttattctcttatttatcttcaattcaaataatcgagggtgcacaattatttgggagcgctttctttcaagacactcccacaatatctgaagatcacgaacgggacccacaaccacgacgaccgagatagctcctgcatttaccttatagcc

SEQ ID NO: 15531 - DNA, 456 bp, Glycine max
  unsure (1)..(456): unsure at all n locations
aaactcagctggatgattagtctagtgggattgaggggagtatttttgttacaacttanaacacaaaagcatgattaattagagaaacatctttatatacatcaactggtttgttagaaagacccaacatctttacctactgttgtcaatcttacttacttgcatttttactgtttttagcctagacttagttttattttgttctaaatcatcaaattatcaatgtttctttcaacaatgccttatttctgaatttaaccatgtctaagactagttccctgagttcgatactcagattcatccgttttaattntaaatacttgacgatccggtgtgctttctgataaaccggatttcccttgaacatatttgtataaagaanaaatggaccagaaagtaactctaggggaaatccaacacaagtcttcagtgtttttggcatgtaactctttcact

SEQ ID NO: 15532 - DNA, 436 bp, Glycine max
  unsure (1)..(436): unsure at all n locations
acctgaggcatgcaagcttgcttctacaccatgaacataaaattttcctctttctgttatggacacaaattcaaacattacattaacttcaacatagtggaaagaaatataatttgcatgaaatactacaactaagtaatgctaattttgtgacaaggacacgtcgtcttccatttccattaaatgtttactaaaaacaactaaaatttctattgacccaaattttttccagtagttagactgcactaacacctttagcacgtcatcgttggttttcagttcaataattttgaatttgataattntatctgaatactcatagtggcttggttgtcgaaaaaacaatcgccttaccgtttgtgttcatgaataccataaggggagtcccttgaagtgcaacttgcttgatcaaattcttcagttcatccatgctaca

SEQ ID NO: 15533 - DNA, 460 bp, Glycine max
  unsure (1)..(460): unsure at all n locations
tcttgcgtagccgctcttggtgctaagaaaatcccanattctaattccncttattactagctattttgaattctttagttcttgaatgtacaaccttcaaattgttgctcgttcccctctttgttttctgcaaaaaagaaaatcaatatcaaagaaaacatggatgaagtcctaaggattccatgtacatgtgtatttctgaagatatagtatttatattccatcaagcatacattgactattgattacatgtaatagactttttataacatggttgtcccaaatcacaattaaaaagcacaacaaccaatctttcggagtcctttagttaatttgtcttgtctccttctgtggtggggttttgtttaataatattatacttttgccttccaaaaaaaacttatgactgatcctcttttcattaatcctattttgtatgttattggataaaagatcatgg

SEQ ID NO: 15534 - DNA, 194 bp, Glycine max
gccaagtggaccccaaacagaggaggcacaccacttcaacaaagggactaacccccatcgcaggtggagctgacattgaggaggaggaactaacagaagggaggacaaatcctcaacaaggggaaggggatgacgcaatcctccctaggaagggaccaagcacaagaaccatgagcagaaggcgccaagaagaa

SEQ ID NO: 15535 - DNA, 412 bp, Glycine max
tgacaaagatatagagactatctgttctagattttcattacgcaagaattgcactatgcattgagtcgcaatgtaatttgtctttgtgtgagcagattttgtgaaaggttcactctaagtacacatatcccaagagaggttagcacactaatctagaagattaggataaaatttatcaattttagcacaaaaattttgtaccattttttgcaaaactctactttatccttttatagttagtcttggaaaagtgcaagaagccatataaggcatggctgagctcgtggagagaacctcaagggctgtccaagctgccaattagtcatattaatggtcattcaaagtgcttagattaagaagataagaattaggccttgcaattccattggtctaaacatttcacctacaataa

SEQ ID NO: 15536 - DNA, 241 bp, Glycine max
  unsure (1)..(241): unsure at all n locations
agcttatgctcaataggggatctttanctagctatactaggcccttgccgctagtgttaggccatagatggccttttttagaagataaactttatcttcttcactttgcttcatgaatccttctggttgctctacatatatttcttcttgtagctctctgtttaaaaaagctgatttaacatttgtggaagccatgccttcccagattattttgatgatggccaagaatcaagagtctagc

SEQ ID NO: 15537 - DNA, 426 bp, Glycine max
  unsure (1)..(426): unsure at all n locations
actcaagctganggnaaagtctcacgacgcacgtgttcatgtttttttgccagcngcggctatacgagacatcttgccaaacaaagtcaggttcacgataactcgtctgtgctttttcttccatgctatatgtagcaaagtgattgatccacgaatgttngatgagttggaaaatgacgccgcaattatactgcgccacttggagatgaattttccccctgctttctttgacatcatgattcacttgattgtgcatctggtcagagaaatcaaatgctgtggtcctgtttatctaccatggatgtacccggctgagcgatacatgaagatcttaaaagggtatacaaagaatctatatcgttcggaagcactattgttgactgtacattgcgtaaaagccattgaattttgttcatactacttaca

SEQ ID NO: 15538 - DNA, 411 bp, Glycine max
agcttctttcagggtgatagagttacggtgacttttggtcattatgagaaaatgctttcatctgctgcacctgataagcatacttgtacatcgggcagctcaaaaaattggatggtgttgtcaatttcaggggataagcctactcctagatcctatgtatgtaaatttgtgattcttgttatattttacatttgttcctgagtctttttctggaagttttatgacttctgagcaattttggcaaatgacttaactatcactatttgtgaatagcatgctacagttgtcattcaaaataagatgataatggttggtggtgaatccgggagtggattgttagatgacgtgcaggtgaggaaacatttctttgttttggaattgcaagatttatgagagggagattgtggcaca

SEQ ID NO: 15539 - DNA, 435 bp, Glycine max
  unsure (1)..(435): unsure at all n locations
tattcctgaaactntagttcttanaataactgtgttggatgacgtcgcgngatctatgtagccgatctcacctagtgggataaaagcttagttggtgtttcaattatcatattcagttcttatttgacgacttctcatttttatgcctttggtattcaattntattccatgtgcctaaccaaagtatcttggtatgtatttaaattttgttttcagggcaagggtcctctattatctgtggaggcactgcatcaccttcatacatttatttttgtcctagctgtggcccatgtcacatcttgtgttctcactgttgttcttggagggctaaaagtgagtgcataatatgctntattataagatgtgcttgatgaaacgctcttttttgagtcctaataattaactctgattaacagatacctgagtggaaacact

SEQ ID NO: 15540 - DNA, 150 bp, Glycine max
cagcagccgagaggagaaggttcctttttcgcagcccaccaaaccatgcacatccggggcaaccccatgggaagatccgacagcaccctacacagaagccacacctccttcaggaccaaggacatgcaaagctccccccacatccacaag

SEQ ID NO: 15541 - DNA, 300 bp, Glycine max
  unsure (1)..(300): unsure at all n locations
atgaacctgatgaaatctggnttcaaaagctcccagaaacggttaatgaaattgaaatttaatacatccggcgcaggactattgcccccccaccccctcaccacaatcccgaactgttgatttgatctccaattcagaaaatctagacacaaggcgttctttatctcttaagtcaagagaagagaattggacaccatccaaggttggtctactacaacattactcggaaaatccgtccttgaagaagacgatagctgcattgttaacactgcaagggtcatgcacncacacaccatctat

SEQ ID NO: 15542 - DNA, 425 bp, Glycine max
  unsure (1)..(425): unsure at all n locations
agcttgcttctacaccatgaacataaaattttcgtctttctgttatggacacaaattcaaacattacattaacttcaacatagtggaaagaaatataatttgcatgaaatactacaactaagtaatgctaattttgtgacaaggacacgtcgtcttccatttccattaaatgtttactaaaaacaactaaaatttctattgacccaaattttttccagtagttagactgcactaacacctttagcacgtcatcgttggttttcagttcaataattttgaatttgataattctatctgaatactcatagtggcttggttgtcgaanaaacaatcgccttaccgtttgtgtttcatgaataccataaaggggaatcccttgagtgcaacttgcttgatcaaattcttcagttcatccatgctacatc

SEQ ID NO: 15543 - DNA, 83 bp, Glycine max
tatatcgagacgctcaaaagttagatccgcacctctgagaaaattgagatcgacactaactttatacacggatgtacggttga

SEQ ID NO: 15544 - DNA, 333 bp, Glycine max
gcccttacggggatccgagagctccgatcattcattaacatattcatgttttgggggcatactcaccacctgtgggctctctaaggaactcaccataactaaaaaagcccaaaggcacccatataacactcgatccagaaataacatggaatggcttctatcacagaggccatgctaaagcttcaaaacactatataagacaatgctacggcaaccgcttccaatacagctagggaagcagaaccggtgctatatcccccaataaacttgtgccgagacagaaacactatgggtttcaatcggaggtatagtcctcaagcctacccttatggc

SEQ ID NO: 15545 - DNA, 449 bp, Glycine max
ggtaggccttggatcttcttcatattggagtcttttgtcttttgaagatcaatgacaacataatggagaaggaagaaagatgattggagaagccacttcaaggagaagatgagtcaagaagaagctcaccaccataggaaaccatggataagagcttgaaggtagaagaagatgagtggagggagagaaagagcacgaatttttgtacttaaatgaggtatgaaatttgaagtgtaattctcaaatgatcaaagttgaaaaaaatgcacacacatgacctctatttatagcctaagtgtcacacaaaattggagggaaatttgaatttctattcgtatttcacttgaatttgaaattgaatttgtggagtcaaactatggagccaaaatttcactaattatgattagtgaatcttagaatatggttagcccactaatccaagatcaatt

SEQ ID NO: 15546 - DNA, 381 bp, Glycine max
agcttctacaagctggtttcatttatcctttcttcgacagccaaagggtgagtcccgtccaggtagtttcgaagaaaaccagcctcaccgtgatcaagaatgaaaaggatgagcttatccccacaagagtgcagaacaactggcaagtctgcattgattataggaggatgaactaggtaatcataaaagatcattttcccatgccattcattgatcaaatgcttgatcgcttggcaggtaaatatcattattgttttcttgatggatttttttggttatttataaattcatattgctcctgaggatcaagaaaaaaccaaattcacctgttcctttggcacttttgcctataggagaatgccctttggtctatgcaacgcc

SEQ ID NO: 15547 - DNA, 388 bp, Glycine max
  unsure (1)..(388): unsure at all n locations
tgtagccattaaaagagaatgagcatgtgattgaaantttgatctggaaatgttagtcaatttgtcagatntattgtgaacaaatgcattaaccatatcccggtgagagtgtgatccttaaattntgagagaaacgactatcatttagtactgattcttgcgtgaatctttgaagtatggactgaatgcacgaaattgaggatgatgaaggccatgtttgattgtgatagccacttagccaaaaacctgaccatgtgcttgaatgaattatcccttgtacctagtttgagctgaatgaattattgattgattgaatcctgagcctatacagtgttatctcctactaccttgacttangttgtaggagagcatcatccacaggaagcgt

SEQ ID NO: 15548 - DNA, 407 bp, Glycine max
  unsure (1)..(407): unsure at all n locations
aaactaagctcatacaatagaataaaacctaatcnctttgtcacatcctatcagagcgncgngnncccgtgtcctctagcatgaggctcttcatagtcatccacctattcatctgctcccccgaacacaagttcaagatcatcacaggatccaaacacaacaacacacagggagtgagttatcacattcctagctaatagagaaacaagacaattaaatatacatattatataaatgagataccacttgcttaaacatagctcacgtaacttcaccacttcgtcattcaaaattcacttttcaattatcaatcacattacacaagaatcccacacttcgatcaagatataataacacatcaattagcaagcatatgcaatagttatgctaagactcaatcctatatg

SEQ ID NO: 15549 - DNA, 354 bp, Glycine max
agcttttcgattcattctatattcccgtagtggtccacatttggtttcatgtatttttattcttgtttcatttactttttatacccccttttgacgtgcttaagccattttatttaagtcatttctcgcttaacctaaaaataaaataaatttccaccgatcgtttgaattgtattatccgttaacttcggttaaaatgaattccgaccgttcggtcgtaacgtaaccacgttggaaatcaaaaaagaggtaaaataataatataataatcaaaaaatgtctcttaataaaataaagcggaaaaataatcggacattttctctttgggaattctcattcttaattgaattaact

SEQ ID NO: 15550 - DNA, 360 bp, Glycine max
  unsure (1)..(360): unsure at all n locations
tagactaagttcagcctaccaccctcagactgttgaccaaactgaacggaccattcagtcactggaggaccttttgagggcatgtgtcttagagcaaaaggggagttgggagagttttctgtcgttgatagagttcacttataacaatagtttccactataccattggcaaggctccctatgaagctttgtatggtagaaggtgtataacacccttatgatggttagagcccggagaaaacctcaccttaggatctaaagtggtacaacaaaccaccgagaaggtaaagttgatctaagaaaggatgaggactgcacagagtangcaataaagttatcagtataagaggagaaaagacct

SEQ ID NO: 15551 - DNA, 355 bp, Glycine max
gagctcatatcaagtggtgatcatagcacaagggcttcaagtatgtgcttcttaaacctccattaattttatgctttaccttctcttccattgttgcttcttcatttttcttcacgtatctcctcacatgtcttgtgctaaatgtttttaacatgattctttagagtttccaccaattaaacttgctataaaagctagatttgattttctatggttcaaatttcttgttcttgttcttgaaccatgaattgtgttgagtttaggttcctttgagttttgtcatgttatattttatggctgaaacctaaaccataaaattattgaaaaaatattaaagtagaagaaaacctcaaaa

SEQ ID NO: 15552 - DNA, 372 bp, Glycine max
tgtacttggtttacacatgattgatacatgatttgggacttgtaggattcaatttgggctacattggatgaaggtaagagtggttttcgaaatctgcactttatgcagaattttgctgttgaaatgtgcagcaaaatttttgtatatgtgtagaaaaatgcttgtgtatggatggctgtggaaatggtagtacatatggggatctgaacgtttgctatcagattccaacggtcaaaatatagatttgtgtactagagactttcagtaaaatttcgagtcgatccaacggttaacgaactggaacgaagaaaatgttactggggtatttgaatgtgaaaagctgtgatattggttcgtgtttagggcagagat

SEQ ID NO: 15553 - DNA, 357 bp, Glycine max
agcttccataatatcccagcaatccaaatacaactatcatgaactaccctaaaccaagaaaacagggcagaggcagaaaactctgcccaaaacacattcacatattacaactttccttactcaaataccccaataacattctcttctttccgattcgttaaccgttggatcgacttgaaaattttactggaggttcctagtacataagtctacattttgaccgttgggatctgctagaaaatgtccagaatccactatgtactatcttttccataaccagcaatgcacaagcattttctgcacatgaacaaaattctgttgcacaaaatttgacagctttttgctgcacaatttggc

SEQ ID NO: 15554 - DNA, 324 bp, Glycine max
tgcctaattaacctgaaattgagagaaaatgattattaaacacacaaaatggaagtactaagtatttattacctatacttaacagaaaatacttataacactacaaaataaccataatttggaagagtttgatacaatttacacaagttttatacacaaaagttagtcgttttcactgactaacaatttcttggagtggtcacaacttccacccatttagacacgtaattaacagacaccaaaatgtactcattacctacaaatgaagggaaaagacccatgaaatcaataccctagaaatcaaaaacttaaacttccataatg

SEQ ID NO: 15555 - DNA, 355 bp, Glycine max
  unsure (1)..(355): unsure at all n locations
agctttaggcccacccgaatgttccaataaattatttttcatggaggctggtcgaagatcaacaaaatactgnggagaaaatctagcaacagcattaaacaaattaggacttagctactctaaaatagtactgtaaaataaaacaacaaaaagaaaccgttatctatcactaattttaaggaaaacattttataaatataattacttttaaagttaaattacttatttggtctttggtctatatagtttcatgattcttatttttttattttctatagntggaaagtaatttttttagtttctataatttatattttaattctcttttaatttttataagtttgaaaagtgattt

SEQ ID NO: 15556 - DNA, 371 bp, Glycine max
taccccagtatctagctggaacttcgacgatttatgccgtggaagaatgcttaaccaatcgcgatcaagttttcgctagtttagcaagaaaattgaacaaggcttaacaacgaatgaaggaactcgcagatcagaagcgtcgcgaagtgagttttgaagttggagacatactgctggtcaagttacgtcctcgacggcagataacagctaccaacagttgctactcgaagttggcaaagcgaatttatggtccctttcaagtgacccaatgtatatgcgaagttgcttataagctagacttaccagcaacctcgaagattcacccagtattccattgctccttattaaagccatttcgtttagacacgaca

SEQ ID NO: 15557 - DNA, 363 bp, Glycine max
agcttgcctgtccgatgcaacaataatgatgtgtccgagttatgttggggaacggttacgaacccggaatgggtttaggcaaagacaacggcggcataactagcctgataaatgccaaaggaaatcgtgggaagtatgggttaggctataagcccactcaggcagatataaagagaagcattgcgggaaggaagagcggtagtcaaagcttgcggttgaaacaagaaggtgaaggaagcccaccctgccacataagtaggagctttatatgcgcgggtctgggggacgaaggtcaagtggtcgcgatatacgaagataatattccgagtacattggatttggtacgaccatgccctcctgatt

SEQ ID NO: 15558 - DNA, 351 bp, Glycine max
tgccacccagctcgcccaggcgagctaggttgcttcctccagaagcaaccgccttctggaggaattttctggaaggcccaagtgggtctggttgctatttgcacccccatttttactaaatacacccccttgctctattttggtgattctttttccataacgttacgaaactttacgaattttgtaacgatacttgttttctttccgtaatgttacgaaaccttatggattacgtaatcatccccttttttgccttccagaacgttacagaactttacggattgcgcactaacacttccttttaatttctggcaagtcacggaacttcacggattgtgctacaatgctttc

SEQ ID NO: 15559 - DNA, 363 bp, Glycine max
atcctctgagatcatctgagtgcatctgcacgcatgcaagcttcggaagaatgtgatgaggtacaagccctagaggcagagcttgaaagagcccgagtagtcgaagagaagttcaagtccatagccatcaaagtctgaaaagagtatgatgaactaagggacgtcaatatggccaccgctgaagccttggaatgagaaaccaagaaggcccgaaaggaagaacacgtgccagcaaagttttgaggggctttatagggcagcaatagcaaactcaagctccgaagaggtgaaaggaatcatcacaggtcaaaggcatgatcttgaaggacgagctaaaggcttaccttaggtcgaaaagaaatt

SEQ ID NO: 15560 - DNA, 370 bp, Glycine max
tgtacggttaacgtctcacgattgtcacgcgtttatgcaacaattgttagccgtggctatactagacatcttgccaaacaaagtcaggttaaccataactgacccgtgttattattccatgccatatctagcaaagtcattgatcttatcaagtttgatgagctgaaaaatgaggccgcaattatactgtgccagttggagatgtatatcccccctgctatgtttgacatcatgattcacttgattgtgcatctggtcagagaaatcaaatgttgtggtcctgtttatttgcaatggatgtacccggatgggcgatacatgaagatcttaaaagagtatacaaagaatctatatcatccataagcatcta

SEQ ID NO: 15561 - DNA, 330 bp, Glycine max
agcttggtgacttggtgacttggtgaatatttgattatttgcatcaggtcaggtacctagattcttatctcagatggagtgatctgattcgtcctgagcagaacatccaggatgggaaaggtcaagagactgaagcttctgctttcagaaatgcagatatttgtgacaataaacttgtataggggaaaagttgttatggaatagcttttgggagccaaaaacatcttccttctcgggtgatgaaaaatgttgttcaagtggagcaagatccagaaggaaaggaaaagtattggttttttgaaacacgtattccattatatttgataaaag

SEQ ID NO: 15562 - DNA, 376 bp, Glycine max
tcaatgtagtatattacgatctggttgtccatgtttgccatatctgatatctccttcataatgcatacaagatggatgaatgaacaaagtaccatatcacatttgcagaattggtggattaagatttgaacattctctgacttgtttacagaagagaaaagttgttggattgtcttttttaagtagtatatgagctcaattgtgctgctacctggctaccttatttcatctgtgatatcattggactcttatttgtttaatctctacctgttcaggttgtccaactaatgaggctagattgcaagcgcgctgttcctttgttgatccagaatagggacttaataagtccacctgaagttgtgaatcaacttctaaa

SEQ ID NO: 15563 - DNA, 298 bp, Glycine max
agcttgttgacatgttgagatttacgtcatcttccgcgctcacaagatctgtcatactgacttttgagtctcgccgacggccgaaaatacccgagtggttatccgcataaactttttgctgtctataagacgaatagcctgatagcacgcagagactaacgtcgtcttctgcgccctttgtcaatcgcggccgacaagcccgttgacacgtggagatttacgttatcttccgcgctcacaagatctgtcatactgacttttgagtcacgctgacgggcgaaaatacccgagtggttat

SEQ ID NO: 15564 - DNA, 341 bp, Glycine max
tctcggccgtgattgacgaagggcacagaagattacgtttgtctctgcgtgctatcaggctttttgtcttacaaacaacaaaaactttatacggataaccactcgggtatttccgccagtgagcgagactcaaaagtcagtatgacagatcttgtgagcgcggaagatgacgtaaatttccgcatgtcaacgggcttgtcagccgcgattgacgaagggcgcagaaaacgacgttagactctgcgtgctattaggcttttcgtcttacagacagcaaaaagtttatacggataaccactcgggtatttccgcccgtcagcgtgactcaaaagtcaatatga

SEQ ID NO: 15565 - DNA, 311 bp, Glycine max
  unsure (1)..(311): unsure at all n locations
agcttctagattcatcctaacttaccctaacagaagctaaacaactaactgaagggtatcttagccttctaaccccttgatcatgctcacggctcactcgataagcttcacacgttccattctgcatggcttctgtcgtaaccttctggatacgctggggtggacctttcccttcgtggtctcgcactccttgcttcctgcacctcctttgctattgacaccccttcccttacatttcccgtaacagaatccanaatattaacatgcttggatactcatggaaaacccgttaaacgggaaaaaaaatataa

SEQ ID NO: 15566 - DNA, 371 bp, Glycine max
tcaacaaattagttcacagcaaaaaaacctttttttttccagaaagaagtaaacacgtgtttcatttgctacaatcacttatttttttctaattaatttttttatatataaaaaaaagaagtaaactacggttactattacactcaccgcattggaagcgagtccataaccagcaacagcaagcagaaggagcagaaagagaacaaatttcagttccatggccttggtcacgacaacctcagaatctcgctgctactaattaggaaacgaaaacatcgtatgccgagagcgtgcgagaaaaacagcaccagaagacttgttcatttttttttttgtgcccttgttgtgagtgaattaaagtaaagagggta

SEQ ID NO: 15567 - DNA, 278 bp, Glycine max
ggcttggagaagataaaggaatttttgtgctgcggataggatactctttgcttacctattgatcgatattcttcttctttttctccattagttatctgttattttttccccttcatattagaaacagtagtcaagcattctttgcacacggaacctcggagttttttgcgctgtacattatgctctactcatttacttaatggccattgaaatgttgattacatgtctaccattctaaactcaattttcgttatctactggaccctgaatataaggac

SEQ ID NO: 15568 - DNA, 292 bp, Glycine max
tgccacccagctcgcccaagagagctaagaggtgtacttcaaaaacaaccggagggcgggagagttttctagcaaggacactacgggacaaggggctaataacatagccgatttatgtaaatacctctacttgacatactaagatgtgggatgcttgcatgagaaacgactaatgattagtgtctgaaagacacttgacatttcgactcctacgcctcttacaatcatggaatagcagcttaaccctttctctaccttccacttagcacagacctttgcactaagggcgcat

SEQ ID NO: 15569 - DNA, 291 bp, Glycine max
tgctttcaagaaattcaaatggtcataacttttcagatgaaagtccgattcagccgcataatatatctagacgcttgaaattgaacgcccgatgatgatgacaaatttaaatggtcataacttatcacgcggatgtctgattcacgccaattatatatcgagatgctcgaaattgaacaatggagctctcgagaacattcaatggtcataacttttcaattggatgttcgattcaggcgcatcacatatcgaggctctcgaaatcgaacaacgaaagctcttgagaaattc

SEQ ID NO: 15570 - DNA, 349 bp, Glycine max
tataatatatcgatacgctcgaaatttaacatcggaaactctcacgaaattcaaatagtcataacttttcacacggatgtccgattcgggcgcataatatgtcgagaaggtcgaaattgaacaacggaagatcttgagaaattcaaatggtcataacttttctcacggatgtccgactcacgcttataatatatcgagacgctcgaaattaaacatcggaaactctcgagaaattcaaatggtcagaacttttcacacggatgtccgatacgggcgcataatatgtcgagaggctcgaaattgaacaacggaagctcttgagatattcaaatggtcataacttttcaca

SEQ ID NO: 15571 - DNA, 316 bp, Glycine max
tttcttatcatcatgatcctgccttacgaacaaattgcagccctatttgccgcttcatgtggtcaggtatcactttgttcacaagctctggagaagctttggataactggaaacagagagaattacaatataatagtccatcatttatgatttttagctaggatgtttataaggatcataaaaaggaacacagcgcatgtatattatttttcaatgcattgctttgtgtactcaaatagacaaacacacaaagacagacactttaaatcaaccagacagaaataaagctaagaaaatggatctggggacctttctc

SEQ ID NO: 15572 - DNA, 363 bp, Glycine max
tgacaacacaaacgtgggaccgccttattacctcggcctatgcacagatgcactcgcatgtcaatgcttcattctaactagtaataggactagttgaaatatcaattgtaaaatttgacactcgttaaaaatgatatgatgactgcgccagaatagaattcacggtgaaggaattcattcattcattcatacataacataactaccagatcgggcctttattacagagctatttgatattctcctatctttctttctttctgattttcttatctaagccatagaagaaaaaggataaaagaccaagatgcagactcctcttgtgttgagtggaaggtttggacatgcatctaattgtatatat

SEQ ID NO: 15573 - DNA, 347 bp, Glycine max
agcttgtaggattatggggtacccatcacatgtggtactaggtggcggtcggccgatggtgcacaacaagttttccacattcacaaagcgcgcataaacccaccatcccctgttgcccacctccaactgagctcacgtactcccacgtagcccatatcctcgtttctctcaacatcgggtccccatcaatcctgccaagctttcccaacatccaagtaatacaacattcaaacagcacaaattatcacagccaagcaaaacagggcaaaggcagaaaactctgcccaaaacaccaaccaaaatcacagcttttctcacttaaagaccccagtaacaattccttcgtt

SEQ ID NO: 15574 - DNA, 439 bp, Glycine max
  unsure (1)..(439): unsure at all n locations
tggatgtggggnttagaagttttgagcgttctaagcgactctatagaatactgaagcttgaatagtgacatatatgtgtgttgtagcagaatgtttcgtataatactaataggtcagggcaatgcacatatcgatgacatatctacagatntacagtctgagcacgtatatgacagctgacccttatgaattgcacaggtgcgctatcacggcgacgacaatatcttatcatggatgccacaatgcgtcaccacatcaatagttgctgcactgatgaccgcttgatgctagcatctacaatcatacacaatctttcacgagtaactccttcgccggtgcaccgaattgcngcccaaggcatacatgtgtgggaacttatggacgagcagagagtgattgttcaaatgtgtatacgtatgcggacaattgaggtggaaaa

SEQ ID NO: 15575 - DNA, 360 bp, Glycine max
agcttggaatcacattcaacaattactctagtttatctcttctcccaaagagataactaaggtcgatagaactccccataattcaacagctggtacatcggttgatccaatattacgcatgcatgaagcaagaaacccagccacctatcccgtttctcaatacacctgcacaagatgcactactaccattgagaagaactgatccatcaacattccattttagccaaggagacaatgggggttgtcattgaataacaattagccgcgatcctaaaacaagagtttattagccttaaaagagataacaatctctctaatggctaactgcttaacatcaaagaaactatcaggccgaaaaaa

SEQ ID NO: 15576 - DNA, 339 bp, Glycine max
ttacttgcaaaaatatcgaaatctttgaccatttgatattctccgggagggggattggatgtatcactttttcccaaaatgggctaacttggtgggagggggattactagcgtgttcaataaaaagccttatattctttctagatacacaccagaatatgagataaaagcccataatcattcacctcatgattatatgatggatggggtggcttagatcatgtaagatgaatatactctaggctatactacactttattaggcttagacctagtttttgttaacatggcatcaggctaacatatttacttatcagaattatttgtaaacctacataaaa

SEQ ID NO: 15577 - DNA, 343 bp, Glycine max
agctttgcttctacacttaggtgttataaggcatgcaaagcatgtaagacatacacaaagtatgactatatgatgtgacaatggggtgtcacaagcaaatgctcacctgcccctctaaaatttaatgggattgggcttatcccaattcaatcaaatttatttcccaacacacatcaaatattcacttaatgcatgtgaaattacaaaattacccctaatacaaaaagtagtctatgtgccctaaaatacaagggctgaaaaatcctacatttctagaataccctacctacattatggagccctaaatacaaagcccaaaaagtgtagaaatcttaatctaatg

SEQ ID NO: 15578 - DNA, 341 bp, Glycine max
ttgagccagaatcctgactcaccataaaccttgttcctaggtgagaatgtccctccttaccctcggaagcgaaaaggaaagaaggaagatttccgatcaaagagaaagctcaaaaaaagaaagagcagaaggaaaattccccaatcaaaaatggggagagagcaaaatgaaaagaaagaaaatttccaatcaaagaatgggagaaagtaaaaaaggaataacaagaaggaaagatagctcctgatcagggattgaaggaaaacataagaaatgtgcatagaggtctttgtaccggacaatatctgaacaatacagaattgacaccaaatgaacaaaaaaag

SEQ ID NO: 15579 - DNA, 357 bp, Glycine max
agcttgttggcaaaaaactttggagacaaaggacaagaaattgtaaccaacacgcttgaagaggtatcacaatgcggtggcataaacgagcaccgcaaccactccacgccaattcatccacaacaccacattagcaactaagcctttgccgaaaacacgatgaaaggatgagaaactaagacaatgccaatattttcagaagaatgaagaatgaaggggttagaatcatcaatggcagtcatggccatgagagagaaaaaaaagaaccaaccaggcatccgaaaggtccccttaaaaaaatgattcataaggaagtggcctatccagttatataaaaacttaatcatcaatgatatc

SEQ ID NO: 15580 - DNA, 366 bp, Glycine max
tattataaaagacccaacaacatcggtttttatataaaaccgatgttgttcacgcaatccacaatatcggtttttaaaaactgatgctaattatgaactaataacatcgcttttttttttggaaaatcaatattaactattaattaacaacatcaatttttgaaaaatcgatgttaacattatgctagcaatattgattttcgaaaaccgatgttaaagatattcttttatttagggaaatgtcactgcaaatagtttaacatccattttttcttgtaaccaatgttaaactaactatgttgaatgtactagtgataccaagtgcattgataaattgtccccattctttaccaagaaatcaaagtg

SEQ ID NO: 15581 - DNA, 364 bp, Glycine max
agctttgagccaaaatcctgactcaccataaaccttgacccagggtgagaatgccaatccttaccctcggaagcaaaaaaaaaaaaggaaaaatgagaaggaaaatttccaatcaaaggaaaaaggaaaggaaattcccaatcaaagagtgggagaaagcaaaaagaaaagaaagaaaattcccaatcaaagaatgggagaaagaaaaaaagagagaagtaaaaaagaagaaagctcctggtcagagaaaccagaagaaatgtgccgagaggtccttggaccagacaatatctgaacaatacagaattgtcaccaaatgaataaaaaagaaggaaaggaaaccacgacctataatggtctcccc

SEQ ID NO: 15582 - DNA, 316 bp, Glycine max
  unsure (1)..(316): unsure at all n locations
tattcgtanccatagtgtttgttgtagagatttttgtcaaacggtgggcttagccaatggctttgtgggttctgagactaaacgccatgttttcaatggaaggcagaagtttatgcttcaaaggaaccggagtgtgaggtattcaccaagtaatgctgacaatggcttgttaaagttctatttgacacccttgaaaagctatatgagaagcatgtctggaaagactagcttaaagagttcaaatcctacagccagaagtttcctttgacgctgtgactaatggaagtttttctggtcgtataaacctatataatga

SEQ ID NO: 15583 - DNA, 341 bp, Glycine max
agcttgaagacattactatacgttgtatcttccttgggtatagcaatatctctaagggctaccgtgtctacaacttgcaaactgagaaactcgtcatcaattgagatgttgaaattgatgagtacgcttcttggaattgggatgaagaaaaagcggagaagaacattcttatacccgctcaactacctcaagaagaagctgaggaagaaaacccaggtgaaccacctttacctccaccacaacaacaagattaagatctatcatcaccagagtctactccaagacaagtaagatctttggtggacatatatgaaaccttgaacttgaccatacttgaacct

SEQ ID NO: 15584 - DNA, 377 bp, Glycine max
tcagaattcaactctcttgatttgttggaatgtttgttgagagaaagaacagagagcaaaataaggcttctattttcttaatcaaacgttggagtatgttgccaatgttgtgtgcttatttatagtttctctgttagcttgtaaagcacgcaacaataagatgtgatataggatttgtttttttaaaaagacatttgccgttatataaggataaattatggcttaaaaaaagatacttattttctttcaaaaaaaaattatttctgaaatttaatattttgaagataatttgaatttacttatgaaaatattagatctgagtttcaatttataaaattatttctagtgtgtgaagttactttttgtgtggattaaaa

SEQ ID NO: 15585 - DNA, 353 bp, Glycine max
agcttccccaacatccaagtaattcaacattcaaacaacacaaactatcacagccaagaaaacagggcaaaggcaaaaaactctgcccaaaacaccaaccaaaatcacagcttttctcacttaaagaccccagtaacaattccttcattccagttcgttaaccgttggattgactcaaatatttcactggaagtctctagtacataaacctacattttgaccgttgcgatctagtagtaaacacccaaaacgcattctgcatcactctttccacaaccagcaaatacatagcatttttttctgcacttatgcaaaaatctgctgcacaatttcacagcaaaattctgcacaaa

SEQ ID NO: 15586 - DNA, 352 bp, Glycine max
taccataagcgccaatcagtggactttgttgctggtgattttgcctgagctatcatgagtaaagatcgtttacccactcattaatacaactagcttattgctagcaaaatcgagtcatattcatagtcctgatgctttcaatgataatttccttattgtggtaatgcttcttctgatgatgagatggcttttgatctgaggatgaatcttcttcaccctgaaaaggatcctgcagtgcaagattgaccaaagttgaccaaaaaaagtcatctgtgtccattttttttacaaaggagtacactttttcgaatggaaacgaccttctaaggagactgcattccctactagcaat

SEQ ID NO: 15587 - DNA, 340 bp, Glycine max
  unsure (1)..(340): unsure at all n locations
agcttgtaggcctatgatctttttcatcaatggattcatttacttcttggatgatgaatgacagcgaaatggagaaaggaaaagagagaggagacgccacttcaaggagaagatgagtctaaaagaagctcaccaccataggaggccatggataagagcttggangaagaaagagatgaatgaatggagtgggagagaagagcacgaaattttgtgctctaaatgagctttgaaatctgaagtttaatactcaaatgatcaaagtttgaaaaaatgcacacacatgacctctatttatagcctaagtgtcacaaaaatgggagggaaatttgaaatttca

SEQ ID NO: 15588 - DNA, 352 bp, Glycine max
ttttaatgctggcatgttcagagatcctggtatttctaccctcgaggtgtcaaacgaattacatgatagcttcagaaatgtctcggactcacaggaaaagatgtacgggcaaaactcgaaactctgtctgaagcttaaatttagagatactgtaaactgctgaacattgtgcagcacagcatatttcatcagcctattgaagagcttgggctcccataccgcgacgcgtgaattcaagattgagcagggaaactgaaccatctcggccagacagaacgcgagacactaatttgttgaatttgacaacattgttaaagagggttgtattgaatccaagataagttagacgctt

SEQ ID NO: 15589 - DNA, 326 bp, Glycine max
agcttcatgcaatttacgattttatctctgcaaagggatttgggagagagaatagataaattaggttcttcatcatgagggatcagggttgagtatgttagtagatttaggtggaaattggaatagtattaaatagtgaaacacattaatattgcataaaggataattaggcatgctacgccccaacatattttaaattctaaatttatctttttatcatcatttttatcttatatttttcttatcttttacattaaaaaactcttatttattttatttcctaatctcttatcttttattttaaatctttatcttatctcctacct

SEQ ID NO: 15590 - DNA, 368 bp, Glycine max
tgtagggttatggggtacccatcacatgtggttttaggtggcggtcgggcgatggtgcacaacatgtttttctcatccacaaagcgcgcataaacccaccatcccctgttgcccacctccaactgagctcacgtactcccacgtagcccatatcctcgtttctctcaacaccgggtccccatcaatcctcccaagctttcacaacatccaagcaaaacaacattcaaacaacacaagctatcacagccaagcaaaacagagcaaaggcagaaaactctgccaaaacaccaaccaaatcacagcttttctcacttaaagaccccagtcacaattccttcgatccaattcgttaaccgctggatcgactc

SEQ ID NO: 15591 - DNA, 354 bp, Glycine max
agcttgtcactcttaatgatctaaatagtaagcttttattgacagcaatatccacaacttctgtagtttctattcttttcttttccactacaagcataacccggttctcgctatgaagggagtggttacatattttaatgtctatatggcattatggcctatgcgattattttcctcacctacccccaaactatacagaaatatatctgaagggatcaagatctctacagtcaagaaaataactgctaaagatctaagccataaataagctttattttataacagacaaacaaaaaattaagattaaatatgaaacttaagatataatataatctgttggatttgaactgcatg

SEQ ID NO: 15592 - DNA, 377 bp, Glycine max
tggaacaatgaaatctccagaagaaggctaatttacacatctaagatgctcctaagataaagacttgttcaattaggtttgctctttcaaaattttcattttctcccatacatccaaattatgcatctcactaggtgcatctaagtgttctcattaaggtgttgtctatggtgaagtttatttcttatttatcactattagatatattcatattttatttaatggttgagatttttggacaactgattggtccagttgcttagatcttcaacaatttaactaaaaattgcaaattaatccttttgcaatatgattgcagaggaatcatagaatatatagtagcagaatacccagtctagaatacgttaaccaaaaac

SEQ ID NO: 15593 - DNA, 278 bp, Glycine max
ttcttctcaaggaggtgagcttatttattagaggggtgtgtgtagctaagctctagcttctcaaggaagtcttctaaaagaagcttctcaaggaagtaggctcaagaaagcttctcaatgaagctacctagtctataaatagaagcatgtgtaacacttgttgtaactttgatgaatgagagtcttgtgagacacaactcaaagatcaacttttctcccccttttcctcctttaattttgtgctcccccctctctttttcttttcctccattgaagca

SEQ ID NO: 15594 - DNA, 362 bp, Glycine max
tccatctattttaaaacaactgaatatggaactaccagcataaaaataaacaggtaagatcggataaaaataaagtttaaagaaaaaataaatatagaaagaaataaaattttgagaataaataaaaaaaaataaaggatttaataagatgtaataaagtaaaagaaatcataaagatgttcagaaaaactcaatcctaaagatgttcaaatctgatatttccaaagttaggacacaatgggacaaatatcagtaggtatgaaaccctgccagcaaacaaaatatttggatatggcataaacactcctgtcgcgcccaagacaatgcagaataataatggtgtctatggagtattttccttt

SEQ ID NO: 15595 - DNA, 285 bp, Glycine max
agcttcaaggatggatgaacctcgatatcacgcatgaatattctatcttcaatatctagattgctcacatccacaacaatttttgaaggaatgtgctcagatggacagaaaaattttagactaggtctgatcttattcaaaattcctcctgcaatggcataaaagtttcaaccatattagcattagaacagaacattagaaccacaaaaaaattccccatgatattatattaaattgaatttgcaacatttggcacccgccccccctccaaaaataatgatattc

SEQ ID NO: 15596 - DNA, 363 bp, Glycine max
tctacttttcttctccttagtctcctcttcagtcttcccagtcatgtgttagacaagtggcctcagatatcttaagaaggggggggttgaattaagatattcgatactttttcttctaattaaaaatctatcttactttttacttaagttatgaattcccttaatgacaatcttcttaaatattaattcaaatgaagcaacttgaatatgaatataaagcaataataaataaaggagattaagggaagagaaaatgcaaactcagttttatactggttcggccacacccttgtgcctacgtccagtccccaagcaacccgcttgagagttccactaacttgtaaattccttttacaagttcta

SEQ ID NO: 15597 - DNA, 356 bp, Glycine max
agcttgctacacccaaatatgtgcgaaatactgtggcgatttcctgcatagattattgacctgcgccgcatttatacacatctatgaagacttgaccaatttgtcttgtttaggagggagatgtataattttgatcatcaagtggtggactttgaaagtaaaagctagataatcatcatggcttggctgcgaaacatatttaattaacagaataattctaattattaaaaaagagaataattctaaatctttttgcaacaccttcctaataattttcataatttatgtttttaagatattgaatatatttatttcttaaatttctattgacttaattagtactctaagaacacatg

SEQ ID NO: 15598 - DNA, 335 bp, Glycine max
tgaagggtactcagactggcatcgtgatacttgttatcaaccggactagtccgttgatgacgtgtacgcaccttcgaagacttatgatttaatactccgtggaaattaaccctgcaaagtgcaaaatatacagcatgagaaaaacaagcatgcgtgagtaacaatattccttgattatttacacataaattcccgacacactgcgaagcttgaacagaaatctatgtatgccatctagagaggttaacaggtgaaagaacgttgttctttaactctctccacacgaatctaagttttacgaaaggatcgtgagagtgatgtaaaagcatatatga

SEQ ID NO: 15599 - DNA, 347 bp, Glycine max
agcttctagttgcaacgtgtgcttgtgagttaacttggatcagtgcacttgaagctccctacagtgatgaaagtctaaaggttcatttcatttactcagattttgtaattgtagttcatgttcttttttgctgattaaaaatacaatcattttgctcttgggaacataatttactattatcctttgtcctgatctttggtagacctcattgcaggatatcttccaattgattgttggttcttttagcggtctaagtgatacaaatggttcatcctttggctggagagttgtcatattggagactctcgccaaatataaatcatgtggtgtgatgttggatcttggat

SEQ ID NO: 15600 - DNA, 358 bp, Glycine max
atagttcatatacagacgaaaatgagcattttctaataccattataactcacagccatcattactgaatggatcataaagcacaatgattaacctcattaattacatgtcaagctcgtgttacaggtcttaccagggtttataagcataaattaacgtataattattcatatttttttcttctatacggagttgacgctatcttgtgctggtcccgacttgttctaaaagtttttgacaaattaatgtcaatagaacctctctcccaagactcaaccaacagaatttcattgggatacgaagttttacctgttttcatagcactatttgacagacaaatgtctccttagaacaagaga

SEQ ID NO: 15601 - DNA, 340 bp, Glycine max
agcttctaaactttgtacaagaatgaagctctgataccacttgttagacaagtggcctcagatatcttaagaagggggggttgaattaagatattccaaactgtttcccctaattaaaaatctatttcactttttactcaagttatgaattcccttaatgacaatcttcttaaatattaattcaaatgaagcaacttgaatatgaatataaagcaattataaataaaggagattaaggaaagagaaaatgaaaactcagttttatactggttcggccacacccttgtgcctacgtccagtccccaagcaacccgcttgagaagtccactatcttgtaaat

SEQ ID NO: 15602 - DNA, 369 bp, Glycine max
tgatcttgaattactcttgaagcaatgcttgtttgttgaatcaaccttgtattactcttgaagcaatgcttaacctttgaatgttagttgaagtaatcttgaaagcaaccttgtttgattattctttggtatcatcaaaatcatgtattcatacattctcaactatttttgaagttacggaaaaaggtttgaaataaaactttaccaggaatggtagaaaacgagttttggctcaatttctaccttgccggtaaaagtagcactcaaattgattttttggaaaggaagaatttcaaatcttttttaactatgtaaaaattggaaacctctttgtcttgttgccttgcggaattgtaaagattttttctc

SEQ ID NO: 15603 - DNA, 352 bp, Glycine max
agctttgatggtgtcgagaagaaatcaaattttatcatcatcaaaaagggggagaatgtgaatgtatgtatacatgattttgatgatgtcaaagaagaatctaacaaggctgcttcaaatgatgagcatttgcttcaagaataattcaagattgcttcaacacacaaagccttgtttcaagattcactaaagaccaagccttgccttaaaacaaagtgctttcaagacatgcaaggctctggtaattgattaccaggaagtgtaatcgattaccaaaagacagggttgagaaatagctgttgaaaaagggtttgaatttgaattttcaacatgtaatcgattaccatatgtc

SEQ ID NO: 15604 - DNA, 351 bp, Glycine max
tctcaaggaggtgagcttagttattagaggggtgtgtgtagctaagctctaggttctcaaggaagttttctcaaagaagcttctcaaggaagttttctcaagaaagcttctcaaggaagctacctagtcaataaatagaagcatgtgtaacacttgttgtaactttgatgaatgaaagtcttatgagacacacttcaaagttccacttctctccctcttttattcattcaatttcgtgctccccccttctctctttcttttcttgcattaaagcatcctcttcaagcttcttatccaaggcaattcttggtggtgaagctccttcttccttggcttattccctagtagatg

SEQ ID NO: 15605 - DNA, 363 bp, Glycine max
agcttggtgaacaattgttgcttgcatagaatgcaaaattaatgaaagaacagatattgacgaacccatatatatgaagataggagttctctgtcagaaattctttctcatatagctgcatgcaaacatcataactgcgtttgtagacctgttggttggttcaagggaaattccagtcaaaagccaaaaagaaacttcattgagtcaaccattcagtcatgtatctcaatttaattaaagatttagaataaatatatttcccaaaaaactttatttgtatagaaaggtcaaacatgtctaatcaacctttacattattgtaacatttgcaaatgttcaaacaattgagacaaagcaacctaca

SEQ ID NO: 15606 - DNA, 381 bp, Glycine max
ttacagaagaggatttataagggatttctagttggcataaatagggtggaagttagtatccatgcggacgacacgatcttctttggggaggcaacaatggaaaatgttagagcaattaaagcaatattgagggcttttgagcttgtatcgggcctcaaaattaattttgctacaagtcgatggtgtgctttcagcgttccggatcattgcacaatcgttgcacccaatcacctcaattgtagcttgatgtcctttcctttcacataccttggcgtgtccattggagcaaatactagaagaagtcagacttgggaccctattattagcaagtgtgagagaaaattatcgaaatggaagcaaaaacacttatctttcgggggg

SEQ ID NO: 15607 - DNA, 300 bp, Glycine max
agcttgagatgatgaagtgttgataggtgaaacttcctgcttttattgttgaccacagagtggtacctggagatatgtcgcgggggtcatgagaccttggggacgtcaggtggggtgctattgcccaaaaccaagcttgaccaatcccgacccaacccgggcatagtcggtcagtgagaacctgtgatgtacctaagcaggcgagctcctggcagtcaacagataaaaggaacaaagaccacaaagcaaggaggcttgtggtggctggccagctgtgaactttgattgatatgtgggtta

SEQ ID NO: 15608 - DNA, 374 bp, Glycine max
tgtccaaaagggaagcaagttaaaaactctttttatagtaaaagcgctgtttctacttcaaaaccctttgaactacttcacatagacttatttggtgcctctagaactatgagtttgggtggtaattactatggcttagttatagtagatgattactcaagattcacatggactttgtttttgaaaaccaaagatgaagcttttgatggtttttgcaaacttgccaaggtcattcaaaatgaaaaaaggtcttaacattgtttcacttataagttatcatggaggtgaatttcaaaatgagtctcttgaaatgttttgtgaagaagatggaattcaccacaacttttttaccctaagaacacctcaacagaatg

SEQ ID NO: 15609 - DNA, 316 bp, Glycine max
  unsure (1)..(316): unsure at all n locations
agctttcgttcctagtgcctaggtatatgtggagcaattatcgtagcccttatgaagctgaatacatgctcaaaaataaccaacacatgcaaaccaaattgttccaaaagtttgtttccttcccaaatcatgcgcaaatgccattgatgcatttcaccgaacacttggtgggcgcatgtttangcatgaatagcaagagaatgacggcaatgtggcatgccccattgcttcaaaatgcaacgtaagcctaaggccattccctacaacccctcaattcacaacaatcaagcacgaattcacatgtgaaatgcttcac

SEQ ID NO: 15610 - DNA, 312 bp, Glycine max
  unsure (1)..(312): unsure at all n locations
agctntgaaaagtgctatttttcaccttctcgcttatccaatctgctggcttagcgagcatccgctaagcgctacactcatgggctaagccggaggaagactctggaagaagatgagctgtacatgttcgctaagagcaccgcttcatctcactaagctcaccgcttcatgtcatccactgaatgagaaaggctcgcgctaagccgaaattcactaatgtccgctaagctgtccataagtgcgctcagcacacgagcacgaacgagaccacctatttgggcctgtattctaatattgggatggagcttggac

SEQ ID NO: 15611 - DNA, 335 bp, Glycine max
cgactcacaccatgacataacaagtttagcatgttttcattatcttccttcacacacaactaccatagggcatcgccctagctaaaacatacccatcatatctcccaaacacccaatacccatgaaattatatgacaaatgaaatctacccagacctgaaatttaaagtcccacaacgtatacgtgcgcttcacgacctccgaaaatggctcccttttgccacttggagcaaaaatggtgagcacagggtggagctttgatggaacttttacggtggaggatcattaacggaatatcatcccgagaatgatggagaaaagcttctgactattttg

SEQ ID NO: 15612 - DNA, 353 bp, Glycine max
agcttatagatcatcttgatccgtagtcttcaatatattgttgaaaaatacatatatttttataatttgatttgctttcccagttgaatatattgcctatcaaggatcaactctcctgaaagccatcattggagtgcatattaaaatttaaatgaggacaatgcgcaggcttattgtgcctcattttaaaattcaaatttaattagtagaatctagctgacaagaataaagctcttgagtcttgaccgcttagcgatgcagatgttttaatattatgtccaagacctacacttaaaagttaagctgaaggttcaagattagtcttatatcttctattattaccaatgtctttt

SEQ ID NO: 15613 - DNA, 380 bp, Glycine max
tccatcaagtagtggcttgcagagattataagtcttggtgttactagtctagttgtggttaggagtgaagtccactacgagtgctgacaggctgttgaaacccaatggtttgctagtccagcaatggctattcatgttagtaaaatctcatattgtagagtgaggattggacataaccgcatgttggggagaaccagtataagaaatttttatagcatcttcttcctgctctgtctattttagtgcactgattttattgttgatctctttattggtttttgataatcataaagactgaaaaccttttataaacaacccttaaaactgaacctttttaacaaagtgttttgcaacccaacaactctttgaaacaaagctct

SEQ ID NO: 15614 - DNA, 321 bp, Glycine max
atcttgcctagcgaggcttcagaatctgaaatgtcaaggagcctttaaaacactaaagttggcgttaaaaagaaagaggagtcaaaaaatagagcaagagaagaatctagaacgatagagcctcggcctccaagagagtttaggttagaggagtgattttagggttctaaaggttggaagagacatcctcaaccatttgtagccttagtctttcctcaaaatctatcatttgtactgaaagttgttaacttgtaatggaaggctaaatctcttgttggggagttctgctgaacctttgatgtaatattctcttactattta

SEQ ID NO: 15615 - DNA, 237 bp, Glycine max
tggaacgagaaaccgagagaaattttatgggttatctgaagagaggggttttgggaatctttaataaagagagataggaagctgtgactgaaagaggggttttgtgattttttttagagggaattttttttgaggggttttgagatttttttgagagggaattttttttttgaggggttttgtgatttttttaagagggaattttttcttgtcgggataaaacaccatttatttcat

SEQ ID NO: 15616 - DNA, 339 bp, Glycine max
agctttattgcttcattatctgtagtagtagacctcccacattcccctgcaccctccactctatgaatctctgaaatgctcacaaatactagaaggccaagaatgccaaaaaccttagtgtaagcctccattttttcctcaatcagtgtgacaacacccctgcttctgatggcattttatagcccaaaatgcaccctaaaagtgcttggtctagtcacccatcttggattaatggagctggcactaggacaataggtgagtttcttatggcaccactttggtattaaaaaaaaaaaactctgatatgatgaaatatgaagacaacaagtttccttttct

SEQ ID NO: 15617 - DNA, 366 bp, Glycine max
tatatgcaattatagaatttttagaggaaatatttcaatgaataacccaattttgcaaaggtttttgcaaaaaaaaaaaattaattaattaatttagcttgcttgggggagtgtgtctgacgtaaaaatttaaaagggggaggggtgaagccattttcaccccatttcttccctaaaactcaaagccaccaataagcttacgggagtcactcttggcagcagccccaagcctccattgtgcacttttgctttcatttttcacattttctttcatctcctacaagtaagtaccatctcccttcaaattttagctttccattgtggtattttggtgctctagttgtcatgttctttgcaaatttcgtg

SEQ ID NO: 15618 - DNA, 355 bp, Glycine max
agcttttcgattcattctatatacccgtagtggtccacatttggtttcatgtatttttattcttgtttcatttactttttatacccccttttgacgtgcttaagccattttatttaagtcatttctcgcttaacctaaaaataaaataaatttccaccgatcgtttgaattgtattatccgttaacttcggttaaaatgaattccgaccgttcggtcgtaacgtaaccacgttggaaatcaaaaaagaggtaaaataataatataataatcaaaaaatgtctcttagtaaaataaagcggaaaatcaatcggacattttctctttgggatttctcattcttaattgaattaacta

SEQ ID NO: 15619 - DNA, 360 bp, Glycine max
tagactaagttcagcctaccaccctcagactgattaccttactgaacggaccattcagtcactggaggaccttttgagggcatgtgtcttagagcaaaaggggagttgggagagttttctgtcattgatagagttcacttataacaatagtttccactataccattggcaaggctccctatgaagctttgtatggtagaaggtgtagaacacccttatgatggttagagcccggggaagacctcaccttatgatctaaagtggtacaacaaaccaccgagaaggtaaagttgatctaggaaaggatgaggactgcacagagtatgcaaaaaagttatcagtgtaagacgagaaaagacct

SEQ ID NO: 15620 - DNA, 339 bp, Glycine max
agcttttaactcggatgtccgattgagtcccttaatatgtcgagatgctccaaattgaaaacggaagctcgtagcaaatgcaaactgcaataacttttaactcggatgtccgattgagtcgcatgatatatcgagacgctccaaattgaaaacggaagtaacaaattcaaacgacaataactttgtacttggatatccgattgagtcccgtaatatatcgagacgctcgaaattgataacagaagctctgagcaaattcaaacgataattactttattctcggatgtccgattgagtcccgtaatatatcgtgacgctccaaatctaaaatagaatttt

SEQ ID NO: 15621 - DNA, 247 bp, Glycine max
ttgagcagatccaaacgacaataaatgtttacttttatgtccgattgagtctcgcaatatatcgagacgctcgggatggaagaccaaagctctgcgcaaattcaaacgacaataactttttactccgatgtcttattgagtcccataatatatcggaacgctctaacttgaattccgaagctttgagcgtattcacacgacagtaacctgtttactcggaagccggattgagtcccgtacatatatc

SEQ ID NO: 15622 - DNA, 349 bp, Glycine max
  unsure (1)..(349): unsure at all n locations
agcttgtatttaaaaatgttttataaatacttttaattaatatttgaatttttattcctttattaatatatatgtgaggggtagagggtgtcacaagaactaaaatcaaaattgagataaactatatgataaaaaatatatttaaatctttttttcattcactatatatacatttacttgtaattggggtaataactttagtattttggttcttcttcctgcttttagtgttttcaaatttcattttttttgtgtggttgtttactttaacaatatgaatttattagcttgaaattcttctgcatctgtatcattatcttaatctagttntgtcctatctgatatgttt

SEQ ID NO: 15623 - DNA, 358 bp, Glycine max
tgtccctgtgcctcctcctgagatattgggggtggtctattttaatgataacatcctcaccagatactcgtgtgccctatttcataataataatgtctggttaaaactcttggggacagacaacgaaaaagcataaattcaaatatgcttactggaggggcaagaccatcatcatccagcttatcataagaaccatgtctcattccctgaaaaatgaaacttggtaagagaccaccaacaccaaaccaatattcttttccaaataaaaattgcaatgcatgaatagttgcttgctaccaaagccaaaattctcaccatggtgttagctctatctggacggccaaaatcttctttcact

SEQ ID NO: 15624 - DNA, 352 bp, Glycine max
  unsure (1)..(352): unsure at all n locations
agcttcataaatatggtaaccgtttctattttggtgatggactcaaggaatttaagagaacccatggcatccacgaaagtgttcttgtgacatcctgnaaattctacccgaaatttttgtaaacggtgcattntaaatgattatatatatataagtattattcagtgtataggcatatatgttcctggtagaagtaggaatagtgggggcaagatacgcgggttaggctaattaaggaagagaaatccataactagaaggttataggttaattcttaattaattagtctaaaaatcatcgttttgcgtgcaacttaaaaattaacaaaaccaacctctgaaccatgctcggg

SEQ ID NO: 15625 - DNA, 367 bp, Glycine max
tgtacctcacttggggcaattcagtttggtactcaggtgcattgccttgttgtcaaatgtgggtttggctgtgaactgtttgtgggtagtaatttgactgatatgtattcaaagtgcggggagttgtctgatgcatgtaaagcttttgaggaaatgccttgtaaggatgcagtgttgtggacgtcaatgattgatggctttgtgaaaaatggagattttaagaaagctttaacggcttatatgaaaatggtcactgatgatgtttttattgatcagcatgtgctttgtagtactttgagtgcttgcagtgcacttaaagcttctagttttgggaagtcccttcatgcaaccattttgaagcttggat

SEQ ID NO: 15626 - DNA, 359 bp, Glycine max
agcttgcatcctgaagacaaacttctatgatatatagacttgttgcttatgagtacatggctaatggttcattggataaatggatattcaacaagaacaaagaggaatttcagttggattgggatacaaggtataacatagcacttggaatagcaaaaggacttgcttatctacatgaagattgtgactcaaacattattcattgtgacattaaaccagaaaacgtgctcctagatgataatttcagggttaaggtttctaattttggtttggctaagctcatgaaacgtgaacaaagacatgttttcacaacacttagaggcactagagggtatcttgcacctgagtggatcacaaac

SEQ ID NO: 15627 - DNA, 373 bp, Glycine max
tgagatgaggaagtgctgaacggtgtaacttcctacttttattgctgaccacagagtggtacctggagatatgtcgcgggggtcacgagacctttgggacttgacgaggggtgctatcgtatgctgacaatagccgagaagcccatgaatttcttcgggggcagagtaagtgtccgccattgccttggccttggctaacaatcggggaagttcttgactcctgttcaaggtaagagcaaaccgatccatccacatggttgcctcttggtgtaaagagtcgatcacccttcctctagcctttttttccgcgtatacttgggcatactcgtccgcgaccctatgctcatgggtcgtggctagacttaactcttct

SEQ ID NO: 15628 - DNA, 333 bp, Glycine max
agctttagaaacttacacagcgtttattttatattttaaaattaattatttattagcgaccgaatgcatttctttataaatgtattttaataatagtttaattactaatttagtccttatagtttcatcatttgtacatttttgtccttataattttaaagtgttttttttagtccctatagtttacattttaattcccttttagtccatctaatttaaaactggttgttttagtatttataatttgtgttttaattcccttttagtccctacagtttgaaagaggattttttatttcttatactttatagcttaattgatttttaatcctta

SEQ ID NO: 15629 - DNA, 372 bp, Glycine max
tttgtgcgcatgagataaccaggttttcaacttttatatcatcaatgacttagacattataaaaaaattttgtggtttactgtctttttagtctctaaactttttaggatttctatttgtaatacctgaactttttcttactagtcaatgttccttaattttttatcagggactagaataaaaaatcctaaaaattttagtgattaaaaatataatatgtgcccattttgtcctattcgacgaaaacgtttgaaaaaccaaaaaagggggtctgggaatttggaaaagaagggtttgggagttgttttcgcacacgaaaggtatacacacccgtcacaatggacgacaacctttaatcgagtgtacataatg

SEQ ID NO: 15630 - DNA, 347 bp, Glycine max
agctttaggttgttcaattgctctagattgttgcacagaatggaaaaggtctgtatggtggtcggcagaggaacataaaccacagagtcttgtgacaggtacaaatttctgattcaaggccagctgggttaccaggttaaccaaggcatctagtttaccttcaagcttcttagtttcagatgatgcagatgagtttgtggctacttcatgcactcctctaatgactatagcatcatttctggtgctaaactgttaggagttggaagccatcttctcaattaaatttctggcttcaacaggggtcttgtctccaagggctccaccactggcagcatctatcatacttc

SEQ ID NO: 15631 - DNA, 370 bp, Glycine max
taacaagatcaagttgagatacatctgttcgtgtattaggacattgcggaagtttatgtttaagccacaaaggtgtaaaaggctgagtcattgccacattgatgttgaagatgaatagtttatttcattgtcttggttgcacaaataaaagctaggtagggtatcacatatattgtctgaagtattaggtttggactattgggccaagggatccttggcaaagtgattagaagtgagacattgtttcaacatgggaagggaactactgcataattttgtcctcggaacttaaaggaaaactcagttatttatgttaatgatggaataatgtataatttcttttactaaaccaaaagttgggtccaaactc

SEQ ID NO: 15632 - DNA, 404 bp, Glycine max
  unsure (1)..(404): unsure at all n locations
gaatctacgattgacctttgagcctcgctcacccgggatcttaagcacctgcggctgcagcttatcgnttataggaaacagcccggatcaccagctaaggcccctaaatgaccgctcactgataacagagggaggggtgcacagacaaccaggaggtttgcctagaagcacccacccttgaaagagtgcgtaatagctcactgatcgagcgctcttgcgccgaaaatgaacggtgctaagcgatctgccgaagctgtgggatgtaaaaaagaatcggtaggggagcgttccgccttatagggaaagacccgcgcgagcagtgctggacgaagcggaagcgagaatgtcggcttgagtaacgcaaacgttggtgagaatccaatgcctcgaaaccccaaggttcc

SEQ ID NO: 15633 - DNA, 364 bp, Glycine max
tgcataaaagccagactaaacaataaaggaccttttattttccctctgcctgccgaagtcgggcaatcccttctacagcttgccctgcaacagtgccttgaccaaccccaagtccaatagaagcaagccctacagtcaacccatcatcaataacagaaccagaagaaataaatggattcatgataatttactcgtaacctaaatataaaataaagaaatagttaatgatataatcacccaataaaatatgacctaagttttcaattatcaagatttattcgggctaaagtaattaataagaatttcgaattgaatataatcatagttattgaactctaccaattacttcgagatttattttctc

SEQ ID NO: 15634 - DNA, 349 bp, Glycine max
agcttacccttatggcttgcctccggacatcactccccgtaccgttccagacgatttgagccaagcccctaccttcaaggggcaactcccaccttatgctgactatcccctgcaagaagacgatgaagaaaatgcccatctaggccctctacttcccctcaaggatccggccccccatgaatttccctaaccaaacatagtccgccatgtcccgtctccacccgcacccattaaagaatccgttccctttgcaaaatatgtggaagcaaagcttcatgatgaatcaacaatgattcaaaggtgttttgatgatagcaatgatgacaacaaaagatgatgaaaaaaagct

SEQ ID NO: 15635 - DNA, 365 bp, Glycine max
tgcatttggagaggttccatcaaccgccctattttcttgatgctggtggtatctgggcttttgaccttgacttggtagaacctcttaccggattgatttgttcccatgcttactaaagtgagataaaagctggcgcaaatcaaaactccgatatctcatgggtggaatggatgaatgcatgatggaatgcatatgacacagatgcaatctaggaatgtgggggtccggggaatttgtccccttctcagatacgacgtctaggggtagcgaaatgccccaacgcacgtttttaagaaagcgacaccgaccctccgtttggttgtttacagtacggatcaagacagaacccatatgctatgcctatg

SEQ ID NO: 15636 - DNA, 356 bp, Glycine max
agcttagcagggttgcgcttagcggcaccatgaaattcagaaaatttactaagtatgcgggcttagcgagtcatgctcgcttagcccaatggctaccgcaatgaaatgagcttagtcgagagaggctcggcttagcgcacgacttccaacaaaaaatttgactaagttacgtgggcttagcgattcaacctcgcttagccacaagtatttcagcaagaggatgagtgttcatcctcaaaagatgaactcgcttagtgcggtaggcgtgcttagcgagtgcgtttggaaatgcataaattcaagcaattttgatgaactcgcttagcgcagtaggagcgcttaacgagttcatcgcg

SEQ ID NO: 15637 - DNA, 380 bp, Glycine max
  unsure (1)..(380): unsure at all n locations
ttgggataagagacttgcttgtgaatcaagggttatgcaacgtattttaattttgatattttctaattcaattctacttgctgtttaatttacagaagcaaacaacccccccccccccacaatttgttactatttcctactattttttatgaacatttggttaatcattgctcggtgggaaacgacctaggatcacttcctagttactgcatttcaatgtttatttgattcgggtacggcctcgatcaaattttgtgccgttgccggggagcagtgtccaaaggttcataatagctatactacaagaaaaatgacctatgcttacggacgcctttntcctacagacattaattagtgtaggtaaatctcaaaaatactac

SEQ ID NO: 15638 - DNA, 283 bp, Glycine max
agcttgttgggtatctgggccggatccctgaacgtagattaatgagttaagcttgtgaacatgtctctactacgccttaattaattttattatcgatgattgtacgtaaggtgttgattaatttattaacgttttatataaatttcattaatgagaaaattggtacttttttataccaacatgttgcaaatggatatgttccaaatatttactaacttttccataagccttaattcttcctttaaactggtgattgatagtacgggaaagctatttttttttt

SEQ ID NO: 15639 - DNA, 357 bp, Glycine max
tcatacaattaatataaaacctatattctaatgtcacatcctatcagagcgttgtgttcccgtgtcctctatcatgagggtcgtgatactcatccacctattcatctgctcccccgaacacaagttcaagatcatcacaggatccacacacaacaccacacagggagtgagttatcacattcctagcttatagagaaacaagacaattaaatatacatattatataaatgagataccacttgcttaaacatagctcacgtaacttcaccacttcgtcattcaaaattcacttttcaattatcaatcacattacacaagaatcccacacttcgatcaagatataataacacatcaatt

SEQ ID NO: 15640 - DNA, 150 bp, Glycine max
accatgaaaataatgccccatctaagccctctactttcccctaaagagcccggcccccatgaaattccttaccaaacataacccccctgtcccctttccccccctcccaataaacaatccttttccctttgcaaaatatggggaacccaa

SEQ ID NO: 15641 - DNA, 318 bp, Glycine max
agcttctccttccttttcctataaataggggaaggagggaagaacaaaaatgttcaaccctcatggtatctgagaatcacttaaaattagtgagaaaaattgtttccgtgaagaaaatccaagtcgaggcgcttccgtaacgcttccgtgacgtttccgtgggtgatttcgcgaagattttcaaccgttcttcgtcgttcttcggtcttcaaccggtaagttcccgaaatcgaacttttcaattcattctatgtaccctttgatgtgaacctgactaggaacggatcacttgatacaggctacgaagatttggatgac

SEQ ID NO: 15642 - DNA, 364 bp, Glycine max
tgaaggtgtgtaacccaccatcttttcatagtttaatactagtaatgtgtctactatcattgtcatcatttttttctccgtcattgaggtgccacttgagctgccaggtctctccacctttgggcgtattcttttgaaagattcgtgccccctttttgcacatgttttgtagttgcatcctatccgaagacattatactgacactgcttaaggaaggcaaccactaggtccttccaagaatggactcaggaaggttccaagttagtgtaccaagtaacagctaccacagtaagactttcttggaacgaatgtatcaacaattcctcatcttctgcggatgcccccatcttacgataatacatct

SEQ ID NO: 15643 - DNA, 332 bp, Glycine max
agctttgataccaactgaagttcttgaaacacactataagggggttgaatagtgtgaaggataaaaatttagtcttttgaaaactattaaaagcttttctcaaatagatatcaatgaatgaagggtttcgtccaaggggttcaaaatcacaattgtgcttagaaaatccagttcacaaaacttggatatagagtgtatagaagtagtaaagaaaatacaaagattttatactggttcaccctaactcttgggctatgtcaagttcatcttcaaactttgaagggttccactaatcaaatccttgattacaaccaagtattctctataccact

SEQ ID NO: 15644 - DNA, 369 bp, Glycine max
ttctaaagttttctggttttctaaaccttgaattcttgtgttattcatcttttcattctcttatccctttgccaaaaagaattctccaaggactaaccgtctgaattctttttgtgtctctcttctcccttttccaaaagaacaaaggactaattgttagacaagtggcctcagatatcttaaaaggggggggttgaattaagatattcgaaactgtttcccctaattaaaaatctatttcactttttactcaagttatgaattcccttaatgacaatcttcttaaatattaattcaaatgaagcaacttgaatatgaatataaagcaatactaaataaaggagattaagggaagagaaaatgcaaact

SEQ ID NO: 15645 - DNA, 357 bp, Glycine max
agcttcttttggaccttgaacaggcaactaactcctctttcaaaaccatgctatgtgctcgcgactggtccctctcttcccttcgcagcttgagttcactattgctaccccacagagctccgcgaaatttattccggccatactcttccttgcgagccctcttggtctcttgttcaagggcccttgaggtagttgcattctcttcccgtaacccggcacactccttccgaatgtgtgtagcggccaacttgaacttctccttggcaagtctcgcctttcctaactcgcttttgagagcttggacttcttcgtcctcttccagtgcttcaaaactctcttcgctgacgacttttaact

SEQ ID NO: 15646 - DNA, 342 bp, Glycine max
ttgagccaaaatcctgactcaccataaacctttaccagggtgagaatgtcaattcttaccctcggaagcaaaaaaaaaggggagagggaaaatttccaatcaaagaggaagcaaaaaaggagagaaggaaaatttccaatcaaaggaaaaaaagagaggaaagggaattcccaatcaaagagtgggagaaagcaaaaagaaaagaaagaaaattcccaatcaaagaatgggagaaagaaaaaagagaagaagaaagggaagaaagttcccgatcaaaaaaaaataatatgcagaaaggtctttggaccggacaatatctgacaatacaaattgtcccaaatg

SEQ ID NO: 15647 - DNA, 339 bp, Glycine max
agctttgatggtgtcgagaagaaatcaaattttatcatcatcaaaaagggggagaatgtgaatgtatgtatacatgattttgatgatgccaaagaagaatctaacattgctgcttcaaatgatgagcatttgcttcaagaataattcaagattgcttcaacacacaaagccttgtttcaagattcactaaagaccaagccttgccttaaaacaaagtgctttcaagacatgcaaggctctggtaattgattaccacgaagtgtaatcgaataccagaagacagggttgagaaatagctgttgacaaaggtttgaatttgaattttcaacatgtatcgat

SEQ ID NO: 15648 - DNA, 368 bp, Glycine max
  unsure (1)..(368): unsure at all n locations
tctcaaggaggtgagcttagttattagaggggtgtgtgtagctaagctctaggttctcaaggaagttttctcaaagaagcttctcaaggaagttttctcaagaaagcttctcaaggaagctacctagtcaataaatagaagcatgtgtaacacttgttgtaactttgatgaatgaaagtcttatgagacacacttcaaagttccacttctctccctcttttattcattcaatntcgtgctccccccttctctctttcttttcttgcattaaagcatcctcttcaagcttcttatccaaggcaattcttggtggtgaagctccttcttccttggcttattccctagtagatggtgccagccctcttctc

SEQ ID NO: 15649 - DNA, 302 bp, Glycine max
agctttgatggtgtcgagaagatatcacattttatcatcatcaaaaagggggagaatgtgaatgtatgtatacatgattttgatgatgtcaaagaagaatctaacaaggctgcttcaaatgatgagcatttgcttcaagaataattcaagattgcttcaacacacaaagccttgtttcaagattcactaaagaccaagccttgccttaaaacaaagtgctttcaagacatgcaaggctctggtaattgattaccaggaagtgtaatcgattaccagaagacagggttgagaaatagctgttg

SEQ ID NO: 15650 - DNA, 376 bp, Glycine max
tctcaaggaggtgagcttagttattagaggggtgtgtgtagctaagctctaggttctcaaggaagttttctcaaagaagcttctcaaggaagttttctcaagaaagcttctcaaggaagctacctagtcaataaatagaagcatgtgtaacacttgttgtaactttgatgaatgaaagtcttatgagacacacttcaaagttccacttctctccctcttttattcattcaatttcgtgctccccccttctctctttcttttcttgcattaaagcatcctcttcaagcttcttatccaaggcaattcttggtggtgaagctccttcttccttggcttattccctagtagatggtgccagccctctcctcttctcctt

SEQ ID NO: 15651 - DNA, 332 bp, Glycine max
agcttcctccattataaataaatttgacagcagaagttttctctttgaagttttgtataatattcctttcatacaaaatttcatactttggaaaaacataattaatgctaaaaacatactattgaaacatgtaattgaaaatacatgtaatagaaattaaaattcctaaatttcataattagggtttatacataattgagagaaattaaatcattcctaaatttcataattacgattcataggagaaatcaaatcattcttggagaatcataaatttcataacacatgttctgataccacatgtaaaacattaaggggttccctaaactatc

SEQ ID NO: 15652 - DNA, 370 bp, Glycine max
tataatgaaatgataaacttcaactctatttattcataaaatccaaacaacaaattgttggtaaaccataggatagagaacataagcaagacttccattaaactaaggtactatcaagaattacatccatatgagcagtgtgctcatgaaaaaactttaagtgtcagacctttagtaagtggattagctactatggaatgagttcctatatgttctatacaaatttgtattttttgaattctttatttaacaaccaaatactttatgtcaacaattttttacttggttgaatccttaataagattgctaagatattgttctaataaacacccaatggcttcttaatgttgacaataggcaagctagttac

SEQ ID NO: 15653 - DNA, 346 bp, Glycine max
agcttagtgagttaagtaaagcttcaaagagcaatattggaaatctgaagaggcgcgcttagcgcgtcgtatgcgcttagcgtgaggcacaaacttagcaggaacaacacacttagcgccagcagaataattcaggaaagcaaagctaattaaggaaagaaggctaattcaagaaagagttgtgcttattacgagctaggtgctacgacgaggattactgccatactcgctaagcgtgacaagcgcgctcagtgtgaatgttgcgtgaaaactaagttgactgcacctataaaagaaggcgagagaatatggaaaaaacacacaaaaaattcaagataatacaatt

SEQ ID NO: 15654 - DNA, 354 bp, Glycine max
tatcccatgcctccttagcttgaaagatgatgtataaagctttcttgcttctctatcttgaatcctttaaagtcttcttttgtgcttacgaaagtgaagtctcatcttgtcactccgtatagcctttttcaaccatttcctaaacatcatgtgtgatgcaatccgaccccccaagggcattggatagaagactccaagaagattacgctagagatgtaagagaaggtcctagggttctcatgagccttatggtagatttcaggcccacgggttaagtatgagtccacttatctttgtacatattagattaaggtttcattatttttgggccttgtatttagggctccataatgt

SEQ ID NO: 15655 - DNA, 348 bp, Glycine max
  unsure (1)..(348): unsure at all n locations
agcttgtgtcacactttcaattgtcgaagctgaatacatagctgcaagaagttgttgtgctcaaagtctttggatgaagcaacaatgatgtaagctccattggagcttgtaggcctaggatcttcttcatcaatggattcctttgcttcttggaagatgaatggcagcggaatggagaaaggaagagagagaggagacgccacttcaaggagaagatgagtctaaaagaaactcaccaccataggaggccatggataagagcttggaggaagaaggagatgaatgaagggagagggagagaagagcacgaaattttgtgctctanatgagctttgagatctgaagttt

SEQ ID NO: 15656 - DNA, 454 bp, Glycine max
tcctaaaccttccctcaaactacttaattacccctccgcttcccccccccaagaccttgaactcgaacacaggacacaaataccagctcagacgcgaatgctacagtagcggcttgttgcacacgactgtacggtggtcaagcacatgagcacacaccacatacccttgcgacaggcacaaataactgaatccaagccagctgggttaccaagataaccaatgcactcgagatttccttcaaaccttttagtttcaaatgacgccgaagggcttgtagctacctcatgcactcctccaatgactatggcatcatttctggcgcccaactgctgggagtcggaggccatcctacacaatcaatttctggcttcaacacgaggcatgtctccaaaggctacaccactggcagcatctatcatacttctctccataatacgagcccacaaaaaaacg

SEQ ID NO: 15657 - DNA, 347 bp, Glycine max
agcttggaacgaaaaaactgatttagtggttgagacaggcttttggtgaagatgtcggcgagttgaagataggaaggaacaaattgagtaatgagctttttggagagaactatctcgcgaacaaagtggtaatcaatatcaatatgcttcgcacgcttgtgagcaaccggattatgggaaagaaatatagcacttttgttatcacaaggaagagtagggggagtagagtaaacatgcatatcgcgccgcaaatgagtgaaccacattagctcagctgctgcatttgccatagcccgatattcagattcacagctggaacgagcaacaatgggctactttttagcact

SEQ ID NO: 15658 - DNA, 399 bp, Glycine max
  unsure (1)..(399): unsure at all n locations
agtctgnttgagctagcctcaagcccttatatctaactcgcaccggtcgattttatcgagggtttatttttctgtgggagaacagttcgcttttacagcaagccatattccggggttggagatacaaaagtttgtgaacaaccacagctactcctctgcaatcatcttagccaacactacataataatatgaacataccctacggctgttagattcaatgaggatatcgcctataaccacggcccatgcgagcccactttattttagatgaagccataatgctggacttttttagaggatcatgtgctggcggtgacatgaaaagcatggctgcgtgtacatgcttagccactcatttttaataggttaccgattgagcctaacgtgacctcatacttg

SEQ ID NO: 15659 - DNA, 527 bp, Glycine max
  unsure (1)..(527): unsure at all n locations
tgcccctcctttattcccatattacntactgcgaacttatangttaatttngcactttgnactaccncanctccaaagagacgaggcngattgaaaccttcggaccaccacgngacactatanaatacccaaggcttcatcttcacagttcgagcggttcgacggaattatgtgcttaatcggaccttcccataaagcattactggcattttgaactttgctacgcagtattcattttataattcccagcattttatatattatcagaactcagagggaaatccgagtcaaacaataatggggcttgactttctcaaaggggccgttttcatgttaaaaccgttcaaaatattaaaggaactctatgcaaaccatcctgaaagaaaaacgtaatcgccgctagaaattggctcaaacttttgtttaaatctccaagggcttcgataaataaggggtctcaatccgggccatccaggaaaaaagtataacccgttgggaattgctcagagttccttctttcaatttcc

SEQ ID NO: 15660 - DNA, 338 bp, Glycine max
agcttgttgggtatctgggccgtatccctgaacgtagattaatgagttaagcttgtgaacatgtctctactacgccttaattaattttattatcgttgattgtacgtaaggtgttgattaatttattaacgttttatataaatttcattagtgagataattggtacttttttataccaacatgttgcaaatggatattttccaaatatttactagcttttcaataagcttaatttcttctcttagactgttgattgatagtaggtgaagtctatcttttttttttctcctttgtgtacaagagcgagattgtttggtaattagatacctgaacgtgga

SEQ ID NO: 15661 - DNA, 363 bp, Glycine max
tcatacaattaatataaaacctatattctaatgtcacatcctatcagagcgttgtgttcccgtgtcctctagcatgaggttcttcatagtcatccacctattcatctgctcccccgaacacaagttcaagatcatcacaggatccaaacacaacaacacacagggagtgagttatcacattcctagctaatagagaaacaagacaattaaatatacatattatataaatgagataccacttgcttaaacatagctcacgtaacttcaccacttcgtcattcaaaattcacttttcaattatcaatcacattacacaagaatcccacacttcgatcaagatataataacacatcatttagcaag

SEQ ID NO: 15662 - DNA, 344 bp, Glycine max
agcttgatgttcaccaccttgctctccatctgtagcaccataacatccagaaaacaatagtaaaggagacacgcctaccatcattcctttaaaaaaaaactccaaaatacaccccagaaaaggtcaaggaaacatcacaaaatataagatgcctactgaaccatcttcaaatagttgaggattgtcaatagaaagtaaatttcgatgattccccaagagatatttcttatggtttcaacataaattaaatgtacatataatactaagttctccagaaaagaataacatcaatgttttttaggaatcatttagaaatattatccaatcattgacaaaatctacag

SEQ ID NO: 15663 - DNA, 367 bp, Glycine max
tgtcaaggttcttaaatcccatgctttatgaatttagagtctactaaaaatgatttaagcaaactccaccatgagataagcacggttggagatgcttccgataaatgaattccatatgcacagctttgcagcaaaaactaccaaaattacagaaagtaatgaacatattcaaaggaggtcatctaaaaggaggatatggcctagagttaccacagtaatgtgttccagtgtttccagaccgagccacacccatagaattagcaggaacaaagtatgctgcgggtaaaccaaactgcggggcaccgggcacaggcataaacacacgctggtattggggagaaggagtgaaccgagggtgagttacagc

SEQ ID NO: 15664 - DNA, 337 bp, Glycine max
  unsure (1)..(337): unsure at all n locations
catgatttacattctacccctttctcaagcaaattctttagtcttcttgacatcatcaaaatcttcatgatttacattctctgaatcacttgaataatttatgacattatcttccctagtgatatatcctttcttttctttcttctctttgaaattcatcttgtcggatttttccattcttcttttaaacacaggacaattgaatctcatgtccaagttgatcgcactcaacattttggggctaaagaggaaccttcttctttttctttcatcatcatattctttcttctctagtntttatttttatttttatgtagttgcatttctccctaccatt

SEQ ID NO: 15665 - DNA, 416 bp, Glycine max
tgactgcgaagaagatgcagcttgagcctgtatttcttctcatagcactctctgtagatggcgagtggtcgtcagttttatgagtgctaaaaccgcctgacagtttggaaagctcatctatctcaactgaacatctcctggacttcagcacgggagtcatagtcacacaagaggcctctcaccaactgtgcagcattctatacataacttcttctaccatattacctgaggtccgttcatcaaaaatatttggagaaataagattgttctgaaaatctgatgcgcgggggcaaactggtacataaggttcttaaatctctcccagtactcatacaggctctttccactgagttgtctaatacctgagatatccttcctgatggctgaggtcctggaagcagggaaactcttttctt

SEQ ID NO: 15666 - DNA, 347 bp, Glycine max
agcttgcttctacagaatattccaccaaagtcttgaaagagagaatcttcgatcactattgtcacaaatatggaggaaaaggtggattttgatgaggttattccttttaacatgtgattttccaaatgcttagtggagcttcagatcttgaaataactatggcagcttctagcaatggaactaaatgatcatttgtcggcgttcaagttggtgttgttgtacaaaggagcttcagccttgataaagtatagtgcgttcccattatgcaaaaatccatgatgctgaactagttttagtttttcctatcgagatcaatcgattcactgctagacttaagtgagaaattt

SEQ ID NO: 15667 - DNA, 366 bp, Glycine max
ttcattttttaaatggtaactcaattatttatttcttaaaactaacgaaatttattttattttggaaaataagtagttatattgattaattaaaaattaattaccaatttgatagatggataaatacatagataatcaaagtataagatttcaaatcttaagctctattttactattttttaatcccttttcccctagtttctttcctatacaattcattattaatgtcgtgatatatgtgtaatactttttatacttttcggaactaaattttgcatttcatatgtcaagggacacatttcccagtagagtgagaagaagaaatgtaaaataaatattatgccaaatatttggctgttgctaggt

SEQ ID NO: 15668 - DNA, 348 bp, Glycine max
agcttgccacatcactgatagatttacgggatattggcataataaagacaaataatacaccggcaatctagtttcagatgctatttttccaaaacgtaattgcaacaacagagtttaaaaacccaatgatcacagaaagatgcatatagcttagcggtgagaactcatcaaatgaagatttacacttatgactgctgcgcaaaggagtgagcaagcattcagtgtaatctattattttcttgaaagaataatgttaaacccctcactttaaaatgatcatagaaactgtgagtgtcaaactgaagaattgaaaagggtatctggcaagaattggaaacaaaatttaaa

SEQ ID NO: 15669 - DNA, 365 bp, Glycine max
cataatcatcatcaattgtacagaagagaagatattgattgaaaataaaagatgaatttgcctatatatagataggaagtatatatgagagtatgactttaatttctctcaagcaatcacttaacaaactatgtttttttttttagaattccaagctatgacactcaaatctaaaaccaaaaccactatctttgcacactcatcagcacacttcaaattaaggtcagaacatatatcttctataacagagaaaaaagaaaataaacttgaaatctatatctaattagagcacacataccccagctaaatttagagagatacaaatcctacaattaagttgttacccacctaaagttagcagaaag

SEQ ID NO: 15670 - DNA, 310 bp, Glycine max
  unsure (1)..(310): unsure at all n locations
agctttcgcagnggttcgtcattatcctttggtaatgaatttcgcgatgctcccggttgcctttcttttaaaagaatttgatttaaatttgtttcttgagtttggtatttttaattttgctgttggcttttgtatctatttctcaaatctgaaaaaaaaaattgaatattataatttgatctgtgttggattttttgttctatgttgggttcttgttgtttgttattttcttgaaactcattgatggtcatgganaaacaatggttctatcagtggcaaagtgacatttgtgatggagagagaaaggatg

SEQ ID NO: 15671 - DNA, 345 bp, Glycine max
tgttgatcttggacaaggcggcatcactaacatgttcttcttggacggacatgtgtcatcagtgggagacattgtgaccaatggaaaaagaaaagggcacgccttttgcgagcatgcagaaaaggatgcaagagacactgctgattattctgccgcaaagcattgtcgtatggaggcgctcatgctgcataggtataagcgtggatcctcaagtcttcttcatccggattcactcacatacattataactctccttttaaatcctgagagataatactgctcaatcggctttcgaacatacaaagagaacacacgaggctctaattgagatggggaccaaacata

SEQ ID NO: 15672 - DNA, 343 bp, Glycine max
  unsure (1)..(343): unsure at all n locations
agcttgcagccattagaagagattgagcatgtgattggaagtatgactaaaaatgttagtcagtttgtcagattgattgtgaaggaatacattgaccgtatcccggtgaaagtgtgatccttaaattttgagagaaacgtctatcatttagtactgatttttgcatgaatctctgaagtatggactgaatgcatganattgaggatgatgaaagccatgtttgattgtgatagccacttanccataaagctgaccacgtgcatgaatgatttatcccttgcacccagtttgagctgaatgaattattgattgattgaaccctgagcctatacagtggtatctc

SEQ ID NO: 15673 - DNA, 379 bp, Glycine max
tccattttcaatttcgagcgtctcgatgtatttcggggcttaatcggacatccgagtaaagtattactgtcatttgaatttgctacgagtattcatttttaatttcgagcatttttatatattataggactcagagggaaatcggagtaaaatattattggggcttgaattttctcaaaggttctgttttcagtttcaagcgtctcaaaatattaaggaactcaatcaaacatctgaatgaaaagttatcgtcgtttgaatttgctcaaagctattgttttcaatttcgagtgtctcgatatattatgggtctcaatcgggcatccaagtaaaaagttataatcgtttgaatttgctcagagtttcttctttcaatttc

SEQ ID NO: 15674 - DNA, 342 bp, Glycine max
  unsure (1)..(342): unsure at all n locations
agcttgatagagctctgggtagtcaaagagaagttcaagtccatagccatcaaagtctgaagagagtatgatgaactaagggacgtcaatatggccaccgatgaagccttggaatgagaaaccaagacggcccataaggaagaacacgaccaaaacaagttttgaggggctttatagggcagcaatagtgagctcaaactccgaagaggtgaaaggaatcatcacgggtcaaaggcatgatctggaaggacgagctaaaggcttgccttangtcgaaaagaaatttgtcccaacagttaaagtgagactgaagggaatatgtgggccatcatcgatgagtgc

SEQ ID NO: 15675 - DNA, 354 bp, Glycine max
tcttagtctcagatgatgcagctgagtttgtttctacctcatgcactcctctaatgactatggcatcatttatggcgctaaactgctgagagttggaagccatcttctcaattaaatttctggcttcagcaggagtcatgtctccaagggctccaccactggcagcatctatcatacttctctccatattactgagtccttcataaaaatattggagaagaagttgttctgaaatctgatggtgggggcaactggcacatagtttcttaaatctctcccagtactcatacaggctctctccactgagttgtctaatacctgagatatccttcctgatggcttgggtcctggaag

SEQ ID NO: 15676 - DNA, 269 bp, Glycine max
agcttgcgcatcttataccctgttgaggatgagacacatgctctcaatactgtgctgaatgacattctgccaacgcatgatggacttgcttgtgatgacccactcttacatttgaaacaactatacatagcctgctacaccatgacacccccagatgtcctatatgatcacgtttttctgaaagtttttactcattcatcaaagggagaggtaaaagactgcctgtatatccttgctcccatggccatctaccatctgggatgacctta

SEQ ID NO: 15677 - DNA, 271 bp, Glycine max
tggaggatgatgcggaaggcgtaagatgtggttctttgaggcggtcaagcgatggtgcgagacagtcttccaaatcgctaaaacacgtttaacccaccatcccctgttgcccacctacgacggagctcacatgctggaacatatcgcttgttctcaatactcttaacgccaggatcccgtgtattctgcgcatctgacgcgcatacaagtaatgacacattcaatcatcatggactcacctatgcgtgtgttcagagccaggcagaactct

SEQ ID NO: 15678 - DNA, 353 bp, Glycine max
  unsure (1)..(353): unsure at all n locations
agcttatgagataataagacgctatatgcaacagagatatgggaattagcaaaacagttgggggcaattggagttgaagaccaagggaggatggtggagaaaatcatgataatggaggatagagacaggaaagaggcagagaaaaaaaacattcaacagggggaaaaaacatccaacagtatcctgngaggcgcaaccgacatctaactcagcagggggaatcctatgcatgtggagtgaaaaaacattcaaattagaaatgaaagttatcggaaatgggttcatttggctgacaggtcagtggattaaggaggcactgcaggttcatattgtaaccatatactcaccatgtg

SEQ ID NO: 15679 - DNA, 373 bp, Glycine max
ttttcgccttcgcttcttggtggctgatggattgtgtttgatccgtataacacatacagatcatgtaatccatgtgttatatggatctggttgtccgtataatgcatatggatcacatgatctgtatgttgcttttaaattattaaaaaaaattaatagtaaaagtttattttttatatatttatttaaaaagtattatcttgttattgtttttaaataggtttttttttatgaaatgtaaatatattattttcttttttatttgtgaatagttattgtttattttataaaaaaaaattgtattttgaattatgatttgtaatagttatttttttgtgtgattgtaaatatgtaaattttaattttgttttaa

SEQ ID NO: 15680 - DNA, 315 bp, Glycine max
agctttccgcaagacttacggattgatcttagaattgaccttagcagaggtatccatagaagccattgcatcactcacccaatactacgaccagcctttgagatgcttcacattcggagacttccaattagtaccaaccattgaagaatttgaggaaattctaggatgtcctctcgggggaagaaaaccatatctttcatccgggtgtctcccctctttgagcagaattgcaactgtggtcaaggattcagcaagaggtttggacagcataaaacagactcggaacggcatggcgggcctaccacggaggtacct

SEQ ID NO: 15681 - DNA, 372 bp, Glycine max
ttgcctttagggcttgtacctcatcactttctttcgaagctttaacctcattgtctctcacagtctttagatttgggagccaatccaatccttgtgtccggactctcagccacttatgatagccgccgatgatcccattactgcttcccctaagctctctgtcctttcttcacaccgcatcacatgccttgcgaactccttggagtaccctcgcgttgtggtcactgaaaccccgtgcgatgaaaggcgtgatgctttcgtctgatggatctcctctcatgggacatctttcgcatgaagatagaatcttgattcttccttccttctagcgagggaacaaattaacagacgcccctccatgctagccaagag

SEQ ID NO: 15682 - DNA, 357 bp, Glycine max
agcttgaaattgataaacggaagatgtcgataaattcaaatggtcataacttatcacaccgaagtccgattcaggcacataatatatcgagacgctcgaaattgaacaacggaagctctcgagaaattcaaatggtcataacttttcaaatggaagtccgattcaggtgcataatatatcgagaagcttgaaattgaacaaaggaagctctcgagaaattcaaatggtcataacttatcacacggaagtccgattcaagagcatactatgtgaagatgctcgaaattgaacaacgaaagctctcgagaaattcaaatggtcataacttgccacacggaagtccgattcagacgcata

SEQ ID NO: 15683 - DNA, 274 bp, Glycine max
atcttgtgctgaagtaagtaagacatgtgcctgagatgcatttaaaccttatctcaacaggaaagctaggtgaagctagaatgataaaccatttcggggtcggtagatgaaagcttgatacaagaagcatggttgttgctcgaagtaagaaagaaggctccttgtacatcatgcagggaaagatatgaaaaagggagatgaatgttgcttaagatgcaactcaagaattgtggcacgagagattgtgacacatgaatgagaaaggtttggagtt

SEQ ID NO: 15684 - DNA, 366 bp, Glycine max
  unsure (1)..(366): unsure at all n locations
ttgtgggacttagctcctaaacctttctctcacttgtcaataggaaccaagtgggtgtttcaaaataaacttgacgaatctggcatcatagtaagaaataaagcaagattgattgccaaaggttacaaccaagaagaaggaatcgactatgatgaaacctacgctccagttgcatggttagaagccataagactgcaacttgaatttgcatgtatcatggatttcagactttttcaaatggatatgaagagtgtcttcctcaatagtctcattgaagaagaagtgtatgtatatcaaccatcaggttntgtggactacaaacatcctaaccatgtctatagagtgaaaaagactttgtatggtttg

SEQ ID NO: 15685 - DNA, 341 bp, Glycine max
agcttattaaaataaactgaaaaaacttatagatatatcatgatttttttcaatcgcttatatgaatacttatatcataagataaagtcaagtagactgtaaatacattctttgaaacaaaccctaactcccatatacatatactacttgaaggtattgtgtcttgagaacagcagtaatataaaaagaaaggaaaaaaggaagtcataaagatactgtcttaagcttatgtcgaaaataatcacttacttttgatttttttaaaataaaaataacgaatatatactactacgaaataataaattgaattaaatatatgcttagtttataagtacctgaat

SEQ ID NO: 15686 - DNA, 370 bp, Glycine max
tctcactttatataactacggggtcattctcatctagatcatgcccttgtaaaaatggtaaattagatgtcactgtgaataagagaaacaaacaaaaaccaagaagttttatctgatcccatttaatgtctgtagttgttttcctcgggaaaattgggaaacatggcacttgaaagctgcatttgcaggcacgtatggtggtggcactttgctaaccttcctttttgtcatctttcatttagcatgatgtcaatcaaaatgctgcaaaaggtactgattctgttttgaaatgcattcacattatcttggaacaccgaaaaattcatacaaattgtcatatcttatataagtatctcaatctctcaatttt

SEQ ID NO: 15687 - DNA, 331 bp, Glycine max
  unsure (1)..(331): unsure at all n locations
agcttgctaacccatggaagctcctaatatctcccacactttttagggggagccattcttggatggccctgattttctcaggtccacttggaccttatttctaccaactacaaaacctaaaaaaactatattatctacacaaaaggtacacttctctatattttcatagagggtgtttttcctaaagactgaaagaacttgcctgagatgtcctaagtgatcatctaggctcctactgtacactanaatatcatcaaaataaacaactacaaatctacctatgaaatcccttaagacatgatgcataagcctcataaaggtgcttggtgca

SEQ ID NO: 15688 - DNA, 363 bp, Glycine max
tcttttggactcgatccccctttatctccatgctcaaaatatttttagcagctcccatgtccttcatataaaactactaagtagtgacttcagcttctgaattggcaacaaattttcagatgctatgagtatgtcatccacatagtgtagtatatagatgtaggaaccatcctccaccttactattataaacacattagtcatagggacttctaatgtacacatgagagacaatgaactcatcaaatctcttgtaccactgccttagtgattgcttcaacccataaagagacctcttcaatatatagagaaaattttcttttacttccacctcaaaacctctagattgatgcatcagaatatc

SEQ ID NO: 15689 - DNA, 336 bp, Glycine max
agcttacagacaaaacataatgttgcatagtttctacaaatcagaaattataatgaaagctttgtatgtgtatatatatataagcacaaggataataaatagattgcaaaatgaggatgagaaagcatatattgcagaacttggagagatccaagcaggtataatatgaacaaagaccaaataaaataataaatataaagaagcttgctagcaatgtcatcactatagctattataaagggaggtgttttgtttcttttttccactttgtattcgggaggtgagcaccaattgtgcactctaaactaatcaaaattcaataattagtgccactagt

SEQ ID NO: 15690 - DNA, 359 bp, Glycine max
ttgggttattgctgaggtagtaatacattgtttgtacttgcatcaagtttcaaatcttgagattttaactctttcaaatatttactttcattaatatatatacttagatacttataaagacttaagaataataagaaacacatatataagtattattactaattgcaatactaagatatggtattatataaatcattttctatataattaacgtaacttttgttcacacatgaaaatgaaattattatattgaagttgtacaattaaagctgacataagaataaatttgaggtgagacgtattgctaaagttccaatgattcacttgaaaaaaaaagagtgacgtattgcatgtataca

SEQ ID NO: 15691 - DNA, 351 bp, Glycine max
agcttatgagatcgaaacatgacaaagaacgtttccaacaatctaattatcacgctaatctagtaaatctcgtccaaaacacaaacgaattatacataaatgcttctcacaacaagcagaataaaacccctcaaacaattttacactaagagcactcaattttatcaatcaattcgcattaagacatcaattgacccatcaaacataacaatttcattattttaatcataaaggtagaattataatacaacaaacatccaaaaataaaccccaatttgatcctctaaggattcctacacatgttcatcatagcaacatcactagtggttccctaagatttttcaagttttt

SEQ ID NO: 15692 - DNA, 369 bp, Glycine max
tctatagaaggttcgttcctaatttctctacatttgcatcacctctcaatgagatggtgaagaagaatgtggcatttacctggggtgaaaaacaagagcaagcctttgctttgctcaaagaaaagcttactaaggcacttgttctagctcttcctgacttttctaaaacttttgagctagaatgtgatgcctctgaagtgggagttagagctgtattgttacaaggtgggcaccctatttcttattttatggaaaaacttcatagggccacccttaactaccccacctatgataaagagctttatgccttaataagagccctctaaacttgggaacattacctatgttacaaagaatttgtcattcata

SEQ ID NO: 15693 - DNA, 358 bp, Glycine max
agcttgtatcttgttttgttcgaatttgaatgtatatgatatggcacgagtaaaaaaacgtggaaaagatgaaagcttaatgaggtggctttgtggtgaaatttgaggcgtgtatttttgaattgacgtaaaaacccaaacatatagttgttcagatttaaattgctacatttggaagaatttttctcaacataacttttctttcgttgattataacaaatttcaaggctattttacgacttatttttaaggttttttcgctgcttataaagctaagaaatttgtgtaggttactgttttgagttgttaattttttttatgaaagttgaacaccagcacttgtgaacatgagatatac

SEQ ID NO: 15694 - DNA, 370 bp, Glycine max
tgaatgaaaactgttcgagaaaatgtccaactttaaagtgaaataaaaaaagaaagagaaagattagaggaaaaaaagaaaaaaagacaggagaagattgaggaagagaaagataaaaatgaaggagtgtaacggcctcgtaggaacatgactaatgatgaagaaaggtggctctagcagtgcaacgagcgagcaagaggcaaaatggtgtcgtttgggtagaaaaatgaagaagtgtgcgaagagaagtgttctagaaaggtcaaggagatgcatacagtcctaagagtagcaatgtcactctcaaacgcaaaagcaaaataaacaaggattgtggaaatatcataaatgccactgttttataccaagt

SEQ ID NO: 15695 - DNA, 360 bp, Glycine max
agctttaccggaaagcttggcacaataattttttttttttgcagacattgtgcaatttttttcttatttttcaccaacgccaggcaataattgttttagtacgatcaagctaattttccttgttgatttcgctcaatgataggtttaccatcgaggtcgcctttggtatttcgtgggaactcaaccgccgttgtgtttcggtcgacattggcctgcgctggtaaaagaggcaaagaaaaatatagccgactttggcagcaaaaacaaatccctcgacaaacttggataaaaaacaactctagccgacatcggccaagaaagattaactgtcgctgtatcccaaaaagaatcaccggatga

SEQ ID NO: 15696 - DNA, 297 bp, Glycine max
ataacaagctcctaccttgcaaagccagcgcggactatcaacagcaaactgcataccaagtgcaacaagaatacctgggatgctagcaatatacaacattgtcctccacctgaaatatgtatctggtggtgccaaataagcattatttggaaaacaattttctgtttttaaagactataaacacataattggtggaagaatcgctgtgaatttataagtgaaggcttgatttcagtgagccatagagaagtatgctccttttacattaagttcaaaacatatcacaatgagtctatc

SEQ ID NO: 15697 - DNA, 316 bp, Glycine max
agcttggttgcatttgcaaacttctatgtagtgcttaatgatctagatgtgtcaaagtgtgcaatcaccaatgttggtatcacagttctctcaagggtcagtctacctagcttgcaagtgttttccttgtctggttgttctaatgtatcaaacaaaagtgcacctttcttgatgaaattgggccataccttactgggattgaatcttcaaagctgcaattcaattggcaccaacacaatagagttgttagtggaaaagttgtggagatgtcatattctggcttaatcatgttagaaactagaagtaaataaaattg

SEQ ID NO: 15698 - DNA, 353 bp, Glycine max
tattgcaagaaattaattagtgaaaaatagttgttatttagactattatagtaaatcttgtggaataatatatttgttttaatttgtattggtctattttagagtattatgttgatggtatttaatgaatcaattttactactttataatattgtgttaattgtattgaatgaattatgatataaaatagtaattctaagaagaaaaataaatcaaatttgaatgggtaatccgttggttcgaactgaatcaaatcgtttatcaataggttgagttgggtttcaaaaaaaatttatgaaaattgaatcgaatcaaaccgattaaatttgattgggttgagtcctaaatttgac

SEQ ID NO: 15699 - DNA, 319 bp, Glycine max
  unsure (1)..(319): unsure at all n locations
agcttgaagaggattataaagctctcttgcttctgaattccttaccaaaatcctttgaagatttcaaggatgcaattctttatggcaaagatcaagacattaccctagaagaagtccagacctcaataaggaccaaggagatgcaaaaatagcaagactccaaatctgaggataatggtgaaagcctgaatatttcaaggggaaggaatgaaaagaagggaacaagaggaaagaagtccagatcaagatcaagggattcaaagaatggccagaaaaaaaagttcanatgctttaattgtcacaaaactagtcatttcaa

SEQ ID NO: 15700 - DNA, 358 bp, Glycine max
ctgggatgagggctatgaatgaagcattggtttctttgttgaaggagccattgatgtaaaattcatccatgaacctgatgaaatctggtttcaaaatctcccaaaaatggttaatgaaattgaaatttaatccatccggggcaggacttttgtccccccccccccccaccacaatcccaaactgttgatttgatctccaattcagaaaatctagacacaaggctgtctttatctcttaagtcaagagaagaaaattggacaccatccaaggttggtctactacaacattcctcggaaaatctgtccttgaaatagaagatagctgcatttttaacactgcaaggttcatgcacccaca

SEQ ID NO: 15701 - DNA, 354 bp, Glycine max
  unsure (1)..(354): unsure at all n locations
agcttctacttatgtggcagggctgggcttccctcactttcttgtctccaacgcgagncttgaccactgctcttccttcccgcgatgcttcttttcatatccgcctgagtgggcttatagcctanaccatacttcccacgatttcctttggcatttatcaggctagttatgccgccgttgtctttgcctaaacccattccgggttcgtaaccgttccccaacataactcgggccatcattactgctgcatcggacaggcaaggctgcccagagaaggggtccacagaggaaatgcttaccacctcaaaagactggaaagcagtttctaacgattcctctgcggctttcacataa

SEQ ID NO: 15702 - DNA, 375 bp, Glycine max
ttaacaaacctgtgacacaaaacggcgaagcatattcctgagtatttgttcaaggacttgagtcccagctgattcaatcgcttgctttggtattgcttggaaaggaaaaggtatttcaatgcttacctggattccacatggcaatccaatggcacctttaactggaatcccacaaatatagaatcataagaaaatgaaatagaaatagagtactacctcaattatagtgtctgatgtgagttgctgcatcaatgacttgttagcgttgctatcacatgatatccggttgaccattagagctgcattaccatattgaagtattgaaaaggcattcctgatagtatcataaaccaaacagcatgacaccctacatgt

SEQ ID NO: 15703 - DNA, 352 bp, Glycine max
agcttctaaactttatacaagattgaagctctgataccacttgttggacaagtggcctcagatatcttaagaagggggggttgaattaagatattccaaactacttgccctaattaaaaatctatttcactttttattcaagttatgaattcccttaatgacaatcttcttaaatattaattcaaataacacaatttgaatatgaatataaagcaataataaataaaggagattaagggaagagaaaatgcaaactcagttttatactggttcggccacacccttgtgcctacgtccagtccccaagcaacccgcttgagagttccactatcttgtaaattccttttacaag

SEQ ID NO: 15704 - DNA, 384 bp, Glycine max
  unsure (1)..(384): unsure at all n locations
aatganagantgttcgagtgcgccagtccaccatttgtttgtgtanaacccaaacgagaaagaggcgctataggaatttagtaaataggggaccgagaaaattgttgacgacaaacatactaatgtgggagtgaatcaccctcttagaatcatgagctggtgagcaagaatggattacttatcattgcaacgagcgacctatatatcctatgacggcctttgtgtagacataatgacgctaacgacgcgatactaactgccgaacctcagccattgtctgacccatcgtgctgatactcaaccagtctctcctcacctcacgcacatattgtccctcgaccgtcgctattaataaaacacactgtgtttctcaggcgtcactac

SEQ ID NO: 15705 - DNA, 275 bp, Glycine max
cgcatgcttcttaaatattacgctcccatggaggaaaagatatagagaaggggggagctccaaattgcatgaataacatagggcaaaaagtgcaactttgaaatgagtcctataaaacttttattcattacagtttccaccagtgttacacatgtttctatttataaactaggcatctctctttagaaactttctttacaaaacttttctctaaaactgaagctttacttcaccaaaaccttaaataacttatctcccctcctttggaaactcct

SEQ ID NO: 15706 - DNA, 363 bp, Glycine max
ttgtatatatgagaaaatgacattgtctaataacaactagtttattttactagcatgataatgacccatttgcccctacataattacacagcaaaattactgttactgtcttgcaaagtgccctcatcgtgtggacgattattgagacttctgtttcaatttcttttaatatgtaattaacaagaaaaaaaaaacaaacaaaatttgaggattgattgccgcggaaaacgggcatttaccttgttggcattgggaaccagttcctgtagggccttcattctctctgcgagtctctcccttcgtaactgccacaaacagcatattccactcacttcagaatatccaaaaaaaaaaacactattt

SEQ ID NO: 15707 - DNA, 320 bp, Glycine max
  unsure (1)..(320): unsure at all n locations
tgcttgtatgcttgcgctagnttttttgctttatgcactaaatcagagaataaatgttgacctaatatgcttctcaagtcaagagaaccatggttacattcatcattgacttttggacaaggaatgctaccattactttctgcatgccacccaaatcttgaccactcacgaactacagtctcatcaacagcatttggttcattttgttcaacagcatttggttcattttgttttacacttatattttcctcaccatgcaggtaatcacgaccttgacagacaaactccaacataattggatctgcaccacctacaagctg

SEQ ID NO: 15708 - DNA, 361 bp, Glycine max
tgtagaagtgattgtgaatagtgtttattgatttttatgggtttgcttttttgtttatttgtttgtttgttataacttgtattagctagcctaaaattgctcaaccagacgaatgtatgaggtgcttaaattaaggttaacaattgcaaatgttgtgacacacaatttctgttgggcaaagtgtcaagattacaccaaaatggctggctcgttctgatgtaattgtaaagcatataagagcatgctatgggttagttatataaccaatgaagtaaaatagcaaacacgtagaagttggaagtttggtcaaagaatataacaatccggcaattattctatgcaattgaatatacaaacaagt

SEQ ID NO: 15709 - DNA, 337 bp, Glycine max
agcttgtagccattagaagagaatgagcatgtgattagaagtatgactgaaaatgttagtcagtttgattgtgaaggaatgcattaaccgtatcccaatgagagtgtgatccttatattttgagagaaacgactatcatttaatactgatttttgcgtgaatctttgaagtatggactgaatgcatgaaattgaggatgatgaacgccatgtttgattgtgatagccacttatccaaaaagatgaccatgtgcttgaatgaattatccctcgtacccaggatgagctgaatgaattattgattgatagaaccctgagcctatacagtgttataaact

SEQ ID NO: 15710 - DNA, 370 bp, Glycine max
tgtatatacgatgcgccatctacgactgttctctagaaccgatttagaatatggcgcagtggcaattttgtaaataggggaacaaaaaattttttttacgtcgtacattctaaggtggttataaataaccgtcttagaatgggtgttggtggcaatgttgtaattactataaattaagacaatgccaatttttatcctaggactgtctttgtatagcataattacctaagacggtttactactcccgaccctcacccattctctgagccatcgtgttgttcctcaaccattctctcctcacctcacgcacattctgtccctcaacctcaactatcaattaaaacaaagcttgttcctcagccattcctca

SEQ ID NO: 15711 - DNA, 291 bp, Glycine max
  unsure (1)..(291): unsure at all n locations
agcttctaaactntatacaagaatgaagctctgataccacttgttagacaagtggcctcaaatataataagaaaggggggttgaattaagatattccaaactacttccccaattaaaaatttatttcactttcttttcaagttatagattcccttaacaatgaacttcttaaatattaattcaaataaaacaatttgaatatgaatgtaaaccaataataaacaaaggagattaagggaagagaaagtgtaaactcagaattatactggttcggccacacccttgtgccta

SEQ ID NO: 15712 - DNA, 369 bp, Glycine max
  unsure (1)..(369): unsure at all n locations
tgacttaaatccactattctttgtcctaccaatccaatgttggctctaaatagattaataagatttgttggaattttgcacactgatcaaatttcttatcatcttacaaatggatatcactcggtacttttagttnttttctcttaaggtatacaaagtgttttgagaaattagtatctttacaagaatttacataaagctttataggaaagaatgaaagagtttgttcacgtaaatgattcgtatcttgtttttcaaagcttcttctatatataggcttcatctccaagtattttttgtctcacaatggttggattcttcactttgctctttgtttgaagtcttgagtttgctggagtatttaatgct

SEQ ID NO: 15713 - DNA, 349 bp, Glycine max
agcttgtaggattatagggtacccgtcatatgtggtactaggtggcgatcgggcgatggtgcaagtcgactctccacatccacaaatcacacataaatccaccatccccagttgcccaccttcaactaagctcacgtacttccacgtagcccttatcctcgttcctctcaactccgggtccccatcaatccctccaagcttccacaacatccaagcaattcaacatctaacatcatgaactatcaaaaaccaaaaaaacagggcagaggcagaaaactctgcccaaaacacaaccaataccacaactttccttactcaaataccccagtaacattctcttcggtccaat

SEQ ID NO: 15714 - DNA, 362 bp, Glycine max
ttattcaagacaaagaaattaaagatattcattatggatgatcaagacagtctatagagtcttagaaagggtatattaaataggaagggaattccaattgaagtagcaaaaagtttggccaataatttttaagttaaaaagtctttttcaacaaatttactctctggtaatcgattaccagaggatgtaatcgattaccagtggccaaaactaatttacaacagctactaaaatttgaattcaaaatttgcactgtgtaatcgattacacatatatggtaattgattaccagtagtttccgaacgttttaattcaaattttaaagattgtaatcgattacatatatactgtaatcgattacc

SEQ ID NO: 15715 - DNA, 320 bp, Glycine max
agcttggcttcgtgtcgtagcttcagcgagaggaagaggaagacaagtcctgcaataacagataatggaaaagcatgactcagatgagcaatgtaccttagacataatcatgatggaagttaaaggtctatgaattgaatatgataatgtacatctttaacgttatcctgctcaatcaattgagctaaacttcctttaagttaaaacattttaatgcgtcaacattctattaaaagagagtataaaatctttatattaacatggatcaagttcaaagtttaaactcttgttaaatgaaaaatgtcttcacatataaatat

SEQ ID NO: 15716 - DNA, 363 bp, Glycine max
tctagctgctcaattgctccaggttgctgcatggaagggcaaaggtctgtatggtggtcagcagaggagcacaaaccacaaacccttgtgacaggtacagatttctgattcaaggccagctgggttaccaagttgaccaatgcatccagtttgccttcaagcttcttagtttcagatgatgcagatgggtttgtagctacctcatgcactcctctaatgactatggcatcatttctggcactaaactgctgggagttggaggccatcttctcaattaaatttctggcttcagcaggagtcatgtctccaagggctccaccactggcagcatctatcatacttctctccatattactgagtcct

SEQ ID NO: 15717 - DNA, 354 bp, Glycine max
  unsure (1)..(354): unsure at all n locations
agctttggaaaatgatttctatacaaaagttagtcatataaagcgactaacaaactcccccaaatttacagttttgcttgtcctcaagcaaagaaagaacagttcacttgtcctcgagggacaaagatagtggccaatcaaaagaaaatggggtttgattcattaaggacattaaccatatgaattgaataccatggaatgcttaaatcaattacttctcacaagcattcagtttttcaaagataggagcccaagtattagagtcactgctgaaataagctagtaagcatgacagaaatcaaggaaggatcatcaaccaaaacctcacagtcattggttcactcanactcaagt

SEQ ID NO: 15718 - DNA, 408 bp, Glycine max
agctatcaggtgacactatgaaactaagcttacatggagctatatcaaagaagaagtccatatcaccacatgattcaaaaagagacctcatatgtaagttactcatttataccaatttaatgatgatcatgaggaccaaaacatttcattcacaagattagtaggctactcaaaagtaggttattgaagtgtgtttaaatgactcgtgttcacaagaaaaatatcagtagggaagaccttaatttaccatacaatttgagaaggggaacaacttgtagaaaacattatctgacaagagattcatacaaatttggatcagtaaagaataaccctatcacctatcatatacccctttgtcacaatcaactcattacccttctatagatagcaagatcatgagaaattctt

SEQ ID NO: 15719 - DNA, 346 bp, Glycine max
tttctttgatggtgtcgagaagatatcacatgtttgtcatcatcaaaaagggggagaatgtgaatgtatgtatacatgattttgatgatgtcaaagaagaatcatacaaggctgcttcaaatgataagcatttgcttcaaaaataattcaagattgcttcaacaaacaaagccttgtttcaagattcactaaagaccaagtcttgccttaaaacaaagtgctttcaatacatgcaaggctctggtaatcgattaccacgaagtgtaatcgattaccacaagacagggttgagaaataactgttgaaaaaggttttgaatttgaattttcaacatgtaatcgattac

SEQ ID NO: 15720 - DNA, 364 bp, Glycine max
tgagatgaggaagtgctgaagggtgtaacttcctacttttattggtgaccacagagtggtacctggagatatgtcgcgggggtcacgagacctttgggacgtcaggtggggtgctattgcccaaaaccaagcttgaccaatcccgacccaccccgggcatagtcggtcagtgagaacctgtgatgtacctaaacaggcaagctcctggcagtcaacagataaaaggaacaaagaccacaaagcaaggaggcttgtggtggctggccagctgtgaattttgtgtgatatgtggattatggcctctggtaatcgattaccaagggtgggtaatcgattacaaggcttaaaaatgaagacaggaggc

SEQ ID NO: 15721 - DNA, 348 bp, Glycine max
agcttgtgcatcctataccctgatgaggatgtcccatatgttcttaagactggactgattcatttgcttccaaagtttcatggccttgcaggtgaagacccacacaaacatttgaaagaatttcacattgtctgctccaccatgaaacccccagatgtccaagaggatcacatatttctgaaggcttttcctcattcattaaagggagtggcaaaggactggctgtattaccttgctccaaggtccatcacgagctgggatgaccttaagagagtattcttagaaaaaattttccctgcttccaggaccacagccatcaggaaagatatctcaggtattagacaactc

SEQ ID NO: 15722 - DNA, 372 bp, Glycine max
  unsure (1)..(372): unsure at all n locations
tgtatgattatggggtatccatcacatgtggttctaggtggcggtcgggcgatggtgcaagacaattctccatatccataaatcacgtataacccaccatcccctgttgcccacctccaactgagctcacgtactcccacgtagcccttatcctcgttcctctcaacgccgggtccccatcaatcctcccaagcttccacaacatccaggtaattccacatccaatcatcatggactaacaaaaccaagcaaaacagagcaaaggcagaaaactctgcccaaaacacaactcanaatcacagcttttcacatacaaataccccagtaacatttccttcgttccaattcgttaacccgtggatcgactcgaaa

SEQ ID NO: 15723 - DNA, 334 bp, Glycine max
agcttcaacatcataccacttctcaggtgctggaactacttcacatggatttgatggggcctatgcacgttgaaagccttggaggaaagaggtatgcctatgttgttgcggatgatttctccagatttacctgcgtcaactctatcagagagaaatcagaaacctttgaagtattcaaagagttgagtctaagacttcaaagagagaaagactgtgtcatcaatagaatcatgagtgaccatggcaaatagtttgaaaacagcaggttcactgaattctgcacatctgaaggcatcgctcatgagttctctgcagccattacaccacaacagaa

SEQ ID NO: 15724 - DNA, 270 bp, Glycine max
tctgttctcaatttcgagtgtctcgatatatttcaggactcaatcggacatccgagtgcacaagaattggcgctccaatttgcttagagcttctggattcaattaggagcgtcttgatatattacgggtctcaatccgatatccggatataaaggaattttcgtttgaatatgctcaaagcatgtgttctcaaattcgtgcgtctcgatatattacgggactccatctgagagaagacttattgacatttgaatatgctcagaacttcta

SEQ ID NO: 15725 - DNA, 331 bp, Glycine max
agctttagggctgatgacctatataacagcacccgggttttagtttagagttttttcggagaggagaataattctaggattttagaattctagtttttactgttcatgcacactgttcacgtagaattaaattcgttttctgcaatttcgtttctgcttcaatctacaatttcgttttctactgattaatggaaggctaagtctccaacgttgttttctcttaaggatcaagcacagctctctttgtggttttgttatcactattcaattctaatcagttttgcctctacaccaattactctgtatttgtgctattaatccatgcatgctt

SEQ ID NO: 15726 - DNA, 351 bp, Glycine max
tgccaaggtatttttaggaagtttgccatttgtctaaccaaagcaacacaagtccttacttttatagatcaaattgtagattagctatttccttcctataaaaatatcttttatgtacataacattctaaatctatctttcaataagttttgttcctcaattgttgtccgccccatcctattaaaatgtaagagaaagcgagaaggaagactagtagtggaaacgggagaaggtaaaaggataaaaaccgtaactatgattctatgaaatacgtaacaagttgctataaaacgttagtgtcagaaattaaaaagtatgtacattaaattatacatccgggcttcaatctac

SEQ ID NO: 15727 - DNA, 337 bp, Glycine max
agctttctcaagaggcttctttgagagctagatccttatctatctaacccctctattaactaaattaatctccttaaaaataattacggataaaataacataataaatataagcaaacatcaaacataattattaatatatagatatatatatcagggtgttacatccctagcttcttcttcaccacccacaaccgccagtagccatcatgaaccgccgttgttctccgttgaaaccccacaccgagaggaacccttcaatcaaagcggaatcttccaagtttgtctcgcggtttcgatagaaaacgaagcccaatgtaaccttcgcagttttcttc

SEQ ID NO: 15728 - DNA, 378 bp, Glycine max
tttcgcaaagcttacggtagaatctgggacctatccatggtagaagtctccacagaggccattgcctcccttgccctgtattatgatcagccattgaggtgcttcatctttgggggcttccagctatcacccatggtggaagaatttgaagagatcctaggatgtcctctagggggaaggagaccatacctcttctcagggttttatccctcattagctagaatttctaagatagtccaaatctcagcgcaggaattataccacaaaaagcaagtcgaaaatggggtggttggaattctgagaaaatatttggaggcaaaagcaagaatcttggcaggtaaaggcgagtgggtcccgttcatagatattctcgcactg

SEQ ID NO: 15729 - DNA, 347 bp, Glycine max
agctttacaaccttctgttttgcaggtcacaggttgtaccatatgtggtggtactcatgagtctggtctttgctttccttttgaagagcaaacgcaagatgttagctacatggggaatcaacaaaggcagggatacaatcacggtggattctcaggtttccagcagggtccttcacttgtctttcacaaagtatgcatttatccaaagagaagaataaaatttaacctgaacagatagatgaagttaggcataagacagatatcaaggaaagtagcttaaaccacagtctcacggctactatttcactcaagcacaagtgttaaatctattcattaataacaactag

SEQ ID NO: 15730 - DNA, 484 bp, Glycine max
  unsure (1)..(484): unsure at all n locations
acatttgttaaggtaacaaatctcattactnagttaattatatatcataaccacacacaaagaagaagagttgaacataggacactagngaactatagaaactnaagctctatagatgaggatctatgggggacgcgtagtttttataaataaggaggaagtntgtgtttttttgtgttaantgtaattgatggggggaaaaaaatggaaaacgccccacccccccacgtttttttgatggccctcaagcccgcacccttcctcaaaaggaaatgcgctacaagtaggtttggtgctattgggggtacagattagaagaaaattgaaggagtcgattacctaaattgaaggtagaagggctttgatttaaaataactcagcgggcaattagatcaaaaccaggaagaattaagaggtgggacactattattacaagggggaaagataaatgttaaagtgaactaaaactctttttgtagtgggg

SEQ ID NO: 15731 - DNA, 328 bp, Glycine max
tttcttcctcggggccatttcttgcgagaacaaacattcaaaagtgagttttaccagataatgcttaccttaatgcaaaaaatgtcatgccaatccctctaatttagactaaactcataagatccattcatgcacacacgcatgtgtagaaaataccctattatttatatcaacatacaatgatattcaaaacattctatttaccatacatataaatgttttttgaaagaatacttacacgcatgctcaatgtattgtgcccatatgttcatatcctaaacatgtgcttttacaaactacctatacatgtttgaaatgtatatcatac

SEQ ID NO: 15732 - DNA, 365 bp, Glycine max
tcatgatgaatcaagattgattcaaagaattttgatgatgatgacaaaatgctcaaaagtcaagaacacttcatgataacaaagatgatgatctcaagaatcaaagaatgagttcaagattgaatcaagaacacttcaaggttcaaaaggaaatttaatttcaagaatcgagaatcaagtttcaagattcaagttccaagaatcaagatcaagattcaagaatcaagagaagactcaatcaagataagtattaaaaagttttttcaaaaactgagtagcacatgaatttttctcaaaaccttttaccaaagagtttttactctctggtaatcaattaccagattattgtaatcgattactagtag

SEQ ID NO: 15733 - DNA, 303 bp, Glycine max
aaacaaccgccttctggaggaagtctctggaaggctgaatagggatctggccgctaatgggacccccatttttagtaaatacactctcacgctgtattgaggaaattctttatacataacgatgccaaactttacgaatgatacaaccatacttgtcttgtttccagcccggtacaaaaccatatggaataaggaatcatccccattcgctggctttcagaacgttacagaactttacagattgcgcgctaacactttcttttaatttctggcaagccacagcacttcacggattgtgctaca

SEQ ID NO: 15734 - DNA, 326 bp, Glycine max
agcttgctacactcaaataactgagtaatactttgtcgattttctgcctcaaaacttgctcaccgccaaattgatactgctcatgtgagacttgtcctatttgactatgaatagagggatattgaaatattttagcgtgtgcgggccgaatggggaaaaattatctaataagttattgtggattggttgtctatcgcaattgaactggattattactaaatttctataagctgcgaggaaagagttgtcattactcaactccttccgcacaaaatacatataatatgcttttatagatttgatatgaataaataaacataatttct

SEQ ID NO: 15735 - DNA, 306 bp, Glycine max
tggtggtgacagacactgcgatgctgaagatgttgattcctgcatggattgggtgatgacgaattcccacaccagagaacggacgtatgaatacatacaagtattcactccctcaaaactagactttgtggccaatggataagagggcccccgagcaatacatattatttacagctcatgcacatgacaaaccaaccacctgcgtggcgggacctgacaatcatgaatgtattcatgaatggtatatggttgcatgcaacaatatattggagatttttcactccaacctgattcttactttgaaaa

SEQ ID NO: 15736 - DNA, 376 bp, Glycine max
  unsure (1)..(376): unsure at all n locations
tcttttaactaaagactgttattctctaataagtagtactgatgaagattctatgaccgagaattaagtttcatgtatggagagtagatacaaagtgttgtttaatacaagtctaaatctcaacttatctaactttggactatataaaaataatttatggagagaaaggtctacttgagaganaaaaatttatatcaccttgaactctgagaatgacagattacttagaaaaggatatttcaaaaatctcatagttaaaacagacgggagggaacaatgagttacggatcatgttttacaataattatttgtttttaaaaaactatattgaaaacgaagtcgttttcgttaaaacgacagcagcagcgggtcgtat

SEQ ID NO: 15737 - DNA, 129 bp, Glycine max
cacaacaagacaaaatgagtcaagccaaaaacaaaaacgcacaacgaaataacgaaatgaacgacataaaagcaagaagaaacccaaaaaaaaagcccataataaatgcacacgcgaaaaacacaagac

SEQ ID NO: 15738 - DNA, 400 bp, Glycine max
agcttatccttatggtttgcctccttacttcaccccccgtgccactccagaagatttaagccaagcccctacttttgaggggcaactcccaccttatgaagactatcccggacaagacgatggggaaggagatacccatcttggccccctgctccacctcaaagatccatccccgcatgaactaccccagccgaacatagtccgccatatcccggcctcacccacgcccgtaaaagaatctgttcccttcgcggaagataggggaaagattgaggcgcttgaagagaggttgagggcagtcgagggcctcgacaattacccattctcggatttggcagatttatgtcttgtgcccaacatcgtcatccctcccaagttcaaagtaccagactttgataag

SEQ ID NO: 15739 - DNA, 331 bp, Glycine max
tgtcagaagtctataccgctgatttaatgtaattagagcttatttatttcctttctcttttgttttctgaaatctacctcattaaataaacaaagagatcttgtttcatctgttcttgcagttccaccttttctcatatcatattgcatgtttttgattctatggtcttgttcggtatagatatgagggtcgattctttgaggatcctaacaactagggtttgacaatcgattttgatagagatataatcctatctattaacgaggaagaggaataggacgttctgtcaccagagtcggagaggttggtcgctcaggaagaacttgaaatg

SEQ ID NO: 15740 - DNA, 403 bp, Glycine max
agcttctttgagaaaacttccttgataagctagtagtttagctacacacacccctctaataactaagatcacctccttgagaagcttccttgagaagattcctaaagaagctagagcttagctacacatacctctctaatagctaagcttacctccttgagatgagaagctagagcttagctacacaccccctataatagctaagctcaccccatgacaaaaaacatgaaaatacaaaaaaaaaagtccttactacaaagactactcaatagagtggccaaaatacaaggcccagacaaaggaaaaacctattataatatttacaaaaataatcgggctcatacttagcccatgtgatgcaatcttaccccgcaagggcattggatagaaaatttcaagtaga

SEQ ID NO: 15741 - DNA, 384 bp, Glycine max
taacactaaaatccttcataccatctagtgataagagagatgaagaaagtgcaaaaggttctgagagcgagaatctaacattgattgttagaaagtttaagtttctaaagaacaagaatctcaaaggaagatccatccaacataagaagaactttaagaagaatgactcaacctcctctaattttacttattttgagcgtggcaaatcgggccacataaaatctgaatgctccattagtattataatgtcgattcaaatttgagtcgatcttaagattgcattctaacattagttcaaattagaatcgatgttgaatggttttcttccttatactaagattaaagtagttattggtgtaataactttaactagtattcatcaaa

SEQ ID NO: 15742 - DNA, 407 bp, Glycine max
agcttccagcaccagcaatttcaacttagaaatcaagagtagtgtttatgttgcttaaggcttggatagttacaatttgtgtttgcttatgttcaattatcttgaataacaaaattcaagagagcttaagacttattttgattcacaaatccagcaacaactcagcaccacaactcaacttcatcataggcatcatgtaggaaacttagaaaacaaaaaaaaaaagaattcaacaagactacttctaggaattgatttagaacatgttatgaactaaataacatgcatgaattatactcaaaattcaaaagataggataagaatgacaagaatacatgaacaaatgtatctagaattcaataaacaaaataaaaattcaacacaaacttagaacataatgtgacaat

SEQ ID NO: 15743 - DNA, 384 bp, Glycine max
  unsure (1)..(384): unsure at all n locations
tgaaggcaaactggatgcgctggtcaacttggttacccatctggccttgaatcagaaatttgtacctgtcgcaagggtttgtggtttgtgctcctctgctgactaccatacagacctttgcccttccatgcagcaacctggagcaattgagcagcctgaagcttatgctgcaaatatttacaatagacctcctcaacctcagcagcaaaatcaaccacagcagagcaattatgacctttccagcaacagatacaaccctggatggaggaatcaccctaacctcagatggtccaacccttagcaacaacaacagcagcctgctccttactttcaaaatgttgctggcccaagcagaccatacattcctncaccaatccaacaaca

SEQ ID NO: 15744 - DNA, 398 bp, Glycine max
  unsure (1)..(398): unsure at all n locations
agcttcatgatgatgaatcttgttgtttcaagtagttntgatgatgataaaaagcccaagagaatgatttcaagattgagtcaacaagttcaagatcaagattaaatcaagattaatttcaagtttcatgagaagaaatcaagaagattcaagattcaagagaagtttgatctcaagattcaagagaagatgaattcaagattcaagagaagaaatcaagaagacttcacaagggaagtattgaaaagatttttcaaaaaacaaacatagcacagttttgtttttcaaaaaagtttttctcaaaattttctaagttccagagtttttactctctagtaatcgattaccaattacctgtaattgattaccagtggcaaagtttgatttcaaaagctttt

SEQ ID NO: 15745 - DNA, 348 bp, Glycine max
tgagtcttagcataactgtctcatgcgcttgcttattgtttattatgaaattgatgtgttattatgtcttgatcagagcgtgtgattcttgtgtaatgtgattgataattgaaaagtgtgattgatggatgaaaagtgaactttgaatgacaaagttgtggaattacgtgaattacgtgtaagtaagtcttatttggtttatatgatatatatatctagttgtcttgtttctctattagttaggaatgtgataactcactccctgtgtattgtttgtgtttggatcctatgttgatcttgaactttgtgttcgggggagcagatgattaagtgaattgtttttaagaa

SEQ ID NO: 15746 - DNA, 73 bp, Glycine max
agcttcctgcggaactgtttcactctgttgtctgaggtgcgaagcgtcgcggcgcaaaaagcgctgcgagagg

SEQ ID NO: 15747 - DNA, 292 bp, Glycine max
gcatgctcaaatatgaactcagtggtcagcacaatcatgacatccgatgcaccaaatatggctataacccaacccaaatccagagaaaacccacaaaaaactagtccttcatccataccagagcaaatgaaattaaacccaagaaaaagaatatcttaaccctgggctgatacaaattgcaatgagctcaaccggaagactggacatcggtcttataactgccaaatgaatgtcaagacattaaagcttgcacttcaagttccttgatgaaccgggtgctgcaaattccccc

SEQ ID NO: 15748 - DNA, 394 bp, Glycine max
agcttttcaaatggataaaaggctcacattcactttcttctacatcatattcaaacttgtccaaataaataataaagtcatctcgactcaaagaaaatcatataagtctcatacaattaatatagaacctatatcctaatgtcacatcctatcagagcgtggtgttcccgtgtcctctagcatgaggttcttcatagtcatccacctattcatctgctcccccgaacacaagttcaagatcatcacaggatccaaacacaacaacacacagggagtgagttatcacattcctagctaatagagaaacaagacaattaaatatacatattatataaatgagataccacttgcttaaacatagctcacgtaacttcaccacttcatcattcaaaat

SEQ ID NO: 15749 - DNA, 396 bp, Glycine max
tcttttggaccttgaacaagcaatcaactcctctttcagaaccatgctatgtgctcgcgactggtccctttcttcccttcgcaacttgagttcactattgctaccccatagagctccgcgaaatttgttccggtcatactcttccttgcgagccctcttggtctcttgttcaagggctcttgcggtaattgcattctcttcccgtaacccggcacactccttcctaactcgctcttgagagcttggacttcttcgtcctcttccggtgcttcaaaattctcttcgctgacgacttttaacttggcgagccaatctaaacctcgtatgcgaactttcagccattcgtggtacccaccaatgatgccattacgaatgcctctaagctcttgatctttc

SEQ ID NO: 15750 - DNA, 393 bp, Glycine max
agctaccatcaagtggtatcagagctcaagaacttcaagtcggttgctccttaaacctccattaatttttagctttaccttctcctacatatgttgtttcttcattttctccatgtatctcctaacatgtcttgtgttgaatgttgctaacatgattttttagaatttccactgattcacctcgctataaaagctagatctgattctctatggaacaaatttcttgttcttgttcttgaaccatgagttgtgtagagtctaggttccattgagttttgctttgctattatttgtggctgaaactgatgagaattctgaaactggccaaatacatgctaaaggcccaagtgaagaaggatgaatgcccagaggcaaagacactatcaagactat

SEQ ID NO: 15751 - DNA, 267 bp, Glycine max
tgaaattaaacaacggaagctctcgatatatttttattgtcataactattaactcggaggtccgattcaggcgcgtaatatatcgagacgctcgaaattgaacaatggaagcttttgagcatatcaaagtggtcatactttttcacttggaggtccgtttcaggcacaatatatatcgtgactctcgatattgaacaccggaagctctcgagaaattcaaatggccatatcttttaactcggaggtacagaccaggcccataattta

SEQ ID NO: 15752 - DNA, 377 bp, Glycine max
  unsure (1)..(377): unsure at all n locations
agctttgagaagaacgtctgccacatgtacttggacccaaaggaaagttgccttgaaggcaactaagcttgagagaagccagtggaatcaataaaatggtttaagcacaaacaaaattaaattcattggtacctgtaattgtgtgttgtgctagagaatgcttctgtaatgggttgtctttcataaatatctagataccaacattctcttttccaaactggttgctgtaaanttctctacaactactcaagtattatgcattttggatgttgatgttaatttaatanattgtatatacttggttccaaattcttgttcatctttgtattctttataaacatcaattagagaagaaataaaagggtaaatgaattgat

SEQ ID NO: 15753 - DNA, 393 bp, Glycine max
ttgagccaaaatcctgactcaccataaaccttgacccagggtgagaatgtcaatccttaccttcggaagcgaaaagaatagaagggaaatttccaatcaaagaaaaggaaagaaggaagatttccaatcaaagagaaagcaaaaaaagaaaagaaggaaaattcccaatcaaagagtgggagaaagcaaaaagaaaagaaagaaaattcccaatcaaagaatgggagaaagtaaaaaaggaagaagaagaaggaaagaaagctcctgatcagggatcgaaagaaaacagaagaaatgtgcagaaaggtctttggaccggacaatatctcaataatacagaattgtcaccaaatgaacaaaaagaaggaaggaaaccacgacctaaaatggtct

SEQ ID NO: 15754 - DNA, 389 bp, Glycine max
  unsure (1)..(389): unsure at all n locations
agcttaacatctgtttntttaaattttgatgttaatatttacatataacatcatgttctactaacaaccaatgttgtttattggaattttttaatgtgctgtctattttttttaataacccaaaattaatctacaatattaaaaaacataaccacgacaaataattttcattctatcttcaaacaatttttagtagaaatctcataaaaattgaatatttactatgaattaaaagaatatttaatgtgcatataacatgaattgtaaatattgtaaattaactaaactacaattccaaaattacttaaacactaattatttcatttntaactttcaaatagtagtttgtccactggatgcaaagcaccttcaatctctttagtttcaat

SEQ ID NO: 15755 - DNA, 116 bp, Glycine max
  unsure (1)..(116): unsure at all n locations
gcaggaaaaacaaacagcaagagcgagaaaagaaagattangggtatatgcacaaaaagaaacacaagggacacgacagccataaaagccgaggccaacaaaacggcaaaagccaa

SEQ ID NO: 15756 - DNA, 382 bp, Glycine max
agcttctatatatgctgaaccattttatcaataaacacaagttgagttttatttagaaaattagagtttttctcttttatcttagggagagtgattctcctaaattcttgagtgattcaagaacaccctggctgtatcaaaggactttcacaacctttgtgtgttgccctcgctggaaagagtgagtctttccttcctttcatcttcacccttgttctttcaaaccacaattccagaaaatccacctctacccagaattatctcgtggccgtaactcccattttacgcactcaaattaagtgattcttgagcctaaattgactatcaaaacgagacctttcacctcgttgtggaatcacctcatttggagccctgtatcttc

SEQ ID NO: 15757 - DNA, 241 bp, Glycine max
taaagtatgcccgagtcattcatccctatgagattttgttgaagaattggcgatcagaatttccattccttggattacagggttgaaccaagctcaagcttttacaaaaaggttcatcatgttaagatgaaatatggaagataccattctgcaaaaatggggctaaagatgaatcgagtcacaatactgctattatctactgccacacaaatttatgattaattattgtcttgttacttac

SEQ ID NO: 15758 - DNA, 293 bp, Glycine max
  unsure (1)..(293): unsure at all n locations
agcttccatcaacattgtgacaccnatacctcttggattattgagttccatcatcttttttcaattggtatcataactaagtcttgaaaggtactcccaaacataagttttctaatcagaagggcttcaaaacaaatactttcacaaaggggccacttttgaatcgaccttctttgttggagggtgaacattttttgtttttgcanaaagagaatggaaatctttgttcaatcaattgatctcggtgcatggaatgcgatcattaaaggtcctttcattctactaaagaaatg

SEQ ID NO: 15759 - DNA, 373 bp, Glycine max
tctggaaggagatcaacttgatgttctatgttttttgaatgtggcagtccatgaggaatctccttgggaaagaaatctttaaattcctgcaatatgggttgaaaactaggagaaacataaatagttaactaattagaattatcactccctctctcttgtgtatcactccatctctcaagtgtatcacttttcctttttctattcctctgtggtgcctcactattgtctctctctagttcactcttttctctccttatgattggtcatcacaacacttctcttagggatagaggtttaagaataattttctggtcatggtgctggaaagaaatcttgttggtgaagccatcatgcactggcttggtgtcctctt

SEQ ID NO: 15760 - DNA, 327 bp, Glycine max
agcttgccgcccagctcgcccaggctagctcatctcgctcaggcgagcagggttgcttcctccagaagcaaccgccttctggaggaatcttctggagggcccaaatgggcctgggtgctatttgcacccccatttttactaagtacacccccctctgctgttttttggtgattcttttttcgtaaagttacggaaacttacgaatttcgtaacgatacttgttttctttccgtaatgctacggaaccttgcggattacataatactcccctttttgacttacggaatgttacggaacctcacttaattatgcaacgatgcttccatt

SEQ ID NO: 15761 - DNA, 416 bp, Glycine max
catgtgacctatgaaactaagctatgctgcaacatttacaacagacctcctcaactctcatcagcaaaatcaaccacagcagaacaattatgacctctccagcaacagatacaatcccggatggaggaatcaccctaatctcagatggtctagccctcaacaacaacaacagcagcctgctccttcctttcaaaatgatgctggcctaagcaagccatacattcctccaccaatccaacaacagcaacagccccagaaacaacaaacagttgaggctcctccgcaaccttccctcgaagaacttgtgaggcaaatgactatgcagaacatgtagtttcaacaagagaacagagcctccattcagagcttaactcgccagatgggacaattggctacacaattaaatcaacatcagt

SEQ ID NO: 15762 - DNA, 401 bp, Glycine max
agcttgaaagagcccgggtagtcaaagagaagttcaagtccatagccatcaaagtctgaagagagtatgatgaactaagggacgtcaatatggccaccgatgaagccttggaatgagaaaccaagaaggcccaaaaggaagaacacgaccaaaacaagttttgaggggctttatagggcagcaatagtgagctcaaactccgaagaggtgaaaggaatcatcacgggtcaaaggcatgatctggaaggacgagctaaaggcttgccttaggtcgaaaagaaatttgtcccaacagttaaagtgagactgaagggaatatgtgggccatcatcgatgagtgcaaagagaagctaaatcaagcggcgactcacgagcaaaggctagaggatgagtacgccaag

SEQ ID NO: 15763 - DNA, 384 bp, Glycine max
  unsure (1)..(384): unsure at all n locations
tcttagtctcagatgatgcagctgagtttgtagctaccttatgcactcctctaatgactatggcatcatttatggcgctaaactgctgagagttggaagccatcttctcaattaaatttctggcttcagcaggagtcatgtctccaagggctccaccactggcagcatctatcatacttctctccatattactgagtccttcataaaaatattggagaagaagttgttctgaaatctgatggtgggggcaactggcacatagtttcttaaatctctcccagtactcatacaggctctctccactgagttgtctaatacctgagatatcctacctgatggctgtggtcctggaagcagggaaacttntttctaagaatactctct

SEQ ID NO: 15764 - DNA, 392 bp, Glycine max
  unsure (1)..(392): unsure at all n locations
agcttattgtcctacatatttaagctcacttacttcttaccacccgaatagagaaaagaattaattctaaggcatattttttttttcactctcaaattaatgcacatgaacacctactctgaagccaccacatcacaaccaatgccacccaccatggatgaaaatttggagaacaacacggaggattgcaacaatgcaatgactccgatggtgagaaagaagtcagaactagttgtggtcacaaataatgactctcgtttccaaatgcttagaaatttcatgaccaatttgcaagaggtcatcttcggtactaagcttggggtgctntttccggcagtccctttggctggtgttgcaaaattttatagctttggaaggtgagtacccatcat

SEQ ID NO: 15765 - DNA, 398 bp, Glycine max
  unsure (1)..(398): unsure at all n locations
tatagtacaagtgtatattaacaagaattattctaacatgagcatataaaaaatacaaaaataatggatctagccttatcttaatgtattcaacctgtcctcttctttattccactgtcctttgatccaacacacaggagactgttttttcttgcttctccttcccaccactttcgcattcttacctaaaacatgcatacctttcgggcacaatgtaagggtttggttgatgtgtgtccacttattattaaaagcctcctcatcagcaaaaacattngcagcattgtaattacttgcatgttgttgctggtgaggaaagtggccacataagaacctatctatgcctatggctgtcaaggagggttgatgttgcgcttatacttcacacccataaattt

SEQ ID NO: 15766 - DNA, 384 bp, Glycine max
tgcagacagacgacacctttatttttgactagagaccaccagcacgacacgtggcctcagatatcttaagaagggggggttgtaataccatattacaaattattttcccagttaaaaattctatttaacattctatccaagttataaatttccttaataatgaatttcttaaatgttgattcaaatagaacaatttgaatatgaatataaaacaataattaataaaggagtttaagggaagagaaagtgcaaactcatatttatactggttcggccacacccttgtgcctacgtccagtccccaagcaacccgcttgagagttccactatctttgtaattcctttacaagttctaaacacacaaggacaatcccttctttgtgt

SEQ ID NO: 15767 - DNA, 323 bp, Glycine max
atgcaaaatggatggtagagagctgtgttacaatttcatatgatagaaatagattgtgcaaaacaaaaaagtttttcaaaaattaaattaaattcaaaccctaagccaatttaaaacagatgataaacaaaaagaatataagacacaaagatttatattggtttgtccctaccactaagaatacattcaattcttagttaacctgatgcaatcctacccccaagggcattggataaaagactccaagaagattgagccaaagatgaaggagaaggccctatggttctcatgagccttacggtagattatgggctcataggcta

SEQ ID NO: 15768 - DNA, 397 bp, Glycine max
agcttttaaagaaaaagtgtttattttcccatgtcccaggataatcaaattcatacatgcaaatgcaacatcactcattttctttctttattagtcaccctttttttcttattttctcatgataaatgtgaatatgatttctcttcatattgatcttgcaggtttgattgaggaatacgattcaccaaagaaactgcttaagaacaagtcttcatctctagctcaactagttgcagaatacacaaggcggtcaaactctggttttggaaattaaattgaaacttaattgagattagcctctaaccagatattttctcagtgataatatgcctagtcaccattacacttcatgtagtgacagtagtgtcctgccttacccgactttgacagaactttg

SEQ ID NO: 15769 - DNA, 374 bp, Glycine max
tcaagccagagttgcaaacactgagaggcttctttagcataacaatgcattgatacgagaattgattgaaagcatgaacatgccatgtataatataaatgacaatcaagaagaaggtgaagatgacagtgaatatgaagatgacgaggagtcactaagtgaaccatagtgactcattgatactggcctacttttaatataatagtgtctgtatggcaaatgttttgtactttggttattaatgttttacttaatgtgtttatatatatattgatatgtatgactattaggttcatatactatagcttattttgaaatgttatttcatatgtatatacctattagattcaaaaagtagaaattggatatatttaa

SEQ ID NO: 15770 - DNA, 394 bp, Glycine max
agcttcaaactatgtctgtccaatttgttgaacaggtatatgtgaaaataatattaaggatgacatttcctccttatttgaaaaattggttatttgtatagcatggcagtttcaagtcctgtcaattgcattcatattatactttagaggaatcaccaagcactacgtgcttcattttgatcgatttgtaagttgtaacattatttaaccgatgttaggggtcaaatggcccaaatttaatgagtaaattagcagatgaactgttgtgtttgaaattcacgccttgaatactggattgcacgttaataattgcagactctgggatgaattttgtggctaaattgtgcaaggttatttgcaaagcatttttaaggatattctggcactcatcatg

SEQ ID NO: 15771 - DNA, 394 bp, Glycine max
  unsure (1)..(394): unsure at all n locations
tcacaaattcaattgattattgtcaatctatttttcagaatagttacaaattaaaatttaaatacaaagcaaatttgagcaaaattgagttacattaattttacctcactttcaaaatggttttacatcaatttttttaaaaaggcaatttcaagacgtcttcgattgtgtttttgtttttttaatctattttttacaataatttttaaaatagagatgttttgatttttttagttttttagtcaccatagcattgcattagtataaaatattaatcaattttactaatgactaattttttataaagacatatatttattaatactaaataagttatttatactaatacaactcagttttaattattaatattatcttatntatatatactaat

SEQ ID NO: 15772 - DNA, 375 bp, Glycine max
agcttctgatttatagcttgttgatttaaattaaaaagaacttataggaaggttatgagccattttcataagctcaaataaaccttgtaggattttattttaccaaacctgccctaatgctacaaatgatttatggcctgtattaggtatgcactaaaaaaatattgtgcttggattcttcatataagtgctttatacttctaaattttcttttaagccttgattactgtttattttttcctaagcattttgtttccgtatttctataccatttgcgatattaggtgcataaacttacgcatatctaggagtgaacgttatttacttgttagattcataaacatacacatatttaggagtgaacgttatttactt

SEQ ID NO: 15773 - DNA, 393 bp, Glycine max
accttctccgcatgtaaccatggaatggtaaatctttgtattgccatcccctttgagcttcttgatcctcagtttttgttgtaagagggatttgtatctcctagaaactctccaaaaatctagaaaccccttctcctttctatttcctcttcctccaatccttcatcttcatctttaatattcaattcattgatcctttccactagggatgaaaatgagctgagtcaagtcttacttgtctaacctattatatattttcataacctaagtttgggcctaatactcgacatgagcctacttttatgcctgagttgatctttgttatagcccatcaagctgattagctcatcaaaaagcctatttcatattaagaagtgtaaaaaatcatatttt

SEQ ID NO: 15774 - DNA, 391 bp, Glycine max
  unsure (1)..(391): unsure at all n locations
agcttctagcnattcaaccatatttctntgtactcggatgtccgattgagttccgtantatatcgagacgctcgaaattgaaaacagaagctctgagcatattcaaacgaacattacttttttctcggatgtaccattgtgtcccttaatatatctagacgctcgcaattgaaaacggaagcctcgtagcaaattcaaacgaacaataactttaactcagatgtctgactgagtcccgtagtatatcgagacgctcgaaattgaaacataaggtctgagcaaattcaaacgacaataactttttactcggatgtccgattgagtcccgtaatatatcgagacgctccaaattaaaatagtagctcctacaaattcaaaccatataactttt

SEQ ID NO: 15775 - DNA, 223 bp, Glycine max
tctgttttcaattttgagaatctcgatatattactggattcattaggacatccgggtaaaaagttattgtcgtttgaatctgctcagagcttctaatttcaattttgagcgtctcgatatattacgggacttaattggacattcgagtgaaaagttattgtggtatgcatctgctactaacatttcgaattcaattatgagcttctcgattaattgcgggacc

SEQ ID NO: 15776 - DNA, 410 bp, Glycine max
  unsure (1)..(410): unsure at all n locations
atccttaagtcacctgcggcagcaagctaacccatccccttttttgttccagatcagnaatatgtttcatttagcaacacattactcaatttcaattgaaagttcaacatcaatccttaatagcaaatcacaatccaagtaattaggcataagggattaatatgttgaagttaaaattaaattattcaggtagtatccgagtttgatccttgcaaattctgaattaatcaaaatttctttctcctaataaaccagaatattaagtaaaaaaaaataacaaaccacattctcaagacccatcataatcaaacaaacgaaccacttcctcaaataaacccattccctcattttatttttttttctcttcaaaataacagattggttcctttacctatcntttcaccgattat

SEQ ID NO: 15777 - DNA, 323 bp, Glycine max
tttgggctatacacacggcatattgtatattatatatgctcaacttctgagtttgagagataattatctggttactgtaaaaaaatcaagtgaaattgagaatggagcagttaggtcactagctaggctttcatagctagctttggtacaaagaaaaacaatggattttgaaaggttgttatttttattatgtaatcaactttaagaataattggtgtacattggtggaagcttcaaactaagtgacgtaagacgaagggttattttttgaatggaaaagtgttaatggaagcaagtgttgagtgtgaggatatttataacaa

SEQ ID NO: 15778 - DNA, 281 bp, Glycine max
agcttctcgatatattatgtccccgtatcagacatctgtgggaagagttatgaccatttgtatttctcgagagctaccttatgttcaatttcgagtatctcgatatactattttcccaaatcggatatccttgtaataacttatgaccaatcgaatttctcgagagcttctgttgttaaatatcaagcgtgtcggtatattatggcctataatccgaccatccagtgaaatagtatgactagtcgactttctcgagagcttcctttgttcaatttcgagcg

SEQ ID NO: 15779 - DNA, 442 bp, Glycine max
  unsure (1)..(442): unsure at all n locations
cgtgctgaaatgantcatctgatgactcgtagacccangganactatataatactcaatctattgacggactatnccaagcgctttgatctcttttactgtaaaagacctatatatatgctggctaagggtagagagaggaagactacatatttggatcaagtaaagctcgtaaatgatgaagtaggcaaagtcattcactcttgtatttactatttaggtaagggtgtacgcagattttctctacttatcatatgatgtctaaagatatcattcttgcttactgatcctatatacaagatccgtacttgattaatatactgatttctataatttcgatgtatatgagccgaataatctatatgtattgatttgcgatggtttctaacttacccatcttttagatttaatcacacatatcagtgtgatggttatctcatttc

SEQ ID NO: 15780 - DNA, 395 bp, Glycine max
agcttgagatgaggaagtgttgaatggtgaaacttcctgcttttattcgttgaccacagagtggtacctggagatatgtcgcgggggtcaggagaccttggggacgtcaggtggggtgctattgcccaaaaccaagcttgaccaatcccgacccaacccgggcatagttagtcagtgagaacctgtgatgtacctaagcaggcgagctcctggcagtcaacagataaaaggaacaaagaccacaaagcaaggaggcttgtgtggtggctggccagctgtgaatcttgtgtgatatatgggttatggcttctggtaatcgattaccaagggtgggtaatcgattacaaggcttaataatgaagacaggagggtacatctaatgttagtctctcatg

SEQ ID NO: 15781 - DNA, 361 bp, Glycine max
tgctaattttgtttgcattctgtgtctcttgtatgctgaggaaatagttgagaaactatatgagcttgtggcaacaagtcttaaaggcaaaaagctagcttcatttacaaggatatcttcaacaatgcatgtttgttcatatccttatatttatgcttccataacattcatactgatatggttcaaaaattgaatgcaaacaacaatggaagaagcacttgttcgcattttaacccctaggcattctattgacatattgagggatgttcatgctgccaaagagcaaaagaaaacatatgttgttgtgtttgttggagttaatggagttagaaaatctacttatctaacttaagtaaataaa

SEQ ID NO: 15782 - DNA, 403 bp, Glycine max
agcttccacaacatccaagcaaaacttcatacatacagcacaagctatcacagccaagcaaaacagagcaaggcagagaactctgctcaacacaccaactaaaatcacagcttttctcacttaaagaccccagtaacaattccttcgatccaattcactaaccgttggatcgactccaaaattttactggaagtctatagtgcacaagcaaacatccagaactcactctgcactgctctttccacacacagtaaatacatagcatttttctgcacttgtgcaaaatcatgctgcacaatttcacagcaaaaatctgcacaaagtgcagatttcgaaaatcacacttcctctcatccaatcttgcccaaatcacttcctacaagtcccaaatcatgcatcaatc

SEQ ID NO: 15783 - DNA, 375 bp, Glycine max
tgtcgctggagctaacccatcaactgtcctaactctttctgactggtgactcctaggctcttgaccttgacttgatagaacctctttttaagcaaaggcgcctgactcgatcccatgttttactaaagtgaaacaaaacccagtgcgaatcaagactccgacatctatcatgggtggaatggatgaatgcatgaagaaatgcatatgacacagaccctccgtcgagattgtcctcttcttagatacaacattctggcagcatggctcctgatgtatgcatttaagaaggcgacacgaaccctccgtcggttcgtgacaaagtgaggggatcaagacgcaacccatgcatgatgcggatgcgaaaaaagcacaaca

SEQ ID NO: 15784 - DNA, 350 bp, Glycine max
agcttcattcctttatcactcatatttccaagtcttttatgccacaaggctgaattattgacagcctcagtaactgctaccatatcctcatatgtaatcatgtaaagagatcctcgcttctttccacgagccacaatgagattgccttttgttaccttccaagctccatctccaaaagtggtgtgatgtcccttatcatccaactgccctatagatattaaatttctctttaaggcaggaatatgtctgacattgtgcaatgtccatagggatccactggaggtcttgatgtgatatcacctcttccgacaatgtcaagagattttccatctgcaaaggaaacttttcca

SEQ ID NO: 15785 - DNA, 362 bp, Glycine max
tctccgacttttccctataaatagggagcaaatgtgaagaataatgacgttcaaccttcctggtatctgaggatcacttgaaattagtgaaaaaaaatcgtttccgtgaagaaaatccatgccgaggcgcttccgtaacgcgtctgaaacgttttcgtgggtgattccgtgaagatttttcgccatctatcgttcgatcttcatcgatctttttcgtcctgcgtgtctttaaccgatatgtttccgatatcgaacttttcaatacattctatgtacccttggtggttcccacttgtatcacgtactcttatttcttttcattttctttctgttccccttttgacgtgctttaggcttttatt

SEQ ID NO: 15786 - DNA, 349 bp, Glycine max
agctcggccaaggacgcacgaaaattactcaattaactctacaagaacaacgacccagcagggaagcacgctggacctaatccagacccaaattttccgcaatctccaaagcgggtcccacttgaaagctcaaataagaaaagccacggcaccaccatgagaactcgtgctgccatcgcaggctcagattccagagtcctatggctcaccatgatagccatgctgagaaaacgcaggaagaatggcggcatcaacgaaagggcaaacaaaaaagagggaaccacacgggacaatggctcactatctggaccaacgggcctctgccgccacttctcaatcaagaaaagag

SEQ ID NO: 15787 - DNA, 499 bp, Glycine max
gctcatcgaatctagatccgggatatatgcaatattaatgtgaaatataaaaataaaaaataaaaaagtgaaatgaatcgtgcgatgcaggacactataaaaacaagcgtgaggacccgctagaataacccgaacggggtttataccttgaaaatgaacgacaatagacacacaggttgactcccaagcaacatatttaacgcatgcattatatcatgggatgtaagcacaaaacactagaggggaaagaaccctaccctggtataaaactcttatggacggaagcacatgtcaatggacaaaaaccaatatgaaggctcaaacccgctaaaactgacgaaacttgcaaaacgaaatgatctaaaaccatcgaaaaaaactggaccgattcagatccaattaaagtaagcacttcacgatgatgacgcatctgaaaacaaccatttaaaagatacccacaacaatgtccatggaaacgctccaagggaaccaagcatcg

SEQ ID NO: 15788 - DNA, 296 bp, Glycine max
agcttaatgaatatgtttggtattatttccatacaggggttttgttcaagaggaagaactgctaacattagatgtgcaacctggatggtcgattggagcatggattacatttgtaggaacaggatttgatagacctttagcgtacagagatgatatagtatttatcatctccagaagatggctccaattatttagaagagaaggggatgatatggaattgagtgtataaattcccttagtaaaggcacttactgagtgtacaatattattcccactattgagtcgagagcacatga

SEQ ID NO: 15789 - DNA, 390 bp, Glycine max
ttgaacatgaattgtttgaccgtttctcaaacatttattggggacccaatttcagggttagggttttagttgtaacaacagcaactttagtaactaattaacagtaacttttacaagtaatttatcaaacaatattaattcaaccaactagcttataattattcagtttttcaacttctaatttattaggttataattaattcaattaagtttttcatcataactttaaacactcaattaattgtttttattgtttttctctatctctttttgttatatcacattatatattatgtttatcactatttctcttgaaagttgttagtcgaagctgagtaaaggtgttaaataaatttattgaatttaatgtattatagcaaatttgatata

SEQ ID NO: 15790 - DNA, 347 bp, Glycine max
agctttctcaagaggcttttttgatatctagatccttatctatctaacccctctattaactaaaggaatctccttaaaaataattacggatcaaataacataataaatataagcaaacatcaaacataattattaatatatagatatatatatcagggtgttacatccctagcttcttcttcaccacccacaaccgccagtagccatcatgaaccgccgttgtgtctccgttgaaaccccacaccgagaggaacccttcaatcaaagcggaatcttccaagtttgtctcgcggcgtcgatagagaacgaagcccaatgtaaccttcgcagttttcttcgaggtaact

SEQ ID NO: 15791 - DNA, 321 bp, Glycine max
  unsure (1)..(321): unsure at all n locations
ctttcgcanagcttacggtagaatctgtttcctttctcatggtagaagtctccacagaggccattgcctcccttgccctgtattatgatcagccattgaggtgcttcatctttgggggcttccagctatcacccatggtggaagaatttgaagagatcctacgatgacctctagggggaaggagaccatacctcttctcagggttttatccctcattagctataatttctaagatagtccaaatctcagcgcatgaattagaccacaaaacgctagtttgaaaatggggtggatggaattctgatacaatttatggaggcg

SEQ ID NO: 15792 - DNA, 395 bp, Glycine max
agcttgtcttagcatttatgcgagatatgagaccaacatgttagccattgtcagcaagtaccaagaagaattaaatctagccacggcccacgagcacaaagtggtggatgagtatgcccgagtgtacgcggaaaaggaggctagaggaagggtgatcgactcgttacatcaagaggcaacaatgtggatggaccgatttgctcttactttgaacgggagtcaagaacttccccgattgctagccaaggccaaagcaatggcagatacctactccgcctccgatgaaatccacggacttctcagctattgtcagcatatgatagacttaatggcccatataattagaaaccgctaggaagtttgtattgtcactcagatcttgactagttataaac

SEQ ID NO: 15793 - DNA, 364 bp, Glycine max
ttctcacttagacagtagctccacaccatccattctatcgaaaccccaaaaaccaacattaaccacataaaaaccaagaaaattaaatgaacatttttatgaactttcaaaagtgctcatggagggaaaacaaaaatgaaaggtgagatggaaaagaggagagttccttaccattgaagtagccctcaaaatcgaataaagctttgctacaagtcccttgaacaaaggaatttaaagtctcaagctctcccatggagggttgtcttggagaggaagaaaatagtaaaatgagaggatttatgttttggttcaacttttagtcaatgaaaaatgtgacttgtttgactcataccctttttcattt

SEQ ID NO: 15794 - DNA, 352 bp, Glycine max
agcttattaaaataaactgaaaaatcttatagatatatcatgatttttttcaatcgcttatatgaatacttatatcataagataaagtcaagtagactgtaaatacattctttgaaacaaaccctaactcccatatacatatactacttgaaggtattgtgtcttgagaacagcagtaatataaaaagaaaggaaaaaaggaagtcataaagatactgtcttaagcttatgtcgaaaataatcacttacttttgatttttttaaaataaaaataacgaatatatactactacgaaataataaattgaattaaatatatgcttagtttataagtacctgaatggaagaaaacc

SEQ ID NO: 15795 - DNA, 395 bp, Glycine max
tctcactttatataactacggggtcacatctcatctagatcatgcccttgtaaaaatggtaaattagatgtcactgtgaataagagaaacaaacaaaaaccaagaagttttatctgatcccatttaatgtctgtagttgttttcctcgggaaaattgggaaacatggcacttgaaagctgcatttgcaggcacgtatggtggtggcactttgctaaccttcctttttgtcatctttcatttagcatgatgtcaatcaaaatgctgcaaaaggtactgattctgttttgaaatgcattcacattatcttggaacaccgtaaaattcatacaaattgtcatatcttatataagtatcttaatctctcaatttttttaccttttcctaacgtgcattt

SEQ ID NO: 15796 - DNA, 288 bp, Glycine max
tccaagatctacttggtcacactaattcacatatataataagagatattttagccttataaggacggaatcttaatctggataacgtttctcaattcagacatgcaatttattcataaaacgtactgacgagtgaatgttgatctagaaattcaacagttcaagtttaatgaaagcgatctaatatgtatatatatatatagataataaagtacgtacgtatcatcatttgatagatgaagtaggtgacgaaatttcaagaacttaagacatatatattaagtctggg

SEQ ID NO: 15797 - DNA, 520 bp, Glycine max
  unsure (1)..(520): unsure at all n locations
acgcatatactatatatcataaacatgatatcgagaattgantacttgatactaacnaannaaagaaatcgagaaaaatgaatcgactgcactcggactgtcangcgacacnanannaaacccaagctggcnngaggggacacaatggaggcaggatanattagcttaatagaggaactgaaacggagatgtaccaccatggagattcacctgaatacaatcgaaaataggtgagaagaatgctccattcactaaggaataaaccttgtaacaaggatcttcaccacctaaatgagcctcggcttataagcaagcaatgagctaagcataggaatattaatagggagaaaagaaataaggggcaacacataaaccaatgatctaaatacggacacacacgtaatctagcaaacagtactacaaaaccatcatcatcaaagttaatccaaatcacacccattatacgcatattaatgacaatgatactatctcacgataataactaagtgcaagcatatac

SEQ ID NO: 15798 - DNA, 396 bp, Glycine max
agcttcttatccaaggctcatcttgtgtggtgaagctccttcttccatggcttattccctagtggatggcgcctcctccctcctcttctcctttgtcttccgctgcatctccatggtggaaaatcaccattaaaggacctcattgaagctcaaagatccagcctccatagaagctccacaagcaagcttccatcaagtggtatcagagcacaagagcttcaagtaggtgctccttaaacctccattaattttttgctttaccttctcttccattgttttttcttcattttttctccatgtatctcctcaaatgtcttgttctaaatgttgttaatatgattctttagagttttcaccgattaaactagctatagaagctagattttattttctatg

SEQ ID NO: 15799 - DNA, 245 bp, Glycine max
  unsure (1)..(245): unsure at all n locations
ngtcataaagggaagcatgttaaaaacttttttctaataaaaaatgttgcttctacttcaaaaccccttgaactacttcacattgatatatttggtccctctaaaactatgatgtttggtggaaattactatggcactggaattgtggaagattactcacagtgtacttggaccttatgttttaatacctacaaattagcatcttatctgattttatctaacttgccactgtgatttaaaatgaa

SEQ ID NO: 15800 - DNA, 386 bp, Glycine max
  unsure (1)..(386): unsure at all n locations
agcttgaatttatgtctcatgagtgtgtgtttcttgagtattccatatctcataagggttacaaatgcctttctcttactggcaagctctttctctctaaggatgttgntttcaatgaagtcaaatttccttattcagatctgtttttgtcttcctctaaatctgattcacatcctaataaccccatctcttttattccctccatccctattgttcctcaacctagttctcctcttcccccctctagcaattctgttgctagtcctacttatgttaatcctacagctgattgaaattctggttctagttcttctgtccatgctgagtctagtcctactgttgcatctgaggttcttagtcctactattgatgctggatccacttct

SEQ ID NO: 15801 - DNA, 139 bp, Glycine max
  unsure (1)..(139): unsure at all n locations
gctctcccccattgttataatttgggatagtgagtnaaaaggttcagccccttagcacttcctctctttcgaatagctagaaaaatggtttctgtgaagaaaatcaagccgagcgctttcgtaacgttatcggagtgat

SEQ ID NO: 15802 - DNA, 214 bp, Glycine max
aaaaaagaaagaggaaaaagaagagagaaagaggaaaatgagaagaagtagggagaaaaaggggagaaaaaaggaaaaataagaaatagggaggtaatgtaaaagaaaagaaagatagagataaaggagggaaattatgatataaaaagaaggaaaaaagaggagaaaaaaaatgaaggaggagaataaagaagaaagaattaaaagagaatag

SEQ ID NO: 15803 - DNA, 363 bp, Glycine max
  unsure (1)..(363): unsure at all n locations
agcttcaatcatgtggttgaaaaatgtgttcctagttgatttggttcatgacaaagaaagaggtagaattttgaaattggatagcattatttctggggaccagtggaaagaagtggatgttttgattntcaacacctaccattggtggactcacactggacagtctcaagggtaatgaagctttttgaatttttaaccactttttttggcgtttatgagaggtgctagccatgtggctaatgacatcattttaatgttttattgtaggtgggattactttcaagtgggcaatgaattaagaaaggaaatggatcacatggaagctttcaagattgggctgagtacttgggctaaatgggttga

SEQ ID NO: 15804 - DNA, 365 bp, Glycine max
tcaagtggactaacttcaatcttgaagagcaagtctctggtgataattgctccacggagcaacaatgagatggatgcatccaaactgaataacgagatccctgagcttctttccatcaaggaatcactgatcaagtatgtctttgagccaaacaagaaaactgcttaaaagtattgagcggtttcatgttttagaaatcaaagattatgcatttctgttgcgggctacatagaacactttttatttcattgttatttcgctgggttttgataataaccttactataaaagctagccatgtggttctcgttctcatagctacaagtgatttcaggtttattattatgttcatcatgttactgtgtt

SEQ ID NO: 15805 - DNA, 400 bp, Glycine max
agcttagctattagagaggtatgtgtatctattctctagcttctttaggaatcttctcaaggaagcttctcaaggaggtgagcttagttattagaggggtgtgtgtagctaagctctagcttctcaaggaagttttctcaaagaagcttctcaaggaagttttctcaagaaagcttctcaaggaagctacctagtctataaatagaagaatgtgtaacacttgttgtaaatttgatgaatgagagtcttgtgagacataactcaaagttcaacttctctctctttttcttccttcaatttcgtgctccccctctctctatctctccctctttcttttcctccattgaagcatcctctccaagcttcttatcccagtctcatcttggtggagaagctcctt

SEQ ID NO: 15806 - DNA, 306 bp, Glycine max
tgaccaatcccgacccaacccgggcatagtctgtcagtgagaacctgtgatgtacctaaacaggcgagctcttggcagtcaacagataaaaggaacaaagaccacaaagcaaggaggcttgtggtggctggccagctgtgaaacttgattgatatgtgagatatggcctctggtaatcgattaccaagggtgggtaatcgattacaaggcttaaaaatgaacacaggaggctaagatggtctctggtaatcgattaccaccgggtgtaatagattaccatgcttgaaaacgaggtcaagaagccat

SEQ ID NO: 15807 - DNA, 395 bp, Glycine max
  unsure (1)..(395): unsure at all n locations
agctttctggagtagaaaccggggactaactttttntatttcaaaaaggatgtcttatctagtcaaggtctgatagaccatacaagttttctaacgatttctaattatgtgggccattaagtctatcatatgctgacaatagccgagaagcccatgaatctcttcgggggcggagtatgtgtctgccatcgacttggccttggctaacaatgggagaagttcttgactcccgttcaaggtaagagctaaccgatccatccacatggttgcctcttggtgtaaagagtcgatcacccttgctctagcctctttattcgcatatacttgagcatactcatccgcgattctatgctcgtgggccgtggctagacccaactgttcttggtacttggcga

SEQ ID NO: 15808 - DNA, 372 bp, Glycine max
tgtattgtcgctcagatcttgactagttataactttctgaataaaatgagtttatcccgcgtttttactccaaagatcagtgcgaatcaaatcactcctgcattttatctctagcatgcattcatatcatgcatcgcataagcatctcttcatggcatcataatgaacatatcgttcctgcatttgtccgttatcatattccaacatcacattttgcatgagtcattgcatcatcatgcatatgagttcaacatactttttgttgtacaaactgcataccttttgttttcatgttcgctcatgcgtgatccttgcatattcctctacaaaactaaaacaaaaagggaagcatgaaaattcatgaaacattct

SEQ ID NO: 15809 - DNA, 400 bp, Glycine max
  unsure (1)..(400): unsure at all n locations
agcttgcagaatgcgctcggnctgtttaatatttaagatttatgacatggatgaatttaagcaatttttttttcaagttgagaaaaaaataatgaaaataagctgcaaataatttttaaattaggttaatactgtgtactttctatagaattgaaaaacgataaagacaaaagaataattaatatatagtatgaaaaaagtattgtgatattgaagatgctatacggacacaattttttatgatattaaataatcaatgtactgaattactataataatatatataaagttaaatgttattatatgagaaatattatcaatatatttttaacattntttattattgaccacaatttattaaaaataacatattgttggttttacttcttatttaatgatt

SEQ ID NO: 15810 - DNA, 393 bp, Glycine max
tgaaacaacagaaatgttgcactgcatcaagcatttattatgagctgactaatttcaagaacagtagcacataccacaaacgtattggctctaacaacatcaagcatagtgactcccaaaagtctcttgggatcgtaagtaccagctcttttgaaaacttcggctgcaattctggactgtggagttaactggattgcttatcacattgacaatggctttaggacagcactttgcaattgcttcacacaatgttttaacaattccagcatttatattgaagagatcatctcttgtcatttccaggtttctaggaacaccagcagggatgatcaccaagtccatgcctataagtgcatccctaagctgttgctgtcccaaaaattctcgaaccta

SEQ ID NO: 15811 - DNA, 405 bp, Glycine max
agcttgtcttcctccacaagagatgttccaactgaataaccctgagccttgtaaaaggtaaagatcattcctccaccaagcaagagaacattaactttctccaacaaggattcaataactccaatcttggaagacaccttcgatccaccgacaatagcagcaaatggtctcttggggtttgacacagccccaactagataatcaagctcctgaaacaattaaaaatacatcagatcaatcaactgtataaattacataattacccaatatatatataatgaagctaacaattacttcctacaaaccttctgcattaggaatcctgcaacagagggcttcaagtatttggcaactccttctgtagaagcatgagctctgtgggcagtgccaaatgcatcattcaca

SEQ ID NO: 15812 - DNA, 392 bp, Glycine max
  unsure (1)..(392): unsure at all n locations
tgcttaggacatagggatcatgccccccacccacaaatattttttaatataatgagaatatcgtttttatatgaaagtaataagaaaaataagtattaatcattaaatcttatcatgaatgctcatttgaattttttaatagtcccattaatttcttatgccactctcatataaaaataattcttccactagatttgtctcctataacattatgaaatattctntaaaattatttatttctcaattattaatgattttaagtcattgacagagcttatagaattttaatttgcaaacttttagttgctgaaagagcataaacaatgtaatattcattcatcttctttattatggttatattttatagacaatttatgttaatattgcattta

SEQ ID NO: 15813 - DNA, 396 bp, Glycine max
agcttccatcaaactggttctccatttccccaatccaagtaatgctctgagagccttcttgcttcaggcatctgttatacccttgtgtacatcgctccatgctattgagaggacgaacacgattaataactcacacatacaaaaaaattccaataaataatttacaatttataaattaaaagaaaagaatgtaagaacaaacctgagaggtgaaatgtggttgtcgaacctcaagttcgttgacctgcaaaatcattgcaatccaaatccttaacttcagaatgacctgcaaaatgtaaggcttggtcccacaaaatacatttatcctatcaacacaactattaactgcgaatataatgcattggccaaaggctctggtccacacaacatgacata

SEQ ID NO: 15814 - DNA, 332 bp, Glycine max
tgaagacaagactatacgaggtatcttttttgtgtatagcaatatctctaagggctaccgtgtctacaacttgctaactaagaaactcgtcatcagtcgagatgttgaagttgatgaatatgcttcatggaattgggatgaagaaaaagtggataagaacgttcttatacccgctcaactacctcaagaagaagatgaggaagaagacccaggtgaaccacctttacctctttcacaacaaccagatcaagaactatcttctccagaggctactccaagacgagtaagatctttggtggacattatattgaacctgttacttggccatactt

SEQ ID NO: 15815 - DNA, 394 bp, Glycine max
agcttgtcactcttaatgttctaaatagtaagcttttattgacagcaatatccacaacttctgtagtttctattcttttcttttccactacaagcataacccggttctcgctatgaagggagtggttacatattttaatgtctatatggcattatggcctatgcgattattttcctcacctacccccaaactatacagaaatatatctgaagggatcaagatctctacagtcaagaaaataactgctaaggatctaagccataaataagctttattttataacagacaaacaaaaaattaagataaaatatgaaacttaagatataatataatctgttggatttgaactgcatgatggtgcagttacttttgaactttatggaatcataatccc

SEQ ID NO: 15816 - DNA, 318 bp, Glycine max
tggaacaatgaaatctccaaaagaaggcttattgacacatctaagatgctcctaagataaagacttgttcaattaggtttgctctttcaaaattttcattttctcccatacatccaaattatgcatctcactaggtgcatctaagtgttctcattaaggtgttgtctatggtgaagtttatttcttatttatcactattagatatattcatattttatttaatggttgagatttttggacaactgattggtccagttgcttagatcttcaacaatttaactaaaaattgcgaattaatccttttgcaataatgattgc

SEQ ID NO: 15817 - DNA, 390 bp, Glycine max
agcttcctttcgtaagatttagaatttaatatgataactctactccttttttaattgagaaacaaatatagttggcaatatgataatttcaccgatacaaaataaaaataaaatacaattggatcgcaaccaaaataacaaaataagaattacaagttatatataatataaatataatatttgaagactaattaaattttgatactgttacattatattccccattaaaaaatgtcatattgttatatttacaaataaaaataactatgaaggagtttgctaatttatctatcagtatatttacatgatatttcctaaatttaaatgaatattaatgtttcatattccaaaagatgaaatatttaaaattaatgatacaaataagattat

SEQ ID NO: 15818 - DNA, 394 bp, Glycine max
tgtgcattcaatatcctgatgagggtgttccatatgttctcaagactggactaatacatttgctgcccaagtttcatggtcttgcaggtgaagatccttataagcatcttaaggagttccatattgtttgttccaccatgaaaccccctaatgtccaagaaggtcatatctttctaaaggcttttcctcattctttggagggagtggcaaaagattggctacactaccttgctcccaagtccattttcagcagggatgaccttaagagggtgttcttggagaaattctttcttgcatctaggaccactaccatcataaaagacatttcacgcatttggcaacttattggagaaagcttatatgaatactgtgtgagaattcagaaactatgtgc

SEQ ID NO: 15819 - DNA, 399 bp, Glycine max
  unsure (1)..(399): unsure at all n locations
agcttgtaggattatgggttacccatcatcatgtggtactaggnggcggtcgggcgatggtgcacaacaagttttccacatccacaatgcgcgcataaacccaccatcccctgttgcccacctccatctaagctcacgtactcccatgtagcccatatcctcatttctctcaacaccgggtccccatcaatcctctcaagcttccacaacatccaagcaaaacaacattcaaactgcacaagctatcacagccaagcaaaacagagcataggcagaaaactttgccaaaacaccaaccaaatcacagcttttctcacttaaagaccccagtaacaattccttcgttctggttcattaaccgttggatcgactcgaaaatcttactggaagtctctaata

SEQ ID NO: 15820 - DNA, 289 bp, Glycine max
tctcaaggaggtgagcttagttattagatgggtgtgtgtagctaagctctagcttctcaatgaagtcttctcaaagaagcttctcatggaagttttctcaagaaagcttctcaaggaagctacctagtctataaatagaagcatgtgtaacacttgttgtaacattgatgaatgagggtcttgtgagacacaactcaaagttcaacttctctccctttttcttccttcaattacgtgctcccccctctctcattctctccctctttctttttcttcattgaagcatcct

SEQ ID NO: 15821 - DNA, 358 bp, Glycine max
agctatcaaagaaaaaatctctagatgagggctcactgtaatcaagcaagtcggagacctaacatgatcccagattcacctccgctccttatgttcccatgaacccgggtatagggccctttttcactcacagggtgtgcaaatagtgttggtgtttgtgtgcatcaaatgaataaatatttaccctatgcatacattataaaatgcactaaaagccacaaagagtttatatacataacaacattatgaagggaaaccaacaatagggataagttcttggtaaaacattgcacaagaataaatggcctaactctctaaaacaatccccagtggagtcgccaactgtcgcaacctaccc

SEQ ID NO: 15822 - DNA, 239 bp, Glycine max
gcaggaactaaaaacttatctgctttggaacgcgaagcccactctttatttggattagatcctgacagctcatacaaacaaaccaaacgtaacaagacaacttatggtgctgattgaataccttacccactcaagtgtgtcacacaattaaggcatttatctaatgagacactcacgcctattaccacactaattacccttgagatctgacgcaattctagagattatggtcacaacat

SEQ ID NO: 15823 - DNA, 388 bp, Glycine max
agcttcatgcttaactatgtatggtaaaacttcattactggtgttcaagacatacaagtgagcttgttacaaatcttctacactcggagagatcacatgcagtcctcttgaacccttaccacccactctgtcatgatgccgagactcaggaagcccaacaggtttagctctctcttagtcttctgaacaaaatacaatggcttcttgtgcaatgtacctctcaacaatagatgctcttggacgatataaattctccgtatacccttttaagatacttatgtatcgctcaaccgggttcatccaccgtagataaacaagaccacaacatttgatttctctgaccagatgcacaatcaagtgaatcatgatgttaaagaaagcgggggga

SEQ ID NO: 15824 - DNA, 318 bp, Glycine max
tatgctgcaaatatttgcaatagacctcctcaactctcagcagcgaaatcaaccacagcagagcaattatgacctttccagcaacagatacaaccctggatggaggaatcaccctaacctcagatggtccagccctcagcaacaacaacagcagcctgcttcttcctttcaaaatgctgctggcccaagcagaccatacattcctccaccaattcaacaacagcaacaacccctgatacagccaacagttgaggcccctccacaaccttccctcgaagaacttgtgaggcaaatgactatgcataacatgcagttttt

SEQ ID NO: 15825 - DNA, 366 bp, Glycine max
cttgaactataaaaaaatatattttcagatttgtttgctatttcatcttgagcaacttaaatttttattctgatctcataacaattcttcattctaaactggttcattctgaactaacataaaaaaccttttgtattcaaaggaaacataaaaagattattaaaactccaattcaatctcccttcttgtgatatttttgtcacttcaattggcatcaaaatcataactctctatgttaagcacacttgacaatgtgagaggaaaatcattggaagaagtgattgttgaccaaatataataggtttttacttgaagtgcgtaaccaacaagcctcctggttttggtggaaacatttattcttcttta

SEQ ID NO: 15826 - DNA, 403 bp, Glycine max
agcttatgatggtgtcttcacttattacttctgataagacaacatcaatttgtctttcattagcatcagacactagatttgatctaatgggttcaactccaaagcctgtctcaataacatgatcctcagactcatggaggaaagcttcaatatcaaattgaaccaaggcttcttcaagcacttctttctccaaggggttcaagtctttagagactagggccagttcaagttcttcttgtcatccaacaacttccgcagagaatacctcagctccatgcttagccatagactaaagcctctcaagctcttccaactcagctaatttagcttccagtgcagattgtgcttacatagactctatgatgacttcttctggtactggctcaccatcaatagcaaatgt

SEQ ID NO: 15827 - DNA, 379 bp, Glycine max
tcttattttcagcagatgaagatgaatttgtggccacatcatggactcctctaaggacaatagcatcatttcttgcaatgaattgttgggagttggaagccatcttctcaatcagattcctagcctcaacaggagtcatatcaccaagagctcaaccactggcagcatcaatcatactcctctccatgttactaagtccctcatagaaatattgcaaaaggagttgctcagaaatctggtggtgaggacaacttgcacacaatttcttgaatctttcccagtactcatacaagctctcttcactaagttgcctgatgtcggaaatgtcttttctgatggcagtggtcctagatgcaaggaagaatgtcttcaagaacac

SEQ ID NO: 15828 - DNA, 391 bp, Glycine max
agcttgcgttgaaattccagattcttatagattaccatctccttgctgcaaattttcctctttttccatgttttcatcaggtatgctgtcaattacttctgatagcgaagaatggcttgatctgctgctgccaacactttcctcatcacttggttctcttctcaaatgtgtttcccccgcattgaattgttcatgaatttcaacctctcgtgttttaggaaagaataccatcttagaaggatcttccaccccacccagcactatttccacttcatcatgatgagcattgctctcctcaacttggattatctccacagaatcattttcttcagaggattggctttcatgttcaacagcattagaagcgtggtcaatgttaaatattaactca

SEQ ID NO: 15829 - DNA, 381 bp, Glycine max
  unsure (1)..(381): unsure at all n locations
ctngcangacaataataaattatcaggaaaagattatctttcgagaggaagttctttaatctcaatattgaaaagaaatacccactatctggtccaccaagttgtgtaatggcatccacaaaacggtcatgaagatcagatgtccaccttaaacgttgcttcccactttccccagaaggtgcagcagtttttacagccgatccacccaaaaccccagcatttgcaagcttgttcatttcctccttgatatttatgctgcaccatgctatcctgagaaaatatctttgtgtgatacatagattaactgtctacatttcctataaatattacaaattccagctgaatattttcatgaacaaactaatcattatcattaatttt

SEQ ID NO: 15830 - DNA, 403 bp, Glycine max
  unsure (1)..(403): unsure at all n locations
agcttgtccttacaaaatatcattatacaaanttgattgtcttaagactttaatgttatcatatgcaaccacaacaaaagaaaatgcatgccaaattcacaagtcctgtgttgcaactgcttcgagcataattattggtttgcaatgatcacctacaataaattgacctttccaaggtgcatgataattttttcattcctagtgcatacaatcaactgaatccaacatacccggaatgccacatgtctcctccatttgtagtaggtggcggaaacattagaacaaatagaggattttgagaatttttggtagaagaaggtacacaattttgtatataattgtatgtggagttgtttggtggtggtggaaacataaggaaaaatggatggaaacatttgtcaag

SEQ ID NO: 15831 - DNA, 386 bp, Glycine max
tgaagaggatgctttaatggaggaaaagaaagatagaaggggggagcacgaaattgaaggaataaaagagggagagaagtggaactttgaagtgtgtctcataagactttcattcatcaaagttacaacaagtgttacacatgcttctatttatagactaggtagcttccttgaaaagctttcttgagaaaaattccttgagaagcttctttgagaaaacttccttgagaagctagagcttagccacacacacctctctaatagctaagctcacctccttgagatgagaagctagagcttagctacacaccctctataatagctaagctcacccccattccaaaaatacatgaaaatacaaaatagagtctctactacaaagacta

SEQ ID NO: 15832 - DNA, 399 bp, Glycine max
agcttcagaattcaatttcgcgcgtctcaatattttacgggactcaatcagacatccaagcaaaacattattgtcgtttgaattagctcagagcttcagaattcaatttcgatggtctcgatatattacgggtctcaatcagacatctgagtaaaaaagttattatcgtttgaatttgctgagagcttcaacattcaatttcgagcgtctcgatgtattacgggacttaatcagacatccgagtaaaaagttatcgtcgtttgaatttggtcagagcttcaacattcagtttagagcgtctcgatatattacgggactcaatcagacatccgagtaaaaagttattgtcgtttgaaaatcctcagagcttcggtattcaatttcgagcgtcttgatata

SEQ ID NO: 15833 - DNA, 391 bp, Glycine max
  unsure (1)..(391): unsure at all n locations
ntgagcaaattcgaacgacaattacttttaacttggatgtctgattgagtcccgtaatatatcgagacgctcgaaattgaatgttgatggtcgttgcaaattgaaacgacaataactttttactctgatgtctgattgagtcccgtaatatatcgagacgctcgaaattgaatcttgatgctctgagcaaattcaaacgacaataactttttactcggatgtctgattgagtcctgtaatatatcgagacgctcgaaatttaatacgaaagctatgagcaaattcaaacgacaataattttttactcggatgtctgattgagtctcgtaatatatcgacacgctcgaaattgaatgttgatgctctggtcgatttcaaacgacaataattt

SEQ ID NO: 15834 - DNA, 404 bp, Glycine max
agcttaaaatatatcagaatgcctattatagcctatccacattctagcatggcactaaaaaacagacgaatcacaacttctagccaaattgcaaccattattaactcgaaagtacactcaaatatacactaacgccagaagctcaagaaacaaaggtaccacagcatgcccgcaatgacttgtgaatacactgataataaaatagctgctgcgcaaagcttccccagaatacaaagagaaaatacctccataacaaacttcttgatatgtaaaggatttcttgaacacaaccacacatggttggtacgatcagaaaactgtgaaccacaggaaccttggatcctaataacacagcatctgttaactaccagggtttctactccacctatttgcagatcttgatg

SEQ ID NO: 15835 - DNA, 393 bp, Glycine max
cttattcaagacaaagaaattaaagatattcaatatggatgatcaagacaatctctagagtcttagaaaaggtatattaaataggaatggaattccaattgaagtagcaaaaggtttggccaagaaatttaagttaaaaagttttttttccaacaaatttactctctggtaatcgattaccagaggatgtaatcgattaccaatggccaaaactgatttacaacagttattaaaatttgaattcaaaatttgcacggtgtaatcgattacacatatatggtaatcgattaccagcagattctgaacgttttaattcaaattataaagcttgtaatcgatacacatatactgtgatcgattaccagaggagtttttctgaaacaattctaacag

SEQ ID NO: 15836 - DNA, 396 bp, Glycine max
agctgtatggtgaatcatttgtgattcaaaggtgttttgatgataacaaaagatgatgacaaaggtgatgacaaaaagctcaaagatcaatcataaatcaatcaaagaacaactcaagtaaatcaagaacaattcaagagttcaagttgagaatcaagaagaattcatgactcaagaagaaagtttagagtcaagaatcaagattcaaggttcaagatctcaagaatcaagatcaagattcaatactcgagattcaagaatcaagagaaggcttaatcaagataagtatgaaatgttcttctcaaaaactgagtagcacatgatttttctcaaaacatgtttaccaaagagatttactctctgggaattgattacaacagttttgaaaaagctttc

SEQ ID NO: 15837 - DNA, 407 bp, Glycine max
caggacattaaatctcagcttctcaggaagttttctcaagaaatcttctcaattaagctacctagtctataaatagaagcatgtgtaacacttgttgtaactttgatgaatgagagtcttgtgagacacaactcaaagttcaacttctctccctttttttccttcaatttcgtgctcccccctctctctttctctccctctttcttttcctccattgaagcatcctctccaagcttcttatccaaggctcatctcggtggtgaagctccttcttccatggcttattccctagtggatggcgcctcttctcacctattcttctttgtcttccgctgcatctccaaggtggaaaatcaccattaaaggacctcattgaagctcaaaaatccatcctccatagaagcccc

SEQ ID NO: 15838 - DNA, 397 bp, Glycine max
agctttaggatcaaactttttctctcaactgttcttcattcttcttccccttttcacttctattcttcctttttcttgcaaaaattttgttgttcttccactggtgatgatcatagaaggctaaacactcaatcaattcaaggatccactccgagcaaagttgaatttcagtcatggtttagtatttatattatgtgtgaatgttcatccttttttaaatcatattttcgattttcatgattataaatatgcttaggattgaaaatgaattaggttatggattcatttcgtaattttgaaatttaatcatagattgtttggatgatattcccacctaatttgcgatctcaatgaatttagggattaattcgattaaactaactctaatgacattgat

SEQ ID NO: 15839 - DNA, 387 bp, Glycine max
tgccagttattgggtttgtgaattgcttcctctcatcattctcttgttttgtttaagagtgcgtttgtttcactgaataaccattcatttgtttatttgtagttttctttttactataaaaaaattgagtttttttatgtgtgtgtgtgtgggcgcgcgttttattttggccatatcattatctccaactccccctcaagccgaagacctgatactaatagcgtgaattttgcaagactggacattaataataatcactatgatagactctgataccattttaagatttggatttaagtctaacttaatcccaaaagctagctttatgaggcaaggttgtcttctacttctgtacaatattttggccggatcactagtcaatgtgga

SEQ ID NO: 15840 - DNA, 353 bp, Glycine max
  unsure (1)..(353): unsure at all n locations
agctcgctcgctaagctaatagagctanatagaatcggatatgggctcactcgctaagcgcgtggctatcatgcttagcgcatgagtagattttcctaaggcacgttaagcgagtcacttgcactaagcgctcagtctgactctcagttttattttctgctttttaatttgaataaattcctgtgtaatcttgtgttgtgattctttagtattgcagaaggctccccgtaacagaaaagccatagcttcaatgtctcaggtcgggtatgatagatcaagatttatatcacaggaggcctgggaccattacttagataatgtgcttgccaagaacattcttgccaaaagaaatg

SEQ ID NO: 15841 - DNA, 377 bp, Glycine max
tgcttaaagacatatttggttaattaattattttaaaacctagtgaaatattaactaaaaaaagaaacttataaaattttatataagtaatgtagaaatccaaaaataattgataaacaaaatcatattgaattcaagtcgttaaagcacaaagtatatcaaacgaatataaaaagagcataatattaaaaaatgtatggattatagatggtttacactaataaagccaaacaaaaattattattagttaaattaacaatttttaatccaatttttgaatatataattatattaaatattcttatagagaatatatctacaataatttcattttagtctactcaagtcatatcttatatactattgatcgaggtcgt

SEQ ID NO: 15842 - DNA, 355 bp, Glycine max
tcaggcgagcatgccaatccttaccctcggaagcattaaactaaaacaacgaaattcactttcgatggactagatatattgcagatctccatccgacatcgaagtaaaaaaagggattatacggatgaatttgcttcgaacgacaacatacaggaacggacgtttccatgcattgacgggcataagctaacatcgaagaaagaagatgaaggaaagctcctgagcaacgatcgaaagaatacagaagaaatctgcagagaggtcttcggacaatacattatctgaacatatacagaattgtcaccaaatgaacataaatagaaggataggaaaccatgacctacggtagtcttct

SEQ ID NO: 15843 - DNA, 379 bp, Glycine max
  unsure (1)..(379): unsure at all n locations
tcctcggggccatttcctgcgaaggcaaacatttgtatagttagttttaccaagaaatgctactcttaaaacgaaaatggcatacaacctcctccaataaacacaaacatcaatgtaaatttagagcaaactcatgcacatacttccttacgaacattcactcgcacaagatattcttctaactaagaaaaatgcacccatgcacaatcaaggcaccttcgttacctagatcacttatatgtacttccaaggtgtatatgctacctacatcacatgcattatctttgctaaatttacatacatgcatactcaaagcactgtggctaccaaaaagtgcatacgtgcacattctggttntctaatacctaacatacacaaa

SEQ ID NO: 15844 - DNA, 399 bp, Glycine max
agcttgaaagagcccgggtagtcaattagaagttcaagtccatagccatcaaagtctgaagagagtatgatgaactaagggacgttaatatggccaccgctgatgccttggaacgagaaaccaagaaggcccaaaaggaagaacacgtgccaacaaagttttgaggggctttatagggcagcaatagtaagctcaagctccgaagaggtgaaaggaatcatcacgggtcaaaggcatgatcttgaaggacgagctaaaggcttaccttaggtcgaaaagaaatttgtcccaacagttaagcgagactgaagggaatatgtgggccatcatcgatgagtgcaaagagaagctaaatctagcggcaactcacgagcaaaggctagaggatgagtacgccaa

SEQ ID NO: 15845 - DNA, 397 bp, Glycine max
tctagccaaatagacttaccttgacttaattcctttgatagctgtcataccctaatttcgtccggggacctttgcttgatgacatgcgacctttctttggtccttgtgaggtgcttgacacccatcatgaggcaatttgtgaaattccaggacatgccggaaaaccaaaaaatattgatgcacaatccgtaagtttccgtgacacaccggaaatcaaatggaagcatcgttgcataattaagtgaggttccgtaacattccgtaagtcaaaaaagggatgattatgtaatccacaaggttctgtaaacattacggaaagaaaacaagtattgttacgaaattcgaaagtttccataactttacgaaaaaagaatcacaaaaaaaagcagagggggtg

SEQ ID NO: 15846 - DNA, 349 bp, Glycine max
  unsure (1)..(349): unsure at all n locations
agcttgaaggattatggggtacccatcacatgtggtactaagtggtggtcgatcgacggtgcacaactagcttttacacaccacttagcgcacataatcctaacatactctggagtctaccttcaactgaactcacgtactcctaattatacctatcctttataatatcaacaacggctcccgattaatcctaccactcttancatgattacatgctaacctacattctcacagctcaagctttcgccgcccatctctactgagcaatggcagattactatgccaatgcaccaaccaatattcacagcttttcccactcatagaccccatatagcaaatacgtcgatcc

SEQ ID NO: 15847 - DNA, 328 bp, Glycine max
  unsure (1)..(328): unsure at all n locations
ntatgagaaaccatcaaaactaatgtcgttcctaaacaaaaatcaattgaggaagcttcgccgagtgtccccatagaaaaacctctattcaaacctttcaaagttagtgataaggctaaactaacaattatggaacttagaaaaactaaatcctcaattgaaggcgtaggagacaatcatagcgaattactaaacaagattggtagattgcttaaggacattccatacactccctcagcctcggaaaatacttccattatggtaacacgaagtacctccaaattaattaaagttatttacgaagatagtgaccagactcatattacac

SEQ ID NO: 15848 - DNA, 404 bp, Glycine max
agcttggaatgaccctgtttatggtgaaaattctttcaagcaaacaaaatgtaactcatcatttattcacatttgattcatatcaatcacaaacaacttattttatttaattttaacagaatcccgattataaattcttttttattaaactaacagttattataactttcaattaaaagaattatgaaatcaaaggaataagcgtaagactttaagatgatcaagtatttccgtatcatatttgaaatagtcattttgacaaccaaatcttatataaaatggtagtttcagaaactaatgtataattaaatttcaaattgaaatacgcttattttgagtatattggtaaaagtagttctttgaataaggctatggttttttttatcataaagatgcttctaaaa

SEQ ID NO: 15849 - DNA, 383 bp, Glycine max
tctgcatgtttagagatttctagacaaagaaagatccaagttccagagagttttgatagcgtttgctctgcgaagactggcagagaactgagcttgaagagaaagccatcctgagagcatgagatgagtttgtgagtgattgtgaggttctagaggtggaggagacatccccactacttgtatttattcaatccttcatttttctcttctctttgttgtaaaggaagcttcccagatatggaaagttaaatcctctgttggttcttccttgtaggtacttgatgtaaatacccggttatctatttaatgatggtttatgtgttctctgtgttatcaatacgtcattttagtgtgcttttgcctcgatcacgtagatgcttgct

SEQ ID NO: 15850 - DNA, 396 bp, Glycine max
agcttcctcggagccatttcttgttgttgatgaacaaaagcgcaaaacggaatcaaaaaatgcgaaaaaggatgaccctagggctgcaaactcgtcaatcccgtgggtatggcttttgaaaggggggaaaagaagtttttgaatgcaaaaaacgtcccccctttcatcattcttataatttggtgcaggggtggctcgcccaggcgagctaacctgcacttttttttttttttttttttgaggggaatattaaccatgtcccctcccttctcatggattagcatcttgcctaacttgaacttacttaggttagaactaggtgttgattacttatttttactttttaaaacaaacaaatagtaaaagaaagctgcaaaatacaaaggatacggggct

SEQ ID NO: 15851 - DNA, 381 bp, Glycine max
ttgaatgcactattcaatggagttgacaagaacttcttttgactgatcaacacttgcacagtggccaaagatgcatgggagatcctgaaaatcactcatgaaggaacctccaaagtgaagatgtccagattgcaactcttggctacaaaattcgaaaatctgaagatgaaggaggaagagtgtattcatgacttccacatgaacattcttgaaattgccaatgcttgcactgccttgggagagaggataacagatgaaaagctggtgagaaagatcctcacatccttgcctaagaaatttgacatgaaagtcactgcaatagaggaggcccaagacatttgaacatgagaggtgatgaactcatcggttctcttcaaacct

SEQ ID NO: 15852 - DNA, 367 bp, Glycine max
attgtgtgccgctaacgggagtgctgaattaatagattaagctctaccaaacgtacatgtcaactgtgttaaattcaaataaagactttgtcactaaagcaaagtatcatttgtaactatggaccattgaaatatatcttaacacaggagaggcaattattagcaacgttaatataaatacaacgcactgtaagctattttaagccgtaggtaaggaagaaactgaagaaaacaaacctacggatattcgtacacgccacttctgggcaatggatacatcaagagaactgcacataagaagtctaatcaacgcctatgtctaatcgcacttttgaacaacgggtaactatggttacaacccaacccc

SEQ ID NO: 15853 - DNA, 366 bp, Glycine max
tcagtccctgataaactggttcccagaagacaatagggagtgaatattgctgaaaaccctagccttgcaacaagtcctagggaagtagacacggagatggacaagaaaatccgcagtatagtgagtagcattttgaaagaagcttctgtgcctgatgttgagaaagatgttccaacatctttcggcccaaatgctgaagccctcccttcacccagtgaagaggaatcaacagaagaagaggatcaagcctcaaaggagactcctgcaccacgggcaccagaacctgctccaggtgacctcattgacctggaagaagttgattctgatgaataacccattgccaacaggttggcacctggcattgct

SEQ ID NO: 15854 - DNA, 402 bp, Glycine max
agcttattatataaggtaagatttgatacccacatagttactacactacactatctttttgccagatgtaccttctagctgcttttatttttaagggagtctaataaagcctaaaacatgggactatgatatcaattatccttatcaaatgtccatttgtgtcagccacattagtaagagtttgggtgcaaacaacactgtatcctttccgccatattatcctttattcttcttcagtgttgactattgtttgggggcttaaattgtggagagcttctcgtgctaaaactttttaatgattttttttttccttctaaattggccacccaagataatgaggtatcttttctggccactgctttctagggataaatgatttggaacgtgatcttttcgtgtcaa

SEQ ID NO: 15855 - DNA, 322 bp, Glycine max
  unsure (1)..(322): unsure at all n locations
ttcaggaccttgaaactaagcttaactagacctgaataaatacttntaattgatgatccaatggaattaccaacgagcactcaagtttcaagcgcggattgcttttgcacggcttcaggcaactcatccacacttaaaccaaattatgtcacgaaagcaattggcgaaatcaaaccgaatattaacataaacaactagttaataacatttagacagatcattcataccgaatacagaatctgtgcacgaacaaggcacaataagaattagaaaatccagcacaaactacatagcatatgaaaatagacaagaaataaatgaa

SEQ ID NO: 15856 - DNA, 383 bp, Glycine max
acgccaccggcatgcatgcaagcttttctatgagggttgatgggttctgtcgtttagaatggcatgagcactggctgacatattgtcaattatctcaattgcttctttcgaggtcttcagctttattttcccccctgtagaaacatctaccagttgcttggtttgcggtctcagcccatctataaacatattcaattgaattggctcgtaaaacccatgggtgggagttcttcttaataaacctctgaacctctccaatgcttcactcagagattcatcagggaactgatgaaatgaagagattacagctttcccttctgcagactaggactctgggaaatatttctttagaaacttttcaacgacttcttccatggttttca

SEQ ID NO: 15857 - DNA, 186 bp, Glycine max
tgtcatatgcctagttacggtgacaacttgcatttaggtctgggtacaaaatgacatagcacaccacagtgcctactttgggaaatcaactctggcggcaataataggagcagcttttgcagagatacctatgtattgtaagctaataattgtcagggtattctttggatcggctgactaaacacc

SEQ ID NO: 15858 - DNA, 541 bp, Glycine max
  unsure (1)..(541): unsure at all n locations
cgcgccacactacctagtcgtgatnngagatagaancagtacantactatacgctnantnaccaacntagaaacncnnanacgacatgttgatactgagaccgtcgcagggccccnctagaggcgcgctgcacgcatgcaagcatgcagcgacaccaggctacggtttagattcactcaagcagacaacgggcaacacagacgccagtcacgtccgactcataacaatcaccaacaacttacccgaggtaagggtaacaaaaggccggaaaaaaatcctttgacagcaaactaacagctcctatacacgacacttaaaacaaggagcaagggaggcgaactcacgcgagactccaagacgactagtaatcccgtctcagaggggaatataaactatggaccacccatcttatggaaagggtcgcgcagaaactgacgaaacaaagatagaaaagggaagaacgcacattatcgagactactggaaacagccacgctgtgaataaggctatggctcttcttatcataaagatgctgctaacg

SEQ ID NO: 15859 - DNA, 393 bp, Glycine max
agcttataagaacaaaattgccttaatcatttccaaatatgcatgtgaattaggacgcatcaacaagaatcaagccaaggctattgtgcaagcaatcaatggggcaaaacacaccaaatgattataatgatggatggctcaaattctcacaaaggtaaaatcatcactttcaaattgagctttcaaaactatcatgacatgtagagaagaatcaaggatttcaagtcacaaaatgtcaagaacttttattttcaaaacaattacccatttcttgaacatatcctatatttcaaagaaaaacatgcaaagtcgtacgtgcacacaaaattgacccataatattaaactgaaaatccgacgaaactaacaacattaacaaattaacacaactaac

SEQ ID NO: 15860 - DNA, 385 bp, Glycine max
ttattcaagacaattcaagacaaagcaattaattatatccaagatggatgatcaagacagtctatagagtcttagaaagggtatattaaataggaagggaattccaattgaagtagcaaaaggtttggccaagaaaattaagttaaaaagtcttttacaagaaatttactctctggtaatcgattaccagaggatgtaatcgattaccagtggccaaaactgatttacaacagctattaaaatttgaattcaaaatttgccctgtgtaatcgattacacatatatggtaatcgattaccagcagtttctgaacgttttaattcaaaattttaaagcttgtaatcgattacacatatactgtaatcgattaccagagcagattttc

SEQ ID NO: 15861 - DNA, 368 bp, Glycine max
agcgtggactagagattttctctgtatccatttggggctacagctatcatgctgagaactaaagccagtgaaatttagtgaactcttgggagatctttggcccagcttattggcagcaatgtggcgctgcacccattccactcaggttcacactctttacgttgctccggaatctcaacttgttaatgatcattgattgtatggatggggtagacataataagcttcagtttgacacaaggatggcaaaatctctatggatcacttcgtgttgaaaaggaagtctttgacaattctgaatagatacgaattaccttctgcttgcgcgcgccttatggaatcctgcggggggagcttaatgaacaatgc

SEQ ID NO: 15862 - DNA, 272 bp, Glycine max
tgccgaccaaaatggcgagttgggaattttatgtttggagagaggagaagacctgtgaaaggaattggaatgacatgaacgaggagtgggagaggaatgattggtggagttcattgagtacttgtgagatcaagatagataatccacactcataatagttagagcccatcattcaattgcaagtagatggagactgatggatgaacatataaattcttatataataggctataacagaaatgggtaacttgggagctcacgtaatcttttgt

SEQ ID NO: 15863 - DNA, 289 bp, Glycine max
ccttctagatgcctttatagttacagaagacgatgactgcctataatatgtaactatgactactattaggcttaacgaattgccatttgagtcaaccacattcataatagctagcgtgcaaacaagactgagccttgccggcaaagcatgcatgaatcgtgggaagggtatcatagcgtctcccaccgctgagactatataaagcatgtaacgccttgcattataatgattccattatttgccaaaacactgtccacgggcgaacaatatgtagcttatactggcccct

SEQ ID NO: 15864 - DNA, 355 bp, Glycine max
cgccacccagctcgcccaggcgagctatgttgtttccttcagaagcaaccgccttctggaggactattctggaaggcccaagagggcctggttgctatttgcacccctattttttttaaatacaccacttgctcttttttttggtgattttttttccgtaacgtttacgaatctttatgaattccataactatgcttggtttcattccgaaatgttttgaaaccttaccgattacgatattataccttctttgccttcctgaacattatggaactatacggatcgcgcactaacacttccttataattatcgggatgtgactgtactttacggattgtgcaaaaatgcttttttt

SEQ ID NO: 15865 - DNA, 392 bp, Glycine max
  unsure (1)..(392): unsure at all n locations
agcttggagaggatgcttcaatggatgaaaagaaagagggagagaaagagaggggggagcacaaaattgaaggaagaaaaagggagagaagttgaactttgagttgtgtctcacaagactctcattcatcaaagttacaataagtgttacacatgcttctatttatagactaggtagcttccttgagaagctntcttgagaaaaattccttgagaagcttctttgagaaaacttccttgagaagctagagcttagctacacacacccctctcataactaagctcacctccttgagaagcttccttaagaatattcctaaagaagattgagcttagctacacatacctctctaatagctaagctcacctccttcaggtgagaagctagagctt

SEQ ID NO: 15866 - DNA, 384 bp, Glycine max
tgaggatagagacttcccaagctatttatcttctctctcaaagaggctctctaactttctagctttctcactctaagaagtggattcactcttgtcttggatggttaagaatgaaggctcctacccttatttatactactccacctccacaatgaatggtggagattaattctctagaatgctccacacattctaggagtctctacactcttctactcccttccatatcctttcatactcttccagaaggttcaagaaggtttcacatatctctagaatattctagaggtttccacagtctttcacaagcttctagagagttctaccctactctagagttctacaggacgttctagaaaattctacacttttctagagagctct

SEQ ID NO: 15867 - DNA, 371 bp, Glycine max
agctttcactcggatgtccgattcatgcgcatcatatatcgagacgctcgatattgaacaacggaagctctcgagaaattgaaatgatcataacttttcactcagatttccgagtcacacgcataatatatcgagacgctcgaaattgaactacggaagctctccagaaatctatatgattataaatatctcactcggatgtccaattgaggaacatcagatatcgagacgctcgaaattaaacaacggtacctctcaggaaattcaaatggtcataacttttctaacggagatccgattcaagcacatcacatatggagacgtccgaaattgaaccacggaagatctcgagaaaatcaaatggctctaac

SEQ ID NO: 15868 - DNA, 322 bp, Glycine max
tccttaagatgattcctaaagaagctagagcttatctacacatacctctctaatagctaagctcacctccttgagatgagaaactagaacttagctacacaccccctataatagctaagctaacccccatgacaaaaaacatgaaaatacaaaaaaaagttcttactacaaagactactcaaaatgccccgaaatacaaggctaaaaccctatactactagaatggccaaaatacaaggcccaaacgaaggaaaaacctattctaatatttacaaagataagcgcgatcatacttagcccatgggctcgaaatctaccttaa

SEQ ID NO: 15869 - DNA, 125 bp, Glycine max
  unsure (1)..(125): unsure at all n locations
caaagaaacggatggaattgggccancaaagtaaaacaacaatggctgacgcgcatcgacgcacggcaggcatgacgcaaacaagggaaagacgttagaattcacgcgaccccccaaacggcagg

SEQ ID NO: 15870 - DNA, 400 bp, Glycine max
agcttgaagacaagactatacgaggtatcttccttgggtatagcaatatctctaagggctaccgtgtctacaacttgcaaactaagaaactcgtcattagtcgagatgttgaagttgatgaatatgcttcatggaattgggatgaagaaaaagtggagaagaacgttcttatacccgctcaactacctcaagaagaagatgaggaagaaaacccaggtgaaccaccttcacctccatcacaacaacaagatcaagaactatcatcaccagagtctactccaagacgagtaagatctttggtggacatatatgaaacctgtaacttggccatacttgaacctggaagctttgaagaagcgtcaaagcacgaaatatgggtcaaggcaatggaagaagagat

SEQ ID NO: 15871 - DNA, 396 bp, Glycine max
tgttcttgatttttcctcagttctttaacaagctttgaacaatatacttagccttcatttaactgtctttgggcttggcgaccacactcaacaaagtactttcgacacctactgtacgttgatttcaccaatgctgttatgagaatgttgcgacaatcctttaaaaccttattgatacattctgagaggttcgttgtcatgtggccatatcgacgtccttctctatcgtaagccatcgtccatttttcctttgagatgcgatccatccatgttgctatggctggactcagttcacgaaatttttctaaattttgataaaaaaaatgtgcttgcaaggagtgtaggctgcataaaatagttatgaataacaattttaagtataaatgtaagtaaatc

SEQ ID NO: 15872 - DNA, 380 bp, Glycine max
agcttgctagtggagcttctatggtatctggttctttgagctccaatgaggtccttcaatggtgatttttcaccatagagatgcagcggaaggcaaaggataagaggagaggggaggcaccatccactagggaataagccaaggaagaaggagcttcaccaccaagaattgccttggataagaagcttgaagaggatgctttaatggaggaaaagaaatagagaaggggggagcacgaatttgaaggaatagaagagggagagaagtggaactttgaagtatgtcttacaagactctcattcatcaaagtaacaacaagtgttacacatgcttttatttatagactacggagcatccttgagaaactttcttgagaaaac

SEQ ID NO: 15873 - DNA, 367 bp, Glycine max
tgtcgcaacctgcccttcggaagagggcgatgtttgattcacgggtgcgtgttccaagaaaggaatactcgcggagtcgccaccaacgtttatttgaggaaagtgtctgaaaaaccggaaaagacgtgatctactaattctttgtgaaaggttctagagttgtatttacgcacagggaaagtattatcaccccacgcgttcgtcacaagagacgacaacctttaatcaaatgtgcaaatatgacatcaatttatattcttttccctttttacgttcttatgtcttttttatgcctttatatgtattatctttttgtggtcaacaagggtgtttacctttgctcctacttattccttaattgtgatga

SEQ ID NO: 15874 - DNA, 304 bp, Glycine max
agaggcgaccggcacgcatgcaagcttcaacactcaatggtgagcgtttcgtattattaccggactcaatcagacatccgagtgaaaattcattgtcgttgggataggcgcacagattcaacattcaacttcgagcgtcacaatatagaacgggacacattcagacacccgagcaaaaagcgattgccgttggaattagctgagaccctcaacaatcaaagtcgagcgcggagacatatcacgggccgtcagcagacatccgaggaaacagccatcggcgctcgaagtggctcagagcttcaac

SEQ ID NO: 15875 - DNA, 396 bp, Glycine max
  unsure (1)..(396): unsure at all n locations
ntgagccaattcaaacgacaataactttttactttgatgtctgattgactctcgtcacatatcgagacactcgaaattgaatgttgaagctctgagccaattcaaacgacaatatacttttactcggatgtctgattgaggcccgtaatatatcgaaacgctcgaaattgaatgttgaatctcttagcaaattcaaacgccaatatctctttactcggatgtctgattgaggcccgttatatatcgagacgctcgaaattgaatgttgaacctctgtgcgaattcaaacgacaataactatttactcagatgtctgatatagtctcgtaatattatcgagacgctccaaattgaatgttgaagctctgagctaatttaaacgacaacaacttttta

SEQ ID NO: 15876 - DNA, 191 bp, Glycine max
  unsure (1)..(191): unsure at all n locations
agcttctagccaaatggacttaccttgaantattttctttgatagcccctttgagcctagtttcccatttctttgttttgaagctcattacaagccttaagtgaaaacccttgatttcaccttaccttaaaggattttggagcctttggaatggtttgggaattagcctggaaataatggtgggggggggg

SEQ ID NO: 15877 - DNA, 205 bp, Glycine max
  unsure (1)..(205): unsure at all n locations
agatgaggaagtgtagaagggtgaaacttcctgcttttattgtngaccacatagtggtacctgtagatatgttgctggggtcacgattaccttggggacttaatgtggggtgctcttgcccaaaaccaagcttgtccaatccctacccttccccgtcatagtcggtcagcgagaacctgttatgtaccttatcaggctagctcct

SEQ ID NO: 15878 - DNA, 396 bp, Glycine max
  unsure (1)..(396): unsure at all n locations
agctttattcaagactaancaatgtttagatattttagatggatgatcaagacagtctatagagtcttagaaagggtatattaaataggaagggaattactattgacgtagcaaaaggtttggccaagaaaattaagttaaaaagtcttttacaagaaatttactctttggtaatcgattaccagaggatgtaatcgattaccattggccaaaactgatgttacagcagctattaaaatttgaattcaaattttgccctgtgtaatcgattacacatatatggtaatcgattaccagcagtttctgaactttttaattcaaattttaaagcttgttatccgatacacatatactgttatcgattaccagaacagactctcagaaaatattctcaac

SEQ ID NO: 15879 - DNA, 299 bp, Glycine max
  unsure (1)..(299): unsure at all n locations
ttgaggtttngcactacgatcggatgagaaccattgtgtttcacaaacaagggcgcatggcttattacctctctcatctcgataaacgcaggacataatgtttgggatggctcctgatgcaaagctctccacatctgagtgatcaatcttccattcattggatggcgcaaagaatataaaatacttacccattagttctttgtagtgcataacagctatatatttgtaccaaatggaattgaacttgtacataccgaccttctaggagaaatctttttattcagggccaaatacgaatc

SEQ ID NO: 15880 - DNA, 396 bp, Glycine max
agcttccatcaattcaagctcttatgaaccataccctcatccaacaactcctttacttgaggaataatctcaagcccaagaggtgtggcagtgctaacaatgtctttttacaaagaagaagatgtagaggttttctaagaggggaagtttctttaatgtttatctttattgcaaaatgaatttctttcttagctaacctcttggaggagacacttacctccttacacttctccttaaccattaaaggttgtccttcttcttgggggtagatttcttcactagattcttccccttttgcttcttcactttcaatagaggaaggtgaagtagtagcctcatcttggctaatataaatttcttggcccctcataatcatggttttcttggtggggcatt

SEQ ID NO: 15881 - DNA, 389 bp, Glycine max
  unsure (1)..(389): unsure at all n locations
tataagaacaaaattgcctcaatcatatccaaatatgcatgtgaattaggaagcatcaacaagaatcaagccaaggctattgtgcaagcaatcaatggggcaaaacacaccaaatgattatgatgatggctcaaattctcacaaaggtaaactcatcactttcaaattgagctttcaaaactatcatgacatgtagaggagaatcaaagatttcaagtcacaaaatgtcaaaaacttttattttcaaaacaaatacccatttcttgaacatatcctatgattcaaagaaaaacatgcaaagtcgtacatgtgcacagaattgactcanaatattaaactaaatatccgacanaactaacaacattaacaaattaacacaactaacaaat

SEQ ID NO: 15882 - DNA, 389 bp, Glycine max
agcttggtagttctctcatatagaatgtgaccttgatcaagaggttgattggatggaccccctttatctttgttgaagttgttccccagatggaatttccacccttgaccttgattttgagaaaagttaccaccctgatggtagccttgacagttttggtttgccatgtaattgacctccatagatgcttcctcttgaaccacacatagccctacttcatgagctccaccacacagggtgcatcctccaacttacatagtggaagattgagttggttgaagggaatgcaattattgtggaagctggttgagtatggctgttagggcttcaagttgttttgcaagaatcttgttttgagctaacaatgcatcttgagaggtgagttcaag

SEQ ID NO: 15883 - DNA, 396 bp, Glycine max
tatcctataactgactaagctcactggtaatctattgcagtcttgtgtaatcgattacatcctactgttctatggtaatcgattacagggagtggtaatcgattaccagacctaaatcaaggctttctctacaaatctaactattgcttactcctaaaaactacatactcattgtatcttttatctaccacaatcagagatcaataatagactttgaaaaacaagcattataaacatcttaactacaaccatcaagcacaatcacaagtacaaatatactcaccaaatcaataatcatcaaatcatacacaaagtacaatcattaagccgcaatgtacaaccattttgattgtcaaaacacacacaaagataatcattgacaatcattcaatcatt

SEQ ID NO: 15884 - DNA, 393 bp, Glycine max
tcttattttctgcagatgaagatgaatttgtggccacatcatggactcctctaaggacaatagcattatttcttgcaatgaattgtagggagttggaagccatcttctcaatcagattcctagcctcaacaggagtcatattacctagagctcaaccactggcagcatcaatcatactcctctccatgttactaagtccctcatagaaatattgcaaaaggagttgctcaaaaatctggtggtgaggacaacttgcacacaatttcttgaatctttcccagtacttatacaagctctctccactaagttgcctgatgtccgaaatgtcttttctgaaggcagtggtcctatatgcatggaagaatgtctccaataacactcttttatgtcatc

SEQ ID NO: 15885 - DNA, 541 bp, Glycine max
  unsure (1)..(541): unsure at all n locations
atcgtcacacgctatcatctttatattaagtgtntcgcctgtangtatntgtgtatantacnnncagcncaccgtgatgcaatttgacctttgactgacnccnttcgacanacnangcgganactctacaggcgagctgcatgcgtgcaagcttgtatcatgacacatatatttttgatatgcaggacgggagatcaagacggcgctaaagtcttacgctggggatattacagaggatgggaacttcctttgaagtaacgtaaggtttgggcccacaaatcttaagataaaacgctttggtgggagagagtaactctctggtaatcgaatactagactatgttagctagtgccattggtcacaactgatgctcaacagccactccaaatttgattcgcaatgtgggctgtgtgatggatacacatatgtggcaatcgattaccttcagctattgatcaatctaaagtcaaatatgaaggcctgatatggataactcatatactgtaatctgataccaaaggagattttcaataagtttccg

SEQ ID NO: 15886 - DNA, 357 bp, Glycine max
gtgaactatgaaactcagcttatagggctcacgatattttgttaaatataagttcaacatcggtttttttaaaaacaccgatgttaacaacatgatgttaaggctaacattggttttctggaaaaaaccgatgttaacttatcaaacgttaacatcggttttctcaaaacccgatgttaataaacttatgttgacatcggttatttggaaaccgatgttaactaatcaatgttaacatcattttttccaataaccgatgttaatgcacttcgctaacatcggttttgtgaaaaaccgatgttaacagatacatagtatttacaattatgccaccacgcttaccttgacatctatttt

SEQ ID NO: 15887 - DNA, 402 bp, Glycine max
agcttctaacgggttgcgtggagcatgcaacattttctggcagatgttgttccagaaaacatcagggcgcaaattttgcacactctcgtaaagattgttgatgcaaccaatctctaccggttgttgaaattggttcccaagccggatgatagttcccaatggaagggtcaggaaactaaagagaacatcaacaaagtctccacttgcttctgccataactacacgcttttgctcattatccacccaatatctcaaagggattgttgcttcttggttggaagccataactgaaacatacaactaaacattagtatcaatgaaacgagaaaaaaaaatgcaaatcttatagtgaaatttctgatatctcaacttagttgttcctgtgatatctcaacccggtat

SEQ ID NO: 15888 - DNA, 398 bp, Glycine max
tcgagagagttgaaaagttaaattgcaacaatatcattataagccttataccatgaaaagtaaaattaagaatgaaatcaaaagaaaatcaagaaactggcagtgaaaaaggatattgtgaaactggtttttaacaaagcaattcattgatacttgtgatctcttgcttttgtttcccacaaaattgattataatactgctccatagttacattagagagttgaaacaaagacaaacatgttaagtttgaaggaaacatgattgactttttagaagcccagttttaatgagttatgggttactagtatatatgaaagggttgcaaacaattacgtgaacaatgtaaaattaaaatatgttttgatgaatctgcagatgcacttgagaatattgttttg

SEQ ID NO: 15889 - DNA, 230 bp, Glycine max
agctttcaaagaaaaaagctctagattatggtttactgtaatcaagcaagtcggagacctagcatgatcccagattcacctccgctccttatgttcccatgaatccgggtatagggccctttttcactcacagtgtgtgcaaatagtgttggagtttgcgtgcattaaatgaatatatatctaccctatgcatacattttaaaatgcactaaatgcatcagatgagttta

SEQ ID NO: 15890 - DNA, 393 bp, Glycine max
cgcatttggaattgcgaaagccccactccatctttaggtttagtacctgacatctcaaacaaacaaatcaaacgtaacaagacaattatagttgctgtttgaatacctcacccactcaagtgtatcacacaattatggcttttctctaatgaaacactcttgccttttaccactctaattccccttgagttcttaggcaattcaagagattatggccacaacaaagaacaattcaccattatgtgtaaggtaaggctagagagacaaggaaaaggttaaccaagaaaaaggctaacatatgttttatgcacaaatgaaggtaataatatatataatttatgaattcaagttacaatcctacatgcactcatttataccttaaagagattcttt

SEQ ID NO: 15891 - DNA, 398 bp, Glycine max
  unsure (1)..(398): unsure at all n locations
agcttatccagattctattttagattttcgngatttacaacctgacaacgtgaaagttttaattcaatggcataatctccctcctagtgaaaatagctgggactctgtggctaaattacaagaggttnttccaacttatcaccttgaggacaaggtgagtcttttaggcggtgctattgataagcataagcataagccacacatcaccaaggtgtacacccgcaaacacccaaggggtgcaaaccacccaataattacaacccacccaaaaggtgtaaaccacccaatagttacgattcacccaaggggtgcaaggttagaagatgtgaatcaaggggacatgacccttgggaacagtcacaatcaaccattatgatccgcccaagggatgcaaggtc

SEQ ID NO: 15892 - DNA, 440 bp, Glycine max
  unsure (1)..(440): unsure at all n locations
gggaaagaagataaagaaaaaggatatgaatanaaaagagaaannaaaaaagaaaaaaaaaatgaatgaagcaatgagaaacannnatanaanaaancnangaangaaaaaggggaggagggggatattttttaggagaagaaaaagaggaggataaaagagaaaggaaagaaaatgaatgaaaaaagagaaaaagagaaaaaataaagggaaaaaaggaagagaaaaaaaataaaaaaataaagggagaaggaaaagagaaaaagaaaagaggaaagaaaaaggaggaagaaagaaagaagaagagaaaaaaaataaaaaaaagaaaataagggggaaggggagggaaagaaagaaaaaaaaagagaagagaaaagaagaaaggaagaaggaagagagaagaaggaaagaaaggaaagaaagaaaaaaaagagaaataa

SEQ ID NO: 15893 - DNA, 350 bp, Glycine max
agcttgaaatttaacaacataagcttttgagaaactcaaatggtcataacttgtcacacggaagtccgattcatgcgcataatatattgacatgctcgaaattgaacaacgaatgctctcgtgaaattcaaatgggcatgacttgtcacacagaagtccgattcaagtgcataatatatcgagacactcgtaattgaacatccaaagctctcgagaaatacaaatggtcataacttatcatacggaagtctgatccatccacattaatatatcgagaagcttgacattgaacaacggaagcttctcgaaaacaaaaatggtcgttccttatcacacggacgtccgattca

SEQ ID NO: 15894 - DNA, 186 bp, Glycine max
attaacaatatctgaattgttataaaaataaaaaaaaaaggaaaatgatctttgaactggaaccaggaccataaaaccagcggaaatgacactgcgcttttttatattcttaggggctccctaacacacgggagtcctcactctgcgcagtgtataccgatactctctaaattgcacaacagaagc

SEQ ID NO: 15895 - DNA, 396 bp, Glycine max
  unsure (1)..(396): unsure at all n locations
agctggaactatggactgtccacattaatatggcangggcatgggctcatggccacctaggtcattagtaagctactatctatacaatggttatttcgccaggtgctaaaagtatggcacaattatttgctagtgtacaattattgtttaccattaatggcaataaatacattgtactgcaatatgaattgatagttagctaaaagcacttatgatgctactatgaatttccaacttcgaaacatacataagaacagatataaaagtaatgtaaaattgacaggaatatttaatctttgaccaagtgtcaagccacatgtaacttggagagtggttatgtaacactccatctttcggagaataaattataaattatgttctatttaaaaataaata

SEQ ID NO: 15896 - DNA, 333 bp, Glycine max
tcatgcttaagtatgtatggcgaaactttatttttattgttcaagacatacatgtgagtttgtaacaattgttctacacttggagtgaacacatgcagtcctcttgaaccctaaccacccactctgttattatgtcgagactcatgaaggccaacaggtttaaccttctcaatgtattctgaacaaaattcaatggcttcttctgcaaatgtacctcctcaacaatagatgctcttagacaataaagattctttcgttacccatttaagatcatgtttctgtcaaccgggtacattcaccatatattaacaggaccacaacatttgatttctc

SEQ ID NO: 15897 - DNA, 350 bp, Glycine max
agcttgtacctggaagaacttgttctctggagctattgagaaaagcttgatgattttagagcactgcaagaaaagggtctattaaggatgcaaaatgggtgtgtgatcaatcaattgtgcctgcagtataagccaattgaggaggaacatgcttgcattttgatgatgacaattcacaatttattttgaagagaccagcaatgacatcttatctggcagtcaaagactgtaaaagatggcattccatcggttttaatggcatcccagattttggatcttgtgtcatttagtttaatttgactctaacattaactagtttgttatttaacctgctatgtttattaactatt

SEQ ID NO: 15898 - DNA, 365 bp, Glycine max
tgtttaatctttccatatgagtatcctgacctatgaaatcaaaagttttccttaatattataaaccaaagaaaaggtatacaattatcaaatattttggcaaataaatacaaacagtttcaggacaaagatttgctctaaataattgctaaaagataggaaacttactacattttgatgagttgtatcatattctacgattgtttaatatgaagatgtaaaatgaaagtgcctgaattgaaacaaagtgacaaatctcaaatatgtattttccatcttctgagtataacttcatatatagctagtatgcttatcagaattgtcccatccagctcccattgtcttaccaaacaagtctgcatgaat

SEQ ID NO: 15899 - DNA, 386 bp, Glycine max
  unsure (1)..(386): unsure at all n locations
agctngagctcattgtttctgccctttagagcccatcggaacttggttctaccctatttttcttttcgggccctctttgtttcttgctctaacgcttcagctgtggtcatgttggcatgccttagctcatcacactccttcctgatcctagtgactgccgtctttagcttttctttgaccactcacactctgtcaagctctgccttcaaggcttgcacttcttcactttccttaggaacttcagcttcttccccacttggacttttcagctttgggagccaagttatctcttgcgtcctagccttcaaccacttatgatagccaccgatgatgccattgctgctatccctaagctccctatcttttctttccaccacattccatgc

SEQ ID NO: 15900 - DNA, 392 bp, Glycine max
  unsure (1)..(392): unsure at all n locations
tctaaactntatacaagaatgaagctcttatactacttgttagacaagtggcctcaaatatcttaagaagggggggggttgaattaagatattccaaactacttccccaattaaaatctatttcactttcttttcaagttataaattcccttaacaatgaacttcttaaatattaattcaaataaaacaatctgaatatgaatataaagcatttataaacaaataatattaatggaagagaaactgcaaactcagatttatactgtttcggccacacccttgtgcctacatccagtcccccagtaacccgcttgagagtttcactatcttgtaaatttcttttacaatttctaaacacacaaggacaatcctatctttgtgtttagaattcc

SEQ ID NO: 15901 - DNA, 346 bp, Glycine max
gcttcttgatagcctccctctctgcagtagcctgttttcttgtctcctttagcatggactctgactccttcgaccgggcctcaagatccgccaccttcttagcaagcttacctttctctgctacaacatcctctaccctaccagccaagttatttttctcttcctgcaagtccttgcaacgtttgaacaattcatccaacctagtgtgcaacaacttggccaacacactaccaactataaaagatagttggtggttcgacctcacagtcttaacaaaagcaattgtggctccaactaccttaggacgctccacattgcagacagtgcaagcagtctcccttcactt

SEQ ID NO: 15902 - DNA, 395 bp, Glycine max
  unsure (1)..(395): unsure at all n locations
agcttcatgatgatgaatcaagttgtttcaagtagttntgataatgacaaagatgatgacaaanagcccanagaatgatttcaagattgagtcaacaagttcaagatcaagtttaatttcaagtttcatgagaagaaatcaagaagattcaagaatcaagagaagtttgatttcaagattcaagagaagatgaattcaagattcaagagaagaaatcaagaagacttcacaagggaagtattgaaaagattttttctcaaaattttctaagttaccagagtttttactctctggtaattgattaccagtggcaaagtttgatttcaaaagttttcaattgaatttgcaacgttccaattgatttcaaaatggtgtaatcgattacaaaatattgg

SEQ ID NO: 15903 - DNA, 386 bp, Glycine max
tgtaggattatggggtacccgtcatatgtggtactaggtggcgatcgggcgatggtgcaaatcaactctctcacatccacaaatcacacatgaacccaccatccccagttgcccaccttcaactgagctcacgtactcccacgtagcccttatcctcgttcctctcagcaccgggtccctatcaacccctccaagcttcctcaatatccaagcaattcaatatccaaacatcatgaactaccctaaaccaagaaaatagggcagaggtagaaaagtctgccaaaaaacacattccaataccacatctttccttactcaaataccccagtaacattctcttcgttctgattcgttaaccgttggatcgactcgaaaatattactgga

SEQ ID NO: 15904 - DNA, 377 bp, Glycine max
tgatcaatgctaccattctcatatctaatgactttcataccggtagcaaggtgcctatcatttaggaaagcacagtcataattaagcttcaaaaagcctgatgaaggaggagaccaatattaacttgtgccatccactacaaggttgggatgatgatcaaccatatttcttttttttgctgacatctttagataacaaagcatgtcatgaatattattatagagaccatgtgtagatgtccacgtttggttaaacacgaactcctttctacaccaccagattctatccaaggcaactccaaacatatgtgtacaattggagaaaccaatcttcatagcttttaagaggttggatactaaccacaaataaaatctttg

SEQ ID NO: 15905 - DNA, 329 bp, Glycine max
  unsure (1)..(329): unsure at all n locations
cacacaccacggggattgctaatttctctctcctgaaangagaagctagagctgaactacacaccccctaaaatagctaagctcacccccatgacaaaaaacatgaaaatacaaaaaaaaaagcccgtacaacaaagactactcaaaatgccccgtaatacaaggctaaaaccccattctactagaacggacgaaatacaaggcccaagcaaagggaaaacccatactaacattaacaaagaggaggggatccgaacacgaccgacgggggaaaagaatacccaaggttcaagagaaccctaaggcaatataatgaaaagtatcaaaaa

SEQ ID NO: 15906 - DNA, 312 bp, Glycine max
  unsure (1)..(312): unsure at all n locations
gatgttgtggtgaacctagattgcttgatagaaacccatgactgaaactcagttgactgccaaactggaaagggctccctcctgatggagttgatgcttccaaatacaaaacttgattgaactgaggcaggttgcaaacttgtgtggacgtagaggctgctgctgccacagtgaatgaaatgaggagttgatgcattggtagaagcttgacatcaatgcttaacgaccatggatagaaacttaatgacttgttttttaataatagaggttnttgaccaaattgaaccccaaggacaacaattgcttcaagga

SEQ ID NO: 15907 - DNA, 409 bp, Glycine max
gacttggagaagataaagaaaagggtgttatccaagtgttatttagtggaggaattagtagaaccagttttagcttcttcaaagccatctacctttgtcacaaccttagcttatatgtgtgtctgcattgctaaagccattcatgaagcccaaaatgtaaagaaggttttatacgtaaaaccatttttgttttcaatacacctaattataagaatgctaccgagacacattcaatagttaaaaactattttcatttccctaattacaaaaatgtcatcgcgttatattctacaaaatcgtcttagaagtaccgtcataaaacagcacctttgtagtggtgacgatatgatgacatacctgaccggggagtttgcacgacctaagtagtttgtggaggaacaaacatatt

SEQ ID NO: 15908 - DNA, 385 bp, Glycine max
agcttacccattctgtttagggtttcttgatgatgcttgtgatgcttgtatgctgaaatggctgatggaaaaatgatagagatgaagggtagaattaacctagggttaaaaagtgagaacgtagtgatatgagtggaaaagtgtgatgctttaaggatttgaaaagccaaatctggatttagtggtaattggaggttaaagtgagttaatcctagcttgaaatgtcatttaggactgtgggaaagcttgggctgtacaaaggaggaaaatgaatgaccaaagtgagggcaagagccatttctagggtaaattgggtgttgaggagtcaaattttgattcggtggagttttcgttgtaaaacctgtttgagcaagtttagattaat

SEQ ID NO: 15909 - DNA, 403 bp, Glycine max
aagctccttcaactgcacatggctcttaatatttgaatggtatccctgtggaaccttcacccgatgaagacaccgacgaagacttatattctcatttctggacaaagtatggcaagctgggggcaagtaaattttcttcccatcataccttggatgcaactgtgatcgtatccccatatcagctagatcttgacgggtattcaagtcatacttcgtcttgccttgaatgttgagaagcgtcccaatcacactatcacaaacatttttctccacatgcataacatcgatacaatgtctaatgtctagatcagaccaatactgaagatcaaagaaaatggacctcttctttcatatgaaactcttacttttatccatcttttgggtatgtctaaatacattattc

SEQ ID NO: 15910 - DNA, 416 bp, Glycine max
  unsure (1)..(416): unsure at all n locations
agcttttcaattcattctatgtacccgtggtggtccacattttgtttcatgtatttttattctcgttttcatttactttttatacccccttttgacgtgcttaagccatttatttaagtcatttctcgcttaatctaaaaataaaatatatttccaccgatcgtttgaattgtatcatccgttaatttcggttaaaatgaattccgaccgttcggtcgtgccgtaaccacgtcggaaatcaaaaaaagaggtaaaataataatataataatcaaaaaataccttttagtaaaataaagcgaanaatcaatcggacgttttctctttgggatttctcattcttaattgaattgactaattactaaagtgaaactaaggctaaaatcaactcgcctagtcaagctcgtccacaaaaat

SEQ ID NO: 15911 - DNA, 360 bp, Glycine max
tttacgtaaaaaccaaactgatcgctggaatgaggattgtcaagaggcctatggaaggatcaagaagtgtcttatgaatccccctgtgcttatgccaccagtacctggaaggcctctcatcttgtacatgacaatcttagacgagtcaatggggtgtatgctggggcaacatgacgaatccggaaagaaagagcgcgctgtttactacctaagtaagaagttcacgacctgtgaaatgaattactccttgctcgaaagaacgtgttgtgctttagtatgggcatcccatcgcctaaggcagtacatgctgagccatactacctggttgatatacaagatggacccggttaagtacatctt

SEQ ID NO: 15912 - DNA, 427 bp, Glycine max
  unsure (1)..(427): unsure at all n locations
agcttataagaacaaaattgcctcaaattattccaaatatgcatgtgaattangacgcatcaacaagaatcaagccaaggctattgtgcaagcaatcaatggggcaaaacacaccaaatgattatgatgatggatggctcaaattctcacaaaggtaaactcatcactttcaatttgagctttcaaaactatcatgacatgtagagaagaatcaaggatttcaagtcacaaaatgtcaagaacttttattttcaaaacaattacccatttcttgaacatatcctataattcaaagaaaaacatgcaaattcgtacgtgcacacaaaattgacccaaaatattaaactgaaaatccgacgaaactaacaacattaacaaattaacacaactaacaaattaacaaaccaacaaaactagcaaaaccaaa

SEQ ID NO: 15913 - DNA, 443 bp, Glycine max
tgaaggtgtgtaacccaccattttccatagtagaatattggtaatgtgtctactatcattgtcatcattttttcgtcattgatgtgccacttgagctgccaggttctccacctttgggcgtattctttgaaagatccgtgcccccttttttgcacatgttttgtagttgcatcctatccgaagccattataccgaccctgcccaacgaaggcaaccattatgtcctcccaggaatggactcgggaaggttccaagttagtgtaccaggtaacaactaccccagtaagactttcttggaaggaatgtatcaacaattcctcatcttttgcgtatgcccccatcttccaacaatacatctttagatggttcttggggctagtagtccccttgtacttgtaaagtccaacaccttgaacttgggaggggtgatgatattgggtact

SEQ ID NO: 15914 - DNA, 300 bp, Glycine max
aacactactactcctctaacaagtcatgacacccttgagtttcctgaatggatgagtgacggtgatcaagagttgctcagagccaagccacactgtgtgcgtgcggatgcggttgtggctttggatgggagaggtcattatcgctctatcactgatgctgttaatgcggctcccagttatagtcaaaggaagtatgttatttacgtgaaaaaggggctttacaaggagaatgtggacatgaagaggaagatgaccaacatcatgcttgtgggtgatggtattggccaaacaattatcact

SEQ ID NO: 15915 - DNA, 435 bp, Glycine max
  unsure (1)..(435): unsure at all n locations
tcttggactaagatatttgacttgtatagcgntctgcactttattctctcctatgttttttttttatcagcactctcctatgtgctttcctcaacacttgtttgacactatcatatatgaatgcatgacttattcactgtttgagaacaggaaagctaaagaactagtttttcagatcaattaactttggaatgattggaatgaatatatacaataggagtctgcaatcagaatgagcagacagttaaagactatacttgtggaaggatagtggatatagtggtcctgcaatctcctctcatgtcttgtccttctctttgcatcaattttgatcagaanaacttgttctttagctntcctggtttcatagatatgatagttcccaacaagtgttgacgganaacacattggagagaagtaaatgaacggaacacc

SEQ ID NO: 15916 - DNA, 383 bp, Glycine max
agcttgctctaaatttacattgatgtttgtatttatgggaggaggttgtatgccattcttgttttaagagtagtgtcccactggtaaaactaactttccaaatttttgccttcacaggaaatggccccgaggaagcttgcctcaaagaggtccaggaaggacaaggcagccgaaggaactagttccgctccggagtatgacagtcaccgctttaggagcgctgtacaccagcaacgcttcgaggccatcaagggatggtcgtttctccgggagcgacgcgtccagctcagggacgacgagtatactaatttccaggaggaaatacggcgccggcggtgggcgtcactggttactcccatggccaagtttgatccagaaatagt

SEQ ID NO: 15917 - DNA, 295 bp, Glycine max
  unsure (1)..(295): unsure at all n locations
gagctctgaccactgttcttcttccccgatngcttttttcatgtccgtctgagtgggcttatagcctaaaccatacttcccacgattcccttgggtttttatcaggctagttatgccgccattgtctttgcctaaacccattccgggttcatacccgttccccaaccataactcggccatcattaccgacgcatcngacagacaaggttgcccaaagagggagtccaccgaggaaatgctgaccacctcataagactggaaagcggtttctaacgattcttctgcgcttccacat

SEQ ID NO: 15918 - DNA, 375 bp, Glycine max
  unsure (1)..(375): unsure at all n locations
agcttttcanaactttgttggaccacttgtttcaatcgggaactagttgcttgtctgatccaaatgtccttataaactgttatgtggtccgactagtaaagaaatgagaaaactgatgcagactggaatttgagtgtgctaacacctaattttgtccaccctctagattgattgtcaattccctttattatattttcagcattcacatcacactgtttttatttttttttatttagcccaacaaaaagcagatttgccaaaaaatattgaattgggcgcagtgaacccatgaaacaaaagttgtgtggcataatatggnttcttttggtctaactcaaacacaacaaaaaaaaaatcaaaatgttcaaaaaaaat

SEQ ID NO: 15919 - DNA, 367 bp, Glycine max
ctattacactattacagaaaaatgacttgaattgcttaatcacttctcaattgattacaagaggaaccttgcttatatagcaggttaatagtaactacttgttggttataagaaagcaaacttaaccaaccttataactaccagtttacagctttttaaaactttgaattattcctaacaagatagtccattaaggagaaagtcgaataaataaactgctctgacatcctgtgatgaagagtcaatctcacttcatagtttaaaatgagcacaccatagataaaaaattcaacgacatgtgaccggctaaaggaaatacatacaaatagtctatctaaataaataacttttgggtgtttattcgcat

SEQ ID NO: 15920 - DNA, 405 bp, Glycine max
  unsure (1)..(405): unsure at all n locations
agcttgtagtcagcatggaaacaatttttcagcccataagaatactggaaatcaagaaaccattcatttattagccatttaccaagatctatataggccagaaaaagacattatttaagatcaaggtgcaaatagcggtcagtacccatatccacaagaaatatgttatttggaacgcattctgcaagaaaaaacaaatcagttaggaacaaacattaaaaacttaaaattcaaaactacagcaaagtttttctcactaaatgaactattttttaattaaagtcagctaggaaatattatactatttatttaatagcaaatccgtcaacatatcttanataatgtnaatgaactatttttttttaattaaagtcagagtatanaaattatttactttaaagcgct

SEQ ID NO: 15921 - DNA, 394 bp, Glycine max
  unsure (1)..(394): unsure at all n locations
tgagcattccaacgacgacgttaacgtgggcttcccttttatcaactcttttggcgatttagggcacgccattgttggccctcttggcaagctattcgttgatgtcatgatcgtgttttctcattgcggtttctgcgtcagctaccttattttcatttccaccacgttggcctatctcgccggtgatgatgacacctcatcagcatcatggtcctccttgttttggggtttcgccacgccaaaggtgttgtttctgtggggatgttttccctttcaattagggctgaatgctatcccaacattgacccatttggctcctttgagcatttttgctgattntgttgacattgtanccaaaagtgtggtgatggtggatgatgtctttgtgttcatg

SEQ ID NO: 15922 - DNA, 418 bp, Glycine max
  unsure (1)..(418): unsure at all n locations
agcttgtcgggtactgnttcaattaagttcttggggcatcccatggactaagcgaaaaggctctagttattaaatactgcacatcttttaaggcataaagcgaggatcggaacctcaatcctacgttctttttaaaggactgtgatgagagaatttacaaaggacaggaatccctgggggaaaccaagaagaacacaaaaaataaaaacatgcagcgactccctcaattgccccagatcctaagcgtaatatcgcttgacaacgtcgaagttcacgggtgagggtagctcctcgtcatccatgttggcgagcaccagggcccctccagagaaagccctttttacaacaaaaggcccttcgtagttcggggcccactctcctctgttatcttgtagagctngggagactttcttcagca

SEQ ID NO: 15923 - DNA, 421 bp, Glycine max
tgcacctcttcactctcctcaggcactactgtctctttcccattcagaccctttagcttttgtggccaagttatcccttgcgttctagatttcaaccatttgtgatagccgcctatgacaccatttcttctttccctaagttctttgtcttttcttcccaccttattacatgccttttggatcccctaaagtatctttgtattagcttcattgaaccctcgtgcgatgaaaggaacaatgttttcctctgatggcgcacctctcatagggtatcctaactgtcttatggccaacacaagattataattaatacaacccctcatctctatcaatgggacgattggaaatccttcacatgagcataatactcctggcccttcttctttcaccgtgggaccaactaatggacgctccatcatgc

SEQ ID NO: 15924 - DNA, 391 bp, Glycine max
  unsure (1)..(391): unsure at all n locations
agcttgcatacattatatatcatatattctgcaaggagnaaaaagtaccagttggattgggaatctttctgttgattcattctagattaatattcttcacagatttcaataggctctttgacttgtcaaatacgctgaaaatggcatttgtgcttagcgaagacaacaagcgtcttgtagacaattattttcagcaaccacaatctcagttttatattctttgtctctttaagatacacctcaaatggtggtaggcgttattaagacaacctattgatttggtctgtgagtcacttaattatctctacatttaatcaaatttgttgtcaatttactaaagtcatacttgcgaccatacacaacattgaagaacacgcctttaaagaaaaaa

SEQ ID NO: 15925 - DNA, 406 bp, Glycine max
  unsure (1)..(406): unsure at all n locations
tgaaggcatgcaacctattatcttttcattttagaacttcgataatgggnccactatcatggttatcatctctctctccatcatcggggttgctacttgagttgccaaatctatctacctttgagcgtattctttggaagattcatcatctctcttgcacatattctatagttgcattctatctggagccacatcagagttatactgatattgcctaatgaaggcagccaataggtccttccaggaacagacccgggagggttccagattggtataccaggtaatagttgtccaaacaagactcttctggaagaaatgcatcaacaacatcaagtgattctatgggcaagtagtttccttggtgtcataccctaatttcgtccggggacctttgctngatgacatg

SEQ ID NO: 15926 - DNA, 323 bp, Glycine max
  unsure (1)..(323): unsure at all n locations
agcttgacaagccggtttttntaagtattaataataataataataactattatctataccatttttatggcattatgaatgacaggatgaagtggtataaagttcttagagagttcgctcgcatgtgaaaaattttcaaaaagaacaagactaagttaaaaggataatgcaaccagattaatactttcaaagaaaaagaatgttttgtaaagacattttcagacaattaaatattttatttggctatattagtataaatcatctctaatccatatattttgtttaatattatgctctntttatcatgttcttttgatatactt

SEQ ID NO: 15927 - DNA, 383 bp, Glycine max
  unsure (1)..(383): unsure at all n locations
tgacactatgaaactaagcttagtggacatggtgttcattactncttaatgcattagtgtngnaccccaacataacttttttagaagtaatataataaccaagactagaactatgtcaggagacataatgaccaatgacacataaataaaaaatttcactatacaattatctacaaattgtgacatcttttgcaaaaagatttttataaataaggcaaatgtagtagatttgctacctgctaaagaacaaatgatcctaggacttgattttattacacatgataataaattagttattattacaaaagattattcattaatctctacaaactcaaaaatgtcaccaataatggatgactcacatcagagttacgaacaaagcg

SEQ ID NO: 15928 - DNA, 347 bp, Glycine max
  unsure (1)..(347): unsure at all n locations
acccacagcgaagatggctcttcattgcactttcgaacctcttgaggatgtgctctgccccatggaaatgggaaagatctttagattatcaaagagacacttnttagaaaataaggcagaatacgtaagcaacaacagttacatctatctggctatctatttagatcaaataaaatggtaaaatatgtattcatcctttaaaatgtttgtaattcaaattaagattactcaaattttttttgacaggctttagtcttcctaattttaaaatactcaagtntttattctcaatggaaccccagtttgctgtattatttttatttctaaagcaagaaaaattcaataag

SEQ ID NO: 15929 - DNA, 439 bp, Glycine max
  unsure (1)..(439): unsure at all n locations
agacatccganatcttacacagcgaaattctctaataattgcagttatgatcacaatnnataacctattgcaaatatattatcatacacagggaaattctgacaaagaatctgacattatgtttgtcaatttagtttttgttattaattatcaaagttcaaaaaacggtcgtagttctggtcgtggttgcagtttcaacacatttattgatattatgggtaattgcggacaaagaaggctaatacagttgcagacactccgaagatcttatcgttggggccgaaaatatggtcacagaccattgtttaaaaccttatgcatttcatcaaataactctactatgacataagaggacaatcaaaatctttctagaggaacattattacagcaaaacagacatttcatcttgtgggaacgtgacccttttttttttaaaaaa

SEQ ID NO: 15930 - DNA, 384 bp, Glycine max
  unsure (1)..(384): unsure at all n locations
agcttgtaggattatggggtacccatcttatgtgngactattaggcggtcgggcgacggcgcacaacaagttttccacatccacaatgcgcgcataaacccaccatcccctgttgcccacctccaactgagctcatgtactcccacgtagcccatatcctcgtttctctcaacaccgggtccccatcaatcctctcaagcttccacaacatccaagcaaaacaacattcaaaccgcacaagctatcacagtcaagcaaaacagagcataggcagaaaactctgccaaaacaccaaccaaaatcacagcttttctcacttaaagaccccagtaacaattccttctatccaattcattaaccgttggatcgactccaaaattttac

SEQ ID NO: 15931 - DNA, 340 bp, Glycine max
  unsure (1)..(340): unsure at all n locations
ctcgattcattctatgtacccgtagcggtccacattgtgtttcgngctttttattctcgnnngggttactttttataccccctgttgacgtgcttaagccattttacttaagtcgtttctcgcttaacttaaaaataaaataaatttccaccgaacgtttgaattatattatccgttaacttcggttaaaatcaattccgaccgttcggtcgtgccgtaaccacgttggaaatcaaaaagaggtaaaaaataatataataatcaaaaaaacatctttttagtaaaataaagcggaaaatcaatcggacgttntctctctgggagttctcattcttaatcg

SEQ ID NO: 15932 - DNA, 417 bp, Glycine max
  unsure (1)..(417): unsure at all n locations
cgctngagaatggcatcctctaaggatttaggagtattagttgattcaggcatagcaacgagagcaccaaaatgatacacacagctagagaatccctggaattcgaggaccaggggaacctccacaagcaatatgaaaaagaaggtgaaattcttattgataatgttgttatttacataaggatatttatagtgatattctacaataaccgaatttgtctttttatgcaaaattggaatatcaaggtaatggaaaatatcaagaccgttgggcacgatcctgcagcatcatcttcatgaacctccagcttcaaacgtgttcaaacatagtccttcaggtacttgggcctagagacccttctcttaataccacttgctattcgtacctcaccttcatgtggttttgtttattctgcac

SEQ ID NO: 15933 - DNA, 414 bp, Glycine max
  unsure (1)..(414): unsure at all n locations
taacgtggtcgtgttaacaagaaaatcatggntntttctatattcattcacttaggttctaggagagcattcacccattccttgtctacttaaagaaccactttttctttgacctcccaacctttattgacatgccacaattaacagcgcacataggtttttttttttacgatgataggtattacaaaagaatgtagttctgattctctgtgtgtctgttactcatattcctggaacataatttacccaaaacactctcccaaatttggaaaaaatttgtcttgatccataataatgttctcctatagcctaagatagggtgcaaaaagatagcatttgcatttagctcagggttcaatgacacattcattcacatttaggctcaaaagggtgcaagggattcaatcattcatt

SEQ ID NO: 15934 - DNA, 419 bp, Glycine max
  unsure (1)..(419): unsure at all n locations
cgcttttatcttacattnttatcttcattctttatngcttttcttttatagtcttttatttactactttcctttaccgctttgatttattgctttcactttatagtctttcatttacagtttttaatctttgtctttcattcaaaatcctatcttctcccttcttcttcattctcctataccaagcacttttcgatgttgcttgggaacccatactcaagaagcaaatttcccttcttggcacaaatagtttgattattttggaatcttgtcaagataaggatagtcgtaacttattttggtttactttgaatttttacgagacaanctattttgaaggaaaaattcgagctgattaagcgaagactcagaggatcttgcaacaaanaaagcttatgtgatgggaattgaaatgtgagg

SEQ ID NO: 15935 - DNA, 436 bp, Glycine max
  unsure (1)..(436): unsure at all n locations
agggaataattctacctatattattggaatcactcatgctataganatannggagntatatgaagagttacggttacattaataacttaagtggttaagattgattagattttattttaaagtcaaactttcattatagacttaaaaaactgataatcctaaatgatttgataaatgtgtaatgcacatgttaacttttactattatttttaatttaggcacatcatatgataaaaatttgtattcatgttgtgaataaggtggttagtcctctaataaacaaggttatccttntatcattagtgattaacttttatccctctaatattattactcaaaagtcacatgtgaacatgaatatatatgtcttatgcatcaaaaattgaacttatataagaaagtatgtgtcatgctatctcagaatttatcatacatg

SEQ ID NO: 15936 - DNA, 371 bp, Glycine max
  unsure (1)..(371): unsure at all n locations
agcttggaggggttgatggggacccgtttctgagaggaactagtataagggctacgtangagtgcgtgagctcaatttaaaggtgggcaactggggatggagagtttatgtttgacttgtggaagtgggagagttgatttgcgtcatcgcccgattgccacctagtaccacatatgacgggtgccccataatccaataagcttgatgtgagaatgcattgaagagtcagtcttcctacttttgtttgttgaccacaaagtggtacctggagatatgtcgcgggggtcaagagacattggggacatcaggtggggtgttatagcccaaaaccaatcttgactaatcccgacccaaccctggcatagtcagtc

SEQ ID NO: 15937 - DNA, 378 bp, Glycine max
  unsure (1)..(378): unsure at all n locations
ctgccatggaagcacttgatctgagtgacttcgtttcaaccaaggattgtcagaaggacctatatgagtgccttactgctaagcgcattatcttggcatcaatgagttcagaactccagaggcaacaccaagacatggacccatatgagatcatcgaacatcttaagaagatgtacggtggtcaaagcaagacggctagatttcaggtatctaaggccctgagtagatcctcacttgttgcaaatgaaaaagttagacctcatgttcttaagatgattgatctcatagaacaacttgagaaggtggggtgcactctcgggaaagagctttctcaagacttgagtttgcaatcactttctgagtcantttcataattta

SEQ ID NO: 15938 - DNA, 412 bp, Glycine max
  unsure (1)..(412): unsure at all n locations
agcttatactctattgtggagacccatttttggtttttntttcctacttcttttggttcttgacagttatcattgtttggtacatttggaaatgattatatttatatctcttttcttcttaccggaaacatagtgaaaagaaagtgatacttttgtgattattagtgaaagtaaaatatggaaataggaaattttccataaaccaaatagacctataattttttattttaagaaaaagatgttggcaccttaaagtggacttttctaatatataagactatttgtcaagtaacattagctacagagaagaaaaacttttactttctggtagctctgaacttggtacttcttattcttctttggttttggggtttggaggtgttcacttgtgaaaaatattgtggttttgata

SEQ ID NO: 15939 - DNA, 440 bp, Glycine max
aactacgctataaacatgtggaatataatttttattgcaatatactaacaaaaaaatcttaattaaggactatcttctaattataaatgctgaacttataaaacatataggaaatatatatttgtattcgcgacaaactcacgcaaaaatcttaaggtttataacttaatgtttaacgttggtaataggagttgtttttgtaattaagtcgagtctaggaaaatcacttagttcaagaacatttaagtgtcaagtgagatccgccctcttggtcaaacgctaaggcttttataaggatctattctaattgacctatccgatattttacgctaaggttcatcatatatgatctcatttgttgccccaaattcccaagcgcgtatttcaggtagttacaaccacttagtgaatgaggaataagtagtgtatacaatgggatg

SEQ ID NO: 15940 - DNA, 400 bp, Glycine max
  unsure (1)..(400): unsure at all n locations
caagcttgaaatatttgccccattngtgtaatagaacctgaaaccgncgaacatgtgttcctgttttatccgtgggcacgacccctttggtttggatgtgatttctagtggtgcattgattccaatacagttcaaatcttccaactttggctttggcagaaactcgtggagattcaaagggtatgtccagaaaatgccaaccaagtatctgctcatgtgggaagtatttgttgagctatttggaaaggaagcaatgaatttattcttgaaggaaaacctgtcaatccgttgattntaaggcagggcatatgtgtatatgatgtgaatgaagagggctggaattttcaattttaacacgatatgtatcttaaaaattggggtggtaaaagatgtcatatca

SEQ ID NO: 15941 - DNA, 454 bp, Glycine max
  unsure (1)..(454): unsure at all n locations
actacgctaagctcataagtnaacttatattttatgctcttctacaggaaaacataagcatntacacactatccaaaacaacacaaacgttaggaaaacataaagacatcttaaataacccagtaggtgaaaggaacacgaactttaactagttacttatgtagaaaacacccaagttccacaaaagaccaaattaagagctataaacgaatacctacaaaagctaagtaaagaaaaacaacttcagctaagtagtgaagcataaaagactcaaccttggattccaagaagaaaggaagagaattcaaaaagacatagacaagaaaaataagaagaaaggaaaaaaatttataagatgggtcgaaagttgagatctcttacggaccatatgaaggttgggtgaacactggtttggagatcggngattccccacaagagaggagttaaagaaaga

SEQ ID NO: 15942 - DNA, 362 bp, Glycine max
agcttgctctaaatttacattgatgtttttatttatgggaggaggttatatgccatttttgctttaagagtaacgccagtcccactggtaaaactaactttccaaatgtttgccttcgcaagaatggccccgaggaagcttgcctcaaagaggtccaggaaggacaaggcggccgaaggaactagttccgccccggagtacgacagtcaccgctttaggagcgttgtacaccagcagcgcttcgaagccatcaagggatggtcgtttctccgggagcgacgcgtccagctcagggacgacgagtatactgatttccaggaggaaatagggcgccgacggtgggcaccactggttactcccat

SEQ ID NO: 15943 - DNA, 435 bp, Glycine max
  unsure (1)..(435): unsure at all n locations
tgtagaatggctagacatgatacatgttatggtttggttttggttaaggataaaagggatgccccacactatttccatgacacaaatgcaaaaatgatgactnggaaacttttatgcaaaactggtcatgcatgcacctatgtggacactcaagtgtcaaacttttatggtcatgtgatgctagggctcaggattcatttcctccattnttaaatcaacccaatgtttccaaaatatgttcttttatcaatttgtgcattcctccaagtccatttcgggcatccggngaaatttcacagcattcacccttcaggtgtagacacgtttttnttcaaaaactagctatgatcagcgaacttttcttttaaagaanagttggaaatcatctcttttcaaagcatgtcgatttttagctagacaacttattttctcttt

SEQ ID NO: 15944 - DNA, 408 bp, Glycine max
  unsure (1)..(408): unsure at all n locations
agcttcttgttcttgttacataattagttagtagacgggtctagcttgggggaaaaaactatttaagctcaacgactgtgaagattttatccacagagcaagatgagggaagctgctagtttgtaaccattgaacaatagcagactaaccacttgacttgctcaaccactatatatgtaatgtactattttcagaatctcttcatgttccttcttatttcttccgaatggttaatattgttgaacattggacataaggaaaagaaagtataacatattaaaggcctctcatgatgatgctatgccagccaaaagttctcgagaacctgccaagtgtcctggtacatgttgccttatctcttcaaaagcacacanagtttctgcatccagaccaccagcaaactacaaa

SEQ ID NO: 15945 - DNA, 450 bp, Glycine max
tgtaattttctccccaatcaaaaggcaagctatcaaaatcatatgttccaagaaacttagacaacttcatgctaatatccccgaaatatcttcaactagtttcgcataaggatcaacaagcacaatgctgctatcaaatcgatgccccttaccccgatctcaaggtccatctatgtgatatccatatagaacattgctttgtggaagatcctacacattgaaaattaaagaaaaaaaatacttaaaagctactactaagaccgtgtttagataagctattataggggggagggagagcttcttttagttgatttctgatagaacagggttttgacagagaagaaaataaacaaagtagatgaagtgatagaaatgtgtattatctttaagtttggtggagccatgcccaatcatggggagccacgtggtccttcctcttcacctcaatcg

SEQ ID NO: 15946 - DNA, 408 bp, Glycine max
agcttcattggttgtatgagtaggagatagtgctggagttgaatcatttggagtcaaggcttcttcatctatttcttcaaagtacgagaaaaatcataagtgtcttctttctcctcccaattccatgtgccttcttcatagaactcggcatctcggctcacaattgtctttccattgtttggattatacaatttgtagccttttgaacttgcatcatagccaatgaacgcatgtttctcactccgatcatcaagcttgaatcttccttggtcgggtacatgagcatatgcaatgctcccaaatactctcaagtgatcaactcttggcttcactccactccatgcttcttggggaggttgatctttgacattctttgttggggagcgattggacaaataaacggcacac

SEQ ID NO: 15947 - DNA, 439 bp, Glycine max
  unsure (1)..(439): unsure at all n locations
tcttccttaggtgcattgtctttagtgaggagctacccttcgttagaatcagataggcgtgaatgctatttttgcaaacctaaaaggtactcctcatcaggtattttgattgatatcgagttttattttacatagggcctatgcaactagcttgctgatagagatgttgtaagagttgctcacaacatttgcaaaaaaggattttgggcctagaggcgtggtcagttgggtgttntgggctttattgtcaatctttgtatccaagaaggcccacaagcaaatcgaggatgtcaccatggagaaaggnggaagggacaaaacaacacaagagaaggatgataccctactggggtttatccctagcagagtgcccttgggagtcatattgaantatttttactcatcatattggtaattgctaacatttctagtgatatca

SEQ ID NO: 15948 - DNA, 231 bp, Glycine max
agcttcatataagctgtactcttctattcttaaacacaagctgagttgcattcacaaaattagagcacatctcttttatgttagggagagtgattctcctaagatcttgagtgatccaagaacaccttggctgtatcagaggactgtcacaacctttgcgtgttgccctcgctggaaagagtgatgctttccttactttcgtcacccccgtggtctttcaaaccccaattc

SEQ ID NO: 15949 - DNA, 316 bp, Glycine max
tttcacttctccctatataaccctccgctcccaaactcaaaccctaaccttaaccttcaatcaaaactcaaaacttctcttttctttcattctctctcttttattcttatcatcacaatgccttcaattcccgaagagcccctcctggctccgaacccggatcgcttctgcatgttcccaatccaatacccgcaaatctgggaaatgtacaagaaagccgaagcctcgttctggacggcggaggaggtggacctctcccaagacctccgccactgtgactccctcaccgacggcgagcgccactttgtcacccacg

SEQ ID NO: 15950 - DNA, 384 bp, Glycine max
agcttgtgcattcaatattctgatgagtatgttccatatgttctcaagattggactaatacatttgttgcccacgtttcatgctcttgcaggtgaagatccttataagcatcttaaggagttccatattgtctgttccaccatgaaacccgctgatgtcctggaagatcatatctttctaaaagtttttcctcattctcgggagggagttgccaaagattggttgtactaccatgctcccaggtccatcaccagctaggatgaccataagagggtgttcttggagaaatacctcccagcatctaagaccactaccatcagaaaagacatttcaggcatcaggcaacttattggagagagcttgtatgagtactgtgaaagattc

SEQ ID NO: 15951 - DNA, 345 bp, Glycine max
  unsure (1)..(345): unsure at all n locations
tcaagataaatcagttntttgaatatcattcaaccccggaccatgagcgtctaactatagcttctccaagaggagaaggttctcgatagtcgtcgttctttccgcgacaaacctactccaattccaccttccaccaccttctcgtctcctttaccttcttccgcaacctccttctctcctttgttacctacaccgtcaaaacctcttccttctctacctaccaagagactgtctctggaggagttaaccttgagatgtgagggtggcctttgtttaattatgatgagaagntctatcacgaccacaaatgtgcctttaagggccttcttctgattgagatgatga

SEQ ID NO: 15952 - DNA, 340 bp, Glycine max
agcttggaaggcacaaaggatctgctgttaacaaatcacatataaatcttgttctagtccacatggaaagcagcaacagaatgatccaaccaaggcaaaggcaaagggtagtaataaagaagtgatttcaaagaaaccaatcagaaaaattcaagccaaagtgcagtctcaggaaagtgcaatcaaaaaaactgaaaaggaatctgtgaagcccacttaaagtcaaccaagatgcaaaagcaggcacaggaaacatgaaaaatggcctgatccattagtaacatttctgaatcccaaaatgacatggagctagaaatccaaaatgaacttgatcagaatg

SEQ ID NO: 15953 - DNA, 459 bp, Glycine max
  unsure (1)..(459): unsure at all n locations
tcttcttcaccacacaaccacaaccacaacctacactcttcaccacacttgccattactcttacctcttcctatctttgagcctgaaatggcggaagaagaacatcctagaaggacacttggagactatattgcacatgttgtgcaaaggcacttcatattggaatgtgttattttggctattaaaggttgtagtgtcaatctataattaggattgctcccttcaattggtcttaacacatctctcaatttcatgtaaaaaaagttaatggaccggattgggtaatgctcaccactacttactaatatattcacacaaaaaaaccactacttattaatatttgaaagtgtttaactatacattttcattcaatattgttacttttatgtacactaattagattaagtaaaaaaaaaaatacactaattagaaatatttattatcattngattatacatt

SEQ ID NO: 15954 - DNA, 351 bp, Glycine max
cgaccttaggcatgcacgcttttctgctagagagtttctcacttcttcagagtaccttatttgtgttggaagaacaatcacctatatacaaataacaacttattatagagttctagataaatcttgctcacaagttaattacaagtcacatagatatacaaggtggaaaaaactttgtaacaataaataatgttaacatctataataacaatcgtttcaatatcacgttatatatattaactaatattaatttaccagcccctgattggtttcagcaagaacaccagctccaccagaagcatagtgaaaccgttgcttcatcaacatttggttgtaaaaacggaggaattt

SEQ ID NO: 15955 - DNA, 417 bp, Glycine max
  unsure (1)..(417): unsure at all n locations
ctacatgaagttgtctcggtaaaaatgttgcccaaccatcgttaatcattgcatcttctcgaaatagggtctggagcttcacagaacacttgtacatgatctaaccatngggatctttgagaagacgtctgcagtgtgcacaacatttccgtttctgagagcattagtcacttgtgctttttgagccttgtagttcaagtagctntggaaaaacgccatttccttctccttctttcttccaaaaccatttccaatgtgccaagcttcttctccatcacccacagccaccagtagccaccacaaattgcccattttctccgttggaaccccacaccgagaggaacccttcaaccgaagcagaatcttccaacttgcctcacagtttcagttgaggacgaaacccggtctaaccttcat

SEQ ID NO: 15956 - DNA, 279 bp, Glycine max
agcttctagccaaaggacttaccttgtttaattcctttttagcccttttgagccttgtttccctttccttgttttgaagatcactacaagccttaagtgaaaaaccatgatattaccatatccttaaggaattttggagctttggaattgttttgggaataagtgtggggggtttttgtttcattggacaacttgttttgttggcaatgcttcatgatgtattttgggccatacttgatgtacattgtatattggttaaatgtcggacatgctgaatga

SEQ ID NO: 15957 - DNA, 390 bp, Glycine max
  unsure (1)..(390): unsure at all n locations
accacagcaacacataatctaggtgtccaaaacctttattttaatggatntttatgctngagaaagtgaaattagaatgaggtaaatntgaagcanactctcacctcacacaagtccataacatcaatctaaacttgctcaaactggatttacacctaaaattccaccgaatcaaaatttgactcctcaacacccaattttgccctagaaatggctcttggttcactttggtcatttgtttttctccctagcacagtccaagatttcttataagtcctaaatgacatttcaagctagaattaactcactntaacctccatttaccacaaaatccagaattaaccttccaactctcaaagcctcactctttttccactcattacaccacat

SEQ ID NO: 15958 - DNA, 323 bp, Glycine max
agcttgaagacaagactatacgaggtatcttccttgggtattgcattatctctaagggctaccgtgtctacaacttgcaaactgagaaactcgtcatcaattgagatgttgaaattgatgagtacgcttcttggaattgggatgaagaaaaagcggagaagaacattcttatacccgctcaactacctcaagaagaagctgaggaagataacccaggtgaaccacctttacctccaccacaacaacaagattaagatctatcatcaccagagtctactccaagacaagtaagatctttggtggacatatatgaaacctgtaac

SEQ ID NO: 15959 - DNA, 437 bp, Glycine max
  unsure (1)..(437): unsure at all n locations
attccactctcttgattngttggaaggatggtttttagaaagaatatagagcaaaataaggcttctattttcttaatcaaacgttggtgtatgttgccaatgttgtgtgcttatttatagtttctctgttagcttgtaaagcacgcaacaataagatgtgatataagatttgtttttttaaaaagacatttgccgttatataaggataaattatggcttaaaaaaagatacttattttctttcaaaaaaaaattatttctgaaatttaatattttgaagataatttgaatttacttatgaaaatattagttntgagtttcaatttataaaattatttctagtgtgtgaagttactttttggttggattaaaaattttaaaatttacggaatctggaatgtctagaaattaacttgtttagaatttagattcttttat

SEQ ID NO: 15960 - DNA, 412 bp, Glycine max
  unsure (1)..(412): unsure at all n locations
agcttccgttcccgagagcatctctaataatgcattgcattcttngctttcttggagcttaagaaaaatgtcatttcttcttctttctttcttccaaatccatttctaaagttccaagtactttctccatcacccacatccaccattagccaccacaaaccatcattgttctccattgaaaacccacatcgagaggaacccttcaaccgaagcagaatttccaacttggcttgcggtttcggtagagaacgaaaaccctaatctgatctttcgttttctttcgaggtaaccatggttctatgcttgtttcttggtagtttcatcttctctttgcatcttttctaactttgcaaccgtcattgcatgtcttatgcttcctttgaaaaagcctatagaaagagactttgtaaac

SEQ ID NO: 15961 - DNA, 500 bp, Glycine max
  unsure (1)..(500): unsure at all n locations
ggggagacgaatgagacatgatgatagcattgataacttgaaattggaagctcgcgaangcccccanagagcccngcgagttattgagacttattttctttttaaacgcgagcatagcaaaaacactctgttcatacatcaggtatgctccgagtggaacatcacaaagaagagatctattgaataccgcattcaaattcatgcccgacatatatttcctatctattcctctagagaagagcacctgtaactgtgctaccccccctcttttacacttnacctcacccgaacagctgactaagtaaacttcctgccaagaactatgtattttactttatctgatatcacctggatcacgaaacaaaagaaagaaatatgatcgggaataacacggtgaaactggagaggaaaggtcatccctatagtaaatacataaggggaaaactataaagcatgggcctcgatngctgtcgctttggatattcaaccctaaagccgcg

SEQ ID NO: 15962 - DNA, 307 bp, Glycine max
  unsure (1)..(307): unsure at all n locations
agcttcatgctgcttaatngctccaagtagctgcatggaagggcaaacgtctgtatggtggtcagcagatgagcacaaaccacaaacccttgcgacaggtacagatttctgattcaaggccagctgggttaccaagttaaccaatgcatgcagttttccttcaagcttcttagtttcagatgatgcagatgggtttgtagctacctcatgcactcctctaatgactatggcatcatttctggcgctaaactgctgggagtcggaggccatcttctcaattaaatttctggcttcagcaggagtcatg

SEQ ID NO: 15963 - DNA, 355 bp, Glycine max
ccctttatatatatagataccgtttcagctcgcatggtactttgaataactctatttcatcaaacataatcaccaaagagacattcctataacgcagacagaaagtacatgtggcataaaacctcagaatctgagctaaatgaatggcaattatattatagatgaatcctctgcaattgacactgattcactgaacaagagacttaccttcatccctcttcacactatccaatgtccacaagccccatggttggcccaatccctcccatagccacagtttcagtgaaatggtgattgcgatggacattccctcccatagcgaaacacgtacgcatcttcaggacatggttggtgg

SEQ ID NO: 15964 - DNA, 207 bp, Glycine max
agcttgcactgtgctacgagattctcctataccagatttctaagctccatgcatgtcgcgagctcactaatgttaaaatggaagcgttcgcgaagaattgcaaggattgttaaaggtcttctgctaatcgtgcacattcaggtcaagcctttctctagaccctgtatttaattgataataaactataaaagtcatagtcttgaaatc

SEQ ID NO: 15965 - DNA, 431 bp, Glycine max
  unsure (1)..(431): unsure at all n locations
gtataatgatcccctatcaatgatatattaacattatttatagttttgcagctatntntgaagaataaatggtatatgtacgaacaataattntttttatatgttgttatttaatcagaaatgattatacataataaatttattaatatttataataattaaataaaaagttatattaatattttttttattaatgctatatatgtaaatattgacactaataatacatgtatattaaactcattttgaaatcttgaacgcttactcattctagttataatgtcacactgaatgtttggagtaacaagaggtgaaatccaagacaaaagttttatgaaagggaggaaatttaggtatagagacctatattttagaatatgatcaatagtaattcctaaattattggtattgaatttatcaagtctttttta

SEQ ID NO: 15966 - DNA, 246 bp, Glycine max
  unsure (1)..(246): unsure at all n locations
agctcgtagaatggttagacatgatacttgtcacggtttggntcggctcaaggataaaagggatgccccacattatttccatgacacaaatgcaaaaatgatgatttggaaattttatgcaaaactggtcatgcatgcacctatgtggacactcaagtgtcaaatatttatggtcatgtgatgctagggctcaggattcatttcctctattttagtcaacccaatggttccaaaaatatgttcttt

SEQ ID NO: 15967 - DNA, 445 bp, Glycine max
  unsure (1)..(445): unsure at all n locations
actcagcttgagccttatcctaacacaccattttcttgaccttggatgagaatatccatcctcgcccttggaagaaaacangaaaagaaaaagaaagctcctgatcaaagatcggaagaaaacaaaaaagaaaaaagttcccgatcaaagatcggaagataacaaaagaaaaaaaagttcccggtcaaagttcagaagaaaacaaagtgaaaaagaaaatccctgatcaaagatcggaagacaatgaaagaattatgtagaagggtcttcggaccagacaaatatccaaacaatacaaaatagccataaccaaataaggaaataaaggaaaccacgacttgaagtagtcctctccctttggttaccaaccaaaatcctatgcgctaatgactntcttgccccgcactaaacaaaaacagaaaagggataggccaaacacttagag

SEQ ID NO: 15968 - DNA, 395 bp, Glycine max
agcttctaccaagtaccttcaacaagtttgattttattatgacataactaacagcatgcaagatcttgtatgtataaaacctcgattatgatgtgattttcaactttgttctttcatgagagaaaataacatggcaaacttgttacttctgtgaagtggtatgaaacattctattcttgtctcatagaagcaaagtggagcaaaacgggacaaacaccatcattagataactacctcaaatatggcatgatctccattgctgttcatacattggtgcttccagcctcatggtttcttaaacatagcttatcaaatcagaaactgagaccagcccaatagaaagccattaccaatctacgtatgggtatttgtagtaacatattaatgaacttgac

SEQ ID NO: 15969 - DNA, 403 bp, Glycine max
  unsure (1)..(403): unsure at all n locations
tctaatcacgcctttggtgctggcttctgcttctacatctgttcntttggnncaaanntttaaaaaaaatcacgttgagaattgtgattgcatgagaattcgggtttaagaatctgaattctcaacgtttttgttgcatattattctcaaaattacagtgtaaattcggattcttctaatctgaatttacactatcaataataaaattatatgtttgtgtaaataataggggatatgtatatttgtataaatattttttttatgtttctgaacaaatttctcatttaatctgttcccagtcacataaaccaaagtattctctatccatcgtcaagcaactgagcaagccacatatagggtagtacctattatttttattttaagattatatttaaaaaacgac

SEQ ID NO: 15970 - DNA, 413 bp, Glycine max
agctcgtagactcctatacgaccgactctgccgtgtttctggctaggcccggattcaaggcgggctgcagccccggctccgcttccctaactgtactggaggcggttgccgcggctttatcctctatggttttctggagttttaacatgacctccgagatggaagccatttgatcttttaaggccgatagatcggccttcatctgttcctgcacgccctcttcattatccatttttctggatcgagtgttataggggtgccttggtgttttcttagttatgatgaaattcctaaagaaataaacaacggtgagtatgccaccaaaacatgagtatgcaaatggatgatcggagcactcggatccaccccaaggtttttagataacgtaatgagtccagaacttctcattttat

SEQ ID NO: 15971 - DNA, 249 bp, Glycine max
agcttaactacacacacccctctcataactatgctcaccaccctgagaaactttcttaagaagattcctaaagaagctagagcttagctacacacacatctgtaatagctaagctcacctcgttgagatgagaagctagagcttagctacacaccccctataatagctaagctcacccccatgaccgaatacatgaagattcagaaaattccctactacatagactacttcaaataccgttaaatacaa

SEQ ID NO: 15972 - DNA, 340 bp, Glycine max
  unsure (1)..(340): unsure at all n locations
gattcttaagtcacctgcggcatcaagtcttgatggactttcttattatgtctccattgactacttcaccaaatgggtcaaagcggcttcgtatgccagtgtgactaggagtgtggtggttaggttcatcaacaaagagataatttgtctgtataggttgcccangaagattatcaccgataatgcaaccaatctgaacaataagatgatgaaggaaatgtgtgaggatttcaagatccaacaccataattctacgccttacaagcccaagatgaatggggcagttgagactgctaataagaatatcaagaagatagttcacaagatgatcgtgtcatac

SEQ ID NO: 15973 - DNA, 388 bp, Glycine max
tcttagtttcagatgatgcttatggagccatcttctctatttaatttttggcttcagcaggagtcatgtctccaagggctccaccactagcagcatctatcatacttctctccatattactgagtccttcataaaaatattggagaagaagttgttctgaaatctgatggtgggggcaactggcacatagtttcttaaatctctcccgagactcatacaggctctctccactgagttgtctaatacctgagatatccttcctgatggctgtggtcctggaagcagggaaaaatttctctaagaatactctcttaaggtcatcccagctcgtgatggaccttggagcaaggtaatacaaccagtcctttgccactccctctaatgaatg

SEQ ID NO: 15974 - DNA, 403 bp, Glycine max
  unsure (1)..(403): unsure at all n locations
gattcctaagtcacctgcggcagcaagcttgtaattttgttatcaagcatcctctaaaggaggaggggagagagttacttgtcgagccaaaacaaggtacatttcattcttttagctntgaatatatatccccaaactatgaagataaaataaatgaaataaagattatacatgagaattatgctcacgtgctttaccctgtcaaatangtttatacaaacttagaaggcaaccgtgcaaacttagttcagacttcatgggctttgttgtcccttattgatgcaggacaggttaataataaagctctatgttttgaatttttaccatatcataaatttaaacctcctaactccttaagccctatggaaaaaccctgcanagtgcaatggtcctctaattagta

SEQ ID NO: 15975 - DNA, 378 bp, Glycine max
  unsure (1)..(378): unsure at all n locations
cacaaacagctcaggagacctctggagattttgaagaggcaagtgagaaagatgctacaaagactgcagtaacagatggaactgtccatcctctaacaagctatgtaattaactatgtgaagtttttatttggtaagttcagctatgttgtcatctgatcccaattttgtagccgcatcaattatttctagcattttttgctgtgttcactgatgacaaaaatgttagacattattgctattgttatattgttttttaaaatttattttacagttctgcgggtttctgctcatggactttttaatgcatttcttattaaatatgcagagagattggcatgctatgccacatanatcaatctctagtttctacgtgttc

SEQ ID NO: 15976 - DNA, 400 bp, Glycine max
  unsure (1)..(400): unsure at all n locations
gcaagcttgccaatccactggggtcgatgctttctgaatatccttttgcaccatgcatctaggagacacattnttcctaccataccctctcaccagctcctgagcaagtaatatgttatcctggatattcctaccaggaataaaagctgattgagtgtcttccaccacactatttatcacatcactcagtctgctagtcaaaatcttcgatatcaccttataaattgtgctacaacatgatattggtctcatgtctttgatggtttttgcctccggggacttagggataagtgagacaatagagcagttgacaactttgtacaacttactagaattaaaaaattccaggatagtattctgcacatcatttttacaataggccaggcggctntgaaaaatg

SEQ ID NO: 15977 - DNA, 420 bp, Glycine max
  unsure (1)..(420): unsure at all n locations
agagactgatggngacccggtgttgagaggaacgttgataagggctacgtgggagtacgtgagctcagtgaaggtgggcaactggggatggtgggtttatgtgtgatctgtggatgtggagagttgacttgcaccatcgcccgaccgccacctagtaccacatgtgatgggtaccccataatcctacaagcttgaaatgaggaagtgtggaagggtgagacttcctacttttattcgttgaccacagagtggtacctagagatatgtcgcgggggtcaggagaccttggggacgtcaggtggggtgctattgcccaaaaccaagcttgaccaatcctgacccaacccgggcatagtcagtcagtgagaacctgtgatgtacctaaacaggcgagctcctggcagtcaaccgataaaagaa

SEQ ID NO: 15978 - DNA, 340 bp, Glycine max
  unsure (1)..(340): unsure at all n locations
acgcttgacactaattctgtccaactgtttaaccatngtttgctcatctatttttaagagcacgtaagcacccgtgcacaagtgcaacaagagatgtaactactttattgtccacaaattaattagtcagtgtttcaaactgattccttcatttgctcattgcaggatggggagcctccaccattttccttgaaggattttcttaaaagtcaatgaaaagcagttaaatatctactgggatgttggggaatgaatcatgcgtacattgtgccttttttgccacataagggatnggtgcatgcatgatttgatcagtagtgtaaagttgtcttcatatact

SEQ ID NO: 15979 - DNA, 430 bp, Glycine max
acatttctgacaacaaggtgatcttgacggaaggtattgatggtgttgttcctccgaagtattttgaaaggatagaatcatggccgagcagacagcccatttctttttaaagttattttacaattttgcttttaggatcacaatacgttgaggattatttaaataaaataatatgaaaaagatataatatattttaaataataaaacatttcaaaaatatataacatattaaataaaaacataaaaaatatacaacatattaaataaaattgataataagtaaaattaaaattatttatttaataattaattaaataaatatttttagcaatttaaaaaaaattgaaaacaaaacaaaacaaaataaaaaatgtctaaaaaattcttaatattataaaataatatataatatcataaaataaaataaaaa

SEQ ID NO: 15980 - DNA, 402 bp, Glycine max
  unsure (1)..(402): unsure at all n locations
gctagctttaacctcatcgtctctcacagtttttatatntgggatccaatccatcctttgtgttcggactctcagccacttatgatatccgccgatgatcccattactgcttccgctaagctctctgtcctttcttcacgccgcatcccatgccttgcgaactccttggagtaccctcgcgttgtggtcaccgaaaccccgtgcgatgaaaggcgtgatgctttcgtctgatggcactcctctcatggggtagccaagttgtcttatggcgaggacgggattataattaatacaacctcttgttccatcaagggaacatttggacattcttcgcatgaagatagaatcctgatgcttgcttccttctaacgagggaacaaattaacagacgctcctccatgc

SEQ ID NO: 15981 - DNA, 392 bp, Glycine max
  unsure (1)..(392): unsure at all n locations
agagagaatgattattattcacacaaaatggaagtactaagtatttattacctatacttaacaaaaaatacttataacactagaaaataaccataaatnggaagagtntgatacaatttacacaagttttatacacaaaagttagttgtattcactgactaacaattcccccaaatttacagttttgcttgtcctcaagcaaaaagagaacatttcacttgtcctcaagtgacaacaacatgcaatgactatgtacaaaggtgtatgcaacaaaagttactgattgcatgataagagaatgaagtaaaatgccctcatcacttgtctttcacaaggtatgcagttatccaaagagaagaataaaatgtaacctgaacaattagatggagtta

SEQ ID NO: 15982 - DNA, 413 bp, Glycine max
cgcttatgagaataatttaggagtactataaattctttttagcttggtaaataagcagcttattgtagtttattaaaataaactatttttagcttattccaaagggtttcatgctttaaatatattatatatggcataaattctcatgtaataagttattccaaattcttcctaatttaatttaccatttaaactaaatatagtacttggttgtttccttgttatcctttcaatgaacaacattttgacttcatgtgttggatgagcctgtgtgatgaagtggtcatgtcatgtcatgtgtatatatgaaaaatgatagttttaagaaaaggaaacataataaaatgttcttggaatgttgttccatcatataaaacacacagatttcacaactctgcttggggcaaatttta

SEQ ID NO: 15983 - DNA, 416 bp, Glycine max
  unsure (1)..(416): unsure at all n locations
ctcactcttgtgcctgcgcgtcatctctctgtaagctggtgaagattctttngnngtttgaatggtctcgatgagttgtaaagacatctgtttgaactctaacgagtcgtataggtcactgccattgtactcaatgttgagtctccttgtgggagtcactgcttcctctttctctagattttccatgaaagaggaagaatgggttaagtaaatttacacggccaccaacctcttccaaaacattcacacctaactgcactttaattgttcactgtgttttttgattaaaaactcacaatgtgcactgttcatgagaggtgggagttagttgccttaccttgatagtacgtantcaaaatacgttattagcaaggtgattgcattgctttctacgtttttctcatgcccttgattta

SEQ ID NO: 15984 - DNA, 291 bp, Glycine max
ggatctttgagtttcattaagatctttcaatagattctttcaggcatggagttgaagcagaagataaaggagaagaagtgagaggaagcgccatccactagataataagccatggagagcgatccgtcactcatctgagagagccttgaataataaacttagagagaaagctgtagaggaggaagatgttggaccagcggcctcaataacttaagaggaatagtctcaaaatacagaagaagcaacaatcaatttaataacattctttaaacatgcacaacatgaatgatt

SEQ ID NO: 15985 - DNA, 396 bp, Glycine max
  unsure (1)..(396): unsure at all n locations
cctgcgaaggcaaacatttggaattttagntntaccattgggacgttactctttaaagcaaaaatggcatataacctccttccataaatacaaacatcaatgtaaatttagaagtaagctatgcgcatactttcttacaaatgttctcttgcacaagacattctattaaccgaaaaaatgcacccatatacaatcaaggcagctccgttacctagattatttacacgtacttctaaggtgtatttgttacttacatcacacacatctccttggctaaattcacatacatgcatacccaaagcattttggggtaccaaaaattgcacatgtacacctctttgtatttctaatacctatacatacacaaaccttatgatgaatcttgactatctacac

SEQ ID NO: 15986 - DNA, 375 bp, Glycine max
  unsure (1)..(375): unsure at all n locations
agctngatttgtgttttgattttagccttattttcactttggttattagtcaattgatccaaggaaacttccaaagaaaaacgtccgattgatttttntgattattttattcaaagatattttgattattttattattatttttcaagatattttgattattttatcattattttgcttttttttggtttaatcgagattacagcgtgaatgatcggttagattttgttttaacagtgattaaacgagattacaacgcaaatgatcggttgaaattcattttatcatttattaggtgagaatgacttaaataaatgtctaaaacacgtcaaaaggcggtacganaagtaaatgaaatgaaaataaaagtagacga

SEQ ID NO: 15987 - DNA, 445 bp, Glycine max
tgtggaagaatgtggaaacctctgatatatttggagttgtgtggaaccttctggaaccttatggaagagtatggaagggagtaaaagagtgtagagactcctagaatgtgtggagcattctagagaattaatatccaccctaggatacaagtaatctccatcattcattgtggaggtggagtaatataaataagggtaggagtcttcattcctaaccatccaagacaaagagtgaattcacttcttagagtaagaaaaagcctctttgatagagaagataaatagcttggaaagtctctatcctcaagcttgagtgagccaccatagagtgagtcaattttgtaaacacatccttgtaaccctactatcattttgtatagtggaagaatctccatatttgagaaatataatcgtgtgctcccattactacctttaattactaagt

SEQ ID NO: 15988 - DNA, 368 bp, Glycine max
  unsure (1)..(368): unsure at all n locations
agctngaagtgagtaagtgtggaagagtttgtcttcctacttntattcgtcgaccacagagtggcacctggagatatgtcgcgggggtcaggagaccttggggacgtcaggtggggtgctatttcccaaaaccaagcttgaccagtcccgacccaacccgggcatagtcagtcagtgagaacctgtgacgtacctaaacaggcgagctcctggcagtcaaccaataaaagaataaagaccacaaagcacggaggcttgtgtggtggctggctagctatggatcttgagtgatatctggaatatggcctttggtatcgattaccagggtatgaatcgattacaggcttaaaaatgaaacaggaattaag

SEQ ID NO: 15989 - DNA, 385 bp, Glycine max
  unsure (1)..(385): unsure at all n locations
caagttttcaatatcaaatngaaatggatagctgatcgtgaaaaagatggttgtgtatacaatatcccaaatgttcctgaagttgttgcacttattgttggtgattttgacccaagctcaaaaagagatattattgttgaaactcaaaatggacaactacaaagaatccatgaattacactctagctatctggctctatagtaccctctactctttccttatggtaaagatggatatagaactaacatacttcaccactctaaatcatcatgcaaaaaaaggaagagaaatcgtctgacaacgagacagtggttcgcttatatgcttcagtccaggccaaatgaagcacaaactttattgctttctatgaaactatttcaacaac

SEQ ID NO: 15990 - DNA, 397 bp, Glycine max
  unsure (1)..(397): unsure at all n locations
agctttgcagattttgtcttcgccagtttaaggatcaatgtgggtccgaaaagaggcaaatttgatcatcctactangacgactgagaaaactggggcaaataaagagggtgaggatgagggagaaacccatgctgtgactgccattcctgtacggccaaatttcccaccaacccaacaatatctttactcagccaataacaaactttctccttacccaccacccagttatccacaaaggccatccctaaatctaccacaaagtctgtctaccgcactttcaatgacgaacaccacctttagcacaaaccaaaaacaccaaccaagaagagaattttgcagcgagaaagcctgtataattcaccccaattccagagtctatgctgacttgctcccat

SEQ ID NO: 15991 - DNA, 310 bp, Glycine max
ctaacctctagcttctcaaggaagttgtctcatagaagcttctcaacgaagttttctcacgaaagcttctcaaggaagctacctagtctataaatagaagcatgtgtaacacttgttgtaactttgatgaatgaaagtcttatgagatacacttcagagttccacttctttccctcttttattccttcaatttcgtgctcctcccttctctctttcttttcctccattaaagcatcctcttcaagcttcttatccaaggcaattcttggtggtgaagctccttcttccttggcttattccctagtggatg

SEQ ID NO: 15992 - DNA, 348 bp, Glycine max
  unsure (1)..(348): unsure at all n locations
gcaggcatgcaagctntgagcaaattcaaacgacaatatttttgtacatgtatgagcggangagacccgtattatattgagacgctcgaaattgaatgttgaagctttgagcaaatacatacgacaataaccttttactcggatgtctgattgagttccgtaatatatcgagacgctcaaaattgaatgttgaacctctgatccaatacaaaggacaataagcttttactcggatgtctgattgagtcccgtaatatatcgagacgctcgaaattgaatgttgaacctatgagccaattcaaacgacaataactttttactctgaagaatgattgagtccctaatttt

SEQ ID NO: 15993 - DNA, 422 bp, Glycine max
agctttgagccaaatatctgactcaccttttaccttgacctagggtgagaatgtcaatccttaccctcgggagcaaaaaagaaaagaaggaaaatttccaatcaaagaggaagcaaaaaaaaaggagagaaggaaaatttccaatcaaaggaacggaaattccctatcaaagagtgggagaaagcaaaaagaaaagaaagaaaattcccaatcaaagaatgggagaaagaaaaaaaaagaagtaaaaaagaagaaagcttaaggatcgaaagaaaatagaagaaatgtgcagaaaggtcgttggaccaaacaatatctgaacaatacaaaattgtcaccaaatgaacaaaagaaagaaaaggaaaccacgacctataatggtcttccccctttaatagccaaccaaaatcttgtgcgctagc

SEQ ID NO: 15994 - DNA, 377 bp, Glycine max
gcttgttgcattagttttcaccgatgaatggatcaaagttggtctgaatagaggcaaatttaatcatcttgcttgaagagggtgagaatgaaggagaaacccatgctgcgactgccgttcctacatggccaagtttcccaccaacccaacaatgccattactcagccaataacaacccttctccttacccagcacccagttatccataaaggccatccttaaatcaaccacaaaacccacctaccacacaaccaatgcccaaacaccacccttagcgaaaaccaaaaaggagatttgcagcaaaaagcctgtaggattcaccccaaattccggtgtcatatcctaacttgatcccatatctacttgataatgcaatg

SEQ ID NO: 15995 - DNA, 163 bp, Glycine max
cattataaacccgttgtttggatatgacaattcaatctcctccatacgcgaaattctcatagaatacttcaaatacatgaatatctaatgttacactttatagaaaataaacgcaatctaatcctgaaatattaatgatgaggacgtgtctgcctttcataat

SEQ ID NO: 15996 - DNA, 305 bp, Glycine max
agtgaaacctatctcaacggtcttcttgttatctctatgagggctttctaggagcatcaaagatcaagttgaagcaatcaagataaaacagcttgtgcaaatccttgagtgtgaaatctacaattttcggcttctaccatctctgtgagagtgatccacttctgtattgcgcttgtcatttgtaataaacattatatataagtgatagactatattcctaagtggaatcactctgcgaggagaaagattgtgttcgtacattcaaaaactcagatacctctttatattggtagctagcaatggct

SEQ ID NO: 15997 - DNA, 306 bp, Glycine max
  unsure (1)..(306): unsure at all n locations
agcttctcaaggaggtgagcttagtttttataaggtgtgtgtagctaagctttagcttctcaaggaagtttctcaaggaagcttttcaaggaagcttctcaaggaagcttttcaaggaaacttctcaaggaagcttttcaaggaagctacctangctataaatagaagcatgtgtaacacttattgtaactttgatgaatgagagtcttgtgagacacagctcaaagntcaacttctctcccccttttcctccttcaatctcgtgctcccccctctctctttcttttcctccattgaagcatcatc

SEQ ID NO: 15998 - DNA, 364 bp, Glycine max
actagtgagcttccaattatatgacatgtaccacttgtaattttcctatctaatttgcatcttccaaaatcagagtctgaaaaaccttttaagtttaaggaagttcctttggaataccacaaacctacattggttgtgcccttaagatacttaatgatcctcttaacagtagttaagtgagattcctttggattggactgatatattgcacataatcaaacacttagcatgatatccggtctacttgcagttaggtagagaagtgatccaatcatacctatgtatcttgattcatccactgatttacctttctcatctaagtcaaggtaggttaatgttgtaacgcctttaaattcaataactg

SEQ ID NO: 15999 - DNA, 340 bp, Glycine max
  unsure (1)..(340): unsure at all n locations
agcttgtgtttgaattanggatttcaatattttaaagaatttgaaatgtctataatttgaattgctttgattntaattttcttcatttttcaaatgttttgtttggataaattaattcaaatttcttccattttaaattctttgtttggataggacaattcaatttcctccatatgcaaaattttaattttatattttaaatagatgaaattttaatattaaactttatagaaaataaacacaatctaattttgaaatattaattaaaaaaaattttcaatttttcataatttataaatacaaaatattgataattntaactagggttgttttgtctgac

SEQ ID NO: 16000 - DNA, 397 bp, Glycine max
  unsure (1)..(397): unsure at all n locations
cttctatggaggctggatcttgagcttaatgaggttctttaatggtgattttccaccatggagatgcagcggaagacaaatgagaagaggtgagaggaggcgctatccactatggaataagccatggaagaaagagcttcaccaccaagatgagccttggataagaagcttgaaaggatgcttcaatgcaagaaaagaaagagggagagaaagagagaggggggagcatgaaattgaaggaataaaagagggagagaagtggaactttgaagtatgtctcacaagactctcattcatcanagttacaacaagtgttacacatgcttctatttatagactangtagcttccttgagaagctntcttgagaaaacttccttgagaagcttctttgagaa

SEQ ID NO: 16001 - DNA, 376 bp, Glycine max
  unsure (1)..(376): unsure at all n locations
agcttcagacaacgtgtagaatcgnctcgacaactatgtaattgatcaaaacatagagtttttgcctttgaagaaatttttctaacttagaaacttttcttcatactaaccatgataacaaccaattcaaatgccactcaaaggagttgggcatgtaaaagccaaaacttgttcaagcttttccttgagcttcaagacataaccttaagtttgaccatgttgctccccctatctctaatagatttaattgttatagtataggtgagataaactgcgaaattgatgaatgaatcatggtccggaatcatggtgattctctactgatagaatcatcgacatatatatatatagatatatagatgcatatgtatatata

SEQ ID NO: 16002 - DNA, 419 bp, Glycine max
  unsure (1)..(419): unsure at all n locations
catgatntgaagcactcattatttcattccttgcatttttagctctctgagtaaatgcttgtaaattctataagagccctcaaaacactttgttcttcttgagagaaaaaactaagtgttgaatatgtttatctgtcaccaagacgatatagtgttagtcattgtgcaatcaaaccaacaagtcttctgatttgtgttagagccaacaatggttatggtggataaaaaatactggttttaacaagctttgtgtaatgcttgatttaagtagcaagaactggcagcgataaatacttgtaactcgcgaaaattcctggaacttggtggtttgcgaaaaactacacatagtcttagtggttgaaacaaaccagtagtaaatctttgcatctcattctattgattctttgttattcaactaa

SEQ ID NO: 16003 - DNA, 406 bp, Glycine max
agctttttaactcttctccaaatagtcattcattaaatttcctacaaaattttaacaaacaacccaagattgattaagcgtaagaggtagaaaattctaaacaaactaagcttttattcaaaacttaagaggaacacaagcaaagctcgaaatcataagagatacctaattgccccaaaataactacaaagtgtaggaatataagacaattatcatgtacctttgaagacaacgagagagagagagagaagaaacatttgatatatctcgtaaaaatgtcacgtatgtcaaatattaatagaaaattactaaattatttataaagaatggaaataaaataataaaacttcaaaaacgtaggaggaagacatagaaaaaaaaaacaaaacttaaataaagaaaaaat

SEQ ID NO: 16004 - DNA, 330 bp, Glycine max
ctttactttatcaaatgtctcccctttttctgaaacaatattaattgtttttatacttcttgggaagaccagttggctaataagttgggactgcagccgtgacaagtgtttctgtggttatacaacctcatggctcgagaagaaccatgtgagcctcatatatactttatctcatgatttatgaaaactatatccgtccactatctcatgaggcgctttagtttagccttatttaaattggcacattcatctgactaatggtgatgaccttaccgcacttgcctgctgcgccattaataaacaagtttacaacgtgccattataacaata

SEQ ID NO: 16005 - DNA, 438 bp, Glycine max
  unsure (1)..(438): unsure at all n locations
cgacctgtcggcatgcacgctgtgcctttagggcttgtaccttattatctttcttccgtatctntaacctcatcgnctctcacagtctttagatttgggagccaatccaatccttgtgttcggactctcagccacttatgatagccgccgatgatcccattactgcttcccctaagctctctgtcctttcttcacgccgcatcccatgccttgcgaactcctttgagtaccctcgcgttgtggtcaccgaaaccccgtgcgatgaaaggcgtgatgctttcgtctgatggcactcctctcatggggtagccaagctgtcttatggcgaggacgagattataattaatacaaccccttgttccatcaaaggaacatttggacatcctctcatgaagatagaatcctgattcttcctttcttcagcgagggacaaattaa

SEQ ID NO: 16006 - DNA, 387 bp, Glycine max
cagagaccaacatgttttctatcatcgtttagtaccaataagagctgggtctagccacggcccacgagtatagaatcgcggatgagtatgcccaagtatatgcggaaaaagaggctagaggaagggtgatcgactctttacaccaagaggcaaccatgtggatggatcggtttgctcttaccttgaacgggagtcaagaacttccccgattgttagccaaggccaaggcgatggcagacacctactccgcccccgaagagattcatgggcttctcggctattgtcagcatatgatagacttaatggcccacataattagaaatcgttaggaaacttgtatggtctctcagaccttgactagatacgacttcctttttgaataaaatg

SEQ ID NO: 16007 - DNA, 428 bp, Glycine max
  unsure (1)..(428): unsure at all n locations
atgcagcttaagataaagccctcactaagtggttttncgttttcgactcgcgaccatcatcgtgaacaggaagaacggttgcctggtcgtctgctagtttgagtcactcatgcacaaattcattttgattttaattctttttttctttttcggcctccccaatatttttggtggagtagtccaaaaaaatgtcaatttttttctttattttttttgtgataaaaaattaatgttgaaagagagagagaaaaaagaaagcactctgcccatgtggatgtgaagtgtgggctttctagtcagccttattatttgtataattgatcttccatatatcagtcattaattcccctaccttcaaaatctgctaagtatcacattaatgaaaacgtttatntatactgttacttatttatttctcctatcatatg

SEQ ID NO: 16008 - DNA, 438 bp, Glycine max
  unsure (1)..(438): unsure at all n locations
tgctggttctttattttgcgctagnattacgtcgttcgaatgcttaatataatactatgctgaggaagggtgaattctttaccaggtcaccaaccatactattcaagagtttgtacctagggcaatgccccaaaaaaaaaaactttggttaaattactcatttggtacttataatttcacgatttttatctttttagtccctatagtttgaaaatgaattttttagtttttataatttacattttaattattttttagttcttgtagtttgaaagtgatttttttagttcttataatttatatatatatatatatatatatatatatatatatcattttattctttttttttagtctctatcgcttgaaagagatttttttaggatttatatattaatattcttttgggccttatcatcaaaatatgattaatattat

SEQ ID NO: 16009 - DNA, 257 bp, Glycine max
tagattaccgagtcattacaactttatagccataaacatcataacatctgccctgcgaatgaatgaatatttcacggtttcaaattgatagagtgctacggaaatgtgggacactctacatttaacacatgatggaactacagacgttacacgatctatgataaacacacctacccctgagtatgaactgtttaggatgaatgcaaatgatgacattcaagacatgctagatagatttacacatatagtaaatcatc

SEQ ID NO: 16010 - DNA, 364 bp, Glycine max
  unsure (1)..(364): unsure at all n locations
tttccactaaccccaaatttggcttctctaaccctcaatatctcacactngtctacctacaacattatcattctcacatttaaccctaagttaactctccccatcatctctaccagttttctatcaacacatttagcatacaaatatcacagagcatcatcataaaaccttaaaacagaatgggtagctttactcacatcaaacatgtcaagtttagcatgatttcaacaaattccttcacaaataactaccctaaggcaataacctagtagaactacccatcattactcccaaaaacccaacacccatgaatatcatgtgagaagaagtccacccatacttgatatttgaagcctcatgaagt

SEQ ID NO: 16011 - DNA, 380 bp, Glycine max
  unsure (1)..(380): unsure at all n locations
gattcttaagtcacctgcggcatgcaagcttnaaatttctgatattttatttttcacttattagacagaacaagggagttaaaggatacgaatgagtactcttaagatactatatatacgaatgagtactctcaagatactatatatatatatatattaaaggatattaaaaatttaataaagattataatatattaaaaaattataatgttatcaaatattcctgaattaacactacttgtacataagaaaacaaatttattntcttcctcaaacgtgtcagatatacataggatggcgatctaagttacttaaagggttattcacccaataatcttttatttatattaaatttaaattattctactgttgaatattta

SEQ ID NO: 16012 - DNA, 451 bp, Glycine max
  unsure (1)..(451): unsure at all n locations
tagacgtagttccttagatgtnggnattgttctttcattttacattgagntntagctcaatataatatatgttcaaattttatgcaaattatcaaaataaaaattcaataattctaattttaattgaaaatagtaccaaaagtatataaattacttattcgaaacaaagtggttgggtggaatgcttgcataaattagttattcgaaacagttttcaagccttgacacaatagtaaggttgctaacttgtgacaatgaggtangaggtcatangttgagggaataaggtaaagtacatctacctttctcanaccccactagagcctagaggagaagcctcttacactcggttgcgctnntcttattatttatcttcgatgttatgcacatgagactgctttaaaggagatactatatatgtcatacatgcaaaaagtcatgagcacacatg

SEQ ID NO: 16013 - DNA, 121 bp, Glycine max
cgaggctcagcggattgtttgcaagcctatcacttttgaggaaccgccgcgatacacaaatcaaacccaccgaagagcgaccgagccgaaacccacccacccagacccacacagatggctt

SEQ ID NO: 16014 - DNA, 370 bp, Glycine max
  unsure (1)..(370): unsure at all n locations
agctncacttgcaaattcattatactatataaacaattacctgcaacagaactataactagaaggtacctcctgctgatgaactgatggatttgtcggcaagttcccttgttcaaatgaaacagtcaaatctcctatgtcagacccatctctagcactgtaagaatgcccatcttgagtatatgatgtctccaaactgacagatgcaggctcctgggaatgtcctgaaatccgctgcacagatgcatccaagtaagaaaattgttgatagcttgctgatggatgggattggctttgaacatcactataatgtgagtcaacagattgctgatactgatcatgatgatggctttgctcttgcattcttccag

SEQ ID NO: 16015 - DNA, 295 bp, Glycine max
  unsure (1)..(295): unsure at all n locations
tcactctactccatgtttntgaaggttatgtttattatgaaacacacgtatattaaccaagataacatcatggtggaaggaaatcgactgctgtgattcaaaagatccttccacccaagcacaaagatcctgtgagtgtaaccattccttgttcaattggagaagtcactgtgggaaaggctcttattgatctacgagccagtattaacttaatgtcactcttcatgtgcacaaggttgggagagctggagatcatgcccactgagatgacntacaacttgctgaccgctccctt

SEQ ID NO: 16016 - DNA, 200 bp, Glycine max
agttttgagctctcaagtttctagaactttcacatgagagcggcccaacaggcgcacggctgctatcattcgtaaaacccgcttcctgagaagttacacaatacttatgctgatcatggcaatcctgcactagagagatgcatttgcaaatatagcactctttatttgcgattaccataacaggaaaatatatatgcatt

SEQ ID NO: 16017 - DNA, 484 bp, Glycine max
  unsure (1)..(484): unsure at all n locations
catgtatacccttgaaccttgaaantctggaacattgcaagaaacccccggaggtaaatagaggattcagaacgctattttttcttttgttcggcatcaactcgacaaacttatttaattgtgattacagccacgaaacatcagtacatagacttaaacaatattcaattgttgttgcaaaggacgaatattttcatattaatttaaagggctgggtctgggttctatacacttagtacaaatgggtattataaaccatggcccttgcaaatatctctacaattaatattcttaatggagatattttacagattccatcaaagttgacaactacacaagggccaatgcaatgatgaagaaaagcgaaaagttgattttcccgcaacaacaatccttgctaatactggtaaataatagatatttctggacagactccgtatgtaaaacttgcaatcggggtaggttaatcctacaaatacttccn

SEQ ID NO: 16018 - DNA, 397 bp, Glycine max
  unsure (1)..(397): unsure at all n locations
agcttgagccttaactattcacaccccttataatagctaaactcaccccatgccaaaatacatgaaaatacaaaaaagtctctactacaaagactagtcgaaatgccctgaaatacaaggctaaaaccctatactactagaattgccaaaatacaaggcccaaaagaaggaaaaacctattctaatatttagaaataagagtggacccagccttggcccatggattcaaaaaactacactgaggttcatgagaaccctatggccttctntagcaactctagcccaatcctcttgaagtcttctatccaatacccttggggggtaggattgcattatatcctcccccttggaaaggatttgacctcaaatctcaaggttcttgatactctgggctcct

SEQ ID NO: 16019 - DNA, 383 bp, Glycine max
catgcaagcttggctcccaactcgcccaggcgtttaaggtggcttctatcataatcttccgccttctggaggaatcttctggagggcccaaatgggcgtggttgctatttgcacccccgttgttactaaatacacccccatttgcccttttttggtgattctttttccgtaaagttacggaaacttacaaatttcgtaacaatacttgttttcttttcgtaatgttacggaaccttacagattacataatcatcccctttatgactaactgaatgcttcggaacctcaccaattgtgcaacgatgcttccttttgagtctcagtatgtcacggaactttaccaattgcctaacattgggtgccaatacctcaaaatgggcaaa

SEQ ID NO: 16020 - DNA, 448 bp, Glycine max
  unsure (1)..(448): unsure at all n locations
tggcagtcaatagcatgatagttcgcagatactattaactggtctatagtttcttgatcgggttgacgacatcaatattgtatttggaaagacccaaaagaaagaaaaaaagtaaaactttcatatgtaagaagaggtcgatattgtttgatcttacatactggtctaatctagatgtcagacattgtattgatgttatgcatgtcgtgaaaaatgtatgtgatagcatcatcgacacgcttcttaacattcaaggaaagacaaaggatggtttgaatactcgccaagatctagttgagatgggtatatgagagcagttacatccaaggtctgatggtaagaaaatataatngcctctagcttgtcatactttgtccagaaatgaaatggtaagtttatgttagtgtctgcaccgtctcatagtgccacagggatactattcaaatat

SEQ ID NO: 16021 - DNA, 284 bp, Glycine max
  unsure (1)..(284): unsure at all n locations
ccttanaaaaaatggtgcagctttgttcttcctcttgtcgtgggaggaaggggaactcatactcgttcattctttgaagggaaacataacagatccaaagagggctgaatttggtttatgaacagttcaaccttcgacttttgtctatagaaagacgaagggtattattgttacgaagttgtcatacactaatggatacgcaagatccatatgatgatggtgctggactacttaaatggactgagttgtctcttgatgaatcaaacttacacactgctcttttt

SEQ ID NO: 16022 - DNA, 430 bp, Glycine max
  unsure (1)..(430): unsure at all n locations
catctgtagtcaatgaacttgtttatnttatttattattncattnaaaataacatcatatgaatcgtatctacgaacaaaaagttcatgtgggttcatgaaacctatagtaaaataaaatcactcttaatctgcctaggattgcctatcaacttcttgatcgtttaaaactggttcttgtaataaaagtattattattgtttgacattaaatgatcattatatactcattgggtgtgtaataagaattgagaagatagagaaggtaatagtgtaataagaaaagaggggtggaaataatgtgcagttgcatgggtgtagttgttgttccacanaccttaatccaacatatagcaagttatatctttcaaagtaataggacagaaatactcaaatgaagaaaatatagcaatctgaattgataaactctat

SEQ ID NO: 16023 - DNA, 366 bp, Glycine max
cacagacatggggagatattcagagtgcatatcacagaggaaagcggtactggctcaaatagatgccaacgttggtgtaggagacagttcactacatctgaggagatatagtcatgggatagagagctaggctcgccgcgactgatccagccgcgcgtgactcaacggttgcatgccatgcatgccgagcgcaggcacaatgatgcgacatctgtcaagccacgagcgttggtgggtgcgacgacaaatggtggtgtgggcttctcgacgaatgacggcgtgggcttgtcgacaaacggtggcgcgccggagataacccccgtcgatgatagagcgccattaccactgggccgagcaacccactac

SEQ ID NO: 16024 - DNA, 418 bp, Glycine max
  unsure (1)..(418): unsure at all n locations
cgcttctagccaaaaggacttaccttgttatattcctnattatgcccttttgagccttgtttccctttccttgttttgaagctcactacaagccttaagtgaaaaaccatgatattaccatatccttaaggaattttggagctttggaattgttttgggaataagtgtggggggtttttgtttcattggacaacttgttttgttgactatgcttcatgatgtattttgggccatacttgatgtacattgtatattggttaaatgttggacatgctgaatgaaatgttgtttctcaaaggcaaaaaaaaaaaaaaaaaaaaaatattcggaaagaaagaaaaaaacaaaggaaaagccttgtagttgagtgaataagatcttaaatggcacaagaatgatgaaactctcggctctactc

SEQ ID NO: 16025 - DNA, 440 bp, Glycine max
  unsure (1)..(440): unsure at all n locations
cctgcggcatgcaagctttaggtcactgaagctctaattataggccattttttaggaattctttggaatgcagttatacaaactctccctatgatacgagaaatcattaggtagttcaggactaccacttgttcatgttcctcaccaatatctatgtgacacatttaagtttttcaatgtatgagacaaagttaataacactcaactaggtgtcctataaaaattaataggaatcatatagtcttggaccattagtaatttctcatacgatacacaccacccacctagtactgtgcttggaattcaaaatggaaaactgattatctaaaataatgcatatggcataatatcataagaagcttgatgatgccttacgaccattttgccattcatgtcaccatagaaaattatgcaattatatnattagttgccttaaatga

SEQ ID NO: 16026 - DNA, 407 bp, Glycine max
  unsure (1)..(407): unsure at all n locations
tacttaaattttaaaatatctgtactatacataaagctctcactattaaagngacctaatgggtaattatggtgcatcatcaaggagcacccttacgcactattaaatgtcaacatattttgttttagctaggattgataggttaattaattaatttaataacataaaaaacaggttgacaaattagcttacttagtttgttaagtaaaacgatgggttaagcatgtgaattcatatattaactgcctacgtgtactctntttttaaataaagtgacctaattcatatattaaccatacaattacaccaacaaactcataaaaaatataaagactaaatgatgattctatgtcttaatactaatttttttcattcagnttagtcattcatcttataaaaaattattt

SEQ ID NO: 16027 - DNA, 325 bp, Glycine max
agcttagataccattagcatcaaggaattatggcggttgatggaacctctccaaatgcaagtcttccgcaagacttacggaaagatcttagagttgaccttagcagaggtatccatagaagccattgcatcactcacccaatactacgaccagcctttgagatgcttcacattcggagacttccaataagtaccaaccattgaagaatttgaggaaattctaggatgtcctctcgggggaagaaaaccatatctttcatccgggtgtctcccctctttgagcagaattgcaacagtggtcaaggattcagcaagagggttggacc

SEQ ID NO: 16028 - DNA, 410 bp, Glycine max
  unsure (1)..(410): unsure at all n locations
ttatagcagattttagtaatgacccttaactncgaattaaattaacttaatgccattaacctagtgaattaaaagaacttaatggctgagtgtaactgaaattgtggcaaccaaaagtcaccccaacagtcactatttggtctcccaaaaggctgatgcctaagttgccaattgggcccttattacaacttgaactaaacctaactaaagcccttttagttgattaacctaaaacatattttggtcagccgactttacaaggattgggccattatttagacaaattgaacactctaaaattgagacaaagtggtgccatttagtcctcccacatttgggccatgatacaactcacaaccttggacttttctccttgaaacttgggcttgtattcaaatagtatggacaac

SEQ ID NO: 16029 - DNA, 325 bp, Glycine max
  unsure (1)..(325): unsure at all n locations
agcttgtatattatgtgattctaaatgtaggtttcttatggngggacactatctcaactcttgttagggaatgcttttttagggaccgcgttggtctccctaattatcgttttagatagtttcttgtttagaagtgtgagtttgatattcttagaactttcattttggacctacctaaactccttaagttaacacaagatttgaattgcctcatttgtatattttacttttggtcatatcacttgtcaatatagaacctccaacacaccgctctcttacaccaagaattggatgtctcgagcttgaagtttatggaactgaacat

SEQ ID NO: 16030 - DNA, 436 bp, Glycine max
  unsure (1)..(436): unsure at all n locations
tggatcagccacgacctactattaacttgaatcctgctactggcagaggatcaggcccncataaacaaaagttccatagttacttgtgggtagtagcatgagaaaaaaaatcaaattgcacattctagttggaaagttgtctcanattccctacacaaaagtttatgttatttttgtaaccagtgcaatgaagtaaccattaatttggaaggtatgtctaatcaacctgtacctcagtggattgaagcaaaagttagtcattatttcatgaataggtgttttgaattactcacatctgtaactttctatggttggaatgttaagtatatttcatattgtatccagagtcatgttcaaactggaggctatgagtgtggatattatgtgatacattggatgtgatgcatagttagtggtggtttgaagaatgaatgga

SEQ ID NO: 16031 - DNA, 407 bp, Glycine max
  unsure (1)..(407): unsure at all n locations
taagtcacctgcagcatgcaagctnggcatntttatcctgatgatttgttccatatgttctcaagactggactaatacanttgctgcccaagtttcatggtcttgcaagtgaagatcctcataagcatcttaaggagttccatattgtctgttccaccatgaagccccctgatgtccaagaagatcatgtctttctaaaggcttttcttcattctctagagggagtggcaaaagattggctatactaccttgctcctaggtccatttttagctgggatgaccttaagaaggtgttcttggagaaattcttccctgcaactaggaccactgccatcagaaaagacatttcaggcatcaggcaacttagtggagaaagcttgtatgagtactgtgaaagattcaagaaa

SEQ ID NO: 16032 - DNA, 511 bp, Glycine max
  unsure (1)..(511): unsure at all n locations
tggacagtggggactgaaaccttgactgatcacgctgtatttcccggacacttttgtaatactacgctngtangccttgaatcgtcttcatcaatgtgagcctctttctttttgaagataacggaagcggaatggagaaggaggaaaggcgattagagatgccacttcaacgagaagatgattcctgaacaagatcaccgccatatgaagatatggatataagagcttatatgtatgagaagatcattggatggagagggagataacgtgcaccaaatttatgcctcacatgacgtatgagatgtgaagtgtaatttctcacatgatcaangttgaaaatatgcacacacaaggcctctatttatagtttaagtgtcatacaaaaccggaggaaaaattgaattactattcaaacttcacttgaatttgaattgtggagccaatctggagcccaactttactaactaggatagatcgtcctttccctgtgagatgatttgcctcaaatccc

SEQ ID NO: 16033 - DNA, 359 bp, Glycine max
  unsure (1)..(359): unsure at all n locations
acaacagaagaagaatattattgtggcggaggggaccctggttttataagagaggggtctaagcctcttaggggttttctaagcgactaactacaatcgnacgccgttaatatatatgccaaaaatcgcaagatcgaatactcgacgtattttttnngtctttcaatgaacgttagtaatgcgatatttgcaattattttaatgattatgtcagaatttctcctaaattactgacaacctttgcgggcggcaaccttagacgaataccgttgaatggtgttgggcggcaaccgccggagcgttgaggaccgttggattttgtctctgtaaatagccggtgngaagaaagtgacgttgat

SEQ ID NO: 16034 - DNA, 331 bp, Glycine max
ttagattatgcatgtgtgcaacataatctacgtctttttcctgcttagtgttgatcaaatatgaagtgaatgaagtattctagttctctatgtttcccaagaacttacttctacttgaaatctggctagaatcatcgaattaagcgagtgcctaacctggtaattgagtgcttatgccagctttataatcaagaaggatttgtatcttaagatgatccattgcctcatctgataattgattacccagctcctagatacaaagagaagctctctgtgtgattctataaccgattaccaaatgtgacaattgatttcctagaaagcactgaag

SEQ ID NO: 16035 - DNA, 424 bp, Glycine max
  unsure (1)..(424): unsure at all n locations
catgcaagctggcgttgcgtgtctatncatatgttattngcattttttaaatnacattngggtgcgtatacccccactagttcaaagttcaaactattcattgtttaagataacgtacacataaagaatattaatagcacacatttgaagaaaatcactataataaaataatttggataacaagtttttattttgaaacccataaacctattaccctattgcaaatcaacacatcatggataacaaatttgatgcgacattttactttntaattattagttatatatttattatatttatttattattcattgtttataaaataataattnttaatcttttggacctgatagctctattgcaaatcagtacatcattgatggagtgtgtttatatattttgagatgaatagaaagatgtgcaaa

SEQ ID NO: 16036 - DNA, 249 bp, Glycine max
aaaaaaaaataccattcatgaagcttatgctagtcaattgagattgaactcttgaataagagggtcttgacttttggtgcatctgacaatgcgtgcattttggttaaaaagctttgcgtgatgactggctttgcagaaatttggatgaattgcctaacagcaagcgtaaacgtctgagacctgtgaaagtatctccgcggcgacaggtgccgaagaatataccgaggcctccgtatgtgaattctatga

SEQ ID NO: 16037 - DNA, 330 bp, Glycine max
  unsure (1)..(330): unsure at all n locations
agtttagcaccagacctcttcacggttttgggtctgcttccaggggctggtgggggccgttgcaacttaagagcctggaaggaaagacgtatgcctatgtatgttgggatgatttctccacactgacatggggcaactttatcagagagaaatttgacacctttgaagatcctaagagtcgagtctaagacttctacgacagaaagactgcgctatccagagaatcangagtgaccatggcagagagtgtgaaaacagcacgttttccgcattctgcccgtttgaaggcacctctcatgagttctctgcagccattacaccacaacaaaa

SEQ ID NO: 16038 - DNA, 336 bp, Glycine max
  unsure (1)..(336): unsure at all n locations
tctctatatccagtntcatgaggatagtatgggcctcgaataccaaacactatcacaatcatcaatcctaaccacatgcgttttatccatgtagagataaattactgcatatagatgaataaaactccattgtgttcttatactcaaaatcatgatgaaaactaaatgtggaagtgtacctggatagccataatagaatgatgaaaggttgatgaggatcaagattggttctatgatcctccaaatgtagagagtcatatttcttctctgaatttctcttctgtggggatagagagaaaaagacagcaaattgtatgttctatcgcttctctatat

SEQ ID NO: 16039 - DNA, 239 bp, Glycine max
  unsure (1)..(239): unsure at all n locations
agctttntatngaatggttaataaaactttcnnnggncgcngaagcacaagancgcgcggaacagaccagcanaacgcaaaagaaaccgggcacgcnnnggggcgcaaacagcagaaagacacgngngagggccaggacacccagcagcnaacaagaggcgaaaaaaaaaaaaanagcacacgcccaagcaaaannagnnncagcaaggacaaaacgagcccncgcacgaaaaaaaaaa

SEQ ID NO: 16040 - DNA, 415 bp, Glycine max
ctgcagcttgattaaattacaataagtattttgttcataatttttgaccccattccttatgtctctggctgctgctgcttctgctacggcagaggatggtggaaaaaaagactaaggtgtgtgagtttggttgtataagaagtcactgtgactcactttgtctgatatcacattcattcttctatgttagaagcctctagatactctcgatatctcttactccagaatggtcacgcttcccagtctctcaacgagttcaaaggtgattgaggagttttttaatcaatatccgctattctactgttggtatttcccgtagcctacccatcgagttaaggataaaaaaaacatgaagtctaaacttaccttctttcattagtattacatgagaagccctatatcagcctatactttc

SEQ ID NO: 16041 - DNA, 396 bp, Glycine max
atgcattggttaacttggtaacctatctggcctcttatcagaaatctgtacctgtcgcaagggtttgtggtttgtgctcctctactgaccaccatacagacctttgcccttccatgcagcaacctggagcaattgagcagcctgaagcttatgctgcaaatatttacaatagacctcctcaacctcagcagcaaaatcaaccacagcagaacaattatgacctctccagcaacagatataaccctggatggaggaatcaccctaacctcagatggtccagccctcagcaacaacagcagcctgctccttccttccaaaatgctgctggcccaagcagaccatacattcctccaccaatccaacaacaacaacaaccccagaaacagccaacagttg

SEQ ID NO: 16042 - DNA, 267 bp, Glycine max
  unsure (1)..(267): unsure at all n locations
cacattaatcaataaaatattcaggtaattgcgattaccatagcaagtcaaatataaatagtaaaataagttaaccaaccacttagagatcatatccataatcatcaatcaaaacccaatcatatgatacaaacccaaattctttgttttgagcaacctaataaaacatatctttcattaaatataccacggaaggtttaaaaagaattattttactcacctcttaaagcataataattngcattctttgcttattattcttatcta

SEQ ID NO: 16043 - DNA, 438 bp, Glycine max
  unsure (1)..(438): unsure at all n locations
tacaaagaggccttgagattcaaaatncttcttctgccctcacgtactggctcgtggggggtatgaactgcttgacaagaaacttatggaggagaagagcaagcgtggacatgaggaacattcgtgtactgaaagcccaacactcaacgtcgacccaccatccctagttgcaagacacttgaagtggaagatcgcccgcactaaacggcatggccaaatgacgtctgaagtggcacaagaaattgcagacaaaattgtcagttcatatatttttatggttactatcattggcaaataatggttagctaacctagtcaaatttgttttattcaaattcaacaattgtatatgcatgcacgattcattacaggaaccagcaacacatgggagttttggtcttgcatggcgacaggacatactcaacacggaccttgaacg

SEQ ID NO: 16044 - DNA, 433 bp, Glycine max
  unsure (1)..(433): unsure at all n locations
accttaggcatgcaccttagaaacctacacagcgatnattttatatnnnaatttttattattnatnagcgaccgaatgcatttctttataaatgtattttaataatagtttaattactaatttagtccttatagtttcatcatttgtacatttttgtccttataattttaaagtgttttttttagtccctatagtttacattttaattcccttttagtccatctagtttaaaactggtttttttagtatttataatttgagttttaattcccttttagtccctacagtttgaaagtggtttcttttatttcttatactttatacgttaatttctttatagtccttaccatcaaaagatcagtaataatatcaattacaattaactacagatatataagcaaataattcgtaactaattgttcccaaataattt

SEQ ID NO: 16045 - DNA, 261 bp, Glycine max
gaatacctgaactttgtgctactagtcaatgttcctgagttttttatcagggactataatagaaaatcctagaaattttagtgattaaaaatataatatgtgcccatatcggcctattcgacgaaaacgactgaaaaaccaaaaaagggggactgggaatttggaaaagaagggtatgggagttgttttcgcacaggataggtatacacacccgtcacaatggacgacaacctttaatcgagtgtacataatgtaacttca

SEQ ID NO: 16046 - DNA, 432 bp, Glycine max
  unsure (1)..(432): unsure at all n locations
tgcacgcttagataccaccagcatcaagaatttggcggnagatttatcctcttcaaaagcaagctttccgcaagacttacggaaagatcttagagttgaccttagcagaggtatccatagaagccattgcatcactcacccaatactacgaccagcctttgagatgcttcacattcggagacttccaataagtaccaaccattgaagaatttgaggaaattctaggatgtcctctcgggggaagaaaaccatatctttcatccgggtgtctcccctctttgagcagaattgcaacagtggtcaaggattcagcaagaggtttggaccgcataaaacagactcggaacggcatagcgggcctaccacggaggtacctagaagacaaggcgaggggtatggccaatcaaggagatagagtcccgattatggatg

SEQ ID NO: 16047 - DNA, 343 bp, Glycine max
  unsure (1)..(343): unsure at all n locations
tagtaatgacccactaacttcgaatttaataactnatcgtccattaaccnagngaantaaaagaacttaatggctgagtgtaactgaaattggggcaaccaaaagtcaccccaacagtcactatttggtctcccaaaaggctgatgcctaagttgccaattgggcccttattacaacttgaactaaacctaactaaagcccttttagttgattaacctaaaacatattttggtcagccgactttacaaggattgggccattatttatacaaattgaacactctataaatgagacaaagtggtgccatttagtccttccccatttgggccatgatacaactcac

SEQ ID NO: 16048 - DNA, 470 bp, Glycine max
  unsure (1)..(470): unsure at all n locations
agactagacattgagtgagcgcgaatgacgnnagcgggcntttcgganagncgacctgcaggtttgcaagctnngctngcattgtattaanactcttactttganccngaaggcactttggaagccgctgatatgtcaaggtcctgcgatagcacctttgccatccacagtttgacagggcttgcctgattcctacatcctacatagctgcaagatgcctcaccataataattctcagcatgcatattaacaccttccgatgccataagtcgacctcttaagagaatatcaatcttgtgaattttactgaaacgtggcaaatcagtgaggatattttctctctaaaatcataattttcgtaaatttcatagtgttcatacttatcaaatgcaattccttcaactggctgagatctgtggtcttccctgaattgctcaaatgatgggactttttatgcaatatattacatg

SEQ ID NO: 16049 - DNA, 201 bp, Glycine max
  unsure (1)..(201): unsure at all n locations
tcacatattgganatattaagtatgaagatcagcttatacaaagatgctctctacaagttcaacattagttgagtcagactgagatgttcaaaattccggaatgttttagactaacttgattgtttactctataggtgacaggacatagtattccagttcctggtccacttgtgattctaatgaccaatcatctcaatcta

SEQ ID NO: 16050 - DNA, 322 bp, Glycine max
  unsure (1)..(322): unsure at all n locations
agtcacctgcggcatgcaagctggttnttttataataggactgcttgatgccctttccactgtatccacttaaatttccatatgctagaaaatcattaatagtacaaaacaccattgtgcgtaacctgaatgtctactgcacatttgcatcccacacatctaccccttcttcccacaattgtttcaagtcttcgattaatggcgtaagatacacatcaatatcattccctggctgccttggacccgcgatcatcatacacaggataatgtatttacgcaaaatgcacaaccatgggggaaggttgtaaatcatcagtaaaac

SEQ ID NO: 16051 - DNA, 371 bp, Glycine max
  unsure (1)..(371): unsure at all n locations
ttcgaaatcganaactaaccggttgaagatcgaagaactaataagaacggcgaagaacgtccacagaattgatcacggaagcgcctcgaccttgattttctccttctttctttcactaattttaagtgaagtttggataccaagggtgctgaaccctttctacttagcctcccttccctatttatagcaaaaactagtggagaagcttgctgcccaaattgatcagttcaccccctcagaatgttctagatatgtccaatgctagttacaccctcaagtttgatgagtgcactcccctccagaatgttctagatggtcccagatgggcccaatgctagttacacccctcagtttgatgagtgcagcccccc

SEQ ID NO: 16052 - DNA, 416 bp, Glycine max
  unsure (1)..(416): unsure at all n locations
agccttggagctatatttatataacaattcttaagctctagnnggagctcctctctttttttcgtttttagttttaggcttatcttcttcttttagacactttttcgttttgcaattccagttgctacttttcgttttagcaataaaatttcgttctatattgattaatggaaggctaaatctccagtgttgttttctcttgaagatcaagcacaactctctttgaggttctattattattattaaattctgctcagtttttcctcttcaccaattactctgtatttgttgctattaattcatgcatgcttagagcttcattaattgtctctgcacttaatntacgttcatgcttaatgatcattcatgattaattggtgtatgtgttgcttaatcacataataaatgccttatgt

SEQ ID NO: 16053 - DNA, 375 bp, Glycine max
  unsure (1)..(375): unsure at all n locations
agcttgggttcgttttctacaanantgtcgctgntttttattnnnatcnaagctaggtttacggttatgcacctggaagttaaattattcttatgtttttaagctatggtaatgcatccttttgtatatagttgtggccttgtgggttatgcatatggtagtagcttcatgtacacactactagaaaataggctttggtggcacatttctgtttctggttctggttttggtaaaatatcagaggaaatatgagaggaaatgttgcatggttttggttcctccataacaagagaacttcgcaattttcagtgaaattattgtctattctgtttggtttgcagatttattggtggtttggttggtttcatggttctg

SEQ ID NO: 16054 - DNA, 362 bp, Glycine max
gtcttgtgagacacaactcaaagttcaacttctctccccttttcttccttcaattttgtgctcccccctctctctttctctccctctttcttttcgtccattgaagcatcctctccaagcttcttatccaaggctcatcttgggggtgaagctccttcttccttggcttattccctagtggatgatgtcgtccctctcctcttctcctttgccttccgctgcatcttcatggtgtaaaatcaccattgaaggacctcattgaagctcatagatccagcctccattgaagctccataagccagcctccatcaatgatgctcatgtttcatacttcatattggatggaaatagtataaacttta

SEQ ID NO: 16055 - DNA, 331 bp, Glycine max
tttctcgggcgcctacggcggtttcttccaactcgagcccaacatacgcatcaccatgttgataccttaacaatagagcctcaaaatacagaaattggcctccctagtgttcgctccgctttcatcaccaccgtggacaccaagaaacacatcaacctcagccccgcaatgaagttatacatgctcaagcatgccaattgcacctcattccatcgctgacaacctcaactctcctctctcagattctctccctctcgttccggcgacgggcaaaggatcgttcgcagtcacagtgacccttttctactctgtcgggctccttcttggagct

SEQ ID NO: 16056 - DNA, 519 bp, Glycine max
  unsure (1)..(519): unsure at all n locations
tctatnatattgannccttttgatgacnncttagatacgcttgaaanttcgnngaactttgtgatacaaaccagccccggnggcacncagattctcaccgagagtctatnntctttatcccagttggncaaagncggacctaagtttgattttcccccattctagttggccaagagattttagatgtgtgcttggatcgcttctgaaaactcatagaccactgcaccggtcttcaagctcaacaagcttactttcttgaggtttgatgggggtatcaatggggatatcacttaagtccactccaacccttttgaataccccttgatccacttcatggcttctttgtatgctctagttatctcttgcaccaatgcctaccatgagcagatgtccgtgccctagattacacatgtcattgttgagcccgcgaggttgatggtcaaatgtgcacccacgcatggcaagtacaataggtgtagcttgattacccccgcgaatcgtgttctaaggatgtcacgn

SEQ ID NO: 16057 - DNA, 329 bp, Glycine max
  unsure (1)..(329): unsure at all n locations
tatctctagcaagcacaggatgttggactcgccctttgacacaggaagcccgaaggtccatatcaccttcttaattgtacacatggggcactgtgccccccacagctctagctagaagagataattntccgggctctcgtgtcccgaaaatgcattcatatcatgcatcgcataagcatctcttcataacatcataatgaacatatcgntcctgcatttgttcgttatcatattccaccctcacattttgcatgagtcattgcatcatcatatgcgttcaacatacgttttgtttgctcatacatgatccttgttttttcctctaccaa

SEQ ID NO: 16058 - DNA, 211 bp, Glycine max
atctagacaaatcatctcgagtagacactgtcagaaaatttaagttcaatcggcaaaatacctatgaatcctttttccctattatgagagatcactaacctaaaacccaaataaagggctagtgtaaggggagaccctcaagtaatatttatcttccttaagtttaaactggggcatatagagctggttcggtttaatacaccagtttacc

SEQ ID NO: 16059 - DNA, 300 bp, Glycine max
agctttgtaatgatgtatccgaggtgttcacgaagcagagatcggggtcgacgcccacggtgatgaagaatgttccgaggacagatgaggcgagtttggcgacgccgtttggaggctgggggcgaggaagtattggaattacatggagccggcttctgggggcgcgtggcatgcgcatattcacaataggcgcacggtgaaaactatgttgatgaatgtggagagggattcgggtgtgtgcgagatcatgatccatgcgatgggccttggattcagtttctggagctgggaacgggggca

SEQ ID NO: 16060 - DNA, 311 bp, Glycine max
  unsure (1)..(311): unsure at all n locations
atatacacactaaacaaatcgccactactaaattccgcanaataaagtgcgaatattcaagcaacaatgtctggtttttttgctaattattactaaagataattatctcctttggtatacacacttcttttatatatatatacaggtctggtttctttataaaattttaagatgtaactactatcacactcttcaaaaaactgttatcactattttctttaactaattattctttttgttaaaaaaaatatgtgtcttttccgaatagtgatgggaaaatgaataaataatgggatatcttccatttgatg

SEQ ID NO: 16061 - DNA, 442 bp, Glycine max
  unsure (1)..(442): unsure at all n locations
ctatcttaaggtcgatgcatgaaaacatnnnnnnncattataagtnttctccaaatatcagctgatgtcccaaacatgattatttttcagacaattttctttctttctctcaaaaacaaatttcagctgtcccaaacaccccaagggctgcagtaataacataccactatcctgaagaatatatctcttggatatatctttcatggtatcataagcagtgagatcaatggcagcataaggaatcatgccaagcagagatggaacaagccctctgtagaaagctcgaggtccctcttgaacccatatattcattgtaagtgttcccagcttatgaacctttccaccttcagagggacaagtctgtaacctaagtttaatgagatccattggatagatagcagcctgtgcaattgcaccagccgtaccaactgcaacaagccta

SEQ ID NO: 16062 - DNA, 461 bp, Glycine max
  unsure (1)..(461): unsure at all n locations
agatgtaggcntnaatgagnncattgnagntagnaagtcttgggcatgcnacctggacttatgaatggatnttatctttatttgcactntgtacttttctcaaagcgaggaacaaagggaaattccattgaaaaacgtccgattgataatgttgatttttactaaaagacaatttttgattgtcatattattattatgcctcttatttttttgggtttaaaacgtggttccgacatgaccgatcaatcggaattcattttaacaagaaattataggatgttattacacgaatgatctgaggaacattatttcttttttgataacgcgagaaaatgatttatattaatgaatgattgaagcacatccaataggggtgcagttagaaattgaatgaatatagattttgcagaaaaatggcgcctccccgggtactagaatgaataaaaggttatttccggacg

SEQ ID NO: 16063 - DNA, 316 bp, Glycine max
gagcgttctcgtatattatcggcctgaatcagacatccgaatcaaaagttatggctgtttgaatatgccatgtgcttcgatgtttaattctgagcatctcgatatattatgcacctgaatcgggcatctgagtgaaaagttatgccatatgagttagccgagagcttcgttgttcgatttctagcgtctcgacatattattggcctgaatcggacatccgagtcaaaagttatggcgggttaaactttgcatgtgcttccgtgtttaattatgagcatctcgatatattatgcacctgaatcggacatctgagtga

SEQ ID NO: 16064 - DNA, 384 bp, Glycine max
  unsure (1)..(384): unsure at all n locations
cgctttagttaaaaatgagatttnttttatttcttgaaaatatttccaacttctctttttgaaaatataaaagccttcaattaatcaggttttttaatagtaaaaaatatatgaactacaaactcaacaaatatatccgagagtttttttattagagaaacctatttctactatgcacatacccatgttttcttcttgcgccagccaataataagtaccacgcccaatgggccttaataagtatcccgtgcatatcatacaataggatcaaaaggctgttaaattaatttgagtgtcatgctgataacgcataagtcctagattcgagtcctgtgtgagccattattttagaattaattcnggaaacatatctttttaaaaaaa

SEQ ID NO: 16065 - DNA, 413 bp, Glycine max
  unsure (1)..(413): unsure at all n locations
gactcatggtctctatgaatgacttattcctttggataaaggnagtgttgccatattttctttattccatactaaggcatacaactccttatcatangttgaatagttaagggtaggaccactataaatttcactaaaataagcaattggatgaccttcttgcatcaacacagccccaatcccaacatttgaagcatcacactcaatttcacaagatttttgaaagtttggcaacgcaagtatgggggcattagttagcttttgcttaagaacattgaaagcttcttcttgtttctctccccatttgaaaccaacatatttcttgagcacttcattgagaggtgctgccaatgtgctaaaatccttcacaaatcatctataaaaacttgctaagccatgaaaactcctcacct

SEQ ID NO: 16066 - DNA, 397 bp, Glycine max
ttcttatccaaggcacgttcttggttgagaagcttcttcttccatggctaattccctagtggatggtgcctcccctctcctcttctcctttgccttccgctgcatcttcatggtggaaaatcatcattgaagctcaaagatctagcctccatagaagctccacaagcaagctttcatcaacatgacttgaaaattgtgtatttaccttttttatattttttttattttattaggggcgacaagcaagctccacaagcaagtttccatcacatgtagatgaggttcaacaatatattgatgcaagatggatttttgctctagaagttttgaggaagatatttagatttaccctttacagaatatatatgtgtgttgagagatacaaatgcatctactg

SEQ ID NO: 16067 - DNA, 430 bp, Glycine max
  unsure (1)..(430): unsure at all n locations
gcgtttgatgccaaacganacctttatttaattattccaaaaccgngaaaacagaaaaggcgaggaaggtcaaagtcgctgaagttccgaggaaatgcaaggtggaagggcgcatgaaacgacaaacctccgattgtggtcgagagtgaccaaggtttgcaaatctcggtaagtgtctttgtcggaagataggaactgtcgaagttcatattgaaaagcggttaggggagtgaggtcgataacgactttgagctttggttcaaatgatgaggtggaggtggtggtgggaagagataatttgttgtgacgtctgcagctttgactgcggcggcggaaggaggagcacacgatggtgagacagcaatggcgacaacatggggatggtggagggaactgggagggaaaggtgttgacagagaaccccacaatc

SEQ ID NO: 16068 - DNA, 313 bp, Glycine max
  unsure (1)..(313): unsure at all n locations
agctttgatatggatattatttngaaatcataagatggcacgtataagacatcatttaatgtaatgaatgcagaaagttgtattgtgcctgagtgggtagcatagacaagatgaccatttggtagtttaactgtgatgggattaatttgatgatatgagtgaaaatttgttagagaggaggaaacatgatcagtggctcctgaatctaagatccaggaggtagaattggctttttcgcaagatagaattatacctgttgcatcgttattggaacaagatgaaataaaggcgacctatggcttgatgggtgctg

SEQ ID NO: 16069 - DNA, 206 bp, Glycine max
aaaggggtcaaccctccgggctattcagaatcacttgccaccgccgtagagaatgatctccttgatgaaaaggctatgcgaggcgcttgctataccaatgcgtgcattttcgtgagtaattacgcgaagattatcgaccgttcttcaacattcatcgatcgttcttcggtttcctcagtcttcaacgggtaagtacactaaaccga

SEQ ID NO: 16070 - DNA, 391 bp, Glycine max
taagtcacctgcggcatgcaagcttgttgagttttgtggacagagttatctctagagaaagatagacaagtagaacaaggagtgaaagagttggcagtggtgaaggtagcagtagcagtagaagcgagtttgtaatgagcttaacgatcaatggagtttaatcgcagaaccatcctcctgtactcttgttcgcaacaatagcaatcgaaacagaatcagaagaaagcagcatcatatcccgattccagcaataccttcaaatcgacaccgcccaacccactccgcgctaccattaatccgcctcatttctcacatcccaagccaaatccctctccctcgaatcccaaaccatcgagttcgttccagggaagccactggtccttctgaaatg

SEQ ID NO: 16071 - DNA, 402 bp, Glycine max
  unsure (1)..(402): unsure at all n locations
ntgcagaattggtcttcgccagtgaatggatcaatgtgtttccgaatagaggcaaatttgatcatcctactatgacgactgagaaaactggggcaaataaagagggtgaggatgagggagaaacccatgctgtgactgccattcctatacggccaagtttcccaccaacccaacaatgtcattactcagccaataacaaacctcctccttacccaccacccagttatccacanaggccatccctaaatcaaccacaaagtctgtctaccgcactttcaatgacgaacaccacctttagcacaaaccataaaaaacaccaacaaaaaggaattttgcagcataaagcctgtatggttcaccccanattccgttgtcatatgctaaacttgatcccatatctac

SEQ ID NO: 16072 - DNA, 348 bp, Glycine max
  unsure (1)..(348): unsure at all n locations
caagcttgaaaagtgttgtttttcaccnatttcgctaagtcaatctgctagcttagcgagcgtccgctaagcgcaacactcatgggctaagcacgaggaagactctgaaaaaagatgagctgtacaggtttgctaagcgcaccgcttcatctcactaagcacactgcttcagttcatccgctaagcgagaaaagcacgtgctaagccgaaattcactaatgtgcgctaagcggtgcataagtgcgctaagtgcacgagcacgaacaaggccacctatttaagcctgaaatcagattttagaagaagaagttggagtgggatttagagccttgcatgtctagggtttct

SEQ ID NO: 16073 - DNA, 439 bp, Glycine max
  unsure (1)..(439): unsure at all n locations
tcgcttgctcgtggagcttctatggaggatggatctttgagcttaaatgaggtccttcaatggtgattttccaccatggagatgcagcggaagacaaaggagaagaggtgagaggaggcgccatccactaaggaataagccatggaagaaggagcttcgccaccaagatgagccttggataaaaagcttggagaggatgcttcaatggaggaaaagaaagagggagagaaagaaagaggggggagcacaaaattgaaggaagaaaaagggagagaagttgaactttgatttgtgtctcacaagactctcattcatcanagttacaacaagtgttacacatgcttctatttatagactangtagcttccttgagaagatttcttgagaaaacttccttgagaagcttctttgagaanaattccttgagaaagctatttga

SEQ ID NO: 16074 - DNA, 416 bp, Glycine max
  unsure (1)..(416): unsure at all n locations
agctagtgtttttctcaaatataagacatgcatgatgccctttcccactgtatccacttaaatttccatatgctagaaaatcattaatagtacaaaacaccattgtgcgtaacctgaatgtctactgcacatttgcatcccacacatctaccccttcttcccacaattgtttcaagtcttcgattaatggcgtaagatacacatcaatatcattccctggctgccttggacccgcgatcatcatacacaggataatgtatttacgcaaaatgcacaaccatgggggaaggttgtaaatcatcagtaaaacaggccaggaactgtggttgctgcttaagctaccataaggattcattccatcagaagcaagagcaagccttaggttccttggctcatccncaaactcttgatacaaa

SEQ ID NO: 16075 - DNA, 436 bp, Glycine max
  unsure (1)..(436): unsure at all n locations
cgaaatcgagaactaaccggttgattatcgaagaactatataaaacggcgaagaacgtccacagaattgatcacggaagcgcctcgaccttgattttctccttctttctttcactaattntaagtgaagtttggataccaagggtgctgaaccctttctacttagcctcccttccctatttatagcaaaaactagtggagaagcttgctgcccaaattgatcagttcaccccctcagaatgttctagatatgtccaatgctagttacaccctcaagnttgatgagtgcactcccctccagaatgttctatatggtcccagatgggcccaatgctagttacacccctcaagttgatgagtgcagccccccttcagaatattctagatggcgcaatgctagttacaccccccatttgatgagtgcagtgcccctctac

SEQ ID NO: 16076 - DNA, 403 bp, Glycine max
  unsure (1)..(403): unsure at all n locations
agcttatgcgcatatttccttacgaactttcacttgctcaagacatcctatcaactaagaaaaatgcacccatatacaatcaaggtagcttcattacctaaattatttacatgtacttccaaggtgtatttgttatttacatcacacacacctccttggctgaatttacatacatacatactcaaagcattttggggtaccaaaaactgcacatgcgctcatcttggtatttctaatacccatacatatacaaacttcacgatgaatcttgactacctacacaataaggtgctacatttcatgcntttttgttttttcaagtttttgctacctaaagccacatgcaaattcaagcatattttccttagctgactaaaattgtattcaaattagaaggtatata

SEQ ID NO: 16077 - DNA, 402 bp, Glycine max
taccttatccaagaaaacagggtagaggcagaaaactctgcccataacacattcaaataccatagctttccttactcaaataccccagtaacattctctttgttccgatttgttaaccattggatcgacttgaaaatttcactggaggttcctagtacataagtctacattttgaccgttgggatctgctagaaaatgtccagaacccaatatgtaactacctttcccataaccagcaatgcacaagcattttctgcacatgttgaaaaattctgctgcacaattcaacaacaattttctgcataatagggcagatttcgaaatccatcttgcccacatccatatttgctcagattggatcctacaggtcctaaatcatgtataaatcgtattaaaccaaaa

SEQ ID NO: 16078 - DNA, 373 bp, Glycine max
agcttctatccaaaagtttttaccttttattaaggcctttgatagcccttttgagccttgtttccctttccttgttttgaagctcactacaagccttatagaattttggaactctggaattgttttttgaataaatcgcgggggggtctttgtttcattggataacttggtttggtggatatacttcatgatgtattttgggccatactagatgtacattgtatattggttaaatggttgacaagctgaatgaaatgctgtttctcaaaggatatggttcaaaaaataaatctaagatgaaaaagaaaagccttacagttgagtgaataagatcttaaatggcaaaagaatgatgagactcgtgggtctactc

SEQ ID NO: 16079 - DNA, 364 bp, Glycine max
  unsure (1)..(364): unsure at all n locations
aagctccttcaactgcacaaggctcttaatatttgatatgtatccttgggaaccttcacccgacgaagacactgacaaaaacttatcttctccttcttggacaaagtatggcaggctgggggcaagtaaattttcttcccatcagaccttgaatgcaactgtgatcgtatacccatatcagctagatcttgacgggtattcaagtcatccttcgtcttgccttgaatgttaaggagcgtcccaatcacactgtcacaaacatttttctccacatgcataacatcaatacaatgtctaacatcaagatcacaccagtacggaagatcaagaanatgacctcttcttcatatcaactctgacttta

SEQ ID NO: 16080 - DNA, 288 bp, Glycine max
agctttccgaactagacttttcctcattattcgaaccttcaagcaccacagagtaaaaaaaattaagcaagatgaaactggtcaggaattttacaagtgtatcctaaatgagagattcagatgtaaagtgtaagaatatgcgtgctgccctatctacttactatgcggctctcttgaagaatttcacgtgacacattgagtggaagtcatttgagtaacaacacctttgacaagcttagtatcggggaactggttagcagtaaaacatagtgaggataaatatcagac

SEQ ID NO: 16081 - DNA, 419 bp, Glycine max
  unsure (1)..(419): unsure at all n locations
tatagctagctcatggtggattctntaatttaattctgtgtttangaggagcttatgcatattttatacgtaaggcatgccatatagcagtgttgtcattattatctaagattctagagtatctaactgaaaataagtacactgacataataataaataaagattaaatgagaagccatttactactatgtactgtaagcattgcttcatttgaaggcaaataatctctagtcccgagtagctctctgcaagctttagctaatagtagctacctgcttctgccatcnttcaatagttctctcttcacccttttcatctattactacctacttatagttaaaaacaaaaaaacccacaaaaatcaaatatacatattcttttgttttatgctacaggatttattaacaaaacgatttctc

SEQ ID NO: 16082 - DNA, 395 bp, Glycine max
  unsure (1)..(395): unsure at all n locations
agctttgagaatatggttgcagccatttttcaatatggnccacatttgcccatttcaagctatcatgacatcagagttccactcttgaagaacgaagttgaatacactaaaaatttgatgaaaggccacacggagcaatgggtcaagtatggttgtactattatgtccgatgcatggactgatctgaaataaagatgcatcattaatctttttattaacttataagctggtaccatatttttgaagcctgttgctggctcttattttgtaaagacatgttaaaagctttttgagtcgcttgatgctattggggacgaagttggagaagagaacactgtcaagtcgtaattgaattgggagcactatgtcttgcgggtaacttgctgacgacaaag

SEQ ID NO: 16083 - DNA, 341 bp, Glycine max
ttattttcacaactttgccataagtttatattgaactactatttaaattatcggttcgttaatcactggacgatagttctctgagaacacatcttgattgtataatcacttccaatgcagaaagattttcaagttaattgtatttcaactctccttctaatgtgatttattgtatttcaacaatcaagtactataaatccctattctttgtgactataatgatgccctttctctggttattatataaatccctactataagtttaccccacacactattcaaccttttttgtgataccctctaccctcacaaataacgaatataaggaaatatgatcatgt

SEQ ID NO: 16084 - DNA, 336 bp, Glycine max
agctttaaaagaagagaatttatttttctgtgacaatgaactctcattaagtgattttcctcttagggaaaggcatactcaaaaggggggaaaatgttcatttgtgttcacttcaaaattaacaagtgtgttcctttgattttgaagggttgaaaataaaattgatactaagaaattgtgttaatatccactggtttatatatgaatgattaagttgtaacagttacaatgctatatctttttttccatataactttgtagggtttttagatttaataactattaaataacagttaaaaccatttcatttttaacgttgaaattttcattgagatg

SEQ ID NO: 16085 - DNA, 325 bp, Glycine max
actataaatctcaagctgtaatgtctctaatcagttgtgtgaattaatttagttgagtggattgataaaaatattgaagatttcctaaaagtgtgcatcaaagaggtccgcgttagaaataaaccttatacccacttcaataagattggttaggaaaatattgcagaaaaattcaacaagacatcaaagttaaactatgaattcaaacagttcaaaaataggtgggataattttaaattagagtgacaattacagactaaacgtattgaaaatgatattgctattggttaggatgttgagaagaagaatggctactaatgatata

SEQ ID NO: 16086 - DNA, 366 bp, Glycine max
agcttgcagcgagaagggacttttctgtattttatacacaacgttgcagtacaaaaattttttagggcgataattgtcggcacaagactatcatctcaactatttcttgcagaatttcccagatattatttcaatatcaatatcagaatttcttgcaaacaattcgacatggttgcaaacaataatcagctccatccaagattaatacacggttaattggcatctaaaacgagttatttaagacaaattcaaactaatctctaccgtaccaagttacatagctttaaggtacaaaattcaaactatgataagattcaatcattcaaagtgtaccaaataatttcagctttaaaactgatctctact

SEQ ID NO: 16087 - DNA, 336 bp, Glycine max
tcctctgtgtttgtaaataatatcaaagcttttggcttttttgtatttcttcttaatgcctgcctagtgtatagcttacgtcaaaagaaactatgaattgattaggcttcatattgttactactgaacttgaacccttctttgtcctcttgtcttttcttacaccaaccaatgtccatgtctaaaaggaaatttcagcaacaaaaaatagttttgaattgatgctgctgctaagggattcatatataccaccaagatatttaacagctaaaacattttattaaggattaatccatttaataatcccactataaatgtctctacttacggactcttc

SEQ ID NO: 16088 - DNA, 348 bp, Glycine max
agcttatgtctgcttttcctgtatttcttcatcttggtcctaactttggcacatcttgtggtaagttgagtataagtcattaatagattcatttaactcactaaaaaataagtttatgtacaggatgcggattgggtgtgagtttatttgcttaataagacacaaagggatttttgccctaatcaatttttaaatcttgtattttagtaaaagttgccacaattattttgatttcttttcaatataaaatttaattatcgtttaccccaatttaattacattgctcaaatagttttgatattatagtagttgataattacatcaatttttccggggaaaatactgtat

SEQ ID NO: 16089 - DNA, 355 bp, Glycine max
tatgaacaagtttgttcaattacatgtgttatctttgtgacttggtgttctatgtttgactatgtatttgggagctgtattcttgcatcctggctgggaatagttcctttacagatttatgtatatatataatgcaaaagttgattgttttgtgccttgtgatactgaaattttgaatgcattgtcttagtcatgtacaccaaacattctaatatccttaccaaatggcttcataattcttacctaactatgcttttcaacattcgctaatatggttattacttctataagaaaattagattaaatttcaaaaggataatctttgtaacaaaatacgctacacaaagtgagctta

SEQ ID NO: 16090 - DNA, 340 bp, Glycine max
agcttgtaggattatggggtacttattacatgtggtactaggtggcggtcgggcgatggtgcacaacaagtttctccacatccacaaatcgcgcataaacccaccatcccctgttgcccaccaccaactgagctcacgtactcccacgtagcccatatcctcgtttctctcaacaccgggtccccatcaatccttccaagcttccccaacatccatgtaattcaaaatccaaattatcacaaactaacaaaccaagcaaaacagggcaaaagcagaaaactctgcccaaaactcaaaccaaaatcacagctttttctcacttaaagactccagttacatt

SEQ ID NO: 16091 - DNA, 358 bp, Glycine max
tgtgcattgaaacctaggttttgtaagattattattgtttgggtttctttgtaatggctggctaagcaccctagttggggatttctaatgaacaactgatgtaaatacctaatatctaattgattatgttttttgtgttcaatgcttccttcaatgcttaatgtttgtatgcttttggtctgatcatccatttgtgtgcatagttaggtgactttagcattgagaaatgtactgttgccttagaacttgattgaagcaagatcgaaacttaatcttacaagaggaatctgtggattaagttttggttttaattatactgctacaataatgttgtttagtctaggcctactcttacaac

SEQ ID NO: 16092 - DNA, 357 bp, Glycine max
agcttattcaatcaagaacttattccttcatgattgcaatatatattgtttcatcatccatacctcaaccctttcattatcaacgaagttatgacataaatatagacatccttttatttccgtcaacattaaactaaatattttacttttaacttccatggttaaatcatgtggcaaaggaatctctaataagcttcattgtctcaaaacataagcaataattgcatcaaaatgcttcttattagacgtcaaagccaaccaatgaagcgccccattcaaaaatggcctaggtggggtcaatgtatacccaaagttaccctcaactttctcccctctgaattgggttagctggagaaa

SEQ ID NO: 16093 - DNA, 362 bp, Glycine max
  unsure (1)..(362): unsure at all n locations
agcttgtaggattatggtttattcatcacatgcggnactangtggcggncgggcgatggtgcacaacaagtttttccacatccataatgcgcgcataaacccaccatcccctgttgcccaccttcaactgagctcacgtactcccacgtagcccataccctcgtttctctcaacaccgggtccccatcaatcctcccaagcttccacaatatccaagcaaaacaacattcacacagcacacgctatcacagccaagcaaaacagagcaaaggcagaaaactctgccaaaacaccaaccaaaaatcacagcttttcccactcaaagaccccagtaacaattccttcgatccaattcgtaaacc

SEQ ID NO: 16094 - DNA, 357 bp, Glycine max
tctccttccatggcttattctctagtttatgttttcccctctcacctcttctcatttatcttccgctgcaactccatggctgaaaatcaccattctaagaccttattgaagttcaaagattcagctttcatagaagcttccatcaagtatatacaaaaaaaagtggatgactggaagttattttgtttatacttatttaattagtgtcttaatattagtattatacatgttgccattgtctttcttaatgaattgtgcattttgataaggataagtatatatgtaatcccgcatattcatgctggtcatttacctacatgcggattggagaaccttgggctatacttattctcattt

SEQ ID NO: 16095 - DNA, 357 bp, Glycine max
  unsure (1)..(357): unsure at all n locations
agcaaggataatgtntntttttgttttttcctcggctnttttgccccttcaatacaacataaaaaaaaaactacagtacgaaatttagcatgaaaaaatctatattgcttttgtcaatattttcatgcttaaaatttggtaacttaattttaattaaaaatttaattacatccatcaattattaaaatattcaataagatcttcaaataatttaaaaaatactataatcatatcatttgttaactctattagaatgataaaaattatataaataaacgtttttatatcaattgcataagtaatgtaaaaatatttattcacatcaataacatattttaagaagtaactaatttttta

SEQ ID NO: 16096 - DNA, 318 bp, Glycine max
  unsure (1)..(318): unsure at all n locations
tgtagtggtcacttccttttgctggttgaagactatctttgtcgactntatcatccagagacaagcaagtccgatggtatccgagacgatgatggtcgtccgtttctaatcatttggagttttttccagcctcttttgtcatccagagacagtcaagtcttttgctatttggaacacaatcaagtctgatggcatgcagagacaaatacatttgtctacttccctggtcgagagactcaatgtctgttgaccaaggctactggagtctcccctgctatcccaagacaagcgagtttgatagcatgcggaggtcatcac

SEQ ID NO: 16097 - DNA, 353 bp, Glycine max
  unsure (1)..(353): unsure at all n locations
agcttgatgtaccaagatttaatgggtcccacactccacttgacccgcttcaggcccaaattagcctccacgctctagcgggtcacacaaccccgaaaaccttatgcatggtgggtcgaatctctcaccgagatgtcatgcttttggtggacggcgatagcatgcataanttcgtgcaagaacgcttgctgaaatccttgaatcttcaggctgaatcaactcccaccttgcacgtcatggtcaaaaatggaaattaagtggaatgttgtttcctttgtcgcaacgttaacctgctggtacaaggccacaccttcacggtggactttcatgtactttcattatgcagcgctgac

SEQ ID NO: 16098 - DNA, 350 bp, Glycine max
tgaatcatttatcctatatccgacagttaatttgtgagtcccgtccaggtagtcccgaagaaaaccggcctcatcatgataaaaaatgagaaggaggagctgattcctattcgggtgcagaacagttagagagtctgcattgactataggaggttgaaccaggtcaccaaaaaggaccattttcccctgccattcattgaccagatgcttgaatgcctggcaggtaaatctcactactgtttccttgatggtttttctggttatatgcaaatcactattactcctgaggatcaggaaaacaccacattcaccagccccttcggaacttttgcctatagaaggatgccttt

SEQ ID NO: 16099 - DNA, 262 bp, Glycine max
agcttgtcaatttaatacatctttattctcgcatcatattccatcatttctcaccattttctttccaaaaatcaaaactaggaccttcattcttttccattttcacaagatactcaaggagggaaaggccaccattttcatctgcttccaaactctatcttagtgtattgagacttcttctctcatagccttggaaagaagcccttaaacctcttttttcttcttatatcttcctcaatttcggacaaagatcttacttgag

SEQ ID NO: 16100 - DNA, 355 bp, Glycine max
tgaatacaataaaagttgctaacttatcatatttaaatttcacttgattcgttcaagtttctttcatccaactaaattgacaacattacaacactttgttcattttgactcaaaagattctctagtgattcaataacttcatcactaacatcttcaagcttcatataaacttcatagcttcaatcctttgagagaccctagctagccattgtctaatagcatgggtgctttacatgtggcacgttactgtgtagagaccacaaacatcttatgtagcatatcttcaaagaagtacaacttatcagtgccgccttttgcttggaactgacttttagtgtacaattcaaatacaaca

SEQ ID NO: 16101 - DNA, 360 bp, Glycine max
agcttgttgattaaatcattggttgagcattgattatttcaggaaaacaactctgagtataaaggagtaatgtgatgttgaatctagtcctatgattgaaggatgttgtcatatcctaattctgtctagacaagttattaaaaaaacaaaaaaaatgaaaaaaaataagaaaataaaaaatgaaaaaataagaagaagaaaaagagaaaaagaaagaaaaaaaaggaaagaaagaaacaaaaaaaggaaaggaagaaaaaaaaaaggaaagtaagaacaaaacaaaaagcatgaaaaaagaaaaaaagaaaaaaaggaaagaaagaacataaaaagaaaattaaaaaaaggaaagaaagc

SEQ ID NO: 16102 - DNA, 356 bp, Glycine max
tcatgcttcttgtcataatagcttttcattcttctttgggatttttctcggtatttgctccaaagttgttggatgacttctcagctaactgcttagctagttgacccacctagatctcaaggtttttcagggctgactcaatattcttatggttggacatggtcacttgcataaactgagctagtgtctcctccagtttggtggtcctctgaaaaatatttggcccttgttggggtggcctgttggaaggtccaccctggtccttagtgaattgattgccagggtgtgatctccattgcccttactgattgtagggaccttgctggaaacttgaaaatcctccttggttgtatcct

SEQ ID NO: 16103 - DNA, 356 bp, Glycine max
  unsure (1)..(356): unsure at all n locations
agcttttcgattcattctatgtttccgtagnggtccacattgtgtttcgtgcatttttattctcgttttgtttactttttataccccctcttgacgtgcttaagccattttacttaagtcatttctcgcttaacttaaaaataaaataaatttccaccgaacgtttgaattgtattatccgttaacttcggttaaaatgaattccgaccgtttggtcgtgccgtaaccacgttggaaataaaaaaaagaggtaaaaaataatatattaataaaaaaaacatcttttagcaaaataaagcggaaaatcaatcggacgttttctctttgggagttctcattcttaatcgaattgacta

SEQ ID NO: 16104 - DNA, 309 bp, Glycine max
  unsure (1)..(309): unsure at all n locations
gcgtagccgctcngggttctcattaaatttttaaaacaaanccctcttattactagctattttgaattctttagttcctgaatatacaaccttcaaattgttgctcgtttccctctttgttttctgcaaaaaagaaaatcaatatcaaagaaaacatggatgaagtcctaaggatgccatgtacatgtgtatttctgaagatataagatttatattccatcaagcatacattgactgttgattacatgtaataaaccttttataacatggttgccccaaatcacaattaaaaagcacaactaccaatct

SEQ ID NO: 16105 - DNA, 342 bp, Glycine max
agcttctagccaaatggactttctttgaattaattcctttgatagcccttttgagccttgttaccctttccttgatttgaagctcactacaagccttaagtgaaaaaccatgatattaccatatccttaaggaattttggagctttggaattgtattgggaataagtgtggggggtttttgtttcattggacaacttgttttgttggctatgcttcatgatgtattttgggccatacttgatgtacattgtatattggttaaatgttggacatgctgaatgaaatgttgtttctcaaaggctaaagagttaaaaaaaaaaaaaaaaattctaaaaaaaaaaa

SEQ ID NO: 16106 - DNA, 343 bp, Glycine max
ttttcatgaaagcccccagttaggttgaatttgtggcagacctctctttggtcttgccaattttatgtgatgatgtgccttaaatggcactttataagtttccttcccttttcttttatatgtttactctttgtttgcatttcattacatgttcacattgaggacaatgtgaatttcaagtgtgtggggagaatttagaaaaaaaaatggttgttttctattattctgttttctatttttttgcttttgttttttgtatactctattttttgatttttgctcttattgtatttatgtatttgatgatgtttttcgtttgctgctattttctattttttgcttt

SEQ ID NO: 16107 - DNA, 364 bp, Glycine max
  unsure (1)..(364): unsure at all n locations
agcttgtgccgatcccacatgcttggttcattctcgcaaaacagcgtgaccttgactagtcttcctatgattttactaagtgtgatgtttgttaatatatgatagttgagattgttagaagcatcatttttattatgttggtatgaaggcatgttgatctgaatttctgaaaataaaagagatatgttgttcatttttccctcaaaattaatgtatctaatatctatttgctttgtttttattgtagagatgagtacttctaatcaagcaacaaaacaagaggatgaagccaaacctctatggagatatgtttcaaaattaagaaagactgttattggtggaaattntgagatcaacatgcaca

SEQ ID NO: 16108 - DNA, 299 bp, Glycine max
  unsure (1)..(299): unsure at all n locations
ttagtagatactggttgggcctttacttccatttgcattagtgttgnacctcaacataattgctttagaagtaatataataaccaagactagaactatgtcaggagacataataacaattgatacaaaaactagaaatttcactatacaattatctacaaattgtgacatttttggcgaaaagatttttataaataaggcagacgtagtagatttgcaacgtgctaaagaaaaaatgatcctaggacttgattttattacacatgataatagatcagttactattacaaaagattattt

SEQ ID NO: 16109 - DNA, 362 bp, Glycine max
  unsure (1)..(362): unsure at all n locations
agcttcaagaataatggcctcattaatcttcttatttccataaggaaattcaattaatagacctccaatctttaatggatagggttaccactactggaaaacccgaatgcaaatttttattgaggcaatagacttaaatatttgggaagccatagaaatagggccttatatacccaccacagtagaaagaaccacaatagatgggagcacaacaagtggaagcacaacaatagaaaaacctagagatagatggtctgaagaggatagaagacgagtacaatataatttaaaagccaaaaacataattacatctgccctgngaatggatgaatatttcacggtttcaaattgtaagagtgcta

SEQ ID NO: 16110 - DNA, 362 bp, Glycine max
tgtaaaaaaaggaagcaagttaaaaactctttttatagttttaaacattatttctagttcaaaaccccttgaactacttcacattgatttatttggtccctctagaactatgagtgtaggtggaaattactatggcttggtaatagtggatgattactcaaggtttacttggaccttgtacttgaaaaccaaaaatgaagcttttgatgctttttgcaaacttgccaaggtgattcaaaatgaaaaaggtctgaacattgtttcaattagaagtaatcatataggtgaatctcaaaataagtatcttgaaatcatttgtgaagaaaatggaattcaccacaatttttcaacccaagaatacc

SEQ ID NO: 16111 - DNA, 336 bp, Glycine max
agctttgccgatttagttttcgtcttctaatagatcaaagtgggtctgagaagaggcaaatttgattatcctgctttgatgaataggaagcttggggcaaatggagagagtaaaaaggagggaggaacccatacatgcccaaatttcccaccagcttaacaatatcaatgctcagcctatatcagcccttctcattacccaccaccctattagccaagaacacccaaccatccacagaggccacccctaaatcagccacaaaatccgtctgtcacacatctgatatcaaacaccacccttaacacaaaccaaaacaccaaccagggaaggaatttt

SEQ ID NO: 16112 - DNA, 357 bp, Glycine max
  unsure (1)..(357): unsure at all n locations
taaaggagcactcaaatcgagtgtatntaccctctaagcctggactctgaggagcccgtcagggcctctccctcctgattcaggtctaacctagaaaatattttaacacacagactctacctatgaactatgcaatacatacaactactcaattgttttcaaaatctcaattattttcatagtcattttaacgcatcgcacctcaagtgatttaactcatcgaggtcccacaatgggacccatcacaaaattcattgcacatttactcatcacccttaaatggtcttatagttgtgtaattgcacagttcatagctcacaactcaatatatacaatgtaacatcccatttttcgtaa

SEQ ID NO: 16113 - DNA, 342 bp, Glycine max
  unsure (1)..(342): unsure at all n locations
gctcacctctgctagaggagaaaccttgaggttgtttcatataaatctcctcctctaaatcaccattaagaaaggttatgcttcacatccatttgttgcaactcaatgtcaaaatgagcaactaatgccaagacgatacgaaaagaatctttcttagatacaggagaaaaagtttttgtgtagtcaattctttctttttgagtaaatcgcttagcaatgagtcttgtcttgtatctctcaatgttgcctaatgaattccttttggtcttaaagacccatttacagccaatagtctttgccccattaggcaactatacaaggttccaaactccgttactctgn

SEQ ID NO: 16114 - DNA, 353 bp, Glycine max
taacaaatcaagttctgtaacttatttcaattttcttttataattacacttatgaataagctcttgtcgagtaagtgcttaattgagttaattacccaaatacacccctttaccactatataaaggggatccccttgtgtttttttccctagaatcttgacattatgagcttctgattactaaaatcacagagaaaattgttattccaatacattttgtccacaccaagctacgctacttactattgttaaaaatggaatttattttcccctgtttctctaccaatttcaacatttgaatgcaaacactagttattaattatgaatgcatgaaagtttactggactgtacact

SEQ ID NO: 16115 - DNA, 357 bp, Glycine max
agcttgccaagtttgtccacgatttggcgaatgaagcgtccggtaattttttttattgatgaattggtgaatgcatgatctttatagggtcaaggtgtgtgtgaatgttgactgttactctgttcacagttgcttcactggcagagcgatgctatgttgatgtacattgtgaaatcctgtataaatgggaagagggaggaatgagggtggagatagacaaatttttaccattcttatgctgtgacgttctaaatagcgattgtggttttgtcgcaatccttggtgttttaaaaagctataggcaaatgtgactgatgccagtcttgatgcggtcaaagagaccctaaaacctttgtg

SEQ ID NO: 16116 - DNA, 362 bp, Glycine max
tagtgatactagatgacttatgaatatttttatagatttaagaaataattagagaaatgatagaagtaattttataaagctaatcctattactaatattaaaaaaactaaaataacacttattagatacgttgaaaaagtaattaatattacattaatattttaagtgtcaaatcaaattttacaaagtgactcagccagcacgataacttgttgcatactgcatcggtattttttggttcttcaaacaataagcttaaaccataatacaccatcttcaacccatgcaaaaccactaaaccgtagtgcatacagcataagcttagagaatacagacaacacagatattgtcgcgaatgatga

SEQ ID NO: 16117 - DNA, 362 bp, Glycine max
agcttgtaggattatggggtacctatcacatgtggtactaggtggcggtcgggcgatggtgcacaacaagtttttccacatccataatgcgcgcataaacccaccatcccctgttgcccacctccaactgagctcacgtactcccacgtagcccataccctcgtttctctcaacaccgggtccccatcaatcctcccaagcttccacaatatccaagcaaaacaacattcacacagcacacgctatcacagccaagcaaaacagagcaaaggcagaaaactctgccaaaacaccaaccaaaaatcacagcttttcccactcaaagaccccagtaacaattccttcgatccaattcgtaaacc

SEQ ID NO: 16118 - DNA, 359 bp, Glycine max
tctccttccatggcttattctctagtgtgatgtttccccctctcacctcttctcatttatcttccgctgcaactccatggctgaaaatcaccattctaagaccttattgaagttcaaagattcagctttcatagaagcttccatcaagtatatacaaaaaaaagtggatgactggaagttattttgtttatacttatttaattagtgtcttaatattagtattatacatgttgccattgtctttcttaatgaattgtgcattttgataaggataagtatatatgtaatcccgcatattcatgctggtcatttacctacatgcggattggagaaccttgggctatacttattctcatttc

SEQ ID NO: 16119 - DNA, 360 bp, Glycine max
  unsure (1)..(360): unsure at all n locations
agcttccacaacatccatttgtttctttcattcaaacagcacaagctatcacagccaagcaaaacagagcaaaggcagaaaactctgctcaaacaccaaccaaaatcacagctttttctcgcttaaagaccccagtaacaattccttcgatccaattcgttaaccgttggatcgactcgaaaattttaatggaagtctctagtacataagcctacattgtgaccgttgggatctactancaaacatccagaactcattctgcactagacttttcacagccaaccacacacaagcatttttctgcacttgtgcaaaattctgctgcacaatttcacagcaaaaattctgcataagtgcaga

SEQ ID NO: 16120 - DNA, 355 bp, Glycine max
tataatatatcgagatgctcttaggtttaaatttattcccatcgcaaatacaaacggccataacatttcctccggatcttcgaataacgaaagtaacctatcgcgacgctcaaaatttaacatggaaaactcgggtgaattccgacgggctaaagttttgactcggatgtccgattgaggcccataatatatcatcgcccttgaaagtagtaatggactgaccacgcatattcggacagccatagcgtttgactcggattcccgattgaagctcataatgtgtcgagatgctcttaggataaaaatgaagcccatcgcaaatacaaacggccataacttttcctccagatctccg

SEQ ID NO: 16121 - DNA, 347 bp, Glycine max
tgcctgcatgcttggagcaagaagatttggtgttcctaaataacctctaggttggttgatacaatacaatcgtaggagctgatgctaattctttgcttcccgcgccagcaataatcacattcttgttacttcccctttcttttcatttacaaatcaaaaaaaatatagggtgtatatgaatcacgaaagcaccttcttgataaaaggttattaaataaaatttgtgtctgaccctaaatgggaaactcatttgaataaaatcaaaagtcctgatgttcttctgtccttcttttacaatggtcattactgattacttatgcccttaaaaaagattttttttttttttg

SEQ ID NO: 16122 - DNA, 356 bp, Glycine max
  unsure (1)..(356): unsure at all n locations
ttataaatgtgtattcattcattnatttaagttcatgaatnaaacatacaagttatctgtgcccaccaaacctaaaacgataacaacggggtcgatgaaataaaaaaacaggacccccacccttccattaccgggaagctcaaaatcagagaatgttttttgtattggtccgttagattgatctaaaaacatgtgtcaccgcataatgaatacaaactcaaacatgcccttaatttgcttctactacacatcaatctcattaggttgatctacgttaggcagttaaacaccataatcatcttggcgcgattaaaagaaatcatcttaataatttgtttctagccttaataaaatta

SEQ ID NO: 16123 - DNA, 327 bp, Glycine max
tgcttggaaactatgtcttctgtgttatactctatctcatttgaagcagcgccccaatatctatcctatggattttcatggataaagtgcttgttcttttggggcaagaacatgctatttcactagtaactggaaactactgcatttggctcattcctgcactctttggttatgtggtacttcaagctttggttcgttattttcagactcagagcttgatctttccaatgcttgtaacctcagctgctgtcttaatttcgcatatacctatttgttgggtactaatgcttgaactgggacttggacaaaatgcatcggccttattca

SEQ ID NO: 16124 - DNA, 355 bp, Glycine max
tgctcaccgtctctgtgagggtctctatttgtttggctaggagattgttctgggctagtagcgcaacttgtgatgtgagctcgagaagactcttctttgtaggtgggtaggctcgatcacgaaggatggcatggtcattggctgccatattttcaatcaactccatagcttcatcaggtgtctttagtttgatctttccactagcgaaggcatcaagtaactgctttgaatggggtcgcaagccatcaatgaagatattgagttgaaccggctcgctgaacttgtgggtgggagtcttccgaagtaaaccatggaagcagtcaagagcttcactcaatgattcatcagggaattg

SEQ ID NO: 16125 - DNA, 359 bp, Glycine max
agcttagccgaattcagatcaaattaaagttggcttagctcatcctctgccatcttagcggaccaaatcagcctcagatgcaacggttgggcgctaagcgcttgagactcacggcatagtgcatgaacaaatatgagcttagcgcgaggcttgcgcttagctaaaggactgattttttagaaaatattttctgagttatttttcagtcccttcctcaacaaattgaaacccttatatctaacattcaaagataggctgatatactcctatgtacagattatgtagcaagttcccaatgatttaatgcatgaaaacaaaaattatagaaattaaaactgggttgcctcccaggaagtgct

SEQ ID NO: 16126 - DNA, 362 bp, Glycine max
tgaaggcaaactggatgcgttggtcaacttgttaacccagctggccttgaatcagaaatctgtacctgtcgcaagggtttgtggtttgtgctcctctgctgaccaccatacagacctttgcccttccatgcagcaacctggagcaattgagcaacctgaagcttatgctgcaaatatttacaatagacctcctcaacctcagcagcaaaatcaaccacagcagagcaattatgacctttccagcaacagatacaaccctggatgaaggaatcaccctaacctcagatggtccagccctcagcaacaacaacagcagcctgctccttccttccaaaatgctgctggcccaagcagaccataca

SEQ ID NO: 16127 - DNA, 356 bp, Glycine max
agcttagcgagacattatctttttcaccttcaaattttactcctttttacctgaaattgaagtgaaatttacattaaattcatatggaaagcttctgctgagaaaatagaaaaactaaacaagaaatatttacaatcctaccaaaaagaaacataaattgggaaaaatatataaatttttgaaaacttttctatacaaaagtttgtcgtaaaagacgactaacaaactcccccaaatttacagttttgcttgtcctcaagcaaagaaagaacaattcacttgtcctcaagtgacaaactcacagtggttattcacaaggtatttattccaaagaattcaatcacatgacatgaatg

SEQ ID NO: 16128 - DNA, 354 bp, Glycine max
tatgcacggaaaatgtaattattaaatttagatgcccgaagaaacaccatttcctagttaaccatgcattaggtaccatgttcaattattttgtttttaagtgaaacgggtttatgatcccaacatggttggctcgtggtgcctaacacatgaaactaagaatgtagtgtgaagtttcacgcttcccccttttttgtttttgttttgtagaggaaaacgcaaggatgagcaaacatgaaaacaaatggtatgcaattttgcagatcaaaaagtttgttgaacgcatatgcatgatgatgccatgactcatgcaaaatgtgaggctggaatatgataacggacaaatgcaggata

SEQ ID NO: 16129 - DNA, 333 bp, Glycine max
agcttgaatcggacattcgtgtgtttagctatgaccattagaatttctcaagagcttccgtagtataatttctagcctctcgacatattatgcgcccgaatcggacattcgtgtgaaaagtcatgatcatttgaatttgtcgagagtttacgatgtttaatttcgagcgtgtcgatatattataaccctgaatcgtacctcagtagtgacagctatgaccatttgaatttgacgagagcttccgttgttcaatttctaatactcactatatgtgatgcgcctaaattggacatttgtgtgaaaacgtatgaccatttgaatttctcatgagct

SEQ ID NO: 16130 - DNA, 338 bp, Glycine max
agctacgggagactatttactaccctctctacttatggtgcgcgcgcatgcgacatacttgtgtaaagtaaccacgctatgagcttgcgaagagtcccctatgttcattcgcaaccggatctatttattgttaccccgtatagcacctccgagtgagaagcggtcatcctcttacttgcgagacatcttgcgctgttgaataagggctctcgcggtatttgattccccttaccgggacctggggcactaatgccgagaccgtgtaaattccaacagaaacttctacgtggaaagtcgagcctttcctaatttgatttggagaacttggacttcctcgt

SEQ ID NO: 16131 - DNA, 365 bp, Glycine max
agctttgaagattggcaatccttttataggatgatttgctgagataatttgtacaacaaaaaattatcaatcttcatcataggcatacaatcttatattttgtttatcatcattaaaaccaagggttgaatcatcttagatctaataatattttccttttgttgatgacaaacaaacataagatgataagaaataagatctccttgtataaaacatgttttaaaatttctaaaaagatcatatgaaaacaacactcattatatggtaagacaaatccttgtcaaattaatcatagaaaaattaagaatagagcaaatatgtagacttagtgaaaaatctcaagcgtgacttgaggaatggatgta

SEQ ID NO: 16132 - DNA, 359 bp, Glycine max
tatgaacagcacatagaatatttgtacttacttaagcttgcatttgtggtagctggaatatctgtcaccatcctgccaatgttaaagagagaagattgataacaaacgaatatatattagtaagcaagtcacaaaaaatttataaaatttgagcagcatttatatacttatttaggtttaggctctacagctatatatagactttaaatacaaattaacatcaatattttttgctaattttagaatttcacccgtgcttctaccaaaaacagatagaaattcagagaaagaaacaaattaagagagattatatggttaacttgatgatgaaaggaaagaaagggggagaaggtaatgga

SEQ ID NO: 16133 - DNA, 362 bp, Glycine max
  unsure (1)..(362): unsure at all n locations
agcttcctcgtggcttctttgagaagctttctcaagaggcttctttgagaagctagatccttatctatccacacccctctattaactaaattaacttccttaaaaataattacagatgaaaataacgcaacaaataatcaaacatcaaacataattactaataatatatagatatatatatcagggtgttacaccgtgtggtgttagctggaatatggatgccaaagtggcaagcgcatccgccatctgattttcctctcggggaacatgatggaaggagatctcatcaaaggaaccagccaactccttgatataagctnggtagggtatcaacttggggtctctagtttcccattcccctc

SEQ ID NO: 16134 - DNA, 360 bp, Glycine max
taatacaccaattattaatttttttttaatagattgtatgtattttatatgaaagataatcttatttaaactggataaataagataattataagtgataaaactctgtctccaaatatttaacgtaattatatatgtaagactaattaatctaaaataactttgcatgattaacatactcagtgctataacactaatagtttggtaataactaattcattgataaatattataaaatcatcaatatttgagagtattagaataaattttacttcgtattagaataaaattaattagatgcaaacctattaacgaaatgctttaacttcaccaaatatgtgattatgaaagcaaagggtag

SEQ ID NO: 16135 - DNA, 54 bp, Glycine max
gccagacattcgttcgatcaataatagttatactagcttcccatgcatgcgcta

SEQ ID NO: 16136 - DNA, 366 bp, Glycine max
agcttcaatttcctcaccttcttcttgttcttcacatttaatttcaccctccttttccacaacaaaacttgttcccaaccctatgttttcttcttccatgcacatatccttcttcttttctacctccccattcctcaaaggttctattccattaccttactcttccttcaccaaagaattctcttctcccacacactcatcagaattatggactgccatttgatccagcatttcttgaagggcaataagcttgttgatgagagactttctgcactctctgaggccagagtagtgcaacaccctaacagaatccaacttgagaagcacgttcatgatggtctcgctcaccctcaccctcttcctttg

SEQ ID NO: 16137 - DNA, 366 bp, Glycine max
ttcatgtaccttggtatatgaggtgcccagatatattttattgccatcttccttctcatatgattgacccattgatatgaaatttccatctcccttgtcaaagggctgacccattgatacgatactttcatctcccttgccataattgtggcccatcaacataaaacccccatcccctttactgaaggtgtgagccattgaaagaagattgtcatcaatcttactaattctgctccccatagcaatggtgttgtcatatccattgttataagtaggacccaatgaaatattgtcgccatcattcttattgtagccagcacctactgaaattgtactattatcttccctactataggagggccccat

SEQ ID NO: 16138 - DNA, 355 bp, Glycine max
agcttatccaaaaatccttttgcttcaccattctttcccctgtgtcaacttccaatccatcacttaagcggaggtctatatcatccatcacaaaagtgcccgatgaggctccaagtttatgagtagtcctaacagggagatcctagcaggggttttattgagttgttcaattaccttgaactcactctgctggatgatgcgtaggaactcagttgcttcatcaacggatattccttttttgctaaagtcctattcttccttaaaaattggctcgccttgctttcctcttgcacactcacctttgcctttccctttaggtctatagctcgcaccgggagctcgggtgccgcaaaga

SEQ ID NO: 16139 - DNA, 359 bp, Glycine max
tataccagcccaatcccccaaatttttttatttgagccgggaactccctctcgactcaagtaaaaggaccacccgcagcagaaagagtgccggcccaacgcacagccccacccgcaccccggccagttaataatatagcccctggcgcgacctataaatatgcacagcacccaaaagacaacttccctcctattccgatggcatactccgagctatggccttcattattggagaatcatttggtggtggccatacctgggaaggttctccagccaccctaccccaagtgctatgactcgggtgccaagtgtgtgtaccatagtggagttcccggacacaatattgactcctacatcccg

SEQ ID NO: 16140 - DNA, 362 bp, Glycine max
agcttaagggaagagaggattgcttacttgatttatactggttcggccacttcccgtgcctacgtccagtcctcaagcagcccacttgagattttccactctctttgtaaaactccttttacaaagtctgaaccacacaaggacaacccttcccttgtgttcaagaatcctctacaacaagagacccacggtctcttaatcccttttcaaaaataagaagaagagaagaagaaatctctcttaaaagagataaattgtacaatgaagatcaatcaaaattccttattgaatatgcaagggtttgaccaagacatttcagttcagaaaaactcttaatctttcgagaggataaaactttttgg

SEQ ID NO: 16141 - DNA, 358 bp, Glycine max
  unsure (1)..(358): unsure at all n locations
tgcctcaaagaggtccaggaaggacattgcggtcgaaggaactagttccgccccggagtacgacagtcaccgctttaggagcgttgtacaccagcagcgtttcgaagccatcaagggatggtcgtttctccgggagcgacgcgtccagctcagggacgacgagtatactgatttccaggaggaaatagggcgccggcggtgggcaccactggttactcccatggccaagtttgatccagaaatagtccttgagttttacgccaatgcttggccaacagaggaaggcgtgcgtgacatgagatcctgngttaggggtcagtggatcccgttcgatgccgacgctatcagccagcttctg

SEQ ID NO: 16142 - DNA, 351 bp, Glycine max
  unsure (1)..(351): unsure at all n locations
agcttaagatgtgactatttgcctataatatcccacgaagcactactacatcaaagttgtatgacatcacttatggaatgcatactacatcaattttagaactcatgttgttcaacacaatgttaaatatatgcatatatttaacatcgatatgatttcaaatcaatgtagaaccctaataacatttaacattggttccccttgattttgatgtaggaagtgacacgccctgcatgagtcaagtcacatcttacatcatttattgacataaccgatgttgaaagtttcgcttactacattgattttagcaaaaaccaatgcaaaatgtatttnttttaataaaaaagttag

SEQ ID NO: 16143 - DNA, 355 bp, Glycine max
tgactgtgaatactttgaatgatatgtttatatgcacatcgtctcattcctaccacattataagtgagttaggagtcattctctaagtaacttgaagctacataataagattgacatgtaagatagttatatctcttattattaaagcaaaaaagttatgcaatgaaattttcccaccttttttgaattcaaatccagcccaaattcatgtaacttcaatatcatatcagaactattgatatattcataacaacaacaacaaagtgtcacctgtgtatcgcacgggtcacccaactagttatatgctaatgctagatatatgaattgtgctagtgttggtgtgagagtgcacttg

SEQ ID NO: 16144 - DNA, 351 bp, Glycine max
agcttcaagagtcatctatgttgttgtcctctgcagccacaccatcttcaaattctgtagctttgtcgtctaactctagggttgtttttaattctggtgatgcaaataaattttcaaaggtttctttgacccctagttctcacactctgtggcatactaggctgggtcatcctaatgctcatgttcttaaactttctcttaatcattgtaatattgctccatccaataaaaatgtctctgagctttgctcttcttgttgtgtaggaaagtcacaccaactcccttcatctagttctcaaactatatactctactccattggaattaattattactgatttgtggggaccct

SEQ ID NO: 16145 - DNA, 257 bp, Glycine max
tcaagcttatccaaaatcattttagagagaagattttattattctttgaaatgaactactccacaggctttaattaactaattgcgccgactaataatcatctgtttaataagctatctgtgaaagcttctaccaattagcttttgcataacctacttttagcttatgaatgaaactcattgctaataggcccccactcgatctctcttaccaacatttgtggagaatgtatggccaatggcacacaaggccttttt

SEQ ID NO: 16146 - DNA, 346 bp, Glycine max
agcttatgtacgttggatttttttttttctcatttttggtttaagggcaaatgtgcaatgcatatatagttgacgcattaaataaaatcgatggcgaaatttaattgattaacaatcattatttttctatctatatgggaaatttttttagtattactcgcttgcatagaaggctcaattttacacttgtccagtcgtctgctttcaaccatcaagtacaaacatcttgaatccatttatgtttacgtgcaaacattattttactcaacttaaataatggatgctttttcctccattttccctttctctttcattatcattattattaggttttggtgctgattat

SEQ ID NO: 16147 - DNA, 358 bp, Glycine max
tatgatggaagaaacagctagttaattcaagtttcctaattaattgctgcacatgcaacatttaatactactgggctcttttgctttactgttgagtcatcaagggactcttgttgtcagagtcttttgtttttgttatcctgactcacagagatatcaaaacaagtacatgaaagaatgccatgtaattctttgtcctctattgatttcagattggttttggtatgggtcattttcagtcaaatgctggtttcctcctcttattctttgcttttccccctctcgagagtgtggggaattttcgtgatacaaggaaagaaatcaagatgccttgtcccttgaaatacaatgagaatct

SEQ ID NO: 16148 - DNA, 341 bp, Glycine max
  unsure (1)..(341): unsure at all n locations
agcttggnctatntaatttaatatactntnaaaaaagctggagtctatgcttttaattaaataagccagttcaagccagactntatgtatgtcaggccgtatgcccctgtaggctggtctggcctattctcatccctacttgttatcattaccattgttgtcacatctatcattactaacacctttatcatcgccataacattgttatcatcacttgttaaagttgttatcactattatcattatactcattattgttattgtcgntactataaccctcactaacaccctgtgtgtaatagntgtgatgaccataattataataatgataataatgaaaaa

SEQ ID NO: 16149 - DNA, 354 bp, Glycine max
ttacaattgacacaaggttttgtttcttttattcaaaatcaaattgcaattgctttggatcattgaggtattgaggtgtcgggtgtaattaaggtaaaccttaaaagcatcattgtaatttactcttttttctattaaattacaagaagggaaatttcgtgtatggttcgaaacattttctttggataagtcaaacctcaagtaatgaagttaaaggctgcattaactagctagccaagctcattcgcttattgaggttcacgataagttcaaatgtaagatcgatttgatccaaactcttagaacaatttaaaccccaattcactctgaggttcacaaacagtgcaaatacat

SEQ ID NO: 16150 - DNA, 344 bp, Glycine max
agcttgaaggaaaactggatgctttggttaacttggtaacccaactggccttgaatcagaaatctatacctgttgcaaggtttgtggtttgtgctcctctgctgaccaccatacagacctttgcccttccatgcagcaacctggagcgattgagcagcctgaagcttatgctgcaaatatttacaatagacctcctcaacctcagcagcaaaatcaaccacagcagaaaaattatgacctctccagcaacagatacaaccctggatggaggaatcaccctaacctcagatggtccagccctcagcaacaacaacagcagcctgctccttccttccaaaatgctg

SEQ ID NO: 16151 - DNA, 350 bp, Glycine max
ttgagtatagcaattgtttatatagttagttctaaaattgacatagcatttgcgagggattcaaccattttagctatagaacctctagctgattatccttccccatatgaaattcctcatgctgattcaactgaaccaccttcacaagataatagcccttctaatggctcaactgaatacattgagttatattcaatgctattagaatatttcgatctgactcgttatggagtagtggttgatgggaggacagattctagctctgtaagctcttgacttgcctctaagaactggagttatattaatttgtaaaaataataaagtgatgcattaaatgtccacatagatta

SEQ ID NO: 16152 - DNA, 339 bp, Glycine max
agctttttgtttatctataacattttattatgtaaaaatcaaacttaaatattctcctacaaacttaatatgtattatgaactgaaatatagttatatttagatcttttattaagcatttggttgcttatgaccgggatcatcttttagtcctaagaattcattttcatgagcggcttggtatctgaaatggaaataacatttagtgaatgaaaataaattggtagagctcaattcaatggatttagaaagaaaataattttgaaattagtataacgtattggacaactttttatttactcatcttggtatttctaatcaccattttcttaagaaaaaa

SEQ ID NO: 16153 - DNA, 360 bp, Glycine max
tgatgatcagatggttgtggagaaaatcttgttgtctctctcacctcgattagattacattgtgtgtgtcatagaagaatccaagaatcttgaggatttgaagatagaggagctacaaggttcattggaggcacatgagcaaaggttgaatgatagagacaaagaaagatccacaaaccaaactttacaagctcattcctcaaaaggcaaaggaagagggaagtggagcactgataaaggaaagggaagtcacaaaaatcatagcaagaattttgaagaaactcaatcagaaactggagaatctttaggacaacacaagaatggagtgaagagttggaagaaagagggaaagaaatttga

SEQ ID NO: 16154 - DNA, 361 bp, Glycine max
agcttgtaggattatggggtactcatttatgtggtactaggtggcggtcgggcgatggtgcacaacaagttttccacatccacaatgcgcgcataaacccaccatcccctgttgcccacctccaactgagctcacgtactcccacgtagcccatatcctcgtttctctcaataccgggtccccatcaatcctcccaagcttccacaacatccaagcaaaacaacattcaaacagcacaagctatcatagccaagcaaaacagagcaaaggcagaaaactctgctcaacacaccaaccaaaatcacagcttttctcacttaaagaccccagtaacaattccttcgatccaattcactaaccg

SEQ ID NO: 16155 - DNA, 358 bp, Glycine max
tccatcatgtggtatcaagagcatcttcatttatgtgatgttcttttgcttcctctatctttttgtttggtgaattctctttaattccttgttcttcatcttattctgcatgtatatcctccattttcttgtggtttggtgctgtttagagtagattcaaaaaaaactaaaccgattaaatcttagatctacacttgttcttgcatttctatggctcaaattttgtagatctactcttgaatcatgtttttgtgtttattttaggttctatcatttttaattcataatattcttgcgctgaaactttagatctaaattttcttccaaaatattgattagaaaaaaagacacaaaaatc

SEQ ID NO: 16156 - DNA, 352 bp, Glycine max
  unsure (1)..(352): unsure at all n locations
agcttgtaggattatggggtacctatcacatatggtactaggtggcggtcgggcgatggtgcaagacaattctccacatccacaaatcacgtataaacccaccatcccctgttgcccacctccaactgagctcacgtactcccacgtagcccttatcctcgttcctctcaacgccgggtccccatcaatcctttcaagctcccacaacatccaagaaattcaacatcccatcatcacaaactaacaaaaccaagcaaaacagggcaaaggcagaaactctgcccaaaacacaactcanaatcacagcttttcacatacaaataccccagtaaaatttccttcattccaattc

SEQ ID NO: 16157 - DNA, 359 bp, Glycine max
tctcaaggaagctacctagtctataaatagattcatgtgtaacacttgttgtaactttgatgaatgagagtcttgtgagacacaactcaaagttcaacttctctccctttttcttccttcaatttcgtgctcccccctctctttctctccctctttcttttcctccattgaagcatcctctctaagcttcttatccaaggctcatcttggtggtgaagctccttcttccatggcttattccctagtggatggcgcctcctctcacctcttctcctttgtcttccgctgcatctccatggtggaaaatcaccattaaaggacctcattgaagctcaaagatccagcctccatagaagccc

SEQ ID NO: 16158 - DNA, 352 bp, Glycine max
agcttctctatattgggcgcctgttgtataatttcatatggaaatacattcgacccaatatgaaagcacagagtaagaacttgtaacttgtgtaagaagtttgtctgaaattctccacgcttgatcatctccagtcctatttcaccgagtgacaggcactgtaagttggatgtaggctaccaagagaaaccgataaccaagcaaaagcaggttagggaggttgtaaaagagatgaacctgcaggctagctagctattaataaggtggaagggattttgatacggtatgtgcctaaacaaatttatttatttttagtttaaaattttagatgaaaaaggtgataaaggagacc

SEQ ID NO: 16159 - DNA, 361 bp, Glycine max
tataagtttttcctgaagtcattttgatctcttcttggggttagtttgttccataaagaacatcctttgtcttcttcaacccaagccatatagaattacttttggcgggacatgggagaacagtaagaattgtctttggaaaattaaattctgaaaaaaagggagtactgtaaataaattcgggaatatattttctagaaagagggtatgatttaaaagaaaaagtgaaaggggagtgtattagcaagatgggaaagggggtaaatagcaactgcctcccaagttacatcttgttagaattcatatattttgctacggaccaaaatatacattcaaacttggtatctttttcatgtttttt

SEQ ID NO: 16160 - DNA, 344 bp, Glycine max
agcttctaattttatcaaatatttttaatttaataaattaatttttcaatttctaattaacttttgaattttcaactaaatataaccttagtttcatatatatttttttaagtttgacttaacttaaaagcttattttataatatcactttgtaaatgaaaatttgcctttaaaaattaatgatctaaacaaataatatgcttaaaattttaaatatattaataaatatttagtttcaaaatattataataattatatatatatatatatatatatatatatatatatatattatggttatttaaataaattaaattattaaaattaaaaactttattttttct

SEQ ID NO: 16161 - DNA, 348 bp, Glycine max
tggactcgtcaatgatgagcaccctcgaccattttttctcgcaagaggcactcacatgatccttgatgaagttagggaaggggtcaaccatgttggcatcattgatggcaagattgacaacggggtgggcgtcaagatcggagaggggaatcccaagggagagggactagtcgtgggttttggtggaggtggggatttcgatgatgtccttgagcttgttagactcaatgtactcgacgaccttgtcagcggcgattttcttcaaattgggaaaacatcaccaaatccaactccatcgaccaagccataagatcctttgccaaaaaacatgttcaaaagcttcaaatc

SEQ ID NO: 16162 - DNA, 341 bp, Glycine max
agcttcttggctatgacttctctattcaatacaaacccggcaaaaagaacgtagttgctgatgcactgtcgcgtcttcctcactacaaccagggccaatacctcatcctctccatgccacaccccatgttccttgaggccattcacgattacgttcactccaacacttcattccaggaccacattcagaagctgacctcttcgcctgactcacatattgactataggttccacgatggactcctttattttcagaacaggatatgccttgaccaacaacacccctttcgtcactccctcatctgggagttccacacccccccacttggtgggcatatgggt

SEQ ID NO: 16163 - DNA, 356 bp, Glycine max
ttgatcaattaaccaattattagttttattattcgattatagaacacaattttagaaggagggaggctttatagcttgagataattgattaacatgtactataatccattagattacttttggaaacttaaggtgctccttgtgtgatgaataatcaataccacaattgctaatcaattattccaaaaagcatgagaaactctttatctaaaagagataatggattacaaattttttgaaaaggtagaacaaataggattttggagaattatttgattaccatatttgacaattgattaaatctgttttaccggtgaaaattataaatatttgttaactcgttggcaagtgtatca

SEQ ID NO: 16164 - DNA, 337 bp, Glycine max
  unsure (1)..(337): unsure at all n locations
agcttgtagaacggatggacattgtatatgtcagggtgttggtctggttcagggataaaagggaatgtcccacattatttccatgacacaaatgcaacaatgatgatttgcacctatgtggacactcaagtgtcgaaatttttttggtcatgtgatgctagggctcataattcattttctctactttagtcaacccagtgtttccaaaatatgttcttctatcaatttgtgcattcatccgagtctatcttgggtgttcggaaaaactttcacagcatttacccttcaaatntgtacacacatttttttcaaaaattggttatgatcagtgaatttt

SEQ ID NO: 16165 - DNA, 356 bp, Glycine max
tctagccaaatggacttaccttgaattaattcctttgatagcccttttgagccttgtttccctttccttgttttgaagctcactacaagccttaaatgaaaaaccatgatatcaccatatccttaaggaattttggagctttggaattgttttgggaataagtgtggggggttttgtttcattggataatatgtttgttggctatgcttcatgatgtatttttgggccatacttgatgtacattgtatattggttaaatgttggacatgctgaatgaaatgttgtttctcaaatgtttcttgtttaaaaaaaaataaaaaaataaaataaaaaattcgaaaaagaaaaagaaaagc

SEQ ID NO: 16166 - DNA, 353 bp, Glycine max
agcttgtggattaattagtattttagtttgaggtctagatatataattatattaaatatttagaaggaaaacaatttatcgtttataataattttatttgattcgagtgaaaattatcacttgtaagaaatacatataacatctacaaataacaataaagtctatcatatatgtgaattccacttatgttttttcgtaaccggttgaaagtccggattaaggagggaagttgtgttagaccattggcaccaacttaaaattcgcctttatacccaacatggatacatgggatatcttaaaaaaacaaaaaggattacaaaaaacatatataggagctgcgataaatatatatg

SEQ ID NO: 16167 - DNA, 276 bp, Glycine max
ggcataccctgatgctaggaagaatttcttctaatgcatatggacgaccattggttaaagattatatgaaacatcccctttgttccttcaaatcatataaatttctacccatagcccgataaacatatgctaaagtttatccccataatattgcaaagcacacttatcgcggcctgattgtttctgagtcaaagggaaagagttactcccatgggacatcacccacaagcattcatgctccattcttgtactcctagatgggacataatcacagct

SEQ ID NO: 16168 - DNA, 354 bp, Glycine max
agcttgttggaaacttattatttataagttaagacgtgaaaaattataagctagttgaaaatttataagttaactaatttaattaaaagtgtataagataactaataaatgtcaaataatgtaaaaaaatatatttaatatttctaatatttgaattttatttttaataacttgttatcttaaaaagtaaaataataatttttaaaattttgtattataaaaaatggttcaattaaatttttcattttttgaaaattaaaattaaattaaattaaatttattagaattatattgtttaaaatcatttttaattaaacactgtattaataatattattttaaaactacaaaaaat

SEQ ID NO: 16169 - DNA, 353 bp, Glycine max
tttggaggtgagcaattcggtgaagtatggattacaatagtttcaactagaatgtgtcagttgacaccagaagaatgaaccaaaatggaggagatcaagccaaagttcaaggaaacaaatacaaccttggaagccaatgggaaaaggatgtcacacaagatatctatcaagatcatccaatggagcaagagttgaaacaaatagaagattcattgctagaagcatggttgaatgatgatgatttactaagggctgaagttagtgctataagcttgatcctttgtgaattttgggctagctcaaattagaatgaaagtttaaatggagacatttgttatgaataaaccgaatgg

SEQ ID NO: 16170 - DNA, 361 bp, Glycine max
  unsure (1)..(361): unsure at all n locations
agctttactatgcaaggaataacctatgaaaattccttcatctgacttagcatcaaattttcccaagttatcctttccattgtttaatacaaagcatttgcaaccaaaaacatgtagatgtgagatatttggtttcctaccattaaacaatttgtatggagttttctttaagataggtcttattaaagccctattcatgatataacatgcagtattaacggcttcagcccaaaaatattttggaagaggagtatcattcaatacggttctagcaatttcttccaaaaacctatttttcctttcaacaactccattttgttgaggggttctaggtgcagaanaattatgttcaataccatgc

SEQ ID NO: 16171 - DNA, 358 bp, Glycine max
tgttataaaagggaggcttaaatatattttttattttttaaatttgcaagtttatatcttttagtctcccaaattaaaatatgtattttttaattttttgaatttgcaaaattttttttagtccgtcttgagataaaaaaaatataacactatagtgttcataatgtatgataagtatttgatataaaatacaagagaaattaaatttaaattttgtgtgttttaaataacttgagtaataaagtatgtgagcgtgttatgaggtggttttgggtttgtcttggtatccttttggttgagtttccataagagtagagtgatagggaagagagtcatttctgcaacaattttgcttaag

SEQ ID NO: 16172 - DNA, 500 bp, Glycine max
  unsure (1)..(500): unsure at all n locations
attatcaccatantaagtaattnagaacggagttnacggtgatcgactatctacacaccncaccannncagcaggagnnanntttgatgtgtacgtcggtcagaccgcacccgggatcctctacaacgacccgcaagcatgcaagctataagcgcctatttccttttctaacgttctcttgcgcaagacattctaacgaaaaaatgcacccatatacaatcaaggaaagattcgttacctataataattacccggacctccaagggggatttggtactaacatcacacacatcatcctgggtaaaggcacaaacatgcctacacaaagcattgtggggcaccaaaaattgcacatgggcacaacttggtggtgctaatacctacacataccccaacttgatgaagaaacttgactatccacaccataaggtgctacaattcaagcccctctttaaataattgatacaaggtgttggcacctaaagccgatgccaacatag

SEQ ID NO: 16173 - DNA, 351 bp, Glycine max
  unsure (1)..(351): unsure at all n locations
ttggagtttccaagtgccaattcgtcttcttctttagtccagncttcttctggcttcaattcatcagtgggctttccttctgtgtccagcatcttgggatgttcccagcctttgatgacagctttccaggttctgctatccagtgatttgaggaaggccaccatccttgctttccagtattcatagttggttccatccagaattggtggtctgttcactggtcctccttctttctccatgttcatcagaatttatctccctagatctcactcagtgatttcgagtgcctgctctgataccaattgaaattctgatcctggggacagatgtcgtacaggatgtcacgacatc

SEQ ID NO: 16174 - DNA, 298 bp, Glycine max
agcttaccaccgtaagaggccattgataagagcttggaagaagaaggagatgaatgtagggagaggatgagaatagcacgaaattttgtactctaaaagagttctgaaatctgaagtttaattttcaaattatcaaagttgaaaaaaatgcacacacaaggcctctatttatagcctaagtgccacacaaaaatggaggaacatttaaatttctattcaaatttcacttgaatttgaaattgaatttgtggagccaaactttggagccaaaatttcactttttatgattagtgaattt

SEQ ID NO: 16175 - DNA, 353 bp, Glycine max
tcaaaaggctttaataaaattgaaattaaagccttccgaacccgggctcttagtacttccacactcctaaactgcctccttaacttccccttcctcaaatttagccaagagaaaaacattgtcttcaagagagataaatttgaaatggacaccatctagctttggtctacaacccccttgttctttgaatctagtttcaaaaaactacttcacttcctcctttacacaatgtggctcttccaccccccccccctccaccctcaagcctctcaacatatttttcttccttctccaatgaccacatgaattaaaatattttgaatttctatcaccttccacgacccaccttgctc

SEQ ID NO: 16176 - DNA, 360 bp, Glycine max
agctttagtcttcatgttgttcatgttgctccccctatctctaacacaaaggcatgacattttttcctcttagaagtcaaccaacaagagattcttctatacatcgtgttatatgtattggtcatgtgtatgaaaattattttgttcaggtaaaataatgatcatcccatttgaatgtgtatatgcctatgcaacaggtatatgcccatttgaatgtatgacaattattttgttcaagttaaccacacactttgttaatttaggagaagattgaacattttgttattgttagggcaatgcttgtaacttacatacttgtgaaacaaacatgaataagtcatgtaatgtggtaattaaaat

SEQ ID NO: 16177 - DNA, 361 bp, Glycine max
tcaagaataatggcctcatcaaactatttatttcttgaagggaattcaataaataggcctcctattttcaatggagtgggttaccattattggaaaacccgtatgcaaattttatagaggcaatagatttaaatgtctgggatgcaatagaagtagggccctatattcccactatggtggcaggaagtaaaaccatagaaaagcctatggaagaatggagtgaagaagaaaagagattagtgcaatacaacttaaaagccaaaaatatgattacatatgccttaggaatggatgagtactttatggtatcaaattgtaaaagtgcaaaagaaatgagggataccctacaagtaacacacga

SEQ ID NO: 16178 - DNA, 358 bp, Glycine max
agcttgtgcattcaatatcctattcatgcttttccatatgttctcaagactggactaatacatttgctgcccaagtttcatggtcttgcaggtgaagatcctcataagcatattaaggagttccatattatttgttccaccatgaagcccttgatgtccaagaagatcatatctttctaaaggcttttcctcattctttggagggagtggcaaaagactggctatactaccatgctcccaggtccattttcagctagggtgaccttaagagggtgttcttggagaaattcttggagacaaatgaccatacagaatatgcaatttcagcaagaaacaagagtctccattcagagtctga

SEQ ID NO: 16179 - DNA, 358 bp, Glycine max
tagaaatgaaggcagcatgttttggaggcctctggtattcgattaccacgctgtgtaatcgattacacagaggaacatgccactgttaatcgattaccagttatgtgtaatcgattacacagtgcatttttgcaggtttcatgtcctgaggctgtgtaattcgagtttagcctctggtaatcgattaccaaggctgtgtgatcgattaccacagatgaaaagccttgagataccccttttacttacatgtagtggttatgagacgcattgtgttgctccgtagttagatatcacgtgaaagagtctacccctttcttttattttttgtacatcgggatggcagtgcaactaatccatg

SEQ ID NO: 16180 - DNA, 352 bp, Glycine max
agcttgtaactcttggcaatttttttaaaactagccacttaaaaagttatgacttttgaaagaatcttcagaaacaagtcacttgaagaattgtgacttttggaaatgtatttttcaaaatcagtcactggtaatcgattaccattaaggtgtaatcgattacacatcaacagatgtgacttcattttgaattttgaaaatcttaacattttaaaacactggtaatcgattacatgattatggtaactgattacagctttgtaaatcagtttgaaaaaaatgctggctactggtaatcgattactaccttctggtaatccattacccgagagttaaacactttggtaaaaaa

SEQ ID NO: 16181 - DNA, 348 bp, Glycine max
  unsure (1)..(348): unsure at all n locations
ttgaatggcacggattttatacgaagtacagtctactccatgtgctttctgaccttngtgaaagtgaccttccatgggatattccacggaggccttctagtctcttctatattgcacttttcttgaattcaaatgttagttattcaaacgtaatagagacaaatggaatttgaataaaacagtacatgtgcactttccttttctgtgatacccagtccttgagagactagacacatgaatttatcgtatgacagtgtgttatattgttatgaacaagactagatgcttactaaataaagagagctgaacactacattaaaatagagcattctctatctagttgggggc

SEQ ID NO: 16182 - DNA, 333 bp, Glycine max
agctttttcggagccccgtgaattatgttttcgttcatgtgtccatcatcttcgagtttgttgccatgcgtagtgattgcttaaggcaattctccattctcaaccctttttcggaaccccatgaattgcgtactcgttcatgtgcctttcaacttcgagtatggagccttgcgcagagatttgcttatgcaattctccattctcaaccctttttttggatcaccaagaatggtcgtttttgttcatgtgtgctccatcttctattttggagacatgcgtcgtgattgcttagtgcatatcctcattcttaatctctttttgggagccccaaga

SEQ ID NO: 16183 - DNA, 320 bp, Glycine max
tgatttgtgagttgattttagccttagtttttttttgtgttattagtcaattcattcaaggaaacttccaaagaaaaacgttcgatcgatttttttaattatcttatttaaagatattttgattattttattattattttgctttttttggtttaaccaaggtttcagcgtgaacgattggttagattttgttttaacaatgattaaacgagattaccacacaaatgaccggttgaaattcattttatgatttaataggcgaaaaaatgacttacacgatcggttaaagcttgttataaacggaagaaaataaaatggga

SEQ ID NO: 16184 - DNA, 363 bp, Glycine max
ttatctttagttactttatccttaagtgggtttttatttctagccaaagatcgagagaaagtgaaagagggtgaggattattgtgacaccctctacccctcacatatatattaataaaggaataaaaattcaaatattaattaaaagtatttttaaaacatttttaaatacaagcttttaaaatgggtaaaaggctcacattcactttcttctacatcatattcaaacttgcccaaataaataataaagtcatctcgactcaaagaaagtcatataagtctcatacaattaatatagaacctatatcctaatgtcacatcctatcatagcgtggtgttcccgtgtcctctagcatgatgttct

SEQ ID NO: 16185 - DNA, 348 bp, Glycine max
tgctagcccaaggaagcggaggccatttcctttacttttacaagagggccattcttggatggccttgatctcagggtccacttggacaccatttctaccaactacaaatcctaagaaaactatattatctacacaaaaggtacacttctctatattgacatatagagtgtttttcctaagaactgaaagaacttgccttaaatgtcctaagtgatcatctaggctccaactgttcactaaaatatcatcaaaataaacaactacaaatctatctatgaaatcccttaacatatgatgcataagcctcataaacgtgcttggtgcattatcgatcccaaaggcatcact

SEQ ID NO: 16186 - DNA, 353 bp, Glycine max
agcttgagttagaatacgatgattatgttccaacatttaggaggtgttcttgtcgctgctgtggagcttacaagctagaatagatcgaacacgataatgtaaattatagacaacaagaaagggtgggtgattgcatataatctttttttggtttaaatatattttcatattttgatttttaaatccaattatactttaaaagtttatgaaagtgcattcaattagaatattaaaaaatcttaaatactttatttcatataagaagtcttataatatctaatcaatatttttaaacaagataaaaaaaaccttacaattttcaattaagccaatcatgaacttttttattattt

SEQ ID NO: 16187 - DNA, 355 bp, Glycine max
tgttatatgtttctagctgcccgttgtattctttgctttttaagcatataaaggctccttgacgagaagattcattttctcgtgaagaaatttgagcacatcctctctcccttcctttataagcaactgtcttaacctcccaaatgtaatacgtgagggtcgaattcccttctctatcatctcttccatcacaacacaagcctttgcagcattgtccttttcacacaaccccttgattagggcagaaaaggtgtgcatgcttggaacaaactgttttgatttcatatacttccatattttcagagccatctccaggtcatttttctcacagaacattttaatcatcattgtatat

SEQ ID NO: 16188 - DNA, 319 bp, Glycine max
agcttgtgcccctaacgttttttctgctagagaatgatatggaaaaccgcaaatgtgaaaaggcaatgactctcttcacacctatagataaaaaattcttactttcatcccaaccaatattttaaaaatttaagaacacactgacgtctagtgtggaggacgctgacgatgaagctgtatgagttggtgaggtgaatgggacaacaacaaacgcagaaaggaaaaaaattgttttacacttaatccgatgtatatacttctattataaaatttcacttatcttaactgttaattctacaacccatcaaatcacacgacc

SEQ ID NO: 16189 - DNA, 278 bp, Glycine max
tctttgaaaactttatttctgatgtatggatttgaacctccgcatcaccgaaaataacttccaccacacgtcacgcgaacaacatgattagtttaaggcacgttatggatggtgccaaaactgtcacaccgtttgtccactgccactatattgatggagtcctttacagtaacatgcaggccgaccttgtcaccattcaacattcaactcaaaggggtgatgacactacagcattagtctctgctgctgaacaagttcctttgtgcttaccctatgct

SEQ ID NO: 16190 - DNA, 349 bp, Glycine max
tgaataaaaccaagattctttgtccgtccaattctttactagccctaaacaaagcctaagacttaagatttgcttgcttgattcgctcatggtctaaatcttaattgtcttacaaatgaatatctagtattttcctttaaggtgttcaagttattttaagagcttttgaactttacaagaatatacagataactctttatataaagacttcaataattgagcataagccttcctcttcaggtatttgctgtctccaaaaggataaatctctttattcgaatttgcgtctgaagtctaagaacattgatacatttaaagcttgcattatatgaatgtcattcttcatgct

SEQ ID NO: 16191 - DNA, 331 bp, Glycine max
  unsure (1)..(331): unsure at all n locations
agtcatgacccttngaagatgctcttagctggcgaagtacaaccacgagccagccgacgtattatgaccccgaataggtcatacgtggtgaacagcttgatcatatgaatttttcgagagtagccgacgttcaaatttgagcgtctcaatatataataaccgtggatcggaccttagtgggaaaaaatatgaccatataaatatgacgagagcccccctcgtcaaagtcaaatatcgccatatgtgatgccccctaattggactaccaagaaaattgtcaagacaattcgatctctagaagaatctggtgttcaatcacaagtggcttccg

SEQ ID NO: 16192 - DNA, 504 bp, Glycine max
  unsure (1)..(504): unsure at all n locations
tggcaatgagcananttttgaatttgttgtcattccactagctacgcgagactatagaatactctcgctttagaataatcgccatggtcagaccttttcgttcatatgctatgaccaagggcgctatcgtatgatagatgagcactcgatatattgaacagacgggatatgctactctgatgaatatagaacttgagtcatgaacctttctcagcacatagaggtcatgatccaattgcgttattatatactatgagactttcgcgtctgaatatatattatcatacgcgatacgctcatcgtagagtatgccaccatgagtcagtaacatttctcacatagaatgatcctgactcatgtgcgcatttattatgggagagatagcgttgtaatattatcagacgcgtagtctcatagtataaattcgccatgagtcagtaacttttgcgagaagatgtcctgactcatgcttattatatatgaatacgcgtcgaataaaacctc

SEQ ID NO: 16193 - DNA, 341 bp, Glycine max
  unsure (1)..(341): unsure at all n locations
agcttgaaattaatgttctctaacttggaggacaacctaaacttagtgttttgggatcatgaatgtagttagttgatagggaagtctgtgctcgaattgataaacttaattaatgaaagatgtatatatatatatcccctgataactattttacaggttttaaatttctgcatttgtcatattgcattactcttacatcctatctgtccgtttgtatcatttctgctgatctctggtatcagagcctgatggggaagtaggaatacagtccgtaagggcgtatgatagccaagtttatggatctgacacctctgatagnatgagtcatattttacttttat

SEQ ID NO: 16194 - DNA, 347 bp, Glycine max
ttcttagtatcctccacaaggtgttggtcttgacttgtcgagctccaaagctgccaagttttgtcttgaaacaccttaatgttcctagatttccagataagccaagatgtaattgcaaagaacatgatgcaatcctaccctccaagggcattggatagaagactccaagaagattggaccagagatgcagaaaaaggccctaggattctcataagccttatggtagattttgggcttatgggcatagtatgagcccacttatcattgcacatattagattaaggtttcattttttttgggccttgtatttagggctccatactgtaaggaggttaccctaataatgt

SEQ ID NO: 16195 - DNA, 341 bp, Glycine max
agcttggaggaagaatgagattattgagggagaggaagagaagagcctgaaattttgtgctctaaaagagctctaaaatctgaagtttaattttcaaatgatcaaagttgaaaaaatgcacacacatgacctctatttatagccttagtgtcacacaaaattggagggaaatttgaatttcacttgaaattgaaattgaatttgtggacccaaactttggagccaaaatttcactaataatgattagtgaattttagttatgggtcaggccactaatccaagatcaattccaagattctccactaaatgtgcttaagtgtcatgaggcattgtaagcatga

SEQ ID NO: 16196 - DNA, 321 bp, Glycine max
taggggtaggtacgagcaggttctatgcctgtgatcaacagattgtcatcccgcatccggcttaagatgttaaagaagcgcttcttggaggcagcctaatacctttaaaatttttgctttttatttattcatctatttgcttaagttatactcgaacatgcctagtttatttgcaatcctagggattaagaaatatacaagcatgacaagggggcatttagatttttgcaaagaaatttttgcaaaaaaataaaataaaattgtcaaattagctcgcctgggcgagcacccgtgcaccagaaaacgttaaaagggggaggg

SEQ ID NO: 16197 - DNA, 354 bp, Glycine max
agcttaccctgaattataattgtttcatttgcaccctttgtgagctaaatgattttatcaataattgaaccctgaacctgaaagattatctccagataccttgtttagatcctaggagatcatatggttcaaggcaaatttaccataaatttgggggagtggaactaattgggatgcaaagaaagagataaagcatcagcacacacaatacataagttgtgtattaaaaaaaagaagaaagaaaaagaaagcaataaaaggaaaagtgtgttgatgtaataaggtcaaaagcaaatgaaagtgaaaagctagtgagcaagctaattgtattaaaaagatcacttggataagtct

SEQ ID NO: 16198 - DNA, 358 bp, Glycine max
tgcttttacaggttccatttggcctaacctatttataaggctttcccatgcaaggtatatcatcaacctccaactcagcaatccaatcattaaattcagctatagtgctggtatcagaactgctgcaattactccccattctttctaaagggtgcctaatacaattgaaatcccctacaagacaccaacatgtgtcttgggattggatctttttactccttagattctgccagaactgtctctttcctagaaggtcacaaggtgcataaatattaaccacaaccaccctttgcatttcaggcagccagaccccacctagcataatgaaatccttgtcaaaaaaacgaaagtcaacctg

SEQ ID NO: 16199 - DNA, 68 bp, Glycine max
agcttggagaggatgcttcaatgttttttaaaaaagagggagagaaagagagagggggtgctgggggc

SEQ ID NO: 16200 - DNA, 351 bp, Glycine max
tgagctcactgttgctgcccctcaatgctccttatattttgtcatggccacactctttccggaggtctgtagcgaccaacttgaatttttctttggcaagtcttgtttttcctagttcggttttcagagctcgaacttcttcatcctcttccggagcttcgaagttctcttcgttgataatctttaacttggcgagcaaatctaaacctcgtgtacaaactttcagccattcatgataaccaccaatgatgccattacgaatgcccctaagatctttatctttccttaacgggctttcccacgccttatggactctctgtatagccttgaaattttgcgcgccaaaatctc

SEQ ID NO: 16201 - DNA, 348 bp, Glycine max
agcttgcacacaagttggttgttgttgttattggtttgattacatgaaaacctctcatttgtgtttagcttgtattattggtttagatgaaatcccttcgctacaagtcaaacaattatacttggtgatagtgccattagggtttttcttcaccctaaacacctatttacaaccaattggatccctatatggaggcagttcagtaagagtccatgtaccattttttatcaaagcatcatgctcaatcctccttgttgcaaaccaagtaggattggaaagagcaatttatgttaacttgtgctcacaattagctagaagaagagtacgatgaagtcttggattgacaac

SEQ ID NO: 16202 - DNA, 361 bp, Glycine max
ttagcctaaggctgtacaccatgttgctcatgttgctctccctatatttaacaatttccacctcaagacccctagttttattaaatcttgatatatttggtctaaccaaaaccctcttatttagtggttcacgggtaaaaggtatggtctatttgtggtggacgactactctagatgaacatggattatttttcttacccacaaaaatgagtattttagagtcgtctttaaattttacaaaagaattcaaagtgaaaaaggagtatacattacttcaattacaaatgatcatggtggacaattctaaaatgaaattttttttcattatttgaactaaaatggtattctttgcattttctca

SEQ ID NO: 16203 - DNA, 350 bp, Glycine max
agcttgatcttcttgatattgtatatgattaactgaagcatttaatccatcaccttgccagtttgagcggttttctaaagatccatcataaccttgaccctcgtgatattgcacataattacccgaggcatttaagccatcattttgaactgcactatcaggcttcacctcactacttaaattatcatacacattccccgtaaaatccccagactgatctcccaagtcactgaaaaagtcagaatatgatcccaaaccgccgccttcattcaaatcagcatgaaaagaattccaacccacctccttaatcccagaactaccagctgtatcgctcgtgcctacagctgaag

SEQ ID NO: 16204 - DNA, 358 bp, Glycine max
ttccttgaatattcttctgtggtataacaaattggaattcctgcctgtcctgataggcaagcgttaaattgggcaacttaaaatcctctcgataattgtttgcaagattgcggatggctgtgaaagcaacaccaaatgctttgagaacacaaatatgatatgctgcattccaagaaagattacactgttgacagaaaagtaaacttcaagctaacggattataaaaccttcactggtttcacaaaatgctcttcgtgaaatatccaagaggccatcaattccatccttaacagcaaagcattgtttgagtgcaagcaacaaaaagaacgcgtgcatgaaatacatcttcatcaataac

SEQ ID NO: 16205 - DNA, 200 bp, Glycine max
ttgaggagcatctatttaatgttgagcttggagctctaatgacgtgccttaatggcgaaccataaccatctaaaatccaccggatacacactaaaagatggaaaaagacggcccctccattaacaaataacaacttaaaaaaaagcttgccctccaatatgagccttggataataaaaaagatatgatgcttattggacg

SEQ ID NO: 16206 - DNA, 362 bp, Glycine max
ttgttgggcaacaatggtggaggaagaaaatttaaattgctgcgtgagagagagggagagagagctgtctgaaatttttgggctgagtgaggagagagaatacagctttttggttttaaataaagggttttctctttttctattattttatttaagctatgccacatgtctccatttgagcggagcaaaaagggcccactttctcttttgattgtgacccatactcagccacaaaaagtgagaaaagtctgacctttgaaacgctaaaatcctgcctcagtttgcatgccgtttctctgattccagttcctcgcgtttctctgcgtccgtcggggccagttttcgaaagtaagcaatatata

SEQ ID NO: 16207 - DNA, 346 bp, Glycine max
agcttctagacaatgcattgcttggatatttttcctacttggtttatactgtatggtgaaattataaccaaggaattttggtaaccattgttgttgttccggagtctgcaatgtttgctccaacaactccttaaggcttttttgatcagttctaataatgaacttatggcctaacaaataatgcctgaatttggccatggcttcattgataacatagaattccctagtataagtatattgcttctgcattctaggggacaacttaaagaaataagcaataggatgttgagattgactcagtactggttcattacttgaaccaaaagcatcgggctcaagtacaaat

SEQ ID NO: 16208 - DNA, 352 bp, Glycine max
ttagaattgtcctatttgttttgtgttccttttgaaatattttgaaaaaaaaaataatttttttttcaaaatatttcaattttttatagttgaggcgttatttgatttcaaaatccgattattatattcctaacctgaagtgttccttggtgtattgataaaaagtaataatttttctttgaatcttaacaattgatatccttttgaaacaatttttttttcttcatttgaattgatagtgaattctttcaatttcttattcgatttatgtattcttttttctaaactaaacaaggcaaggactaactcctgaactgcaagtaaaaaaagttatagaatagaatatagattt

SEQ ID NO: 16209 - DNA, 353 bp, Glycine max
agcttgtacgaatataagaaacatcttcttcgaccttggtgattcttgacaccatctcattgaagcgcatgtccacttgtaactccaaagtatcaaacttttcaccaacaaaggtttgaagaccatcgaacccatccaaaatcttttgaagaagagaggaatcttctccaccttgtccttcttcatcaacaggtcgagcaccctttttcacccaagagccatcatgctctttttgataaccaaaggatgcaatgacagcaacacctattagaaaggatctcttgattggaacataaggtttagaatcaagagggacgttaaagtgttgaaggaagagggtgactagatgtgga

SEQ ID NO: 16210 - DNA, 354 bp, Glycine max
tggtgtttcaacacgctgacctcaccctcatgttactgccattgtgtttgaacaagcttcattggttttcttgcaggcattccattggcacgaaaccagtctttggtcgtgtttgtactcgcaatcacaagttaagttttcctcaccctaccctcgcagtcttcgccattttgttaacttcccttagttataagtccccttaaactgagcttttaacttcccttagttggttgcaacctgaatttgatctatttaggaaagttgttgttttgactgtttgaaggtttagataccttgaaactaagtttaggccctttgatttgcactatatcagaagtgagttagcctattggc

SEQ ID NO: 16211 - DNA, 355 bp, Glycine max
agcttgtaccaattggtccattgttgacaagtcatgatgatacaattgcaactacaaaatcaattggacaatattgggaagaagatctctcttgcatgagttggctcgatcaacaacctcgtgattctgtgttgtatgttgcctttggtagtttcactcattttgatcaaaaccaattcaacgaactagctcttggattggacctcaccaatagaccttttctttgggttgtgcgtcaagacaataagagggtataccctaatgaattcttgggaagtaaaggtaagattgttggttgggctcctcaacaaaagggtgtaagccaccctgctgtaacatgttttgtcacccattg

SEQ ID NO: 16212 - DNA, 355 bp, Glycine max
tgcctgtagacatcataagaaaaagttagtatagtagaattttttgacaaattgaggagaggaagagtaacaacagaccagaagcgtgtgaagaatcttatcaaaccctcggcaaaatgaactgttttggcccaaagctgaagtaatcttcttgactgaatccctagtcaatatagaagacacagtactagaatcccgtacaatgatttttgatttcattctagcaaggtagtaactggacttctgctgacaatttgaatcatctttgtaccacaagcagagataaaacctgtacatcatacacatgcattacttttgcatatatataactaaaatgtcaattagaaatctgtcg

SEQ ID NO: 16213 - DNA, 320 bp, Glycine max
agcttgacttggcggagtttttttttctcttaatccactctagttattactaaactcaatttataatgaaaaatcccaaaaataaaacctcccattgatttttttcgcttcatttttactaaaagggatttctcgaccattatattattaatttacctcctttttgaattccaaaatggttactgcacgaacgaacgggtgttattcattttaccgaaattaattgatttacaaaataaatgatcggtggaaattattttatttttgatcagcgagaaatgattaaataaatgactgaagcccgtcaaaaggggtacgga

SEQ ID NO: 16214 - DNA, 358 bp, Glycine max
tgcctgtttgatgcagcagtaatgatggccctttttatgttggggaacggttacgaacccggaatgggtttaggcaaagacaacggcggcataactagcctgataaatgccaaaggaaatcatgggaagtatggtttaggctataagcccactcaggcagatgtaaagagaagcatcgcgggaaggaagggcggtggtcaaagctcgcggttgagacaagaaagtgaaggaagcccgccctgccacataagtagaagctttataagcgcgggtctgggagacgaaggtcaagtggtcgcaatattcgaagattgatgtccgagtacattggatttggtatgaccttgccctcctgatt

SEQ ID NO: 16215 - DNA, 339 bp, Glycine max
agcttgttgattaaatcattggttgagcattgattatttcaggaaaacaactctgagtataaaggagtaatgtgatgttgaatctagtcctaggattgaaggatgttgtcatatcctaattctgtctagacaagttattaaaaaaacaaaaaaaatgaaaaaaaataagaaaataaaaaatgaaaaaataagaagaagaaaaagagaaaaagaaagaaaaaaacggaaagaaagaaacttataatggaaaggaagaaaaaaaaaaggaaagtaagaacaaaacaaaaagcttgaacaaagaaaaaaagaaataaaggaaagaaagaacataaaaagaaa

SEQ ID NO: 16216 - DNA, 356 bp, Glycine max
  unsure (1)..(356): unsure at all n locations
tcatgcttcttgtcataatagctgtgcattcttctttgggatnnttctcggtatttgctccaaagttgttggatgacttctcagctaactgcttagctagttgacccacctagatctcaaggtttttcagggctgactcaatattcttatggttggacatggtcacttgcataaactgagctagtgtctcctccagtttggtggtcctctgaaaaatatttggcccttgttggggtggcctgttggaaggtccaccctggtccttagtgaattgattgccagggtgtgatctccattgcccttactgattgtagggaccttgctggaaacttgaaaatcctccttggttgtatcct

SEQ ID NO: 16217 - DNA, 348 bp, Glycine max
agcttcgtccgcaaaagtcactcaaaaccgttttaaggtccaacgccttaaacgatcctctttgcttttatcggttaacattgaccgttcaaaagcataaaatcaacatgtaactttaccgcttttgcaagaactacataggtctaatttcctcatcgcaattaaggatacgtaggagcaaaagccccgcttttgtcgaccaccccaagaaatcgttaatggtccaacgccttaacgtttctctcctttcaaaaaacaagatatcgttaatggtccaacgccttaacgtttctctccattccaaaaatcaaaagatcgtttaatgatccaatgtcttaaacgactttt

SEQ ID NO: 16218 - DNA, 351 bp, Glycine max
tgccatgaatagtttcatgtgtactagtaaataggctggcataatcctgtcataaaacacaaccataaactaaaataagcatatgtgatcagtgtcaaaataaaatgcaaccatttacaaaaccaatcaagaaaataagaatagattattacagctaaccaatcaacaagcctttcaggtagccatgcttgagattgcttgtccacataaaatatttcaattaactcccacgcagctttcaaagatgtaggctcttcacctctctatattatgtgtaatgtgttaaaaagcaagtgattaacttctcggtatcataattcccacaaagcagatctcagctcagctaaacac

SEQ ID NO: 16219 - DNA, 351 bp, Glycine max
agcttctcagcaaacttgtttcctcactagcagttgctagtgctatcatctcaaattccatagtggactgagctaagatagtctatttcttttacttccaagaaatagccccaccagctatgctaaatatatagctgttggttgctttggaatcatctgaaagagtgttccaatctgcatcgctgtatccttcaagtacaacgggaaaccttttataatgtaatccaaggcttatggttcttttaaggtacctcattaccctttcaatagcgtgctagtgctccatactaggtctactgataaacctgcataataatcccacaactaggctatgttggatctagtacaatc

SEQ ID NO: 16220 - DNA, 349 bp, Glycine max
tgtaatcgattacacatctactgtaatcgattaccagagcagattttcagaaaatattctcaacagtcacatctttttatgtggttcttgaatggctatcaaaggcctatatatatgtgacttgagacacgaatttgctaagagtttttcagaacaaaaaggtcttatcctcttataaagcaaaatcgttttatcctcttacaaattccttggccaaattacttgtgattcaataaagaattatttgagtgctcaaattgttcaatctatctctttcaagaaagatttcttcttttcttcttcttcattctgaaaagggattaagagaccgagggtctcttgttgtgaa

SEQ ID NO: 16221 - DNA, 349 bp, Glycine max
agctttagttgggggattgttttatgttgcctgatcatgatggacttctatggttttgtaacttgtggtaggtgatcatttgtaaatattttatgcttaagtaagatataagtaaaattacactggtgtatgtggttcaattagtaaaattatgctttctagcgtgtgtgagtgcatcatatcccgcatcgtgcgtaaggaatttattttagtcttatttgttcaacctttttttatattatgtacgaaatactttatactcgttaatatattttaaatgacttcaaaattaagttttgaatttttttacatgtttaacatcattttttttacttttggtctcttaatt

SEQ ID NO: 16222 - DNA, 308 bp, Glycine max
tgctctaaatttacattgatgtttgtacttatgggaggaggttgtatgccatttttgttttaagagtagtgtcccactggtaaaactaactttccaaaatgtttgccttcgcaggaaatggccccgaggaagcttgcctcaaagaggtccaggaaggacaaggcagccgaaggaactagttccgctccggagtatgacagtcaccgccttaggagcgctgtacaccagcagcgcttcgaggccatcaagggatggtcgtttcttcgggagcgacgcgttcagctcagggacgacgaatatactgattt

SEQ ID NO: 16223 - DNA, 324 bp, Glycine max
agctttgaatccccctacattttcacaccaaattgcaagatgaagctgtttctggagtctatgagcctacctctacctcgtgggaccttcaatttcaagtaagggtggacttctcctcacttgaaatctgtgggtgttgggttcttgggagctataatggatagttctactaggttattgctttagggtagctgtttgtgaaggaaattgttgtaattatgctaaacttgacatgtttaatgtaagcaaaactgcccatgttgatttaagattcaataatgatgttttgagttatatgtgtgcttaaaatgtaaatagaaaact

SEQ ID NO: 16224 - DNA, 358 bp, Glycine max
ttcataggtgaaatcaggtgcagccatttcccttagagtcctctcacgaggtggaggttgtgccatgttctcagaatgtgcaaaatcagaatgctcagaatcagaatgctcaaaattataatgctcaagatcaggatgttcaaaatcaccaataagagaatgcacagattcgccagttatggaatgctcagaatgatcaaaaggtataaaatgatgcctaactaatctatgaaatgtcctatctatctcaagatcaaagggttgtaagtcagatggattgcctctagtcatacactacattcagcatgcacacaactagttgccttgtcatgtaaataaaggtgtaggcttgaactac

SEQ ID NO: 16225 - DNA, 227 bp, Glycine max
ttacagcacatattagaaaggacacactaacttataatttaaataactaaatgccattaacctatggaattaaagcaaactaaatggctgtttgtaactgaaattgttattaacctaaagtcaccccctacagccaacaactcagccaccatttgcactatcaaaaggctgatgcctacgttgccaattgtgcccttattacaacttgaactctagccctgttagat

SEQ ID NO: 16226 - DNA, 359 bp, Glycine max
agcttgctagctgtttgagattatttctcctcatctatctctagtaaccctttgttgtgcagtgccattgtcaatcactcttgtccatctgttcatctgctctgcatatttccactgctttctattgatatctcctccattcattaagagggttttaggtgtttatatatattttttttaaatgtcaccaggatactgttcatccattgtatttctctcttgggtctcaagttttaatatataaaaaaaagtcatctgttgatcctgttcatgttctgcttttgtccgcggtggttaagcattgatgtcaagcttctgccatggatggttaaacattggtgtgttgcttctgcctttat

SEQ ID NO: 16227 - DNA, 361 bp, Glycine max
tgcattatttgattgaacattcgtaactgttcttcagttacattttttagttgaaaaattgtttgtcactagaattaattaacggatgaataagttaaagtttaaaggtaataaggtcatctaaaaatagaataaaattatatgatagttagttgcgttaaaaaaaatgtttgttagtagaattaattaatagataaataaattacaaaacataattaattaaaatgataataaatgaaatgtaaaaaggaatgatactagtaagagcagagaataatattttgaattcagcatctaatttagcaagatcaaaatgtagtttcaagtgtatcaaacaatttcctatataacttgacaattt

SEQ ID NO: 16228 - DNA, 352 bp, Glycine max
agcttgtcccctgctctaacggttctattccactaatcccttttctacccttaggcataatcttgaaggtaagctggcctcattactctccttttgggcttttccatattctgcacctctgctgaatgttctctttgtacccctgctctgtgatctgtgttttccctatcatagtctttttaaacaaaagggtttcactgtttcagaagcagcagatagaacgttgaaatggagaaaaagttttaagtaaagctttgtgatcctttaccaccaaatcatgatcaagtgatatataccatatgcatgatgcatgaaccctacatgagagaaaacgatcataccagcgtatata

SEQ ID NO: 16229 - DNA, 365 bp, Glycine max
ttgcggcagcatgtttatattatcgatgtgtttatcttgtgttcagttcagatgttgataatcgttgttgttgtacagactcgttgtattttacctttgacgtagagaagatagtgatttacagtcaaattaattttattatggttaaaaatacgtaataattaaaatttcttattgatataaaaaaaaaatcaaaatttgaaaactaaacaatatgaaaacacactaaagtataaacagttatttttgtttgaaagacaaaattcaagtatcttctaaaaagtgataatagaagctttcagaaatctttttaaatattggttataagtgaggaaggttagcgatcctctcaaatattttctatg

SEQ ID NO: 16230 - DNA, 91 bp, Glycine max
ccgggaccttagaacaccgcagcagcaagcagacgaatagaatgctctctaaccggacaaccgagtcaaacgttatgaccatatgaacatc

SEQ ID NO: 16231 - DNA, 377 bp, Glycine max
acgagagactattgaagactcaagcggctatatacgcgggcgcatcttacctttaaattcaagtcgaggaccattcagaaaactagagaacatctcttttatcttagcgagagtgattctcctaaattcttgagtgattcacgaacaccctggctgtatcaaacgactttcacaacctatgggtgttgccctcgctggaaagacggattgttttcttcctttcatcttcacccttgctcttttaaaccacaataccacaaaaatcacctctgaccagaattatctcgtggccataactctcattttacgcactcaaattaagtgattcttgagcctaaattgaatgtcaaaacgagacctttcacctcgtttttgga

SEQ ID NO: 16232 - DNA, 354 bp, Glycine max
agcttgttcttggtttaaacatgattggtacatgatttgggacttgtaggattcaatttgggcaaaattggatgaaggcaagagtagttttcgaaatctgcactttatgcagaattttgctgttgaaatgtgcaacagaattttgtataagtgcagaaaaatgcttgtgtatggctggttgtgaaaagggtagtacatatcgggttctgaacatttgctagcagatcccaacggtcaaaatgtagacttatgtactagagactgccagtaaaattttcgagtcgatccaacggttaacgaattggaacgaaggaaacgttactggggtatttgtatgtgaaaagctgtgatttt

SEQ ID NO: 16233 - DNA, 338 bp, Glycine max
tgcctgtccgatgcagtagtaatgatggccctagttatgttggggaacggttacgaacccggaatgggtttagggaaagacaacggcggcatgactaacctgataaatgccaaaggaaatcgtgggaagtatggtttaggctataaacccactcaggcggatataaagagaagcatcgtgggaagaaagagcggtggtcaaagctcgcggttgaggcaagaaagtgaaggaagcccgccctgccacataagtagaagctttataagcgcgggtctgggagacgaaggtcaagtggtcgcgatatacgaagatgatgttccgagtacattggatttggt

SEQ ID NO: 16234 - DNA, 304 bp, Glycine max
agcttcaacattcaatttctagcgtctcgatgtatcacgggactcaatcagacatccgagtaaaaagttatcgtcggatgaatttgctcagagcttcagaattcaatttcgatcgtctcgatatattacgggactcaatcagacatctgagtaaaaaagttattgtcgtttgaatttgctgagagcttcaacattcaatttcgagcgtctcgatgtatgacgggactcaatcagacatccgaataaaaagctattgtcgttcgaattagctccgagcttcagaattcaatggcgagcgtctcaa

SEQ ID NO: 16235 - DNA, 359 bp, Glycine max
tgtcttgccccttgatatatttgatgttactcttggtcactatgaatgacaaattccttgggataaaggtagtgttgccatgttttcaaagcctgtactaaggcatacaactccttatcataagttgaatagttaagggtaggaccacttaacttttcactaaaataagcaattggatggccttcttgcatcaacacagccccaatcccaacatttgaagcatcacactcaatttcaaaagatttttgaaagtttggcaacacaagtatgggggcattagttagcttttgcttaagaacattgaaagcttcttcttgtttctctccccatttgaaaccaacatttttcttgagcacttc

SEQ ID NO: 16236 - DNA, 82 bp, Glycine max
agcttgtccacaaaaatatggttttgaaagtttatcatttcagtctcttaccaagtaaaatggatcatttttaacgcccatc

SEQ ID NO: 16237 - DNA, 359 bp, Glycine max
ttgcagatttggtcttcgccagtgattggatctatgtgggtccgaaaagaggcaaatttgatcatcctactaggacaactgagaaaactgaggcaaatgaagagggtgagaaagagggagaaacccatgctatgactgccattcctatacggccaagtttcccaccaacccaacaatgtcattactcagtcaataacaagcctcctccttacccaccacccagttatccacagaggccatccctaaatcaaccacaaagcctgtctaccgcacttccaatgacgaagaccacctttagcacaaaccaaaaaacaccaacaaaaaggaattttgcagcgagaaagcctgaagaactcacc

SEQ ID NO: 16238 - DNA, 326 bp, Glycine max
agctgtgttcgcgtttatctctttataccatcttaaggtgcaacgccttaaacgatcctctttgcttttatcggttaacatggacccgtctaaatcatacaatcaacatgtaactgtaacgcttttgcgagaactacattagcctaatttcctcttcgacggaggatacgtaggaacaaaagccctgcttttatcaacctcctgagatggttaaaggttcaacgccttaacttttctcaccaaggagaatggatcattttaaggtccaacgccttataagaccacctttcaagtaaatagaatcacttgattcgccccttgtgcaa

SEQ ID NO: 16239 - DNA, 349 bp, Glycine max
tgaattcaggactttctgaataatcttttttcttcaactatgccaaactcaaaacattggtatatatgaactcatcaaattagactatattggtaaattagtcaatctgtaaggaaagaggcttttaacatgaaggaaaattgtagcttaatatggagacaactgtgaagggtgaatatgtaaatgcagaaatgccaaatctgaaggagattcctataatacaagaaaagtagtgaaagcttttacagagtaagtttaggcaatataaacttatttcaatattttttaaattagttagtctatcattcctcaaacaggagaacaaggaatcttaaatcaccctattcac

SEQ ID NO: 16240 - DNA, 318 bp, Glycine max
agcttccattgttcaatttcgttcgtctcgatatcttatgcgcctgaatctgacctccgtgtgaaaagttatgaccatctgaatttctcgagagcttccgttgttcaattttgagcgtcttgatatattatacgcctgaatcggacctccgagtgaaacattatgaccatttaaatttctcgagagcttccgctgttcaatttcgagcgtctctatatgtgatgcgcctaaatctgacctccgtgtgaaaagttatgaccatttgaatttctcgagagccttcgctgttcatttcgagcggcttcatatattatgcgc

SEQ ID NO: 16241 - DNA, 346 bp, Glycine max
tttcactcggatgtccgattcaggcgcataatatatcgagacgttcgaaattgaacaatggaagctcttgagcaattcaaatgatcataacttttcactaggatgtccgattcaggcgcataagatatcgagatgttcgaaattgaacaacggaatcttttgagcaattcatatggtcaaagcttttcactcggatgtccgattcaggcgcataatatatcgagaagttcgaaattgaacaatggaagctcttgagcaattcaaatgatcataacttttaactcggatgtccgattcaggcgcataatatatcgagacattcgaaattgaacaatggaagctcttg

SEQ ID NO: 16242 - DNA, 283 bp, Glycine max
agcttgaccccattacaacctgttttgcctcacttgtttggaattttatggtgtctattacagttgagttgattgattaacaaaattgtgaatatgtttgctgaattgtgatttgagtgtttcttgttatttgataccattgagagattgtgagaagagtgaacccacctctctttgagattattgtgccagtatagttaaccctaatggattccttgagttattttgtgtgacttgacgtgctaacatttttacaataaaaagtcctctgaactttgttacc

SEQ ID NO: 16243 - DNA, 357 bp, Glycine max
gccttgagaaacttacttgagtaagattcctatataagctagagcttagttacacatacctttcttatagctaaactcacctccttgagatgagaagctagagcttaactacataccccctataatagctaaactcacccccatgcctaaatacatgaaaagtccccactacaaagactactcaaaatgccctgaaatacaaggctgaaaccctatactactagaatggccatgatgcaaggcccaacagaaggaaaatcctattctaatatttacaaagaagagtggaccctaccttggcccgtgggctcaaatatctaccctgaggttcatgagaaccctagggacttctttaat

SEQ ID NO: 16244 - DNA, 106 bp, Glycine max
tggcgcgtccagaacgtcaacaatgttcatgacgaaaactaatcacgtaatcgtcccctaaaccgctattgactatattcagggcacacgaacctgctacaaagcg

SEQ ID NO: 16245 - DNA, 357 bp, Glycine max
agcttaagacttatatgaatgctattgatgagcagtttgttagcttcaataagtccatggtcagcaccctaatgaaaaagctttcaagcatgaagtatgataatatcaagggtgtgcatgagcacattatggaaatgagggataccattgctaaactaaaatcccttgaaattaagataaaaaagttagtgggagtggaaatacttaacatgtggaatttgaagaaataacaaaatcacctatgaaagaaatagagttgactaatattcaaaataataaacatgatattattgaacatcaaccaactcatcaagaaccacatgtggaggacatgccacataagtaacccattaacat

SEQ ID NO: 16246 - DNA, 360 bp, Glycine max
ttgataagtttttcatactcagctttcctttttgcagtcttggcttcatatggagctttctcctttacatttcaaagagaggagtcaaaattaattaaaaaattaatcccttcttcaatagaatgggttcatttggtacatatatatagatatactgaattcaattgaagcaactttgcttacaaatgacaaactatatctacctaaaatgaatttatactgaaaacatctaaaaacacaatgaaaaatagtaaattaatttaaaagagaacaaaaatgtgccataatttatcacaattgcaaagcttacagcactggacagggatttccatttctctcctccagcttttccaaccttca

SEQ ID NO: 16247 - DNA, 355 bp, Glycine max
agcttgagctctggtacatcaactgctaaaccgtcccattccttaagcagcaaaccaacattttgcaaggtttctgagttaataaagttatgcctttcaaccaacaaagaaaactagaaaaagtgaaaaagattcaaaacgcaaaccttgagaatcatatgaccttctaacatatcatgacattgagcactacaagattccacttgacttaatagattctggagcacgtctatcttcaggagttgaactttaacatccacaaactattgaaaacatgaatttcatattataatctgcatgtacttcacaatgtgggtgttgtgcctgtgtatgatatatactactcacataaatg

SEQ ID NO: 16248 - DNA, 365 bp, Glycine max
tgcttggccaactccttttatttgtcaattcttttccctatcttttggtccatacacagttacacacaacacaaattaaatatgtatgaaactgttctttcacacacacacaaacatttatatcctgaatttcctgtttctacgtacatgcatccatatatgtagactaaaactataagattaattcaaggaagttatattgtagttaaggtttgaggcgaggttaagagtgtcctctaataaggcatagacttttatatccatccgtcatacccttttgcaaacctgtttctacaaacagcatcaatattgcatttcagaaagactggaaaccctattgagggaagacgcgcgacgactctaat

SEQ ID NO: 16249 - DNA, 346 bp, Glycine max
agtagctgtgtgatagcctccctctctggttttgctcgcatagttggccctcctccaatatcagggggtggcccacgaaccgttaaaaggaaactactggtcccttaaccgggagtgcaagtctcggttaagcatttaaggacagaggaccttaaattatcttaaggtgtggatatggagcccactgaaagtgaggacgcgtagccctctaaaggcgagggcgtgtagccttctgaagttcaagacgtgtcgccttttgaaggcgagggagtgtagtcctatgatggcgaagacatgcaatcctctaaaggtgagggcatgtccccctttgaaaatgggggacatg

SEQ ID NO: 16250 - DNA, 364 bp, Glycine max
tccacaacatccaagcaaaacaacattcaaattgcacaagctatcacagccaagcaaaagcagagcaaaggcagaaaactctgctcaaacaccaaccaaaatcacagcttttctcacttaaagaccacagtaacaatttcttcgatccaattcgttaaccgttggatcgactccaaaattttactggaagtctatagtgcataagcctacattgtgaccgttgggatctactagcaaacatcaagaactcattctgtactactctttccacagccaaccacacataagcatttttctgcacttgtgcaaaatcatgctgcacaatttcacagcaaaaatctgcacaaagtgcagatttcgaaaa

SEQ ID NO: 16251 - DNA, 347 bp, Glycine max
agcttgttggtggcttgtttatgtttgatttaattattctcttctcggatgagaaaaactgggtaggacctaagagtgttgatgcttttattatgttatgttgaatagtgaaaatagttgcttttgcttccattgtgcattttattatttccctttatctattttcttgggttctttatgttaattatttattttaaaaataagttactgcattgactacatgaaataatttgttcttaaaatgtcgggttatcttgacatgtatttgttacttcatccagtcatttgggtatcgagacgtcgcaagaaagtagtgatgtaccttatgcagatatttccggggtgag

SEQ ID NO: 16252 - DNA, 356 bp, Glycine max
tgtgcatgtttagagatttatttagagagaatggtccaagttccagagagttttgagagcttttgctgtgcaaagactggcagagaacggagcttgaagaggaagccatcctgagagcatgagatgagtctgtgagtgattgtgaggttctagaggtggaggagacatccccactacatgtatttcttcaatccttcatttttctcttctctttgttgtaaaggaagcttcccagatatggagagctaaatcctctgttggttcttccttgtaggtacttgatgtaaatacctatatatctatttaatgatgttttatgtgttctctgtgttatcaatacgtcatttcagtgtgct

SEQ ID NO: 16253 - DNA, 350 bp, Glycine max
agctttgcggatttggtcttcgttggcgaaaggatcaaagtgggtctggaaaaaggcaaatctgatcatcctgctttgatgaatgcgaaaactggggcaaatgaagaggatgagaatgagggaaaaacccttgctatgactgccattcctacacggtcaaatttcccatcagcccaacaatgtcattactcagccaataatagtccctctcacccaatcatccacaaagcctgcctgtcgcacatccggtgccaaaacaccaaccaaaaaggaattttttagcaaaaagcctataggattcaccccaaattccggtgtcatatgctaacttgctcccatatctacttgat

SEQ ID NO: 16254 - DNA, 353 bp, Glycine max
tgtaatctataatagatctaagatagatatattagactgtaatttcttgagtggaaaccctttgtgaagtgaagatctgtatctgtgcaatccaaacacataaacctctttgttgttgaaagtccagcagggctggaaaggttaaaatccagtggtgttgttggtttatcctaagttatgttaatgaaatctcatcttgaagggtgaggattggacgtagtcccaaggttaggataaaccaatataaaaatcactgtgcattactcttttcccttcatgcactaattttttgtttattaatctgttaactagtttttgtatatctttaagacaagaaacctttcacaaatacc

SEQ ID NO: 16255 - DNA, 331 bp, Glycine max
agcttgtgtttttttggactattgttgaaaattcttgattcttgatttgactcactcatgttagtggtataaatttttaaatgtttagcgcaatgatttgtagctggttgtgttctttctgtaaattgtgtggtattgagttgatttgttcaattgtgtaggccactgggaatcagtatggatcagttgattcaggaaatgctgctaatggccagatcccatcgtatgatcggtctgtaaccccagtgttgcaggattttattgatcctactatgtgttacctcccaaatggttacccattcactgcctattattatggtgggaagtttgt

SEQ ID NO: 16256 - DNA, 351 bp, Glycine max
tgtaccaattaaccgtgcatatgccatgcattatcgcatctcataacacaatgatatttttaaacaaatatgagaggattaatggagaaaaatagtactaactagttcttacattttgatattgctgttgctgatcttgcatcgaatccgataataagggtaagcatgggcacaaagatgccacccccaccaacacctcccacagtcccatatgctgatcctatgaatccaatcatgctgcccactattattttccacccaaatttcatctcctacaaccaaaaacagaagcattaattacaaggtaattaatcccaattcaatgtccttaattaatatacaaacactaat

SEQ ID NO: 16257 - DNA, 354 bp, Glycine max
agctttgtttctgcatcttcttcataaaatttagtgactgcagcttccatcttcaatactacagtctcattcttcatatcttcatatcactaaacacctcttcaacctaagaaaattctggaatcattgttgagttttgcgtttgacttccattacatagtccacccgtatttatatatttaatggcttcttgaggctaccaagttgtatgggggtttgttttgttatatggaaactccagttcaatcagttcacatctagaataatttaaaagagtggaattgcatggctctatatcaataaatatgaaaatagcacacacttatacgagtatcattgtattatcataaaatt

SEQ ID NO: 16258 - DNA, 296 bp, Glycine max
tttatcaaattatacataactcgttttttcttattttcctacactaactcccctttaagtttgaaaacattacactaatatcccttgttaagtctaaagacatttatttcttaaaacgaatcaggaccgttaattattttgattagatgtaaacaaatacacaagttcaatgttgcgccttttgagaaatttgcgtctaatattgatatgacggatctgatgctctattaaaatatttggagaaatctacgcttgatgtttcaaatgacagacacacagaatcatgatcttgcact

SEQ ID NO: 16259 - DNA, 356 bp, Glycine max
agcttgtggagaccgtcctagattttaaagcacccccattgagtatgctgcattctgctgatgaatttgcagtaataacaaacatcacttcattgtgcattaagatttactttgaactttccttcttgacctattatgtgtgcaactatatataatgatttatgatctgtaatatttacgttgatttggagcataatcaatatcgcactttccaaggcttgacttgcctgatgcaaatctcaacaaggactgaagattttattgttgacactttgaaacttcacagttctattgggccctatatgagggaagtcttcaaggacctttccaatagaaaagttagtggcacatgattg

SEQ ID NO: 16260 - DNA, 357 bp, Glycine max
ttggagtttccaagtgccaactcgttttcttctttattccagtcttcttctggcttcaattcttcagtgggctttccttctgtgtccagcatcttgggatgttcccagcctttgatgacagctttccaggttctgctatccagtgatttgaggaaggccaccattcttgctttccaatattcatagttgcttccatcgagaattggtggtctgttcactggtccgccttctttctccatgttcatcagaatttatctccctagatctcactctgtgatttcgagtgttggctctgataccaattgaaattctgataccaggggacagatgtcgtaccggatgtcacgacatcacgct

SEQ ID NO: 16261 - DNA, 295 bp, Glycine max
tgcttctagagttgttttgttctttaatcggccatctgggtgaaaagttatgaccagtcgaatttgttgagagcttctcttgtttaattgggagcatctcgataaactattttgcccaatcggacatccgcgtgaaaatttatgaccattcgaatttttctagaggcttcgttgtttaatttcgagcatctcgatttattatgtactcgaatagaacatcttagtgaaatggtatggccattctaatttcttgatagttttcggtcatcaatttcgagcgtttagaagagttatg

SEQ ID NO: 16262 - DNA, 357 bp, Glycine max
tccatcaataactcatctagacgctctatatgtgaacaacggaagctctcgagaaatttgaatggtcataaaatttcactcaaatgtacgattcggggacataatatatcgagacgctcgaaattgaacaacggaagctatctagaaattcgaatagtcctaacttttcacacagaagacagattcggggacataatatatcgagacactcgaaattgaacaacggaacctctcgagaaattcgaatggtcatatctcttcacacagatgtccgattcagggacataatatatcgagaagttcgaaattgaacaacggaagctctcgacaaattcgaatggtcataacatttcactc

SEQ ID NO: 16263 - DNA, 336 bp, Glycine max
agcttgcatttggaattgcgaatgccccactccatcattaggattagtacctgacatctcaaacaaacaaatcaaacgtaacaagacaattatagttgctgtttgaatacctcacccactcaagtgtatcacacaattatggcttttctctaatgaaacactcttgccttttaccactctaattccccttgagttcttaggcaattcaagagattatggccacaacaaagaacaattcaccaatatgtgtaaggtaaggctagacaaggaaaaggttaaccaagacaaaggctaacaatgtttttacgcacaaatgaaggaaataaaattcagaat

SEQ ID NO: 16264 - DNA, 345 bp, Glycine max
tctgttctgaatttcgagcatctccatatactacgggaaacaatcggacatccgagtaaaaaggttttgttgtttgaattttctaagaggttatgatttcaattttgagcgtctcgatatattacgagactcaatcaggcatccgagtaaaaagttattgtcgttagatttttcttagagcttctatttccgattatgagcgtctcgatatattacgagattcattcggacatccgagtaaaaagttattgtcgtttgattttgctcaaagcttctgttatgaatttcgagtgtctcgatatactacgggacacaatcggacatccgagtaaaaagttattgaca

SEQ ID NO: 16265 - DNA, 333 bp, Glycine max
agcttgtgttagtatgaattgtttgttttctaatctgcagatctcgctaagcgacaacattcttacgctaagccaaattttgtgctaaaaaaacatatgaattttttaatttggctaagcgcgggaccgctgagtgggaagaaaaattgagaaaccaaacgtcttgtcttttcactcagcgaaccactccgctaagtgaaaagaacgaaacgttcttagtgggtgtaatgtcagttacacccactctttgaaaatttgcgccccttctgctccctttttatctcaaactgctccctgtgcgtttttgctttttctactctggctctactttat

SEQ ID NO: 16266 - DNA, 339 bp, Glycine max
tgaaatgaggaagtgtggaatggtgatactttctactattattcgtcgaccacacagtggtacctggagatatgtcgcgggggttaagagaccttggggacgtcaagtggggtgctattgcccaaaaccaagcttgaccaatcccgacccaacctgggcatagtcagtcagtgagaacctgtgatgtacctaaacaggcgaactcctggctgtcaaccgattaaagaacaaagaccacaaagcaaggaggcttgtgaggtggctggccacctgtgaatcttgagtgatatatgggatatggcctctggtaatcgattaccacgggtgggtaatcgatta

SEQ ID NO: 16267 - DNA, 329 bp, Glycine max
  unsure (1)..(329): unsure at all n locations
agtctaaactaacaaaaacgtatcaacagataaaaacttaatttagatttacatagcaagttattggcaaaatctttattaacaaaaaaaaaaaaaacgaaccaagaccttagtacttacatgttcttttttcacattttttacgttcctcttcttgttttcctttattcttctagaattgctacccaagtctgataaaatcttcccgcacatggtgcaagagctgcaacangacattcaaaaatcgataatggcgtgaaaatataatagtagttttcccaaaaccttacgaggaaagaaatacgaagaataatattgtactaatactt

SEQ ID NO: 16268 - DNA, 334 bp, Glycine max
  unsure (1)..(334): unsure at all n locations
agcttctcacagncaaccttcttagcctgttggattgtttagtcctccntgatgtaacctcggtaggattatctcaatgtggaggggagctagggggtgttgccataactctgtgcaaataaaccaaattcagttaggacatagtagttggtttaaacaacatatatgaattaacttctaaatatcaaaataaataaatgcataaaaaatatgcgagatgcaatttgtatacattactttgttcttacgttgttacgtaggaatgttctcccataaaccttcgttatgatcagaaccaattgcatgtacatcatcctcttcattatcattatta

SEQ ID NO: 16269 - DNA, 414 bp, Glycine max
  unsure (1)..(414): unsure at all n locations
gcaactatncgnccctggcacaattgtcagaattattctaaacctgcanggttctttaagctaaccaattccaaacaaggtcatattccatcgacttttttggttattcaaggcatgcattgatgcattcgcattttgtaaacccattgtgcaaatcgatggaacatggctttatggacaatacaaagggacactgttaattgcagttgcacaagatggggctaacaacatatttccattagcatttgccattgtcgagggtgagacagcagatggttgacactttttgttgcaaaacttgaaaacccacgtcacaccataacatggtatatgcttaatctctggtagacatgagtcaatccaaaatgcatacagacgacttgacagtgggtggacaacaaacaactcattaca

SEQ ID NO: 16270 - DNA, 370 bp, Glycine max
  unsure (1)..(370): unsure at all n locations
agcttctcaaggaagttttctcaagaaattttctcatgtagctacctagtctataaatagaagcatgtgtaacacttgttgtaactttgatgaatgagagtcttgtgagacacaactcaaagttcaacttctctccctttttcctccttcaatttcgtgctcccccctctctctttctctccctctttcttttcctccattgaagcatcctctccaagtttcttatccaaggctcatcttggtggtgaagctccttcttccatggcttattccttaatggatggcgcgctctctcacctcttttcctttgtcttctgctgcatctncatgggggaaaataaccattaaaggacctcattgaagctcaaag

SEQ ID NO: 16271 - DNA, 402 bp, Glycine max
  unsure (1)..(402): unsure at all n locations
aacaagagacttcacaaataatcatcatacagcagttacctagcaagactaccctttatatctccccaaaccccatacccacgaaaattaaaggagaaagaagtccacccaaacctgaaatttcaaagtcctactcgtagccacacacttcacgactccaaaaatgctctcctttcgcgatttggagcagaaatgatggccaaaggttgaagctttgcttggagcttcaatggagaatgaagaagaagaaaatggcaacgtgagagagagagagctgtctgaaaagtgtggggctgagtgaggagagagagagttgcttttttttaatgttaaaaaggctttgtcctcatttcttattantttattataactgtgccacatgtctccatttgagtggagcaa

SEQ ID NO: 16272 - DNA, 353 bp, Glycine max
agcttcttatccaaggctcatcatggtggtgtagctccttcttccatggcttattccctagtggatggagcctcctctcacctattctcctttgtcttccgctgcatctccatggtggaaaatcaccattgaaggacctcattgaagttcaatgatccagcctccatagaagccccacaagcaagcttccatcaaaacctttctttgactgtttaagcttgctcgagttctgtcctaagggcctgcacctcttcgtcttcctctggtgcctcaatttcctcccttctaacggttctcaaacttgcgagccaatccaaaccttgcacgtgggctcttcaaccactacctaccct

SEQ ID NO: 16273 - DNA, 290 bp, Glycine max
attatttccatgacacaaaaatgcgaaaatgatgatttggaaactttatgcaaaactggtcatgcatgcacctatgcggacactcaagtgtcaaatttttatggtcatgtgatgctagggctcaggattcatttactctattgtaatcaacccaatgttgccaaaatatgttcttttatcaatttgtgcattcatccgagtccattttgggcgtctgggaaaatcttcacagcattcacccttcatgtgtatacacattttttcaaaaactagtatgatcagtgaatttt

SEQ ID NO: 16274 - DNA, 410 bp, Glycine max
  unsure (1)..(410): unsure at all n locations
ttgaaaatatggtttcacacttcaaattagaggatattttatttattattaacaagntnttaattttattttttatggagatcttaaaaacttattgaaaatacaagcataaaaatgtttcttattagaagaggcgaaaaataaaaggagcagtgggaatgaaacgttgcagccagtagcaatttgacaggtgcaatcggtgactcagtccgaccaatcgtatgtggacatgtcttctcatggaggatttttgtgctgcgtatattagcttattaattntatagctaacaacaaanattaactctttctgtgtaagataaatttaattatttattttataaaataaatatattntgtgaatttaacagttactaattgtatttcgtgaattttaaaatcataacagtagt

SEQ ID NO: 16275 - DNA, 366 bp, Glycine max
agcttgttaatttcaaccgtttcaaatattcatttctattttaaaaaaaaagaaatgagatctctaatgctactgttagactgatagtgttacggcttattggatactgtcagcaagagatttctaatactgtggttgaagtggttcatggggttgcacaatgtcaagttaccaccatgtaattgcaatgacatttgaattgtattaaaatgatagacggcaatgttacctaagaaaaactattatggtagaactgtgtaatttaattgagaaccatgttgagtccaacatgaacttttgtaccaataatatcacatgctagagacaatacaagatggaacgtgatacggaaagtaatttattggt

SEQ ID NO: 16276 - DNA, 319 bp, Glycine max
  unsure (1)..(319): unsure at all n locations
tcatgatgatgaatcaagttgattcaagtagnnnggagttatctaagatgatgacaaaaagcccaagaaaatgatttcaagattgagtcaacaagttcaagatcaagtttaatttcaagtttaatgagcagaaatcaagaagattcaagaattaagagaagtttgatttcaagattcaagagaagaaatcaagaagacttcacaagggaagtattgaaaagatttttcaaaaaacaaacatagcacaattttttttttcaaaagagttttctcaaaattttctaagttactagagtntttactctctggtaatcgatta

SEQ ID NO: 16277 - DNA, 273 bp, Glycine max
agcttggcgctgcaaatgacagtcagattatggctggatgtgtcgccacgtgcaggaacaggggcagtttggttgttgtttggtgcggcaaaaggacgtgcgtgagagcacagtttggctgttgtttgtgacagaaaggtcattggagctccgacagtggccagaatagtcattgtgaaagcttaaacagcttaaacagtgggtccccaatgagacacaattttatgataccctcatcaaaatatcaagctttgataccataaagaagtttta

SEQ ID NO: 16278 - DNA, 310 bp, Glycine max
  unsure (1)..(310): unsure at all n locations
tctcactcccttgacatttattggaggaggaagnntcttatttacatcaatctttgccttggccacctctattccccttactaaaatcttatgccccagcattattccttcctgaaccatgaaatggcatttctcccaattgagaactagattggactcttcacatctctgtaatactctntcaaggtttgatatgcacccctcaaaagatggcccaaaaatagagaaatcatccatgaaaacttcaatgcattnttccacctaatcagaaaaaattgcaatcatacactgctgaaatgtaactggggca

SEQ ID NO: 16279 - DNA, 380 bp, Glycine max
  unsure (1)..(380): unsure at all n locations
agcttgtaaancttgcttttagtctcactgatntggngaagaacttaaaacataattgttgtatgcactacattataggagttatgtttaatgttcctttaatttaattttcccattagaaaagaacatattctgaccgtaatttcttttctagagatgttagctacaacaaattaactggaccaattccaagcatttttggtgatcttccgcacttgaatatgctgtaagaaattttccataattnttctatanttttacaccaaaataatctcatacatttctgagtagctaggaagtgctattctatttcattaaactntcttcagttntagtttgaaatggtaaaagttctaactgggttattttggatagacata

SEQ ID NO: 16280 - DNA, 270 bp, Glycine max
  unsure (1)..(270): unsure at all n locations
agcttcacacttattttatnnggctgagtctctaactatgcgtggggtatattttcttacctatttatgagtgtggacttcaacaaaaaaataatgtcccggtccacttataaatttggattcggatcaagtggcatgattaaaatactatgtactaattatatacagatcatcgaaaggttactagagagatttgccagatttcttctctcacctaaatagttcacatgctaaaggcaaaccatatctatctgaattaataatacttct

SEQ ID NO: 16281 - DNA, 406 bp, Glycine max
tcttagttttagctgatgaagacgaagtgtggctacttcatgcactcctctaatgactatagcatcatttatggcactaaactgttgggagttggaagccatcttctcaattaaatttctggcttcagcaggggtcatgtctccaagggctccaccactggcagcatctatcatacttctctccatgttactgagtccttcataaaaatattggagaagaagctgctcagaaatctggtggtgagggcaactggcacatagttttttaaatctctcccattattcatataggctctctccactgagttgcataatgcctgaaatatcctttctgatggtcgtggtcctggaagcagggaaatttttttctaagaatactctcttgaggtcatcccagctaatgatg

SEQ ID NO: 16282 - DNA, 377 bp, Glycine max
agcttggactccatttctctagagtatgtgtcatagataaaccactttcgactccttctctgcacagctcttctgctcttgtgtcattgagccacatgagaagcaccatgtcaccgccaatgtattttggtttaactcttcacctccatcccacataagtacttcatcaagtctatcaaacgccattaggttcctcagtctacctatccaagctttggttagccatgccttcttattcattgatagtgttagttggatagacgagcgaaaggtcatacttgatgcctgcgcatacttcaatgtccaccgtttcaccacatgcatactgtctgctgcaaccacattcggatatgatctgaaaagtgcctctcgctggg

SEQ ID NO: 16283 - DNA, 398 bp, Glycine max
gggcatcttttatactggctgagaggctttgtttatatttgaaatcagaatcatgaatttttttacaaatattctacccggaagagcaagcactctaagtgatgtgtaataaatatgttatagataatttgttgaaaactcggacaaataaaattctatccatgaaagatgaaccttaaagaaactacaaattaatggatagcatatgttcatagatataattaactttttacagtaatccacccttacatattaaatttgaagtttaattttaaaaataactcatcattctaagttgttcattttcaaaaaaagaaattgagcattctcctttctactaagcggtgggcatagtgtcaaaaaaataccgtgctacataatatttttaaaaataagtg

SEQ ID NO: 16284 - DNA, 289 bp, Glycine max
  unsure (1)..(289): unsure at all n locations
acaaagatgatcataagnacgtttacaacttgacatcaacatttacttgaaattttatagtttctgatacttggtttacttggacataacaatggggagcaattgatggaaaatgaatcttaaattgctctaaggagaagggatctacatatacttgacggagatttgcaatcaccaatcaaagatctccatgaaaagtaggcttgaccaaatcatacttttgtctgaacttgggagcatgatttaaattagagccttgtcaaaaagaaattcagtcttttttatttta

SEQ ID NO: 16285 - DNA, 307 bp, Glycine max
cctctaccactagtcttaatctttggcatgctaggttatgacatcctaatgatcatgtaatgaaaattgttctcaaacagtgtaatatttctcaactgaataaaaacatcaccgagttttgttcttcttgttggatgggtaaagctcataggttaccctctcacagctcaacaggcttcccactccctctctcaagtttgttgttccttttgttcctttgattaataaagagtctgattatcattttcttaaaactgttacgtgtgcctgttttcctttactaaagccatatcatacacacaagctc

SEQ ID NO: 16286 - DNA, 376 bp, Glycine max
  unsure (1)..(376): unsure at all n locations
agcttgtatttctagagagtatcnnnggttttgaatattatgaccatngnggagatngatcatgtttcctgaaataaccaaaatcgtgtgtttctgtctgatatgataagaactttccatatctatcattcataacttaatatggtcgttagactcataaaaggaaaactaagattgatttgaagatttattccttttaaacaaaatcatataaactagcataaattgataattcaaataaaatgcatattccaattaatgtttggatggattggatgagaacttcctacttctagtagactgagtatccccaatggataagtctcacttgtgtngcttctagtcgtcaaacttgttgcttacatgtaacaaaatg

SEQ ID NO: 16287 - DNA, 246 bp, Glycine max
aaattggcgagtggaggaacgccccggcatttacgcaacaagcataatgtaaaccttcacggttttaaaagctctatatgtcgggccctaagctttatgagctttcttatttgataagggctgtgtgtacttttgtttttgaatgtataatacaaggatctttcttcatctgttcctgggctttacccattctcattcatttgcatgtttacttctttttctgatacggcagattcgatgacgagt

SEQ ID NO: 16288 - DNA, 353 bp, Glycine max
agcttctagcatacacacacacgcacactttcacacactatttcttacacatatatgaagggggtgggtggtggctctaaaaaagataaatatctccacttgatcttgcctatgaataaacgccgcccctggaacaattaatgcttggcaaaaaagcacatacctcctcatgcttgaaaaccacccctctaaggaaccggagaataaaccaacgagaaaccacttcctctcatatgaaacaactcgcacaacataacccttctttagaggaaaactgcaacctcaaaaataacggtcaattatccttgaagaatcaaccaacttatgagaaaggctctaccaacaaaacttaa

SEQ ID NO: 16289 - DNA, 353 bp, Glycine max
  unsure (1)..(353): unsure at all n locations
tacgaactagcctctgggcaaagcattaactngaattagtctaaaannnnctattgtataaatgtgccatcaaatgtacaaaatactattactaatattatgggtgcagaatgtctatgcatggggaagtatcttggaattccatcgttagttggtccaagtaaaagggcggtgtttgggcacgtaaaggacaaggtttggaagcgtattcaatcatgggagggccattggctctctagtgcaggaaatgaggttatgatcaaggctgtccttcaggctattccaacatattatatatccatctatttgcttcctgatagcctcgcagatgagatacatatattgctaaattg

SEQ ID NO: 16290 - DNA, 306 bp, Glycine max
  unsure (1)..(306): unsure at all n locations
agcttcacaccaataacaatgacggcactctcntaattacagaccccccttgcaattggggttaaaacagaccttattcggtaaattgctttcaaaatcagtaaatttgccgtgaagtgacatcaatggggatgatatattgatttaaggtcttgatatggattgaagcatttccttctcttacgaccatggaattaaatatcaatatttgaattttgtatgaaataatggcccttaaataacctattggtctactttgaatacgtgtttcgaaatattgcgagaactagtaaattgaatcctttt

SEQ ID NO: 16291 - DNA, 332 bp, Glycine max
caccaatagctaattcccctatattcttcgaacctctctacccactataccctagtgtatcctgtaaatcattcatttctcacagatggaacataaccatatacctcaccatctcacacatggaccataattacatacctcaccatctcatagacaaaatctaaccataaccacaccatctcacagatgaaacctaataacaaaacacgtcatctcacagatggcacaaaactaacagttccttactcttccttcaatctccttgcatctctctgccacactacattcatgataactgcttaatatgagtatattgtgggggtaaaatatat

SEQ ID NO: 16292 - DNA, 383 bp, Glycine max
agcttctgtccctgagaaactggttcccttattacaattgggagtgaagattgctgaaaaccctagccttgcaacaagtcctagggaagtagacacggagatggacaagaaaatccgcagtatggtgagtagcattttgaaagaagcctctgtgcctgaagctgatgaagatgttccaacatcttccaccccgaatgtttctatgcctgatgttgagaaagatgttccaacatcttccggcccaaatgatgaagtactctcttcccccagcaaagagagatcaacagaggaagatgatcaagccgcagaggagacccctgcaccaagggcaccaaaacctgctccaggtgacctcattgacttagaagaagtcgaatctgatg

SEQ ID NO: 16293 - DNA, 372 bp, Glycine max
cctaacgccttgttcaaactctcctataacctttatgtgaatctaggatctctatcagacactatggttgacgacacatcatgtcatctgacaatctcactaatgtataacgaggtcaacttctctaaggaaaacctaatattgatggggataaagtgtgcagatttattgaatctgtcaacaataacccaaatagaatcaaaacctttacgggtcctaagtagtcctacaacgaaatccatggagatattgttccacttctacacgggtatctctaacggttgtaacttacctaaaggtctctgatgttctatcttagccttctagtagactaaacacgcatacataaacttattaacctctgtcttcatg

SEQ ID NO: 16294 - DNA, 379 bp, Glycine max
  unsure (1)..(379): unsure at all n locations
agctnggataccacatgttctcatnacttttatattttagnggnaagggtcaatgaaagtaaaaattcttttcaatatttcacttaacattgtatacaaaagcacaaactattgggacatgcatgttagatttcatctgatgtgggacttgtgtatttcccaacaatgcataagtcacataagcagggtattctagtctctagacatcagttcctatcaaatgaatgacagaggaaacaaattaattgtttcattcacttacatcaaccaagtccaaatttgctactctatatttgtgtgcctaaccagcgtgcgtccagacaggataaactaacagaatgattaatttgaggaagcttgtttagaggtcactgtcttt

SEQ ID NO: 16295 - DNA, 257 bp, Glycine max
  unsure (1)..(257): unsure at all n locations
atcatttctggcgctaaactgctgggagttggaagccatcttctcaatcaagtttctggcttcaacaggagtcatgtctccaagggctccaccactggcagcatctatcatacttttctccatattactgagtccttcataaaaatattatagaagaaactgctccgaaatctgatggtgagggcaattggcacatagttttttaaatctctctcagtattcatataggctntctccactgagttgtctaatacttg

SEQ ID NO: 16296 - DNA, 398 bp, Glycine max
  unsure (1)..(398): unsure at all n locations
agctagaaggtgngtagcttaccatctattcttattatagaaccggtagtgtgtctactatcattgtcgtcatttttttttcgtcattgaggtgccacttgagctgccacgtctctccacctttgggcgtattcttttgaaagatttgtgccccctttttgcacatgttctgtagttgcatcctatccgaagacattatactgacactgcctaatgaaggcaatcactaggtccttccaagaatcgactcgggaaggttccaagttagtgtaccaggtaacaactaccccagttagactttcttggaaggaatgtatcaacaattcctcatcttttgtgatgcccccatcttccgacaatacatctttagatggctcttggggcaagtaatccccttg

SEQ ID NO: 16297 - DNA, 386 bp, Glycine max
  unsure (1)..(386): unsure at all n locations
agcttccgagtntaagcttatttntattttgggctttaagcccatttcgatcagnacttgctttctatttatttattctttaactaaactttctagccgtgaaagccgaacactagatagtacagcataaggaacacaatgtgaaatttattattatacttttttactattcttaaaaaaatttaattataagatcnttttttaaaaaattattttttataagaccacttttttatttctaaatatattaattataaatttttcttattaatctaacttaaatattggttcttcaaatttaatgaaaaaaattgaatgaataaaacgttaaaaacatatttaatatgataaatttattattattctttaagaaacatgattataaa

SEQ ID NO: 16298 - DNA, 315 bp, Glycine max
  unsure (1)..(315): unsure at all n locations
ntgacttgagtcatcaatttattataaatatgngaccttggcttgagtatcaatcatcaatcatctttgaatcatctatctttctatcttttttcaacatcatctctcaaacatctttcaatcaatctttcaatatctttctacagaattttctgattcatttctcttcatctttctaaaagtttttgatcaacactttctcttccaagaaaagttctttgttcaaaaacttgtgttattcatctttttcattctcttctccctttgccaaaagaacgaaggactaaccgcctgaattcttttgtgtctctcttc

SEQ ID NO: 16299 - DNA, 283 bp, Glycine max
  unsure (1)..(283): unsure at all n locations
agcttgtaaaagtcttgcattttagtctctctgatttggngaagaacttaaaacataattgttgtatgcactacattataggagttatgtttaatgttcctttaatttaattttcccattagaaaagaacatattctgaccgtaatttcttttctagagatgttagctacaacaaattaactggaccaattccaagcatttttggtgatcttccgcacttgaatatgctgtaagaaattttccataattnttctatatttttacaccaaaataatctcataca

SEQ ID NO: 16300 - DNA, 323 bp, Glycine max
gtgttcaaccgaaagcttctttcaaagacaggacaatttagatttatgcaaaaacaccaatacgactaaagagggatctaattcgtgagaacttggcaaggataaactttcagaatggcaacccatcgaagccaatgtttcatactgatgattcagtttttgaaggccaatgcattccttggcaagatgccctggttgtgaaacttttaagcaagactattggctacaatattttgaaggcaaactcacgaggctatggaaattcaaggtgggttttgatatgatggacatcacgaatgactcttttatgttaaagtttgatc

SEQ ID NO: 16301 - DNA, 376 bp, Glycine max
agcttgctttgccttcttcttctcacatacacaatgtgtgtcatgcttcccagttgaagagacatgtcactattgctgattcaagtcctacacttcctgatttttctgctgatagttctagtcttcaagaactagaggccattttggatcagatgatggttaggagaagaggacaagttatgaccaaggttttagtcaagtagaaacatcacttgcctgaggattccagataggagttctactatgatctcaagaagcgatttccttgttttcatccttgaggacaaggatagttttgagggggtgggattgatatggagcaaagctgaaggatccacatgtcatgcagttgctgaaggacacgtgtctgtcactg

SEQ ID NO: 16302 - DNA, 147 bp, Glycine max
atacaaagcattggcaaccgaagacatgttgatgtgagatgttcggtttcctaccgttgaacaattgcgcatggagttgtgtttatgataagtcttattcaaatcctatccataactttacgtgccctatgtacggcttcaacccaa

SEQ ID NO: 16303 - DNA, 475 bp, Glycine max
  unsure (1)..(475): unsure at all n locations
ggaccaaccgtttggcccttgaattcgatgcantgcacagacccgggagccgcaaagacgccctgcacgcatgcaagcttacaacaggtggagcgcaatgatttttatacagaaaactcccaacagccgaggcatacggtatagcttgaccacgggtccgtctgccacatgtggtcgacagtgcgccgaactaaaccgggctcccttgcgaattgaaaccggagatgctgaacactcttacatcctagatcgatgaagacgaatatgatgaagacgctatgaaagcagcctaatcatccttgttgaactataacggatatttctatcctatcacataactcgcctgacccgtattcttcatgacagagtgctaagaagaaacttttagctcatgcagagaccatgatcttagttgccgcattatgcctctactacaggacgagagcatacccttctctcaccgacgtcgaaaaac

SEQ ID NO: 16304 - DNA, 187 bp, Glycine max
tcgaatcaaatcctcggacgctcctctgcccagatccacacgacatagtgaacactctagccgcaccgaagtctaataactcctcgcatagtaccttcctgtcactgaactagtccgatacgcaagaggagacgaagcgtaggctctatagtgttagaaggcattccgctatatcaacgaaatccca

SEQ ID NO: 16305 - DNA, 199 bp, Glycine max
  unsure (1)..(199): unsure at all n locations
agctttgtgtaatttattacacttttnttttaatcgannaccagngatagtttctgaataaatcaaaagatgtaactcttcatatgggttttgactttttcaaattggttttaagtttatctaacaggcataactcttctaatggttctcttgaccagacttgaagagtctataaaagcacggctttgtttgcatttca

SEQ ID NO: 16306 - DNA, 393 bp, Glycine max
  unsure (1)..(393): unsure at all n locations
tgacaagtctgtctgtttaaggaataatttttattattattataataataactattattattattaaataaaaacttttaaaagtcttcagattcttataaaataataaatagaaaataaagtgcttagagagttcacttgcatgtggaaaattttcaaaaagaaagagactcaagctaaaaggataatgcaattagattaatacttccaaggaaaagaatgtttgtaaagacattttcgaacaatttaaatattcttgtttgactatattagtataaatcatctataatccatacattttttaatattatgctctgtttnttcattttcttttgatatactgtgtattttaacgacttgaattcaatatgaatttatttatcaattattttt

SEQ ID NO: 16307 - DNA, 401 bp, Glycine max
  unsure (1)..(401): unsure at all n locations
agcttatcacgagcgacaatccccaaatatgttcttaatttttcttgtgggaaacgtcggccttgccggtagcaggatagacattgaccacaggtctttctgccccaggtggtctagtggccaatgatcgtagccgtgtcgccttgcgtgtctacttcaacgtacatggagacgctgatgcgtctgcaggaggaggaggaagaggaggaggaggcgaggcangtggagtagccatggtcctttaaagagaaaaagttgagttagttaatattatcaaaaaacattgtatgagttatgtaaatgaatgtaccgaaatgaaatactatattagaaaattacgttagacgatgttaattaattctccttcatcatgatcattacgattagcatgaacgtcgtca

SEQ ID NO: 16308 - DNA, 342 bp, Glycine max
acctgaggcatgcaagcttctacttatgtggagggcgggttttcttcacttcttgtttccaacgcgagctctgaccactgttcttccttcccgcgatgcttcttttcatgtccgcctgagtgggcttatagcctaaaccatacttcccacgattcccttgggtttttatcagactagttatgccgccattgtctttgcctaaacccatcccgggttcataaccgttccccaacataactcgggccatcattaccgccgcctcggacagacaagggtgcccaaagagggagtccacggaggaaatgctgaccacctcaaaagactggaaagcggcttctaacg

SEQ ID NO: 16309 - DNA, 249 bp, Glycine max
cttcacatcatgatgttggactatacgaatgagtcttcgagcatttatcatcgacaagtgcattattgtttgctttgcttatttccttctcaactggatcacttttaaagatttaatttggcgtgtgcattagacttgtttataccttatatggacttgtggtctggaagaagccaatgataagcttttacttgataatcaactgacagggaagcctacgccctaggaattataaaaaaactaaacctt

SEQ ID NO: 16310 - DNA, 332 bp, Glycine max
acctgttagacaaatggcctcagttatcttaagatggggggttgaattaagatacaaagactattcctcaattaaaatttcgctctctctttttagattaacattgcacccttaacatgaattactcaaaagacaattcagaataaacttctttaaagcaaaagataaatggcaataattaaaagaagtttaagggaagagagaaatgcaaactgatttatactggttcggccacttcccgtgcctacgtccagtcctcaagcaacccacttgagatatttcactctctttgtaaaactccttttacaaagtttgaaccacacagggacaac

SEQ ID NO: 16311 - DNA, 388 bp, Glycine max
  unsure (1)..(388): unsure at all n locations
agcttgccacccagctcgcccaggcgagttcagctagctcattcgagcagggttgcttcctccagaagtaacagccttctggagggcccaagtgggcctggttgctatttgcacccccatttttactaagtacaccccattgcctttttttttgtgattcttttttcgtaaagttacggaaacttatgaatttcgtaacgatacttgttttctttccgtaatgttacggaaccttgcggattacataatcatcccctttntgacttacggaatgttacggaacctcactaatcatccccttttttgatttccggtgtgtcacggaaccttacggattgtgcatcaatatttttttttgttttccggcatgtcccggaatttcacaaat

SEQ ID NO: 16312 - DNA, 344 bp, Glycine max
  unsure (1)..(344): unsure at all n locations
ataagcgcgggtctgggagacgaaggtcaagtggtttctttatacgaagataatttttcaagtacattggatttggtacgaccttgccctcttgatttccagctggggaattggcgagtggaggaacgccccgacatttacgcagcgagcataatgtaaacctttacggttttaaaagctgtatagttgggcctaagctttagagtttttcttttggttaaggctttgtgtattttggtttttaaatttataatacaaggatctttcttcatttgttcctacgtctctacctattctcatccatttgcatgcttacttcttntctgaaacggcagatccgatga

SEQ ID NO: 16313 - DNA, 355 bp, Glycine max
  unsure (1)..(355): unsure at all n locations
agcttcaacatcagaccacttccagggtgttggaacttttttcatggactngatggggcctatgcaagttgaaagccttggaggaaagaggtatgcctatgttgttgtggatgatttctccagatttacctgngtcaactttatcagagagaaatcagacacctttgaagtattcaaagagttgagtctcatacttcaaagagaaaaagactgtgtcatcaagagaattaggagtgaccatggcagagagtttgaaaacagcaagtttactgaattctgcacatctgaaggcatcactcatgagttctctgcagccatcacaccacaacaaaatggcataattgaaaggaaaaac

SEQ ID NO: 16314 - DNA, 327 bp, Glycine max
  unsure (1)..(327): unsure at all n locations
ctataaatagggggagaagngattttttaagggntcagccttgtatgctcttctctctctttcgaatatgcttggaaaaattgattccgtgaagaaaatacaagccaatgcgcttgcgaaacgtttccgtgaggaatttcgcgaactttcgaccgttcttcgacattcttcattcggtcttcatcggtcttcgatcttcaacgggttagtacctcgaaccaagcttttcgattcattctatgtacccgcggtggtccacattgtgtttcgcgtatttttattctcatttcatttactttttatacccccttttgacgtgcttaagcc

SEQ ID NO: 16315 - DNA, 205 bp, Glycine max
gagaccctctggaggcatgcagcacgcatgcatacgtggcgaggcggaattttcttcactatacttgtttccgacgcgaggctctgacgacggcgcttcccttcccgaatgcttctttgaatgtccgcctgagtgggcatatagcctaaaccatacttcccgcgattacctggggatgatatcagactaactatgcacccgttgt

SEQ ID NO: 16316 - DNA, 424 bp, Glycine max
  unsure (1)..(424): unsure at all n locations
ttttggaccttgaacaggcaactaactcctctntataaccatgctatgtgctcgcgactggtccctttcttcctttcgcaacttgagttcactattgctaccccatagagctccgcganatttgtcccggccatactcttccttgcgagccctcttggtctcttgttcaagggctcttgcggtaattgcattctcttcccgtaacccggcacactccttccgaacgtgtgtagcggccaacttgaacttctccttggcaagttttgcctttcctaactcgcttttgagagcttggacttcttcgtcctcttccggtgcttcaacactctctttgctgacgactnttaacttggcgagccaatctaaacctcgtatatgaactttcagccattcgtggtacccaccaatgatgccattacgaatg

SEQ ID NO: 16317 - DNA, 173 bp, Glycine max
cgcgagctgtgaccactgctatatctgcccgggatgcgtcatatcctgtaccactgagagggcttacaggctaaaccatactgaccgcgagccccttgggattacatcaaactagtcacgcacacatagcctttgcctaaagccatcccgggttcataaccgatccccaacat

SEQ ID NO: 16318 - DNA, 291 bp, Glycine max
  unsure (1)..(291): unsure at all n locations
agctntcacaacataatttttataaagcttttgaatggaggacatgaattgttctcatcatcagctcatgaatttacataataaaacaattttcatatagcacatgaattgacctcatcatcaactcaaaaacctcccatgtaaattttggaatctatatgtcggcctgtgcctccttctcctgtcataaaataaattacttgcatatccgacatcaaatatattattgcgcataatatgaaacacaatttaaaaccttctattgttgaaaggaagacaaataactgaatc

SEQ ID NO: 16319 - DNA, 358 bp, Glycine max
  unsure (1)..(358): unsure at all n locations
gacctatagaaactcagctaaagatgcccgatcaatcattcctatgagangttttgaagtattggcaatcagaatagccattccttggattatagggaggaacacagctcatgcttatacaaaaaggctcatcaagacaagttgaaatatggaagtaaccatcctgcaaacttggggcataagatgaatcgagtcacatcactgaatcaactgctgccgaacatatctaggattattgatgtccttgttacttccacattcaccttgacaaagatgtcaaggaccatgttgaaaatctaaattgattcaaccccatatgctgcgtaaaaattcgcaatacttctacatcattcgcatg

SEQ ID NO: 16320 - DNA, 338 bp, Glycine max
  unsure (1)..(338): unsure at all n locations
agcttctagccaaatggacttaccttgatttatttcctttgatagcccttttgagccttgtttccctttcctcgttgtgaagctcactacaagccttaagtgaaaaaccatgatatcaccatatccttaaggaattttggagctttggaattgttttaggaataagtgtggggggtttttgtttcattggataacatgttttgttggccatgcttcatgatatattttgagccatacctgatgtacattgcatattggttaaatggtggacatgctgaatgagatgtngcttctcaaaggctgcagaagaattacccaaaaaaattcggaaaaaaaaa

SEQ ID NO: 16321 - DNA, 370 bp, Glycine max
tcatctgcagatccctcttgtgagactaggcctagactttacagcattattgcgacaacataatgaaaactaacacttaatccatagatccttcttgtcagattaagatttgatcctgcttcaatcaagttctaatgcaacagtacatttcccaatgctgaagtcacctaactatgcacacaaatggatgatcagaccaggaacatacatacattaagcattgaacgatacattgaacacagaatacatagtcaattagatattacgtatttacattagctgctcattagaaatccccaactagagtgtttagccaaccattacagatgataccctaacagaaataagcttacaaaacctatgtatctct

SEQ ID NO: 16322 - DNA, 315 bp, Glycine max
agcttcttttggaccttgttcaagcaattttctcctcttccagaaccatgccatgtgctcgcgactggtccctttcttcccttcgcaacttgagttcactattgctaccccatagagctccgcgaaatttgtttcggccatactcttccttgcgagccctcttggtctcttgttcaagggctcttgcggtaattgcattctcttcccataacccgacacactccttccgaacgtgtgtagcggccaacttgaacttctccttggcaagttttgcctttcctaactcgcttttgagagcttggacttcctcgtcct

SEQ ID NO: 16323 - DNA, 416 bp, Glycine max
  unsure (1)..(416): unsure at all n locations
atatgctgcagaantcctttttgttggagagnnaaattgttttgagctaaaggaggtcttcgtcattggaagtgcggtagacagactttgtggttgatttacggatggcctttgtggataactgggtggtggggtaaggaggaggtttgatattggctgagaaatgacattgttgggttggtgggaaacttggccgtataggaatggtagtcacagcatgggtttctccctctttctcaccctcttcatttgccccagatttctcagtcgtcctagtaggatgatcaaatttgcctcttttcggatccacttcgatctttttgctggcgaagaccaaatctgtaaaacttgaaagtgtgaacccaccatttttttcatagtagaacaccggtcacgtgtctactatcattatgata

SEQ ID NO: 16324 - DNA, 237 bp, Glycine max
agcttctcaaggtattttctcattgactttatccacgctataaatacatgcttgcgtgacacttgctgtaacatgtgacaaatgaaaggcttatgacacacactgaaaacttataatgattacgcttcttgattgctttatggcttgccatcccaccactcttttaagtgatgtgctaactatacatgaacgcactcattaagcatattgatcattgcaccctctctatactaataa

SEQ ID NO: 16325 - DNA, 360 bp, Glycine max
  unsure (1)..(360): unsure at all n locations
ngcaattcatttatacaccatcaatgacttattgatttttatttcttctatgcacgccatatgcttgtggaangaacctatgtacgctatatacatcatattggatgtatgcgattccttgtttgtagcaatgctaatgccttatagtttgatgacctgtatcaagctatatttcttaatgaatactatattgatcataccttttggttttggtacaatccatttttttgtgttgcatgttgaagtcaagtaactccattacacttgcaagcccgagtataattcattctttgggtataagcttatgtcaaactgtctgacgtctccatatgtgtgtacactatggacatgtcttggttt

SEQ ID NO: 16326 - DNA, 192 bp, Glycine max
agcttgatatccatagctcatcatgtatgtgactcgccgtcttccatggcttatccgttagcggatggagactgctatcacctctgattcttagactacagatgaatctgcatagtggaaaatcaccattagaggacctcatgagagctcaaagatacagtcttcgtagaagcttcacaagccagcttccat

SEQ ID NO: 16327 - DNA, 171 bp, Glycine max
  unsure (1)..(171): unsure at all n locations
tgaactgatgcactaagtcagtagccgattcaagcgtttggtagccaaccncgacctatagngggtcgacctgtaacaggctgcacactatgtggcggagctcataggtgaagcttgcgtatttccactaacaaaacatcttatgaagataattacatgggaaaccatggt

SEQ ID NO: 16328 - DNA, 331 bp, Glycine max
agcttgtaattgcttctttctctttatttttatcgattaactataaacaacattatttgcatccttgctgccatgtagctttataggttcagttgtattgcttatttcacttcttgaaaacttataatgaaaatgcttcaggaaggtctttgggctgagatgtttatcatttttctaagtgatgtgctaattatacatgtatgcattcattagcaatattgattattttaccagcagtatactaatagctacatacaagaaagtgtttgatgcccagatataatggaacattaaacatatggtacatgtggcacaattctgcaaatatcag

SEQ ID NO: 16329 - DNA, 412 bp, Glycine max
  unsure (1)..(412): unsure at all n locations
tgcgagacagagaccaacatgttatctatcatcgccaagtacgaagaagagttatgtctagccacggcccacgagcatagaatcgcggatgagtacgctcaagtatatgcggaaaaagaggctagagggagggtgatcgactctttacaccaagaggcaaccatgtggatggatcggtttgctcttaccttgaacgggagtcaagaacttccccgattgttagctaaggccaaggcgatggcagacacctactccgcccccgaagagattcatgggcttctcggctattgtcagcatatgatagacttaatggcccacataattagaaatcgttaggaaacttgtatggtctcttagaccttgactagatatgacttccnttttgaaaaaaatgagttggtcccatgtttct

SEQ ID NO: 16330 - DNA, 461 bp, Glycine max
  unsure (1)..(461): unsure at all n locations
cgagcgccatgaaaccttttgagacgtgcaagcaccagagacgcnctagaggcatcgcaggcgcatgcatgcgccgcccgtctgcagtagtagcatttgtctccaccaaagagccagctataccgatcttctgacttcctgtacattcggcagtggaagtgaataatgatactctcccgtatacctgctgacatgtagtgagcaaaatggcgcacacgagaggctaggcaaatcacactgtctacactggctatatgctctaccctactggcgcctgaggaacatccgttggagggacgctaccctgacttgccactgttaagcattggcacctgtcataagcatttgctaaggtctgagaatgcctgcagcataaaaaagctcgtacacgatggtggaccccgagaatgcggagataaaagagtgttaggctaattccggaacccgcacttgggaagaac

SEQ ID NO: 16331 - DNA, 332 bp, Glycine max
  unsure (1)..(332): unsure at all n locations
attttctaaagtcgcgggaaataaaatgactttatgagtgtaacttttttttataaaaaaagtacaccgngatttaaacatgtctagaattcagaaaaatgtgccagcaatatacttactaattgagaatgtttatttccagtatgtatagctgattatatattcgtatagattattgagtgaaaaaatggtatctgaatatctatagcttgcacacggatgagaagagaatctcagtgttcagtaatggaaatatacttttttcttcaaagcacacatggtgataaaggaccctgctcgagagagctcacatagcaacacgttgctttggt

SEQ ID NO: 16332 - DNA, 270 bp, Glycine max
agcttgatttgcgagttgatattagctttgtgttcacttggttatttctctactcattaaaagagaactttcaaagtaaatgaccggctgaaacttacctttaaggtgattaaccgaggttacaacatatacgatcggttgaactttactttacaggtgattaaaggagattaccacataaacgattggatgaaattcgttctaacattgaataaatgaatatacggcttaatcaatctgttgaaacttgcttaaaacaacgaaaaagaa

SEQ ID NO: 16333 - DNA, 331 bp, Glycine max
  unsure (1)..(331): unsure at all n locations
ctcaagcatggaaagaagacagnatataccttacaccgaagattncttttagctnttttatcttatcgacaatggaaaaaagcttttaatggaagtcaggagaatgaaggccccccggaagcattaactggaaaccaagttcatgatcgcgtaaaggacattgtaaccgtgtttggcaagtcccagaagaagacatcatctcccaaaaacatgtggaagaaacgctcaatattctttgatctttcatactggtctgatctatatgtgcgtcactgtctagatgttatgcatgtggagaaaaaagtgtgtgatagtttaattggtactcttc

SEQ ID NO: 16334 - DNA, 275 bp, Glycine max
  unsure (1)..(275): unsure at all n locations
agcttgataagaattntgtttgtaatacttgtcattattctaaacataaaagacttccatttcccaccagtaactcacatgcatcgaatagtttttaacttttacatatagatatatggggaccttgttcaaaggtttcaatgctaggacattgatactttctaaccatagtagatgattattcacgttttacttggatatttctaatgcatgtcaaagctgaaacacgagaacatatcaaagcctttatagctcttgttgaaactcaatttgac

SEQ ID NO: 16335 - DNA, 410 bp, Glycine max
  unsure (1)..(410): unsure at all n locations
tcactccacccatatctgaccttcacattaaccttacttaacaccgccgactttctcgtcaaggaattcttgcaccctggatacaaaggcttctttgaatcagtttgcaatgtatcatacataggagtatgtgcttgctaaaaagactcttgtccaagatcacgagtcatatcctctaagcgatctcccatttctacatcaaatggttcaaattgagaccccctctgcatgtctgtcaattcaccatgccatatccacgtggtgtaattcttaatcccatcacacagtagatgctcccgaatgtcgtcaagtattggacgtcttccgttctaacaattgatgcaaggacaataatattttccgtcctcatctggtcgacttccatcggaagcaaattgcanaaactgatc

SEQ ID NO: 16336 - DNA, 322 bp, Glycine max
agcttataaaacctaggtatctctacatatgctactcctcttgctacctccagagctcttttcccgaaatagacattgtggtaggctctgaattcatgacgttgcgcttagcgtcaccctcgcgcttagcgtgaataaatgggtttgggcttaacgccagtcttgcgctgagcctggctgaagacacctactgcgcttagcgcactgatctcgcgcttagcgcgtggccttgatattgatgccctgccaaaatcttctgtcgcgctgaagctgcgcttagcggaggatgcatgcttagcccattgatgagctaagctcaact

SEQ ID NO: 16337 - DNA, 395 bp, Glycine max
tactaagctttccttaatggctatttttagtggatacgccttttttctcctcttctcctttatcttccgctacaactccatggttgaaaatcaccatggaaggacctcattgagcctccatagaagcttcttaagcaagcttccatcagaactcgtcgtgctgaccttgtcgccgataatgcgaacgaagacatcaatgacctaggagggttcgaacttcaaccacattgtgaagtgatgatgatcgaagaggaagatgagtggtttcaaagcgagaaaatgaggcgcaacacgaagagagggttatatatattggggattaggaattttgcttattctcaaactgaaagcttatatttgggtctaatctggctggatccacgtaccctactctt

SEQ ID NO: 16338 - DNA, 205 bp, Glycine max
agcttccatcaagtgatattatagcatttgagcttcaagtaggtgctccttaaacctccattaattctcagctttaccttctcctctattcttggttcatgatttttctccatggacctcctcacatgtattaagctaaatggtgttcacatgattctttagaaattccactgattaaacttgctatatgtcttaccctaatttc

SEQ ID NO: 16339 - DNA, 294 bp, Glycine max
aatttaatcatcctgcttggacgaatgagaaaactggggcaaataaagaaggcgacgatgagggagaaacccatgcttggactgccattcctgtacggacaagtttcccaccaacccaacaatgtcattactcaacccttctccttacctaccgcccatttatccacacaggccatccctaaatcaaccaccaagtctgtctaccgcacttccaatgacgaacaccacctttagtacataccaagaacaccaaccaagaaatgaattttgcaacgagaaagcttgtagaattca

SEQ ID NO: 16340 - DNA, 409 bp, Glycine max
agcttctattgacagcacttatgacacatgtcctcatgcttccctcctttgtgagttattgttgcaatggcatgtcggcatggcatccctacatcaaagttgtaaaatcagcacacatgtatgttaggaatgaaaaaaaaactataaagaacacaacctgttagttgccatactccacaagagcatgtccattcacctaaattgacctcaaccttattcccccacatgtggacctcatatctcaggcccatgttatcaccacaccaaatgggagtccattgattagcaaaatggaattctttttctagtcttttatactgcactggacataatggtccaggttttccagaaagtttaaccttgcgggcagccatggttctcatgatataacttctaatttctcaagcat

SEQ ID NO: 16341 - DNA, 397 bp, Glycine max
  unsure (1)..(397): unsure at all n locations
tctccttccatggcgtattctctagtggatggcgccttttcttagctctagtcctttatcttttgctgcaactccatggttgaaaatcaccattaaaggaccttattgaagctcaaagatccaacctccatagaagcttctcaagcaagcttccatcaagattctactattcgcattgcatggttatcgaactttggtgcgtacttctactggggcaaccctattctctntggtgtatgagatggaagttgtgctcccttttaaggtagagattccttctttgagaattctagcagaatcagggttgggagaagcagaatgggccagacatgttttgactagttgaatcttatcgagggaaaaagaatggctgccatgagtcatgggtggctatatc

SEQ ID NO: 16342 - DNA, 337 bp, Glycine max
agcttaacacaatagtaatgttgctactttgttgtgactcggaccccacaggttcaaatctacgaaacagctccatcttttgctgtggacagtctgcatacatccaccctccccagaccccactgggcgtgagcctcatgcactagagcggactaatcaatcctgcagtcagatcattcacagattaactatcatgacattccaaacaatcgattgtcatttgagccacaatcttacacaatctcgatgatgctgggctcatcttgacagagaatagcctaaccttagcttctcttattctgcaagcccagagcctacctccttgaaactactttca

SEQ ID NO: 16343 - DNA, 386 bp, Glycine max
tcaagctgacagagagctgtgattatcggataatctctcttgtagctgtgagttatcattgataagtgattacatagccgttctagcttacttactcgagaatgtctctgaaattgctggtgtttttaccatatactcgatctaacattactgcttaaatgttcgtttttatgataatctcgtttaaaagtgtcaattacaaggattaagccatatatagttgaagtgtaagcttctaaggccaaagaattattctgaaacaataattggtttctcaagactgccttttaatagagtagtaccctatacctatcttaagatgaaatggctccaaagatgcccaatgggctgtcacacgccttgtactgtactatattggctttatg

SEQ ID NO: 16344 - DNA, 334 bp, Glycine max
agcttttctccctctctctctcacgttgttattcccttcttcttcctcaccattgaagccccatcaaagctccaatctttgcacaccatttctactccaaatcgcgaaaggaagccattttcggagtcgtgaagcgcacctctacgttgtggaacttcaaatttcaggtttgggtagacttcttctgacataaagtgggtatggggtgtttgggaaatatgatgggtagttttactacgtttatgctttatgatagttatttgtgaaaaatttgttgaaagatgctaacttgtcatgcgggtgtgagtaagcttcccattctggttaaggttta

SEQ ID NO: 16345 - DNA, 410 bp, Glycine max
  unsure (1)..(410): unsure at all n locations
tcggaagaaagtgatgatgtgcaagcgctaaaggcaattcttgatatagcccgggtagtcaaagagaagttcaagtccatagccatcaaagtctgaaaagagtatgatgaactaagggacgtcaatatggccaccgctgaagccttggaacgagaaaccaagaaggcccgaaaggaagaacacgtgccagcaaagttttgaggggctttatagggcagcaatagtaagctcaagctccgaagaggtgaaaggaatcatcacgggtcaaaggcatgatcttgaaggacgagctaaaggcttaccttangtcgaaaagaaatttgtcccaacagttaggcgagactgaanggaatatgtgggccatcatcgatgagtgcanagagaagctaaatctagcggcgactcacgag

SEQ ID NO: 16346 - DNA, 394 bp, Glycine max
  unsure (1)..(394): unsure at all n locations
agcttgaggatagagactttctaagctatttatcttctctctcaaagaggctctttctcactctaagaagttgattcactctttgtcttggatgggtaggaatgaaggctcctacccttatttatactactccacctccacaatgaatggtggagattacttgtatcctagggtggagattaattctctagaatgctccacacattctaggaatctctacactcttctacttccttccatactcttccataagattttagaaggttccatacatctccagaatatttcagaggtttccacattctttcacaagcttctagagagctttacactactttagagttttcagaacgttctagaanattctacacttntccagaaagntctaaaattt

SEQ ID NO: 16347 - DNA, 416 bp, Glycine max
  unsure (1)..(416): unsure at all n locations
tatgaaataagagatcgtctcatatgtcatacacgagttattattcactaagtgacaagacattctaggcaatactaactagtataaaataacattaatgtgtgccaccaagcacttatagtgaacatcaatgataactgttcattgattaacttgtaacacggatacttaaaacatttattgacaagagtgctgctaaattttcttatgataaaaaatgagaggattaaactcaagtttcactttggctttcttatttatactattagcatcaatttgtagatgcaattggctttgatgttntgatgatgatcatgatgatgtgttgcaattgatgcaaatgggcttttcaagaataatattcaagacaatacttcaagattacaagtcacaacatcaagatgatcactagaata

SEQ ID NO: 16348 - DNA, 352 bp, Glycine max
tgcttgactaggttattagactttagctttagcttcaccctacctataagtcaattcggataagaatgagaaattcccatcagacaattgtccggatgattcttcatttcactttactgcaagggatattattgttattatactaatactgtatctctttttgatttacaacacggttacgggaccacccaacggtctaaaattattctaaccaaagcttacggatcatacaattctgacgttcgggggaaatttattttatttttaagttaatcgagaaacgacttgagttaaatggcttaagcacgtctacagggggtataaaaagtgcctgaaatgagaataaaaatac

SEQ ID NO: 16349 - DNA, 359 bp, Glycine max
tctaaactttgtacaagaatgaagctctttttccacttgttatacaagaggcctcagatatcgtcagaagggggggttgaattaatatatcccaaactgtttcccctaattaaaaatctatttcactttttactcaagttattaattcccttaatgacaatcttcttaaatattaattcaaatgaagcaacttgaatatgaatataaagcactaatcaataaaggagattaacggaagagaaaatgcaaactcagttttatactggttcggccacacccttgtgcctacgttcagtccccaagcaacccgcttgagagttccactatcttgtaaattccttttacaagttctaaacaca

SEQ ID NO: 16350 - DNA, 392 bp, Glycine max
agcttccttaagattattcctaattaagctagagcttagctacacatacctctctaatagctaagctcacctccttgagatgagaagctagagcttagctacacaccccctataatagctaagctcacccccatgacaaaaaacatgaaaataataaaaaaaaagtccttattacaaagacaactcaaaatgccccgaaatacaaggctaaaaccctatactactagaatggccaaaatacaaggcctagacgaaggaaaaacctattctaatatttacaaagataagcgggctcatacttagcccatgggctcgaaatctaccctaaggctcatgagaaccctagggcctttccttggatctctagcccaatctacttggagtcttctagc

SEQ ID NO: 16351 - DNA, 407 bp, Glycine max
  unsure (1)..(407): unsure at all n locations
tgtaggattatggggtacccatcacatgttttactatgtggcggtcgggcgatggtgcacaataagttttccacatccacaatgcacgcataaacccaccatcccctgttgcccacctccaactgagctcacgtactcccacgtagctcatatcctcgtttctctcaacaccaagtccccatcaatcctcccaagcttccccaacatcaaagtaatacaacattcacacagcacaagctatcacagctaagcaaaacagggcaaaggcagaaaactctgcccaaaacaccaaccaaaatcacagcttttcacatacaaataccccagaaacatttccttcgttccaattcgttaaccgttggatcgactcngaaaatttactggaagtctctagtacttaagcctaa

SEQ ID NO: 16352 - DNA, 253 bp, Glycine max
aacttctgcggggacatcttgacttgcttttcaatctgtcatttaccacaaaatctgccttcttttattttcagattgggaatgcctattacagcacctttgtcaatgattttcttcatgcctcttacgagcagatgtccaaatcgttgatgccatattctgacttcattttctttggacgacatacatgtggaggagtaactggtttctttaggtgtccatacgtaacactggatctttgatctgctgccct

SEQ ID NO: 16353 - DNA, 402 bp, Glycine max
  unsure (1)..(402): unsure at all n locations
ccacccagctcgcccaggcgagcaaggttgcttccttcagaagcaacagccttctttaagaatcttctggaggaatcttctggagggcccaagtggacctggttgctatttgccccacctttttactaaatgcactccccttctattttttttggtaattctttttccgtaatgttacgaaactttacgaattttgtaacgatacttatttttcttccgcaaggttacgaatccttacggattatgtatttactctttttcagctttcgaagaagttacagaagcttacggattgcgcaaaaacacctcttttcgattttcgtcatattacggaatntcacgaattgcgcaagcctgcttcctttngatttctgacacgtctcgngacttcattcattgtgc

SEQ ID NO: 16354 - DNA, 227 bp, Glycine max
  unsure (1)..(227): unsure at all n locations
agctgtggagtttccaagcgccaatacgttttcatctttattccagncaacagatggcttgaatccatcagcgggctttccttctgagtccagcatcttgggatgtacccagcctttgaagacaggtttccaagttctgctatccagtgatttgaggagggccaccatccttgctttgcagtatgtctagtaggttccatccagaattggaggcctgttcactggtc

SEQ ID NO: 16355 - DNA, 404 bp, Glycine max
atcctgactcaccataaaccttgaccattgtgagaatgtcaatccttaccctcggaagcaaaaaagaatagaagggaaatttccaatcaaagaaaagagaaggaaaatttccaatgaaagatgaaaaaagaaaagaaaggaaattcccaatcaaagagtgggagaaagaaaaagaaaagaaagaaaattcccaaccaaagaatgggagaaagtaaaaagggaaggaagctcctggtcaaagaaaccagacaggtctttggaccagataatatctgaacagtacagaattgtcaccaaatgaacaaaaatgaaggaaaggaaaccacgacctaaaatggtcttctccctttaattaccaaccaaaatcccgtgcgctagcgaccctcttttctcgccccgcacta

SEQ ID NO: 16356 - DNA, 346 bp, Glycine max
agcttcagtaacatgaaataagaatgtgctcttgccttattatttaagtcttttattatgtgcaagttaaaattttgaaatctagcttgtataccctgtaatttgtaactggtattacttgcaacataaaactcacgttagatattgaagtactactagtcaaaaggttcagtatcgattatttacccctagacagaaaatccgtaactttgtgagccagcaatgcaggttcacgttggtaagatatcataatgcagaagcacattgcaggaagagttttgagcatcatacgaagaacatcttgagaagacttcatggagctactacttttttctacaccctttct

SEQ ID NO: 16357 - DNA, 393 bp, Glycine max
  unsure (1)..(393): unsure at all n locations
aggatgcatcttcagtgaaagattaagctttttctgctgattccctgtgatgaattctgcatactggctaaccactggaacacctttctgttcatcgctccaaccgaaaatgtctggccagtcttcaaccaactgatcctgaacgaatatgaagaagctcaggtcaccatgatggctaatatccgggtcaagctgacaaaagtgtaaccttagcacgtaggtgaaacctgaatcaacgggaagttgccatgtgagggtgaaccccatgttgatggtgctattacttaccatattccttanggatcggtacactgtgtctggtgccgagtagttaggaatctttgtgaatctcaacttaattcttatgccaatatttagagatagtacactttg

SEQ ID NO: 16358 - DNA, 342 bp, Glycine max
  unsure (1)..(342): unsure at all n locations
agcttcatacttcgagaaaggaaaatatttctaatatttatatgagcacaaactcattatagcaatcaaacatgacaaacaaataaaattatgttagtcatcatataaacaagttaaatgaaagaaaaatttcaaccaacttaatttaaaagataatggttctgattaccttntgtctgattcaagtgcttagatctttaatgatgaaagccaaacttttgttttacttgcttaaacttcttgaaagatgttctcatcactttcaagtcctggatagaaggttgatctcttcttcgaacattgatgattattgtctcccaagcaaatacgccttttgatctc

SEQ ID NO: 16359 - DNA, 427 bp, Glycine max
  unsure (1)..(427): unsure at all n locations
ttcttgagatgcctttggtaaatctcactagatgtttttgtaaaatccactatctctttggagacatcgatattgaagtagtcaatgaatcttgaggcaagtacaacataaggaaatttgtagtccactaactgatgactttntaacatgatgtcttctatcaaaagtacccaattcatcttgatacctgattttagaccatagacagtctgcagatcatcgtccattacctaagcgtgattacttaacctctgagtcagaatgtaggtaatgaggtaactaggagattcctcaagttccttgctgggtcaagaagcattcccctataggtctgcatcttgttgtacccatcagctgtttcatcgaacttgtggacttcacccatgtccagaccgactacttccttccatacttcaatgtgaatgac

SEQ ID NO: 16360 - DNA, 406 bp, Glycine max
  unsure (1)..(406): unsure at all n locations
gcttgtctttactttgaaactgaantccggacnccaagcaccgcgcagctgcggggaagggaggtanttacttttgacaggngaaaacgggaactttttgnttgtgtccctcattatggagttatgtgtaaggttccttaatttaattttccattaaaaagaacattttctgccggatttcttttttagaagtagctacaacagataattggtccatgtcaacattttggtgatactacgcattgaaatgctgtggaaagatcctgattgtttttttttacgcaaagaattttttctttttgtggctagaatgctttctattctttaaatttttttttctgtttgaatgtgatagttttctgggtttttggaagtacacctttattggctaaattttttctgttcg

SEQ ID NO: 16361 - DNA, 313 bp, Glycine max
agctccacccccatttttctataattggtgagatgcgaagagaaggattgttcacccctcctggttattctagaatcactcgaaattatgggaagaaatttgtttcgtgaaaaaaatccaagccgaggcgcttccgttgcgtttgcgagggggatttctcctagattttccaccattcttgaacgttcttcgctcattcttcatcggtcttcgggcttcaatcggtattttcccgaaatcgaacttttcaattcattctatgtacccttagaggtcctcatttgcgtcacgtgctattttttaatttgattta

SEQ ID NO: 16362 - DNA, 421 bp, Glycine max
tataaaactcaagcttttgtgaaaggaagaagatgatgaaagatgagtatgataataattgtaaaggcttaaaggtttctcaaaagttgttcaagaagttgttaaaaatgcaagtcaaggtcttgcttttatagactcttcatgtctggtcaagaaaaccattggaagagttataaccttgagaaaatcatgtcaagagttacatctcttgaccttttattcaaaacttgtcactggtaattgattaccataatcatgtaatcgattacacaatgcattttaagaaaagatgtgactcttcacaattgaatctgaatttcaacattcagatacactggtaatcgattaccaatatattgtaatcgattacaccatttaaaaatcatttgaatgttgcaaattcaattaaaagctttttgaa

SEQ ID NO: 16363 - DNA, 266 bp, Glycine max
  unsure (1)..(266): unsure at all n locations
agctacttgacttcaagtttcatagatttgctcttaactttntggggctattccatctaacgacactcaccaatattctagagtagatcaatatatacacacacatacataactactgatttttagttctttttttgacacaatcttaacgtgaataaaacctgcggaggtacaatgctagagatagtccatagttgcatgtggaccaaattcactagtcaatctggggatttaggtgctataagtacccatctactccatgggca

SEQ ID NO: 16364 - DNA, 350 bp, Glycine max
  unsure (1)..(350): unsure at all n locations
ntacaaagcanaaaggaagctccaccgcatgagtgattttacctttaatcaagttgaaatcaaacctgagatgatttcacgtcatttacttttctatttcacaagaccactaaagtcttgcctccacattgacaaggtcttgcttcctacgctgtcaaagatttcacgctcaccatgatggcctattcatactaccacaagtaacagagcattgcataaacaaaggcgaacacataagacatacatactgtgcaaaatttgtcaatgaaagaaaagcatgtgcattaaagagaaataataattgccaccattacaaggcctatgcagccaaaatccaacaatgttgaaaa

SEQ ID NO: 16365 - DNA, 404 bp, Glycine max
agcttggactgtgctaggtttaaaaaaatatatatgaccaaagtgaaccaagagccatttctagggcaaaattaggtgttgaagagtcaaattttgattcggtggaattttaggtgtaaatccagtttgagaaagtttagattgatgttatagacttgtgtgaggtgagagtttgctccaaatttacctcattctcaatttcacttttcaaaccttgaaaatccattaaaatgaggggttttggacacctagattttgtgttgctgtgggttgaagcttgactttggtttagacatgattgatacatgatttgggacttgtatgatgtgatttgggcaagattggatgaggggaagtgtggttctcgaaatatgctctttgtgcagattttgctgttaaattgt

SEQ ID NO: 16366 - DNA, 382 bp, Glycine max
taaatgtgatgcctaaaagtactttagagaagctccttttaacgcctctcacttgaggccgagctccatggtggtccaggcattcgatggcagtcgccacgaggtaaggggggagattgatatcccagtttagataggaccccacacttgtcaagttacctttcaagtgatggatataaaccacgcctacagttgcttgttaggccgaccatggatacatgttcgcaaccggctatttcgataaataggcgtctggtatcaaaatatgattgtggttatgaacaggtatttaaactatctaggcaaaaagaaagaaaattacgcaagagaaatattgtgtaaaaacaagtatgcgcttagctaaaatgatgcatcttaagta

SEQ ID NO: 16367 - DNA, 377 bp, Glycine max
agcttgggaccaataagtttatcacacttctatgaaatgcataactcaactgttggaccatgaaaatatatatatgttgaacaagggttttgtacagaagccactagatcacaagcacaaagccttaccaaaccttgcttttaacttctttagtcaacatggaaaatggcatgggctgctacacaaacaaaagaaaaagatttccattctgcctgatgaaaaaatggcataaacgctgtaataagtttgcttttggctggaatttggagcaaagaaattctctggctaaaactattttaattttcttaagatgaagtaccacaaatatatatttaaagtgataatgtctgaggtaaccttacaatttgaaaacactt

SEQ ID NO: 16368 - DNA, 349 bp, Glycine max
tccaaccatggcttaactgttgctagaacttgcgctttttgtgattgttgttacagagcacttcaggtttctcccggttcctacgacgagaaagtattcagggtacgtattgcatcttcaattaataatattctttttaatacaatcatgtcaaagttaatatattctcaagagttatcatcaacctattcatatgagtgatattagactcaattctttaaaacacagtcttatatttaaattttgttaataaaaaaatacaattagagattagtcatcaactagtgatacttcaccacaatgtcataatatatttggtgatctaaaaaaataatctcattgctacttt

SEQ ID NO: 16369 - DNA, 352 bp, Glycine max
  unsure (1)..(352): unsure at all n locations
agcttgatgtggagagagttatcacatatttntctctctccaaaagccacgaaccatgattcccaatcggtaccctttttcagtcctcaacattgaatgctatcatgcctagttttccttcttttgtttctgtatttttcctttttttagtgacggtgggggaaataaaaatgggacctttagatggngctttttcttttctttctttttttggatttgattttgatatacatggcaaggtggtgtggtttgttgatggggctgtctttgatctttctaaaaccccttaaaagagtttgaacgtgaagctgataatactaagtttgtgttggtttatttttttaggggtgca

SEQ ID NO: 16370 - DNA, 398 bp, Glycine max
  unsure (1)..(398): unsure at all n locations
gacactatacaaagctcaagcttgtaggtgtaacgagatcttgcctgggcgggtcgaatttgtatggtgcgatgggccacgggccaacctattattacacggctattatcacttactaaaaccttctattcaatagacccgatagaagcgcaaatatccaccctacatataggcgaccaaaacattctntacatacatttgtaaatataatcactcttcatcattaatagagcgactcatacgctcactagtttaaagcttaagaatctcattcataagaagttatgagccattaaaagacgattattatatcatgacatgaagtcatatgaaaaatatatgtagcccgggcttcagctgtcaagcatctgtgattgaatcacaataacagattgatg

SEQ ID NO: 16371 - DNA, 177 bp, Glycine max
agcttgtccttaaattcagatattatcttcgcaaagctcacattctctgcttcaactcctaaacaatccaaaatttttggcttctggttatatgtccatacatcaaaatcttatgttttacttgtgtcatcatgtaatgctttctctactactgaatccgatgatacagaaaaaaaa

SEQ ID NO: 16372 - DNA, 386 bp, Glycine max
  unsure (1)..(386): unsure at all n locations
tgatttatgtgttgattgtagccatagtttcactntgtgttattagtcaattgatccagganaacttccaaagaaaaacgcccgattgatttttttatattattttattcagagatatcctgattattttattattatttttctctttttggcttaaccgaggttacagcgtgaacaatcggttagattctatgttaacagtgattaatcaagattacaacacacatgatcgggggaaattctgtttatcatttattaggtgagaaaacgacatagacgatcggttaaagctcgtaaaacacgactgaaaagaaaccgacattgatcgaaattaagatgaatgccatactaatagagatgaattaaagtctcggatttgggaacta

SEQ ID NO: 16373 - DNA, 259 bp, Glycine max
  unsure (1)..(259): unsure at all n locations
agcttgctctaaatttacattgatgtttgtatttatgggaggaggttgtatgccattttttaagagtagtgtcccactggtaaaactaactttccaaatgtttgccttcgcaggaaatggccccgaggaagcttgcctcaaagaggtccaggaaggacaaggcagccgaaggaactagttccgctccggagtatgacagtcaccgctttaagagcgctgtacaccancagcgcttcgaggccatcaagggatggtcgtt

SEQ ID NO: 16374 - DNA, 382 bp, Glycine max
  unsure (1)..(382): unsure at all n locations
cttggagtttccaagtgccaattcgtcttcttctttagttcagtcttcttctggcttcaattcatcagtgggctttccttctgtgtccagcatcttgggatgttcccagcctttgatgacagctttccaggttctgctatccagtgatttgaggaaggccaccatccttgctttccagtattcatagttggttccatctangattggtggtctgttcactggtcctccttctttctccatgttcatcagaatttatctccctagatctcactctgtgatttcgagtgttggctctgataccaattganattctgataccaggggacagatgtcgtaccggatgtcacgacatcacgcctcagaacatgcagattatatgtgt

SEQ ID NO: 16375 - DNA, 408 bp, Glycine max
  unsure (1)..(408): unsure at all n locations
agctccttcactccttgactcaaaacgcattgaatgaataatttcacactccacaggctcagaatactaatgcccactcagacttcactattcacaacaacaccatcctgcagcaaggcaaaatttggctgtccttgggtcatgaatncatacccacattatgggaagaatctcataaaacttctgtagggggccatacatgagttgctaagacacttcaccacttgcaagataatctacaatggtcttatatgcgccacgatgtacgccagtatgtggcacactatgacatctatccacatacaaaggaagagactcatagaccaactggcttactgcaacctttccctattccaataacaatgtgggaaaatctctctttatactgcattactggcgtaccacctt

SEQ ID NO: 16376 - DNA, 368 bp, Glycine max
ccttgcaagctccaaacaccccatttgaaaatctttctggattaaacttttgatcatcaggcccccagagttgagggtcttgttgcagcactgagattggaatctgaatattcattccttttggaattaggatgccttttaaattaacaccttggagagctgttctaacaacaaaggctgctggcgaataaagcctcaaagtctcttgaatcaccatggtcaactgcaagtgtaacatttttatatatggccttcacagatcagtaagaatgctcatgaaactgggaaatgatcaactataattacaataaaatttgaggcacacaaaaatcagaaaaagcttgttgttaaatgtaccttacatgctg

SEQ ID NO: 16377 - DNA, 366 bp, Glycine max
  unsure (1)..(366): unsure at all n locations
agctgatccgaacgggaatgtgaaaagattctctcaagttgatatnaagaaggcggcaaagtgatccttctgctagaagaagggacacatgacaaagaatcgccccggggtccataaatggcttgagaagaaaggcaaatcaatctcattagtatgtcatgaaactaatatggctagtagtaatattaacacccggtggattgattctggatctactattcatattgcaaattttttacagggtatgcaaaacctaatgaaaccagtgggaattgagcacagcttttaataggcactcagctaagctcacatgtggaggccactggaacttgcattatgactttaaacagctggcttattttaaat

SEQ ID NO: 16378 - DNA, 398 bp, Glycine max
  unsure (1)..(398): unsure at all n locations
aaaagnacgtcattaaacttgttagttgaaatgctctttttagggcctaatanttattgtcaagaccagaataatgatatacattttctaatccatccttcttaaaacttattaaaaaccataaaatcgtcattaatgaaactagttaatttttggtgattttcaattaagttaaatcaataatagagaacatattaaaaaatgtcctagcaagtatggtcaaaagagtatttcacataatatgtagttagcattttttttctaaaatattttttttaaattattatataatctaaaattatcacttgttcatgatcccaaccgatattcacataatatactatcaagatttcaatttataaaataaagagttaacaccaagattattatgtgtggcg

SEQ ID NO: 16379 - DNA, 267 bp, Glycine max
  unsure (1)..(267): unsure at all n locations
agcttcaggctgctcaattgctccaggtttttgcatgttangtttaaggacagnatggnggncagcagaggagcacaaaccacaaacccttgcgacaggtacagatttctgattcaaggccagctgggataccaagttgaccaacgcattcagattgccttcaagctttttagtttcatatgatgcagatgggtttgtatcttcctaatgcactcctctaatgactatggcatcatttctggcactaaactgctgggaagtggaggc

SEQ ID NO: 16380 - DNA, 315 bp, Glycine max
agctggtacctccttcttactacattttaatactggtttgagtcttctctgtggctatcttacaggtttagccccatcctctaaatttatccgatgcatacatgttgatgggctaataccaggaatgtcggccagggtccagcctatagccttcttatgcttcttgagaactgataacaacttctcctcttgctcatcagcaagggaggcagatataattactggaaaacttttactatcatccaagtaagcatattttaaatttgatggcagaggcttcaaatctggtgtgggcggctggataatggtagaaag

SEQ ID NO: 16381 - DNA, 339 bp, Glycine max
  unsure (1)..(339): unsure at all n locations
agcccaccatcttttcatagtagaattctggtaatgcgncnactatgatttttatcatggannngncnccgcccttgatgtgccacttgagctgccaagactctccacctttgggcgtattcttttgaaggattcgtgccccctttttgcacatgttctgtagttgcattctatctgaagccattatactgacattgcctaacgaaggcaaccattaagtccttccaagaatggactcgggaaggttacaagttagtgtaccaagtaacagctaccccagtaagactttcttggaaggaatgtatcagcaattcctcatcttttgcatatgcgcccatc

SEQ ID NO: 16382 - DNA, 390 bp, Glycine max
agctgggagagaatgtttcaatggaggtttataaagatatagagagagagagaaaaagagagaaggggagcacgaaattgaaggaggaaaagggggaaagaagttgaactttgagttgtgtctcacatgactctcattcatcaaagttacaacaagtgttacacatgtttttatttatagcctatgtagtttccttgaaaaacttccttgagtaagttctttgaaaagctagagtttagttataaacacccttctaataactaagcttacctccttgagaagcttccttgagaaatttctttgagaagcttccatgagaaaattcctagagaagttagagctttgtcacacacacccctctaatagctaacctgaccttcttgagatgag

SEQ ID NO: 16383 - DNA, 217 bp, Glycine max
ctttgtttccgctgcatctccatggcggaaaatcaccattaaaggaccccagttgggttcctaccatcgaacatattagatggcgcccaattcagcatacatcttattaaagccctattcataatataacatgcaggaggaacggctaccgcccctaaatatatgcgtacacaactattccattgtagtggtctagcaatttcttccagagacctat

SEQ ID NO: 16384 - DNA, 342 bp, Glycine max
  unsure (1)..(342): unsure at all n locations
taagcacctgccgcatgcagcggcaacaaagttttcctnacttgagagaagcccgcggctgantcatataaacctcctcctctagatcaccattaagaaaagttgccttcacatccatttgttgcaactcaaggattgaatgaccaactaatgccaaaataataaaaagagaatctttcttagatactggagaaaaagtcggtatgtagtccaatccttttttttgagtaaataccttatccacaagtcttgccttgtatctcacaatgatgcctaatgaatcccttttggtcttaaagacccatctatagtcaatggcctttgccccattaagcaacttta

SEQ ID NO: 16385 - DNA, 395 bp, Glycine max
taagtgaagaaatctacttatcgagagacaacaaacacttgtatatgaagacctataaataacagaagctatgaaagaatgaaacatgaacctacgtgctatcatccaaattttttatgtaaaaagctcttatgtaaatttttgtatagtttgaaaaagttttcaaaatactttgagcatcatgggagaaaagatttagtgctgagattgtatattcatttgtaagatgattaagagttagtcattgtgcaaatagatatttgtataaagttagcattgagttggtagaacaaagaatgaagttaacaagcttggagtagagcttgatttattgagtcagaagtggtcgtgacataatacttgtaactttgataagttagtgaaacttgatagtg

SEQ ID NO: 16386 - DNA, 207 bp, Glycine max
agctgtacaaatgaacaattctcggagattcatgcctctaccgccgcacaaaacagctatcggatgtcgctggatatataagatcaaatatcgagccgatgggtccatataaagatacaaggcacgcctgtgtgccaagggttacactcaaacggaggggttggactaccttgacaccttttcttcggtagcaaaactcacctccgt

SEQ ID NO: 16387 - DNA, 408 bp, Glycine max
  unsure (1)..(408): unsure at all n locations
tatagttattggagggagtataaaacaatccacaatcttttgtacccttcaagtaacgaagaattctttttgcggcttttagatgacgagaggtaggagcctccgtaaagcgacacacaacttccaccgcatatagaatatcgggccttgtattggttagataccttaaactccccacaagactcttgaagaccatggagtctaccttctctccttcatcaaactttgataacttcaagccaccttccatacgtgtgttcacgggattgcaatctagcatactaaatttcttcaacacttcttttgtgtaacttccttgtgagacaaagataccattctccattngcttcacttccattcccagtaatatgacatgagtcccatatctatcatatcaaattcacgaga

SEQ ID NO: 16388 - DNA, 386 bp, Glycine max
  unsure (1)..(386): unsure at all n locations
agctntagatactgaactgtaacccacatagatatcgggttcaactttcttggctagcttgtctctcttaatttgaggcacataagtaaagcgcaaacatccaaatactttaaaaaatttcaagaagggtttataaccataccaagcctcaaaaggagtcttctcatctactgctttggtgggaagtctatttatcaaaaatactgcagtgtttgtagctttcgcccaatatgccttaggtaactctttctcatgaaacatacatctgaccatttccaagattgtttgattctttctttcactaaccccatnttgtttaaaggtgtaagaagctgttaattgatgttcaatgtctgcttcctcacaaaacatgatgagttatgctg

SEQ ID NO: 16389 - DNA, 145 bp, Glycine max
  unsure (1)..(145): unsure at all n locations
tactctcttactttntctttcatttgaagagcaatatttgatactttcaattgcacaaaaagcaaattatttcaatttttcttttatgtctgacagagagaaagagaggcagagagggagtaactgttaaaggggacaattggaa

SEQ ID NO: 16390 - DNA, 262 bp, Glycine max
agcttctccccattttttataaatatgtggagaggtgaagggaaaaaatgttcagccctcctggtaattcgagaatcacttgaaattagtgaaaaaaattgtttcgcgtgaagaaaatccaagccgaggcgcttccgtaatgtttccgtgggtgatttcgcgaagattttcaaccgctcctcaacgttcttcgttcgttcttcatcattcttcggtctttaaccggtaagtaccctaaatcaaacttttcaattcactctat

SEQ ID NO: 16391 - DNA, 379 bp, Glycine max
  unsure (1)..(379): unsure at all n locations
acacttaaaactcaactttataggtgaaatcgggtgcagccattttccttagattcctctcactgngtggaggttgtgccatgttctcagaatgttcaaaatcagaatactcaaaactataatgctcaaaatcaccaataacagaatgctcgggatactcaaaaggtactaaatgatgtctaactaatctatgaaatgtactatctatctcangatcaaagggttgcaagtcagatggattgcctctagtcatacactaaattcagcatgcacaattagttgccttcttatgcaagtaacagtgtaggtgtgaactacagctaccattaaatgatatccaaatgacttngaaatttgtgagcaacattataaaatgatg

SEQ ID NO: 16392 - DNA, 316 bp, Glycine max
  unsure (1)..(316): unsure at all n locations
agcttgtgattncngattgttactnttttatcttattgaancttctcattacaactgtaatcatttttatcttaatgttgttccttgcctgatgctatgataacttgtcactacagaatgttcactgagtcatgtaagaaactaaggataatgaaaggctctgaggcaatcgggctaggtatgtgttactcataaatnttaaactcgcttttacatgcttaggtgaaaagtcgtcaatatattgaatatgatacttttctttttatattttaaatggaagattaatttttttaatagattaaatggaagattaact

SEQ ID NO: 16393 - DNA, 404 bp, Glycine max
  unsure (1)..(404): unsure at all n locations
tagtccccctctcttttgtttgtttgacaatgactctcttccaatttatcttctttgctcttgagtattctcactccagtgaaatcttgttgtgaggctctcaatctaattgcaaatagcattaggaagcttaaagcaccccataacataagagagaatatgacttttacaacatactttatcaaaatctccctttcagcttaggatcaaaccatctcctttcacccttttaccttcttccataccttctctcaaacagatcggaaaacctaagttttggacctaccaataataatagtataaggttaatctttgttttatttccataaccaattcaattattactgtatgtgttaattacttcttttatttctttntatcaatttgcgtaagaagcaacacat

SEQ ID NO: 16394 - DNA, 165 bp, Glycine max
gacccggatccttaatcacctgcagcagcagcttagagtcttgccacttgtttatatacaccaagcacactgccttctttggacaatggtaagcccaccttcaaagaagccatccctggcatgcacctaggagctcgcctcaacgactccatgaagacaaagcgg

SEQ ID NO: 16395 - DNA, 331 bp, Glycine max
cgcctgaatcagacatacgagtgaaaagttatgaccatgtgaattgtttgagagctttctacggataaatttgagcgactcgatgtattatacgcctgaatggaagctcatcgtaaaaagttatgaccatttgaatgtcttgagagcatccgttgttcattttttagcacctctatatgtgatgaaccttaatcggacctacgtgtgaaaagctatgaccatttgaagttctcgagagcttccatcgttgaacttagagcgtctctatatattatacgcccgaatcggacatccgcgggaaacgctatgactatctgaatctctcgagagc

SEQ ID NO: 16396 - DNA, 324 bp, Glycine max
  unsure (1)..(324): unsure at all n locations
agcttnngnnacattatcccatcttcgcttgcaaaccaagacaaattctagaggaaggtgtcttcaagttgtccaccttcccatgatatgtagtgtaacaccccaatggaatcacaccagaatgagaacgatccagaggctgcggaggtatgagaatgtataattgaaaatgactaaagaaaataattggtactaccttatacataagatgcattatttttcagtagtctatcacttaagaactttgggtgaccttttggaagtttccttggaaacatatgagtgaggacaaaacacactaatacctttgtgcttatttggggg

SEQ ID NO: 16397 - DNA, 468 bp, Glycine max
  unsure (1)..(468): unsure at all n locations
agttgtnattagggcagtgannncnttgatacctttgataccatngacatttcggagacactacacaatactcaagcttatagccgtgtggactgaccncgaaaattatctttgttgcccccacgagccaaagagaacttttgtttgttttgaagctcattacatgccttaagggaaaaaccatgacatcacctaaacctctaggaatactggaagcgtggaattgtattgggaataagctgggaataagtgggggggggtatggttcataggaagatatgacttttggacatgcttaaggcttatcttggccatgcccgacgtatatatatatattgcctaaaactatctataatcgtcaaaactgcactattcaaaaaataaaaaatcaaaaaaagaaaatggaacaaaaaaatcaattgctgaaatattgcaatctgtactttacaaaataaaatgaagctgaaa

SEQ ID NO: 16398 - DNA, 221 bp, Glycine max
  unsure (1)..(221): unsure at all n locations
agctngctctaaatttacattgatggttgtatgaatggtaggttggtatatgccatttttgctttaagagtaatgtcccactggtaaaactaactttccaaatgtttgccttcgcaggaatggccccgaggaagcttgctctcagagaggtccaggaaggacaacgcggcctaatgaactagttccgccccggagtacgacagtcaccgctttatgagcga

SEQ ID NO: 16399 - DNA, 397 bp, Glycine max
agtgcctgtatattgatgcgcctgaatccgacatccgagtgaaaagttatgaccatttgaatttctcgagagcttcctatgtttaattttgagcgtctcgatatattatacgcctgaatcggacctcagtgtgaaaagttatgaccatttgaatttcttgagagcatccgatgatcattttcgagcgtctctatatgtgatgaaccttaatcggacctccgtgtgaaaagttatgaccatttgaatttctcgagagcttccgttgttcaatttcgagcgtctcgacatattatgcgcccgaatcggacatccatgggaaaagctatgaccatttgaatttctcgagagcttccagtgttcaatttcgagcgtctcgacatatgatgcgcccgaatcg

SEQ ID NO: 16400 - DNA, 140 bp, Glycine max
ctcatacgtctcatagcatgacacaaagagacggaagtgttacatctgtaagaggctgtctgggagtccaatattatattacgttgaacactttgtctgacggaactcctgtgatgcgtaaacttaggcgtgccctccat

SEQ ID NO: 16401 - DNA, 339 bp, Glycine max
gcgtctcaatatatgattggcctgaatcagacgtacgaaggaaaagtgatggctgtgagacgattttcggtgcggggacttggactaacgatcgaaatatcatggacatgcgagctacttatggagggtaggtatatctcaatcagcttggactaaaactatttaatttttttatgggaaaaaaagatatgcatatttattgacttttacaaaattaccttataaggcgtacaaagcgattgaagagaatgtaaaatgattttaaagtatcaatgcatcactattaaattattttttatttgagagtcaaacctttggtcttaataaatctatcatgtc

SEQ ID NO: 16402 - DNA, 300 bp, Glycine max
  unsure (1)..(300): unsure at all n locations
agcttgaagtgaggaagtgtggaagagtttttcnnccttcttttatncgncgaccacagagtggtacttggagatatgtcgcgggggtcacgagaccttggggacgtcaggtgctattgcccaaaaccaagcttgaccattcccgacccaacccaggcatagtcagtcagtgagaacctgtgacgtaactaaacaggcgagctcctggcaatcaaccgataaaagaacaaagaccacaaagcaaggaggcttgtgtggatcttgagtgatatttggaatatggcctctggtaatcgatta

SEQ ID NO: 16403 - DNA, 340 bp, Glycine max
  unsure (1)..(340): unsure at all n locations
agcttcatttctatggttttatgaatggtcatttggcgnngggcatnnttaatttggaattgaagcacaactactctagatatacgtaatatactgagtgcatcaaattttcaaccaatttcatcttaactgtggatgacttttagtagatgtccccacatattacataatcacatttactagcaaaatgtgcatgccttcttgatttggaagttccctcctctctctctctctctagggaggaggaacatttgaaactttctgcagatattgaaaaaaagcagaatgagacatccaggaaatcctatactgaccggataaaggagattacgaaaaatag

SEQ ID NO: 16404 - DNA, 377 bp, Glycine max
agctttagtggcaccaatttatctctgttcttatgtgcaatcttcaatagaggcaataatcttgtgtagttctcaaacatcttatagcaggacacaaagtgacagaggtgaaacttctttaagaagctgtagctgaatccaatattttattacttgaacaagtttcataagtgagctactgggatttgtaaacagaagcatgccctctatttgtttatcagtttacatgcataagctctaaaatgaatctcataaagaatcaccaaactgaacaataaaacatagggtaataaaacctttaccagagccagccttaaaagtcagctatgtgggaataaactcaaattttagaaacatgatgcgtggtattcatacta

SEQ ID NO: 16405 - DNA, 383 bp, Glycine max
tgacaggcaggtgcacatgtctgcaatgtatttggcttttcaagtggacagtgctactactttttgcttcttggaactctaggatatgggagaccctaacaacaggtgaacttatcccacgatgctccttttgtctactagatcaccacacctgtcagaatcatagtaggctacaaggtgtaggctatcatctcccttagtatgatgaggaaacaaaatgccatattcgagtgtccctctcagatacctcatgattcttttagctacaatcaagtgtgggtgtcttggatcactcataaatctgctgaccaagccaacactgaaagccacttctggcctactgtgacagataaactcaggctaccaacaatctacctaaacat

SEQ ID NO: 16406 - DNA, 410 bp, Glycine max
  unsure (1)..(410): unsure at all n locations
agcttgttcttaagcccttttaccactccttctctccttaactcattcttcatgtgcttgaagagaattcaacaactcccccaccttcattgaatcaaagatccttggattctttgattgccacaataatgtgattaaaagaggagtcaatgttctcaacaccttgccaacaatttgttggtctaacaacacttcattgcaggctttcattgaattgattaatgtttggatttagttgaaataattaacaatggactcttgatcactcattgacaataattcatattgtcttcaaagatcttgaagcttcacctttntggttttggttgcacctccataagctttgttcaagatgtcccaagcttcttttattatcatagcctttgaagtttttccaaaatttgcaacat

SEQ ID NO: 16407 - DNA, 409 bp, Glycine max
  unsure (1)..(409): unsure at all n locations
tgccacccagctcgccctttctagcaaagnggctcctttctatacaaccgccttctggaggaatcttctggatggcccaagtgggcctggttgctatttgcacccccatttttactaaatacaccccctactttttttgtgcttctttttcgtaaagttacggaaacttacgattttcgtaacgatacttgttttctttctgtaatgttacggaaccttgtggattacataatcatcccttttttgacttacggaatgttacggaacctcacgaattgggtaacgatgcttcctttttgatttccggtatgtcacggaaccttacggattgtgcatcaatactgtcttttgatatctggcatgtcccggaactttacaaattgcctaatgatgggtgccaaacacctta

SEQ ID NO: 16408 - DNA, 325 bp, Glycine max
  unsure (1)..(325): unsure at all n locations
agcttgtagggttaaagtcttacgatngtacgtgctcatgcaacaattgttagccggggctatacaagacatcttgccaaacaaagtcaggttcaccataactcgcctatgctttttcttccatgctatatgtagcaaagtgattgatccattaatgtttgatgagttggaaaatgaggccgcaattatactgtgccaggtggagatgtattttccccctgctttctttgacatcatgattcacttgattgtgcatctggtcagagaaatcaaatgctgtggtcctggttatctacggtggatgtacccgggtgagcgatacatg

SEQ ID NO: 16409 - DNA, 329 bp, Glycine max
  unsure (1)..(329): unsure at all n locations
tctttgaaagataatgaatgttataaaaagtcaaaaagtacatggttttggaagacgacgtgaacatggccgacgaagaagagatcgtgacaattgtgataataatgaaagaagttatcaacccactagatgttatgaaagatgaataggtagagataattttggaagaacaaatgaaaggaggtatgataaatctaacattgaatgtttcaatattgccaaaagtatggtcattnttcatgggagtgcatgtaaagccaatattgaatgctataattgccataagtatatatggtcatttttcttggaagtgtaaatcttatgttgaa

SEQ ID NO: 16410 - DNA, 401 bp, Glycine max
  unsure (1)..(401): unsure at all n locations
ncaagcttgagcaaatttaaacgactttaatttttgactcggatgtccgattgtgtcctgtaatatatcgagacactcgtaatcggaaacagaagctctgagcaaattcaaacgacaataacttcttactcggatgtccgattgaatcccgtaatatatcgagacgctcttaattgaaaatagcagctctgagcaaattcaaacggcaataacttttaactcgggtgtccgattgtgtcccgtaatatatggatacgctcggaattgaaaacagaagctctgagcaaattcaaacgacaataacttcttactcgaatgtccgattgagtcccacaacatatcgagacgctcgtaattgaaagcaaagctttatcaaaatcaaacgacataacttttgactc

SEQ ID NO: 16411 - DNA, 259 bp, Glycine max
tagcttatacttatgtgtgctggtctactttactaagcttgctgcctgcaaaagcaacatgcatcttgatgaatcttctggagggcctaattgggactgacggctatttgcactaatattcttactatgaacaccactgcctttttgttgggtgatcatgcttttcgtacagctgcggtaacttactaataccatgcacgatactatgtttagtttccgacatgctacagcgccttgctgattacataatcgtaccact

SEQ ID NO: 16412 - DNA, 281 bp, Glycine max
tctacttatttgtgcacgcgcgtaacttttatggcttgattcccacgcgcgcaactgctcggagttggcagccagctatgccaattataatttctcgcctgagcaggagtcatgtcttcaaaggctccaccacaggccgcagggatcatactatactgcatatgactgagtgctttatataaatattgtagaagaagtagatctgatatctgatggaagtggcaacagtcacatcgttgcttaaatctgtcttagtactcatatagggtgatgtcactgag

SEQ ID NO: 16413 - DNA, 399 bp, Glycine max
agcttatatgcatttcttcggttttttctttcgtgttaggagggattttgttgggctatgtgatgtatgattgcacccattactacttacaccatggtcaaccaaagtctgatgtgcccaaaagtcttaaagtaaaagtgtttcccctcctttagctggatgataattaaattacagttcctcactccaatgggttactaagcataatcatcttgtcaattaatgttaggtaccaaaaaaaaatggtcttttaacatttgtgaatattgaatctgattagatgttgaaggacattaaattcgtacacagtgaatgtgctttccttatcatttattgttatactcatgagtctcttattctggccataaaacatggcagtattctcctcttcactcttct

SEQ ID NO: 16414 - DNA, 408 bp, Glycine max
  unsure (1)..(408): unsure at all n locations
ataggatttttttatagacggaccacttgatttggttttggacacgacanccgacatggcaccttggagaacgtaaggtgatacctagagggaataatgaaaaaagcaggctaccccctataggatatgaaacaagaatacgttgagattatattggaatagctaatgagcaggggcgtgtatcagatgtccatgcagcgggaaaaattgacaaaagaggggcatattntgatggtaccgcaagtcatgtcgatattgaatgcttttagaagcatgtgtaatcatggacaattgtcttggtaaagaaatgcaatggtgtagaaatagtcacttatgttgtaacaatgtggtgtaaggaaatgcttctttatcagattctctcgaagtctttacagtctaacgctgacg

SEQ ID NO: 16415 - DNA, 360 bp, Glycine max
  unsure (1)..(360): unsure at all n locations
agcttgccacccagctcgcccaggcgagcntatctcgtctcaggcgagtagggttgcttcctccagaagcaacagccttctggaggaatcttctggagggcccaattgggcctggttgctatttgcacccccatttttactaagtacacccctgcctttttttttggtgattctttttttcgtaaagttacggaaacttacaaatttcgtaacgatacttgttttctttccgtaatgttacggaaccttgcggattacataatcctgccctattttgacttacagaatggtacggcacctcactaattgcgcaatgatgctttcatttgatatctggtgtgtcaacggaccttataaatt

SEQ ID NO: 16416 - DNA, 404 bp, Glycine max
ttagcttcagatgatgcagatgggtttgtagctacctcatgcactcctctaatgtttatggcatcatttctggcgctaaactgctgggagttggaagccatcttctcaattaaatttctggcttgagcaggagtcatgtctccaagggctccaccactggcagcatctatcatacttctctccatattactgagtccttcataaaaatattggagaagaagttgctctgaaatctgatggtgggggcaactggcacatagtttcttaaatctctctcagtactcatataggctctctccactgagttttctaatacctgagatatccttcctgatggctgtggtcctagaagcagggaaatttttttctaagaatactctcttaaagtcatcccagctcgtgat

SEQ ID NO: 16417 - DNA, 305 bp, Glycine max
ttaaccccggacgaagagattgtagcgaatgatatctgaatctgcacatgcaagactgctaaacgcaactaataagcacttggccaaaacctaccacaaataacagggacgtagtcacgtctaggtttaaacccaaagatcagtgatgtcaaatatcaattttgaataactagacgaattgagtttgatcaacttagaagggtatttttttaatcaatattactcttctacatggagtaaaattgaggcaagagaacttgggcgaaaataaatataaaagaaagtctacgattatgaattcacac

SEQ ID NO: 16418 - DNA, 357 bp, Glycine max
tataaaactgatggtgttgttggacatacaacattgttttttaccaaaaaccgatgtcggttatcacaaaacaacatcaattttttagtaaaaatcgatgttgttgtatgactgctaacattggttttggtaaaaatcgatgttgatatgaagatatatgactttttttatatttcttactatataacatcagtcttttaaaaaatcaatgttgtcattcttatgttaacatcgatgttaacagtattactttcaacgtcggtactttttacatcaattaataactgatgttgaaagtccttaataaccgatgttaaatcttattttctagtagtgagtatatatgtaattaaatta

SEQ ID NO: 16419 - DNA, 525 bp, Glycine max
  unsure (1)..(525): unsure at all n locations
acacacccgaaccaagcgacgaacagagacagcgccaactcacaaccaccnccccccacggcatgacacatcgagtgcatgcgatcccaagancgacctgcaggcacgcaagcccgnaacnagcacgaggggcaacacaattgaaaaataaccgttccacccgaaaggagagatccgaagacaagtcaacccgccaacacccaagagaaatggacaacgaccgaccaggacgacggagagacctcgcaaacatcaccccgaacggcagggaaaccaaacgaggacacggccaacccgggaaaacttgagcgccaagagagcctaaccagcacaagaacgacacactgacagaccgactgagcacacccgggacaaacgagcaacgcaaactcaagcccgcacaagggcccaaaacgatcatcccaaaacaaagggccggccacacacgagaaagacgcaacaagagaagcgcaccaaaacaaacccaacacccggtgcaaaaaaccaccccccgcaccaaaaccc

SEQ ID NO: 16420 - DNA, 324 bp, Glycine max
agcttgaccggatgtaagacacatcttcttcaacctttgtcattcttgactccatttcattgaagcacttatgcacttgcaattccaaagtatcaaacctctcaccaacaaaggtttgaagaccatcaaacctgtccataatctttgaaagaagagatgaatcttctccttcatgtccttcttcaccaacatttctagcacccttcttcacccaagagccatcatgctcctttacataaccaaaggatgctatgactgaagtgcctataaggaatgatctcttgattggaacacaaggttcagaatcaagagggatattgaagt

SEQ ID NO: 16421 - DNA, 333 bp, Glycine max
  unsure (1)..(333): unsure at all n locations
agcttggaacaattgattactgtgtgtattttntcctcgncagataacttgagcttataagcaacaggaccaattctttcaataacttggaatgggccatagaatcgtttggcaagtttggcggaagctgatgaagttcccttggtagaagactgtcgatagggtcgtaaccggagaagaacccaatcgcccacctgataattcacctcctgacgcttgtgatcagcttgcttcttcatctggtcttgtgcctttagtaatttcttgcgaatggtttgaaaagtagcgtctctatcagttaacaagtcctcaacagcttcaatgtttgacgtg

SEQ ID NO: 16422 - DNA, 410 bp, Glycine max
  unsure (1)..(410): unsure at all n locations
tgngtatttattctttaggcttaagtcattctccctctatttatctttccaaaacttgagtcttgacccatcacccaccttccatctgaaattgttaatgaggctattgctgtgatgttagtgaaaaacagacctcaagtccttccaccattcttcaagaagctataagctgcctttgtggaatatggtccaccagtatcaagcccccatagcagaaggtccctgctttgctggttgaattgaaactcagcaatgtctgccataaaagctgctgccatatcaacttcttggtcaaaaaggtttctcctccattgaaacttccactcccatctattatccactaagatacccattgagttgattaaatggttctgctgagtactaacgttgtacaagcttgggtatttatc

SEQ ID NO: 16423 - DNA, 238 bp, Glycine max
atggtaactctataaacagacctcctattctttaatggacagggtaaccactactggaaacccctaatgcacattatcctcgaggctattcatctcaatatctgggaagccatagaagtatggccttttatacccaccacagtaaatatacgttcaatagacggtagttcatcaactgaaagcataaccactgaaaaacctagagatagatggtctgaacatgatagaaatccagtac

SEQ ID NO: 16424 - DNA, 404 bp, Glycine max
taaaaacaagaaggaaattaagtgagtattatatacgatctgttagtatatatatatatatatatatatatgtatatatatatatatatagatatatctatatatccatatatatctgagcgcaagtgtgaaaaaagaacacgcgaagtatccacttattatatggagcgagtgtgccacatacccacaataggtgtgaattttggatatacaaatactattacactcacagaaatgttatcactcggaatgagtaactttatatactacactcatagaactgtctcttggaaaagaaaacagctcctaatccatgagaaaaaaaacagaactgataacgggcgtcgcgtgactgaaataatgacccatagcattccgtccaccaccaaaaacgtcctactccg

SEQ ID NO: 16425 - DNA, 205 bp, Glycine max
agcttcaggttgttcaatggctttagatttttcttagaagggaaaaggtctgtgtggcgatcggtatatgagcataaaccacagagtctggcgacaggtgcttattttttattcatggccagttgggttaccaagattaccaagggatctaagttaacttctaactttttaatcccacctgatgaattccttgctactttatgca

SEQ ID NO: 16426 - DNA, 367 bp, Glycine max
  unsure (1)..(367): unsure at all n locations
ntccctctttgaacaaatacccctcagccaaatagaattcatcttgggcctttttcccaaaactctcgtaaatgggagagaaatgttcatctaaagcatacaagtccctaatgttaccaaatcctaaagtttgagctcctagggagcaaaacaatgtgtgtctcctagagagggcatcaactaccatattttcttttccctttttgtatttgataacatatggaaattgctctatgtactctacccattttgcatgccttttgtttaacttgctttgccctctaatgtacataagtgagtgatgatcactatgaatgacaaattccttggaaacaaggtaatgttcccaagttcggagggctcttat

SEQ ID NO: 16427 - DNA, 280 bp, Glycine max
  unsure (1)..(280): unsure at all n locations
agctntgatgatatggtatttaccgatgttaggatcaaagtgggtctaaaaagaggcaaatctgatcatcatgctttgataaatgccaaaaaaaatagggcaaatgaagagggtgaggatgaaggagaagcccgtgctgtgactgtcattcttatacgaccaagtttcccaccaacccaacaatgtcattactcggccaataacaacccttctcattacccaccacccagtcatccacaaaggccgtccctagaacaaccccaaagcctacctaccgcac

SEQ ID NO: 16428 - DNA, 228 bp, Glycine max
ttcttgagacaactgcctttagatagcttctttgagaaaacttccttgagaagctagagcttagctacacacacccctctcataacaaagctcaccttcttgagaagcttccttaagaagattcctaaagaagctagagcttagctacacatacctctctaatagctaagctcacctccttgagatgagaagctagaacttagctacgcaccccctattatagcttag

SEQ ID NO: 16429 - DNA, 265 bp, Glycine max
agcttctagccaaatggacttaccttgaattaattccttgggcaacccttttgagccttgtttccctttccttgttttgaagctcactacaagccttaagtgaaaaaccatgatatcaccatatccttaaggaattttggagctatggaatagttttgggaataagtgcgtgtgtgtgtgggggggggggggccttttcacccaatagccttctgctccttaacatacccatatgatgctatgactgaatgcctatagggatgat

SEQ ID NO: 16430 - DNA, 400 bp, Glycine max
aagctccttcaactgcacaaggctcttaatatttgattatttccttgtggaaccttcacccgtcgaagacactgacaaaaacttatcttctcctttttggaaaaagtatgacaagctgggggcaagtaaattttcttcccatcagaccttggatgcaactgtgatcgtatccccatctcagctagatcttgacgggtattcaagccattcttcaccttgccttgaatgttaaagagcattccaatcacactgtcacatacatttttctccacatgcataacatcaatacaatgtctaatgtctatatcagaccagtacaaaagatcaaagaaaatggacctcttcttccatatgcaagtcttacttttatcctttgtttggggttttccaaatacagtat

SEQ ID NO: 16431 - DNA, 272 bp, Glycine max
agcttctggaggaatcctcctaatgaagtttctagagaaagctacataaagctacctcggtaaaaacgcttcccagccttcgttaaccgttggagcttctcaaaatttggtctacaacttcataagacacgtgtccatgatctaaccgttgggatctttgagaagatgtctggagtgtgctagaagcttccgttcccgagagcatttcttatttaagaacttcagcctttgctttcgtgtagcttaagaaaaacggcatttcttcttctttc

SEQ ID NO: 16432 - DNA, 374 bp, Glycine max
  unsure (1)..(374): unsure at all n locations
tccatcactatttcttcatgtgtcccgatttttgctttttaataggtaaattcctcatccttcttctatttcttttgctgagaagtcccttccgcatcacccttagtcttcttccttttcttattctgagaggtcgaagtcaagtgagcactttcagttctatctctctgcagcctctccttcttttgcgcacagtgagatataagctcattgagggaccatttttccttctgagtgtttgatgtgccatcattttctcctatttcttaaccctttttgccccattctaaatactgattagtcttaattgtcaaatttattatgcagttntattatttgggcccattcagctaaattgatggttttaatctaat

SEQ ID NO: 16433 - DNA, 367 bp, Glycine max
gtttacttttgacaaggtgtcgccatatgcgaagattatgttccgagtactgtggatttggggcgaccacgctctcttgattttcagctgggaaattggggagtggcagaacaccccgggcttttcgcaacatcctaacgtttacctttaccgtgataaatagctgtataattggggctctgctttaaagtcatcatcttgactagggcttgtggcttttgcttttgaattttaactcaaaggacttttcttattcgttctgggcgctacccattccatgcctctgctggtgacttcttttcgtacacggggcaatcaggacgatcccttaaattctagacctgggcccgtcttaacttgagcagaa

SEQ ID NO: 16434 - DNA, 199 bp, Glycine max
tagccctatatgggatggaccttttcatgttttggagttgatcaataacaatgcctataggttggacctcccagaagagtatggagtcagcaccacttttaacatttctgatttaattccttttgcaggtggagctgatattgaggaggaggaactaacagatttgaggtcaaatcctcttcaaggggaaggggatgat

SEQ ID NO: 16435 - DNA, 292 bp, Glycine max
  unsure (1)..(292): unsure at all n locations
agctngattctatgtcaatataaaaaatcatcaaattatatatccatatgaattataacgaacataacgtttcttttcaatataaggaccattagatagatggacagcaaaaaaaaaaaaaaaaaaatattaccacttccttacatcaaccttatccttagaacctcccacaccatcgacaaaaccagaaacccgaaaaaatgaaacaaagctggcagaaagtgagtccttcgtgaccgctcactataaattgtgaaggagttgtggtgcgccctgtcaatggaggggttgt

SEQ ID NO: 16436 - DNA, 281 bp, Glycine max
tatgacggattgttaatgcggaagcctcatatggagtttgtgatctttcgtaactatcttacctgagaaaatgtgagagcacattattagtataacgctctaaccagctgaactgatagactaattgtgatataaaagcatcaatgtcgccatatataacattaaaatgcataatgtatatctaatgcacatgcaaatgtacataattaaatttggggataattaatgtcttttacatatatatatctatatatgtatagatatattataaatgagattca

SEQ ID NO: 16437 - DNA, 382 bp, Glycine max
  unsure (1)..(382): unsure at all n locations
tcgcaggcgatctgaaaagaggccaatttaatcatcatgcttaaaccaatgaaaaaactggggcaaataaagagggtgaggatgaaggagaaacccatgctgggactgccatttctgtgccgccaagttttccacccaaccgacaatatctatacttatacaatttcaaactttattcttacccaccaactccctatttcgcaaagcctatttttgttctaccaccatggtttgttggcgtgcttactatgaccagaccacctctttatcgctaacacccatcaccgccaatacataatgttgcagaagaaagccagtaaacccgcccaactccaagcctatgctacttgcacctatgtcgttgtaataactgtgcctctcn

SEQ ID NO: 16438 - DNA, 399 bp, Glycine max
  unsure (1)..(399): unsure at all n locations
tatntgtgacaacattgaagatattgtntcttatctttctagggactacccactctccatntggagtcctttagtgtcctataggccctgcacaagacagatagatcaagtnagcacaaanaattgaaaataagccacaattatcaattaagctcaatcatttgcctaagatcaaaactaaattaaagtgagaaaatgagggtcaaagagtttcaattgagctaagaagaatataaaaatactaaactacaaatgctcaatcatacgagatcggtgaatctcttttgataggactcgatatgttgcagcgaaccatggagcaagtgaagtctatcacggataagatcaaagtggcccaagataggcagaaaagttactatgatatgaggagaaagtctc

SEQ ID NO: 16439 - DNA, 518 bp, Glycine max
  unsure (1)..(518): unsure at all n locations
atggatgtnnnngttgacccttgaaacccnccagggatcccgcantaccccnnnttggnngnnnggcnaagaggctaagangaaatctttgtnnttattacaaattatttanagaaagatacaaaagcccgacaaaggtccaatngataaactaaatttacctgtgatatagctctcattcactccaatacagcttgaagccttttttatcattcaatgctctagcaatactcaacaggtacatactatatcataatagatattggtcacggcagaactaactgacatgcatgatcatccttgtttgagcatctatttttgatacaaaaataaactcttgtcggtacacgataatctacttttgatggacaatgctgagcgctgcacataggatatctctcatcgcgatacgactctatgtctatatttcaagtcagaagtctaaattatagtactttcccaaacagcattactatctaaataactctaaggttaccgaaaatctggactaaacaaac

SEQ ID NO: 16440 - DNA, 384 bp, Glycine max
agcttccgtaactttttcgaaaattattattaaagggtggtgaacttatcaaaagggatgcaaatagcaattttcaaattttcgaatctggacccttccaaaatattctcgaaacagggttgcttcctccctgagctcgcctgggcgagctatgcggcaacctcctccccctttttcctataaataggtgaaagggggttgttccaaatatccataatccctctggctatgcatttcagttgtttttggtgaaaaaaatcgtttccgtgaagaaaatcccagtcgaggtgctttcgtaacgcttccgagacatttacgtgagtgaatccgtgaaggttttccgtcgatcttcaccgttcttcatctgttcttcgttcttcaacg

SEQ ID NO: 16441 - DNA, 393 bp, Glycine max
tcctgttggtaaatattcgtatactaaaaccctgtgctcttcttcacagcagtatcctatcagctgcatagtacatacataggaaatttgaagatcacacagaccactttcagtttactattattactttttaacattcagataccgagattatgatctcaaatagttaacacaattacacaccaatggtccaatactagaagcacaagttaatcataaccaataaaaattaccttattatcatcagctccaaccaaacatgccacaaagagaaaaaaaatgggtcaatttataaagtggagtttatgttttcaagcagggctgctaataagaaacctgtgttgaatctaatgataaagcatctcagagtcactcacagatctctcaatctca

SEQ ID NO: 16442 - DNA, 387 bp, Glycine max
  unsure (1)..(387): unsure at all n locations
agctntctaaagctttctggttatctaaaccttgaaatttaacgtgtgttatctcatttctttcactcccttatggatctgacgaaaagaattcgacaaggactaaccgcctagagtctttgtgtgtctctcttctcccttttccaaaagaacgaaggactaaccgcctgaattcttttgtgtcttccttctcccttgtcgaagaattcaccccgacacagtctgagaagtattttgattctctcctttcccataaacaaaagatttcaaaggactaaccatctgagaattcttttgtttccccattcacaagagttcaaaggactaaccgcctaagaactttgtcttatcacattggagggtacatctacttgggttgtcggactg

SEQ ID NO: 16443 - DNA, 365 bp, Glycine max
  unsure (1)..(365): unsure at all n locations
tatataaagatagacgaccttctcctagaatgacacatataaatggtctctctggacaatagnggattgcagacagggaagaagaaagtaagcggagaaattttgccgaagcaactgagtggaaaaaagaaagatgacagtgaacacaaattatttgtcttaagagatgagtaaaacacgtatcttttaataactctcatggtatagtttgaaagaaagaattttgtattcttggtataatgaaactaaatcaacaaaattctgagtattctattaaagttcgagaatttcttagacataattgtgagcgactaaagtatacaagattttccatgttgatatctaattttttgaatattaataaa

SEQ ID NO: 16444 - DNA, 379 bp, Glycine max
agctataaacagacattgcttcatcttagtcgccattgactacttcaccaaatgggtcgaagcagcttcatacgctagtgtgactgggagcatggagattagattcatcagaaatgagataattttccgatatgggttgcccaggaaaattatcaccgataatgccaccaatctgaacaataagatgatgaagaagatgtgtgaggattacaaaatccaacaccataattctatgccttataggcctaagatgaatgggttagttaaggctgctaataaaaatatcaagaagatagttcagaagatgactgtgtcatacaaggattagcacgagatgctccccttttcattgcatggttatcgaacttcggtgcacatg

SEQ ID NO: 16445 - DNA, 468 bp, Glycine max
  unsure (1)..(468): unsure at all n locations
tcgcttggaagaccctcatgttctctcatcctagggtatgtttggaaatttccatcctaggtcaaggttatggcaaaaagtcgatgtttggatcaaaaggcctgcaaatggtgggtcataatgtatgtcgtgatatctatttggccaatggctcangaagaagggaatgcccaaatcatttccatgaaaagcatattatgataattaaaaattcatgcaaaattaatcatagcacatatccatgcggacactcaaatataaggctntgtggccacacaaacactaatacttagggtttgtttccacattcaggccaaaccagtgtttcaacgatttctctttttatcaagtcatacaaacatccgagcctattttggcattcgggggaatctttntttgttttcactctctaggtgcatatgtctttttcacactatgaaataacatgacaacacacttgaagataca

SEQ ID NO: 16446 - DNA, 417 bp, Glycine max
agctttgcggatttggtcttctccagtgtattgatcgaagtggatctgaaaagaggcaaatttaatcatcatgcttaaacgaatgaaaaaactggggcaaataaagagggtgaggatgagggagaaacccatgctgtgactgccattcctgtacggccaagtttcccaccaacccaacaatatctttactcagccaataacaaactttctccttacccaccacccagttatccacaaaggccatccctaaatctaccacaaagtctgtctaccgcacttccaatgacgaacaccacctttagcacaaaccaaaaacaccaaccaagaagtgaattttgcagcgagaaagcctgtagaattcaccccaattccagtgtcctatgctgacttgctcccatatctacttgataattcaat

SEQ ID NO: 16447 - DNA, 195 bp, Glycine max
aaacgttccatcgatattattaattatcttatgtaaagatattttgattaattgatgattattttgcttcttttggtttaaccaaggatacagcgtgaacgattggttagattgtgttttaacaatgattaaacgagattacaacacaaatgaccggttgaaattcattttatgatgtattaggtgaaacaatga

SEQ ID NO: 16448 - DNA, 414 bp, Glycine max
agcttgagatgaggaagtgttgaagggtgaaacttcctgcttttattggtgaccacagagtggtacctggagatatgtcgcgggggtcacgagaccttggggacgtcaggtggggtgctattgcccaaaaccaagcttgaccaatcccgacccaacccgggcatagtcggtcagtgagaacctgtgatgtacctaaacaggcgagctcctggcagtcaacagataaaaggaaaacaagaccacaaagcaaggaggcttgtggtggctggccagctgtgaattttgtgtaatatgtggatggtggcctctggtaatcgattaccaagggtgggtaatcgattacaaggcttaaaattgaggacatgaggctaagatggtctctagtaatcgattaccaaggggtgtaatcgatta

SEQ ID NO: 16449 - DNA, 301 bp, Glycine max
  unsure (1)..(301): unsure at all n locations
tggatatgcgagacatcttgccgaacaaagtcgggttagtcataactcgcctgtgctttttcttccatgctatatgtagcaaagtcattgatcctatcaagtttgatgagctggaaaataatgtcacaattatactatgccagttcgagatgtattttcccnctgctttctttgacatcatgattcacttgattgtgcatgtggtaagagaaatcaaatgttgtggtactgtctatctaccgtggatgtacctggttgagccatacatgaagatcttaaaacggtgtacaaagaatctata

SEQ ID NO: 16450 - DNA, 410 bp, Glycine max
agctttttattttcagtagatgaagatgtatctgtggccacctcatggactcctctaagaacaataacatcatttcttgcactgaattgttgggagttggaagccatcttctcaatcaaattcctagcttcagcaggggtcatatcaccaagagctccaccactggcagcatcaatcatactcctctccatgttgctaagtccctcatagaaatattgaagaaggagttgctcagaaatctggttgtgaggacagcttgcacacaatttcttgaatctttcccagtactcatacaagctctctccactaagttgcctgatgcttgaaatgtcttttctgatggcagtggtcctagatgcaaggaagaatttctccaagaacaccctcttaaggtcatcccaactggtaat

SEQ ID NO: 16451 - DNA, 433 bp, Glycine max
  unsure (1)..(433): unsure at all n locations
tctaagcaatcaaagttgagtttgcattatagtnttttgttgttttaatgcatgtgtgcttacgttcataagactatatctaataagtttctttgtctacaactagagatgcatggatcctccatatgcagtcatcatccttacactcaatagtcaccctacatttttcatttttaacccaccatccaaatccttcttgtattccaaatcccttcagcacttccctaanatgtgttacatttaaaaacaaatgcccaatctcaaaacagatcttgccatcattgtccaactcaaatngttttccatgcaatctgntctcctcataaatttcttccatgtctgaatttgaatgcacaactgcnactccaatgacatccactgattcatcaaaatcacttaaggcatccccatctgttgattctgcatgctcatc

SEQ ID NO: 16452 - DNA, 414 bp, Glycine max
  unsure (1)..(414): unsure at all n locations
agcttaggctaaattagtctaaactttcttaagctatttaagctaaaatctagtccaacaagagggatctgaggacgaagcttagattgattcagtctaactagggatcgaggtttagtaatttaggctacaacatagaacactaaagcatgattgattagagaaacatctttatatacatcagctggtttgttagaaagacccaacatctttacatactgttgtcaatcttacttacttgcattttttactatttttagcctagacttagtttaattctgttctaaatcatcaattatcaatgtttctttcaacaatgccttatgtctgaatttaaccctgtctaagactagttcccagagtttgatactcggattcatctgttntaattntaaatacttaacgatccgatgc

SEQ ID NO: 16453 - DNA, 409 bp, Glycine max
gacactatccaaactaagctattatccacgcacattcttggttgcgaagctccttcttccatggcttattccctagtggatggcgcctcctctcacctcttctcctttatcttccgctgcatctacatggttgagaatcaccattgaaggacctcattgaagctcaaagatccagcctccatagaagctccacaatcaaacttccatcaagtggtaatcagagcacaagagcttcaagtaggtgctccttaaacctccattaattttttgctttaccttctcttccattgttgtttcttcatttttctccatgtatctcctcacatgtcttgtgctaaatgtttttagcatgattctttagagtttccaccgaataaacttgctatagaagccagaattgattttctat

SEQ ID NO: 16454 - DNA, 322 bp, Glycine max
  unsure (1)..(322): unsure at all n locations
agctatgatctgaatatattttgtatatatattcactccacctacgagaacacctcccacattggaaattgtgatctgtacaacaacaaaaaaagatcaatccagacggacagacgcatacatttaatacaacgtttatctttgtgcaatcgattaatcctaaattctatcattttctatcatagacaaaacttatactaaataactaagttgacattgccaaacgattatatggagagatattcatgtaatataatagaaggaagctactaaagataaatacaaaatggtactttattaactatngactgacaggatttat

SEQ ID NO: 16455 - DNA, 345 bp, Glycine max
  unsure (1)..(345): unsure at all n locations
gacacttaaatctaagctgagaataccaagtctgtggagtgagtcanaggtttcanggaaatgggcagcagagatcaaacacacatcaaagaagattatgctacaactattagtttgtgttaaaagcaattcaaatgatggcattttgatattctctgttaaactagtagcttgaaaaatacaatagaaacacgggcaccgggagacatttatcaaaatagtatataagtataccttgaatcattaacaattttcttgacttttacttaaataacatactcaatttgcatgatccacttgttcaatccttttaattagcattaacaattatagttttagaatcat

SEQ ID NO: 16456 - DNA, 283 bp, Glycine max
agcttgactatgcgagttgattttagccttagtttcaccttagttattagtcaattcgggtaagaatgagaaatcccaaagagaaaatgtccggttgattttcctctttattttactaaaagggatatttttgttattatattattattttatctctttttgatttccaacgtggttacggcacgaccgaacggtcgaaatttattttaaccaaagtttacggatcatacaattcaaacgttcggcggaaatttattttatttttaagttaagcgagaaatga

SEQ ID NO: 16457 - DNA, 357 bp, Glycine max
  unsure (1)..(357): unsure at all n locations
tctaaactntgtacaagaatgaagctctgataccacttgttagacaagtggcctcagatatcttaagaagggggggttgaattaagatatcccaaactgtttcccctaattaaaaatctatttcactttttactcaagttatgaattcccttaatgacaatcttcttaaatattaattcaaatgaagcaacttgaatatgaatataaagcaataataaataaaggagattaaaggaagagaaaatgcaaactcagttttatactggttcggccacacccttgtgcctacgtncagtccccaagcaacccgcttgagagttccactatcttgtaaatccttttacagttctaacacac

SEQ ID NO: 16458 - DNA, 256 bp, Glycine max
agcttttagccaatttttacgacattaattcttgactcggatgtccgattcaggacctgaagatatagctacgattgaacttgaatgcctaagctatgagcgtattccaactacagctactatctaatacgatgactgatggaggcactaaaaaaattcagacgctccatcaggaagtttgatgctatgacccaattcaaactacaactgctggctactccaatgactggctgagtccactattattagcctacac

SEQ ID NO: 16459 - DNA, 430 bp, Glycine max
agcttctagccaaatggacttaccttgatttaattcctttgatagcccttttgagccttgtttccctttccttgttttgaagctcactacaagccttaagtgaaaaaccatgatattaccatatccttaaggaattttggagctttggaattgttttgggaataagtgtggggggtttttgtttcattggacaacttgttttgttggctatgcttcatgatgtattttgggccatacttgatgtacattgtatattggataaatgttggacaacttgttttgttggctatgcttcatgatgtattttgggccatacttgatgtacattgtatattggataaatgttggacatgctgaatgaaatgttgtttctcacaggctaaagagtaataaaaaaaaaatcgaaaaaaaaaatcgaaaaaagaaaaag

SEQ ID NO: 16460 - DNA, 202 bp, Glycine max
ggttttaacccaatcacattatgttgataagctattgttgaagtgtaatcatcttgatgtaaaacctatttgtacttcttatgactcatccattgagttcaagaaaaaatagaataaaggaatttcttcacataaatattctcaaattatgggctctttgttgcatttgacaaacttgtataggcctgacattgcatatgaa

SEQ ID NO: 16461 - DNA, 430 bp, Glycine max
  unsure (1)..(430): unsure at all n locations
agctngcatttggaatttgcgaaagccctctccatcattaggattagtacctgacatctcaaacaaacaaatcaaacgtaacaagacaattatagttgctgtttgaatacctcacccactcaagtgtatcacacaattatggcttttctctaatgaaacactcttgccttttaccactctaattccccttgagttcttaggcaattcaagagattatggccacaacaaagaacaattcaccaatatgtgtaaggtaaggctagagagacaaggaaaaggttaaccaagaaaaaggctaacaatgtttttaggcacaaatgaaggaaataaaattcagaatttaggaattcaagtaacaatccttcatgcaaccaatatattaccttaaagagatttttttttttaaaagttcttcaagcatgaaccattc

SEQ ID NO: 16462 - DNA, 528 bp, Glycine max
  unsure (1)..(528): unsure at all n locations
cggaaagagnnnnngatgagacgtagagagcactcgatactacagaagaccgaagcganntatggaccgtgagcaagcgacttactcctgtatcataaccacgctctgagctcgtgacaggaccctatctttcgatatcaagcagagcgcactattgctgccccatatagctcctcgaagtgtaatgcggtcatactcttacttgcgagcgatcttggcctcttgaataacgacccttgcggtaattgcatcctcttaccgtgacctggcacacacaattcaaaagcgtgttgaggcctacatgaacttcgccgtggcaatgttagcctttcgtaacatgctgttgagagactggacttcttcgtactacttcagtgctatttgactctcttcagtactacttntaactaggcgaggcgatctaaaccttgttatgaactatcagccattcatgtagccaccaatgatgccatgactaatggcgagtagctcttgatctattccttacggggttacccatgccttgtg

SEQ ID NO: 16463 - DNA, 426 bp, Glycine max
  unsure (1)..(426): unsure at all n locations
agcttaaatatgtaaatattctttataatttaaatntgtactcatgggntggagtataattntatttgaacttatatgttagtgtttttttttatttgagtacatattttagagaaatttttgagatattttttttggagttcacaatttttatttatttatttagaattagtcgtgaacatttttaattgtgtagatcatagaatatttgaaaaactttagttgtaacaattaaaattatttttaaaaaatattaaaataaatagaattacaataaaaatggttgttaaaatatttttaaagtattttttagttttggaaaaatatccgtgctaatatttaaaaaattcacgagtatctgcataatgaatatcatgcgataatgaacgatcacataacgagatttatctcatgagactactatat

SEQ ID NO: 16464 - DNA, 370 bp, Glycine max
  unsure (1)..(370): unsure at all n locations
tcctgaanagctggtatgtttcattagaagcccatntattatagaatttgtataagttcagataaattcattttaatattactctgagaggatttctgatacttctattgaactgctgaagtaatttatattctagattaagaacataatacttaaaaaatgaaatcaattgtttactctttcttttttgcttcttttttttacattttaatccttagataagtagctaatcctacacaagaacctagctagctcaccaacatacttcaccaatccttagaccangttgaagatgaagactctttgtaacttcagtgcgctacaatgctgtttttctttttttttggaaagcaacattgctgttataatg

SEQ ID NO: 16465 - DNA, 330 bp, Glycine max
agctttaggcgaccaactttgatatcagttttgtaaattaagtcacatacgttaactaaaagatcccacaaatcactattttctttaaagtagaaaatcctttctcaatttacgttttaagcttcattgtatgttaggctgacattgaattggtgctcatagaatattaattagaatattttaaaaaaattattatataaatcacgagacattataaaaaaaattatgattaacatagattttcatctttcaataaaaatatttagactctaatttttttaatcgatatccttaaaataataatggtgagttgtattttaataaaaagat

SEQ ID NO: 16466 - DNA, 448 bp, Glycine max
  unsure (1)..(448): unsure at all n locations
ccttaaactcagcttaaagtcttanaactgccgtgccatatcttgtaattgttatgtatttttctcttttatctacctataaagtgaaacttattattggtctaaaaaaataatgattttatctaaggtgtcaactaattctgtgaaacagggattttgattgttgatttgaatatttaagggctgaatctgtaaactatcactgcaacacagggataaacgtactcaaaagtcaaaacgttttcttattaatcttattaagcaactaattcctctgaataaaattattaatcttattaatctctataggcttattagatcataatgataataaggaaatcgataccaggctatcttatttatgactcattcacactaataggcgaatatattatgttctcttgatgcttgngttctttgtttcttcctcccccctagagctctctca

SEQ ID NO: 16467 - DNA, 417 bp, Glycine max
  unsure (1)..(417): unsure at all n locations
agctattctccctctctctctcacgttgttattcccttcttcttcctcaccattgaagccccatcaaagctccaatctttgcacaccatttctactccaaatcgcgaaaggaagccattttcggagtcgtgaagcgcacctctacgttgtggaacttcaaatttcaggtttgggtagacttcttctgacataaagtgggtatggggtgtttgggagatatgatgggtagttttactaggtttatgctttatgatagttatttgtgaagaaatttgttgaaagaatgctaaacttgtcatgttgggtgtgagtcaagcttacccattctgttttanggttttatgatgatgtttgtgatggttgcgtgctgaaattgctgatggaaaaactgatagagatgaagggtagagttaacct

SEQ ID NO: 16468 - DNA, 250 bp, Glycine max
aagctcgaaaaggatgaggcagccttttgcatattgaatacccggtgtcaaagaattcagtctagcctctagttgaaagagttgatgaactaaggagtcatatgcaccgtgtacctggaatagaaccaaaagcccgaagaaaacactccacaaatttgaggcttataggcacaatatactcaactcaagagtgaaagaatatacggtcaagcatacttaagacgactaagcttacttagtcaaagaattg

SEQ ID NO: 16469 - DNA, 404 bp, Glycine max
agcttctacttatgtggcatgtcgggctttcttcactttcttgtctccaacgcgagctctgaccaccgctcttccttcccgcgatgcttctcttcatatccgcctgagtgggcttatagcctaaaccatacttcccacgatttcctttggcatttatcacgctagttatgccgccgttgtctttgcctaaacccattttgggttcgtaaccattccccaacaaaactcgggccatcattactgctgcatcggacaggcaagcttgcccagagaaggagtccacggaggaaatgcttaccacctcacaagactggaaagcagtttctaatgactcctctgcggcctccacataatgcatagaggatgggcagctcaccaagatgtcttcctcacctgacacgatg

SEQ ID NO: 16470 - DNA, 396 bp, Glycine max
  unsure (1)..(396): unsure at all n locations
tgacttannaaccaatattttntttctaccaagccactactggctataaagaatcaacaagattttttgaaattttgcacaccgactaaaccatgtgaacatcttatagatggatatatcactcaatagttttggtcttttctctcaaggtatacaaggtgtcttgagagctttgtatctttacaagaatttacagaaagatttacaagaaagaatgaaaaaatgattcatgtcttggttcttcaatgcttcttctatatatagatttcatctccaagtattcattatctcttaatggttgaattctttactttgttcttcgtctgaggccttgagtttgttgaggcatttagtgctngcattaaatgcatgtacattcttcatgcanagntcatg

SEQ ID NO: 16471 - DNA, 156 bp, Glycine max
  unsure (1)..(156): unsure at all n locations
agctttgaggacnaactagttatctcgttattctaaaggcatacaagtgcttatattgcgatgtctactatgcccggtaactgttaaaaacctgacccgagagcaaccccttgtgtatgaatcatgggtccacctacgaccgagaggtacataagc

SEQ ID NO: 16472 - DNA, 57 bp, Glycine max
  unsure (1)..(57): unsure at all n locations
ntgactacacagtacacactgctgactgattttacattatctattanggaaatctac

SEQ ID NO: 16473 - DNA, 402 bp, Glycine max
  unsure (1)..(402): unsure at all n locations
agcttctacaagtaacacattttcaatagtagtaaaggaactcatacctattttactaactccaatgattntgcctttgttgttgacgccatatgtaacgtgtccccttttcttgggggaaatgattgtaaatttggatgcatctcccgtcatatgcttggaacatccactatcgatgtaccacttctgatggaagcttgcttgtgtggcttctatggaggctggatctttgagcttcaatgaggtcctttaatggtgattttccaccatggagatgcagcggaagacaaaggaaaagaggtgagaggaggcgccatccactagggaataagccatggaagaaggagcttcaccaccaagatgagccttggataagaagcttggagaggatgcttcaatgga

SEQ ID NO: 16474 - DNA, 379 bp, Glycine max
tgaaagaaaattagtaattaatgtaagtaatgttagatattaactggtttataattaagggtgattaatggtgatctagattccatagaattggaaaaagggtaattaagtcataagagtctaaagtggagggcattttcataaatgactatataactagcttaaaaatagaattttagtttaactagatggtgactaattaaagtgtctaattatatgatgtagaataattaaaataagctagagttgtaacaccctcaaaaattacaattcaaactaacaaacgaaactctatgttgtggtatctgttcatctatgaacttaatttcagtagttatatgtttctaatcatagaatttctactatctatatgtgtgtg

SEQ ID NO: 16475 - DNA, 352 bp, Glycine max
agcttgcctgtccgatgctttagtaatgatggcccgtgttatgttggggaacggttacgaacccgaaatgggtttaggcaaagacaacgacgacataactagcttgataaatgccaaaggaaatcgtgggaagtatggtttaggctataaacccactcaggcggatataaagagaagcatcgcgggaagaaagagcggtggtcaaagctcgcagttgaggcaagaaagtgaaggaagcccgccctgccacataagtagaagctttataagcgcgggtctgggagacgaaggtcaagtggtcgctgtcgcaacctacccttcggcgggagggcgacgcgtgactcgcgggatg

SEQ ID NO: 16476 - DNA, 415 bp, Glycine max
  unsure (1)..(415): unsure at all n locations
tagccctagaaggggatggaccttttatgttttggagatgatcaataacaatgcctataggttggacctcccagaagagtatggagtcagcaccacttttaacatttctgatttaattccttttgcaggtggagctgatattgaggaggaggaactaacagatttgaggtcaaatcctcttcaaggggaaggggatgatgcaatcctccctaggaagggaccagtcactagagccatgagtaagaggctccaagaggcttgggctagagctgctgaagaaggccctanggttctcatgaacctcangatagatttctgagcccatgggccaaggttgggtccaattatctttgtacatattagactagaatgtcattatatttggtccttgtatttanggctccataatgtatct

SEQ ID NO: 16477 - DNA, 225 bp, Glycine max
  unsure (1)..(225): unsure at all n locations
atatgacagccaccgttttataagcgctgagcaccagcagcgcttcgaggccatcaagggatggtcatttctccgggaacgacatgtccagctcanggacgacgaatataccgacttccaggaggagatagttcgccggcggtgggcatcgctggttacccccatggccaagttcgacccagacatagtcctcgagttttatgctaatgattggcctacagtgga

SEQ ID NO: 16478 - DNA, 377 bp, Glycine max
  unsure (1)..(377): unsure at all n locations
tcaagttgctcatngactccaaattgctgcaaagaatgacaaagattcgtatggcgatntacagaagaacatagaccacagactcttgcaacaagtgcagatgtctaattcatggaaaactgagtgactatgttgaccgaggcatcaattgttcccttaagccttttattctcagtagatgaagatgaatctgtggccacctcatggactcctctaaggacaatagcatcatttcttgcactgaattgttaggagttggaagctatcttctcaatcaaattcctggcctcagcaggggtcatatcaccaagagctccaccactggcagcatcaatcatactcttatccatgttgctaagtccctcatagaaatattg

SEQ ID NO: 16479 - DNA, 410 bp, Glycine max
  unsure (1)..(410): unsure at all n locations
agctntgtcctcagatccctcttgntggtctatgctcaatttagacagccctccttggtttagactaacttaaactaagcttcatcctcagattcctcttgttggactagacctaactaaaatagcttacaaaagtttagactaatttagcctaagctttgtcctcagatccctcttgttgaactagacttagaccaaacaacattattgtaacaacatattcaaaaccaaaacttaatccgcagatccctcttgtaagactaagtttcaattcttcttcattcaagttctaaggcaaaaatacatttcccaatgctaaagtcacctaattatgcacaccaatgggtgatcagaccaagagcatacaaaatttaagcactgaaagaaacattgaacacaagaaacacaat

SEQ ID NO: 16480 - DNA, 433 bp, Glycine max
  unsure (1)..(433): unsure at all n locations
tacttgtggggaaaagtatgtttcactctgcctggttcttaccaaccacgtttgcgatatatatttgaaaaatatttaattagtctttcaaatagatattgtacatttgtattatatttctcattcaaacaaaaaaatataaactaaatacatcacatcaatatgaattggatcgggagacaacaattgaaactgtcaagaaatactataaggacgatttcacggataacacagatctnttgcacaaggtaaactntgtttcactacgaagtctttaaataataagtgatttaaatttcattagaattatgacaaaattttattatntttaattatttacagaattttgttcctatgaatgatgaaaaacatgggtacctttttgttgtgacatgctngacaaaagcatatcatactgggatcattacactgg

SEQ ID NO: 16481 - DNA, 433 bp, Glycine max
  unsure (1)..(433): unsure at all n locations
agctnttaattgaatntacaacgttccaattgattttttaatggtgtaatctattacaagatattagtaatcaattaccaatgtatctgaacgttcaaattgaaattcaattgtgaagagtcacgtcttttcataaaatgctttgtgtaatcgattatgtggttttggtaatcgattaccagtgacaagttttgaataaaaatcaaaagatgtaactcttccaatggttttcaggtttttctcaaggttataactcttccaatggttttcttgaccagacatgaagagtctataaaagcaagaccttgacttgcatttcaataacttttgcaacttttttacacaacctttgaacatcctttcgaatttcttcttcttcttcctttgccaaaagctttctaagttgtctggtttctaaacctttgtttttcac

SEQ ID NO: 16482 - DNA, 476 bp, Glycine max
  unsure (1)..(476): unsure at all n locations
gtggccattgtcgacttagcatgtgcgtntgatacattcttcttaacatgcgacacgagcaatgtcagaattgtcttgtgcacacctactctttatgtattgttggtatcccacatgtgtaatcatggaagtaaatctatctgcctcctttaagatcatcggcatgtgctcgggagagcgacaaatgcttatcgagaaaaactgttggcaggcatgacaagagcgtacactatttggttcccatcgaggcaataatgaggggtatgagcgttatgctgatgtgaaggatttccaaatgatcctatgatagggatgaggggatgtattaagtataatctcttgtgggcatgtagacagacaggataccctatgagaagcgcgccgttagagagaccatcgctcctctcatcactaaggcttgtatgaagcttatgtgacattactctatacgatctctaatgcataggatacagtgg

SEQ ID NO: 16483 - DNA, 419 bp, Glycine max
  unsure (1)..(419): unsure at all n locations
agcttcttatccaagacactctcttggtgtgtgaagtttctccttccatggcttattccctagtggatggcgcctcttctcacatcttctcctttatcttccgttgtaactccatggtggaaaatcaccattgaaggaccttattgaagctcaaagatccagcctccatagaagcttctcaagcaagcttccatcaagtggtatcagagcgcaagagcttcaagtaggtgctccttaaacctcaattaatttttagctctactttctcctccattgttggttcttcattttcctccatgtatctactcacatgtcttgtgctaaattttgttaacatgattctttagaatttacaccgattaaacttgctatagaagctagattngattntctatggntcaaatttcttgttcttgttc

SEQ ID NO: 16484 - DNA, 377 bp, Glycine max
taccttgaatgattgcataaatctaaacattagactaattatctttatgtacctgaacaaaatgatttccaaacacgtgaccgacacatataatgcagtgcacagaagaatctggtggtggttgacttctaagatgaaaaaatgtcatgctctgttgtcaggacaacgatacaaggattacattataccttaatgcaatgacatatcccgtctccgttatatccatccacttatgcacactaacctgaatcaaacaaatatacacatcaaagttagtttaaagtttgtcttaaaaaataaaccaaaacaacatacctttgaaaacccatcaacaagtagggacaaccttaattcttcaaatctctctgtgccatcga

SEQ ID NO: 16485 - DNA, 299 bp, Glycine max
agcttccacatttgatacaagtgaagtttctcctgttgttcgaaggatcttttatattcacattctcacgcatcttcttgttgtaatcataatagctgaatggactcttaataaacggggaatgactgtagttactaactccgcttggataatcaactctaaggctggctaaagatgaacaacattatcctatttactttctatttaattcgatacataataaatgagagaaactggaacttgcgtttcgcactttcaattctcatttcattatacatattattattaacagcttggat

SEQ ID NO: 16486 - DNA, 495 bp, Glycine max
  unsure (1)..(495): unsure at all n locations
cggcccgtggnattgaactttgaaccgtgatatcctaaactccgcgaagattaagatcgacccttgttgcgggaaactattacaactcttcncggttttttgcaacggcgcacgcgagtctatctggctagtagctgaagaaccttctagagatattgatcgtaggcactatatcacgcacctcanactaactagcattgactcttgaccttaccttcatatgcgacggatctggagaccacaattgggaccgtttagaactactattatgacgatttctcggataacacagatcttttgcgcaaagcaaactatgaccacttcgaagactttaaataataagtgatgtaaatttcattatatatatgacacatttatatattcttaattatttacagaattttgatcctatgaatgatgagaaacatggggacctcnttgttggtgacatgcttgccaaagcccatgctactggattcgttacacctggaaact

SEQ ID NO: 16487 - DNA, 417 bp, Glycine max
  unsure (1)..(417): unsure at all n locations
agcttgtccgcaaaaaaatcactaaaaatgttntaagattcgatacctcagtttttctcaccaagtaaaaatggatcattttaaggtccaacgccttaaaaggaccaccttccaagtaaaaaaatcgcttgattcgcccttttgaaagaactacgtaggagcaagagccccgcttttgtcgacctcaaaaataaaaaagaaataaagtttagatacataatttcacacaattctaatctaaggctgttgtcctttgggataaacgtgagaggtgctaataccttcctcaaacgtaaatacaactcccgaatctggaatattcttcatgaccggtttctttcggtttttccgatgttttccacaaaaaaacgttggtggcgactctgcgcatttcctcctttggagacacacccgtga

SEQ ID NO: 16488 - DNA, 406 bp, Glycine max
  unsure (1)..(406): unsure at all n locations
ntacaacaaatagttgagaaaaaccttaaaaccccattttttccaactatgcaactaanacattcaaagctttacaaagtccatactaatgtctacctaaggtgtagatgggatgggtaagggtgtgtatagcccatgaggcatcaccctaaacttggcttgtaaacaagccacacacatagtgcaatgcttatggacactnttcttcatatggggccaataaaacttttctttgagtaagacaagggtcttgtctatcccaaagtggcccatgagcccacccttatggctctctntcacaagtaatttcctaatggatccttgnggtatgcaaagctttccctctctgaacaaatacccctcagccaaatagaatccatctcgggcctttttcccacaactctcg

SEQ ID NO: 16489 - DNA, 382 bp, Glycine max
  unsure (1)..(382): unsure at all n locations
agctntcacaacataattttcataaagcttatgaatggagtacatgaattgttctcatcatcagctcatgaatttacataataaaacaattttcataaagcacatgaattgacctcatcatcagctcaaaaacctcccatgtaaattttggaatctatatgtcgtcctgtgcctccttctcctgtcatagaataaattacttgcatatcagacatcaaatatattatagtgcaaaatatgaaacaaattttaaaacttcctattgttgaaaggaagagaaaataactgaatctatgtctgtgtcagttgcacaacatagagtgttatcagcaaagtatgaaaataccacgttatctacaaatgcaactaagactaccacatt

SEQ ID NO: 16490 - DNA, 240 bp, Glycine max
  unsure (1)..(240): unsure at all n locations
gatgaatcgagtcacatcactgcttcgtctactgccaaacatatttacgattatggatgtccttgttacttccagtttcaccttgacaaagatgtcatggaccatgttaaaatctaatgattaacccctatcctgcgaaaaatcncaatacttgtacatcattcgcatgcatccatgcttttcattggttgcattgctcattgcattctttccttgaaaaataaaataaaatgaacttat

SEQ ID NO: 16491 - DNA, 373 bp, Glycine max
  unsure (1)..(373): unsure at all n locations
agcttgtgtatntgttgtactaaaatttttgtgagcagaacttattaaactattttaaacttttttcctctctaaagcatcaatgagaacattatatttcactcgagaaaaaaaaaactcattccccctttctcaaaacaatattacttcacaatttcacatcccataaagtcttttacatttaataaaaaaaattaacttctgagcattttaaatttattttctatctcaaaaccgtcttaaacctccaatggcacctcttagggtttatataaagagaaagtatcaacgggatttaactgtaacaatttaaacaaattgaatgattaaattggagaaaaaatatattaagaaccaaaaatccaagcattaa

SEQ ID NO: 16492 - DNA, 216 bp, Glycine max
ggtagagaaagcagttgaagtcaagatagacgtggatgatgtgttgaaatcagctaacttgaagattgttggagtaatggagagaagtgtggtgagtgcaccaccaaacataatacagaaaataacttatttttaaaattagatcatgaatgaaattgatagagtggttaatgaggaagatcttaacggcaaaatcaaggagttggagagtgagat

SEQ ID NO: 16493 - DNA, 404 bp, Glycine max
  unsure (1)..(404): unsure at all n locations
agcttgtaggattatggggtacccatcatatgtggcactaggtggcggtcgggcgatggtgcacaacaagtttttttccacatccacaaatcgcgcataaacccaccatcccctgttgcccacctccaactgagctcacgtactcccacgtagcccatatcctcgtttctctcaacaccgggtccccatcaatcctctcaagcttccccaacatccaagtaaaacaacattccaacagcacaaactatcacagccaagaaaacagagcaaaggcagaaaactctgccaaaacaccaaccaaaatcacagcttttctcacttaaagaccccagtaacaatttctttgatccaatttgttaaccgttggatcgactccaaaattntactggaagtttctagtacat

SEQ ID NO: 16494 - DNA, 428 bp, Glycine max
  unsure (1)..(428): unsure at all n locations
cttgaacaatatacttggccttcatttaactgtctntgtgtcttggcggccacgctcaacaaagtactttcgacacctactgtacgttgatttcaccaatgctgttatgggaatgttgcaacaatcctttaaaaccttattgatacattctgagaggttcgttgtcatgttttcgtatcgacgtccttctctatcgtaagccatcgtccatttttcctttgagatgcgatcaatccatgttgctatggctggactcagttcacgaaatttttcttaaatttgatcaaaaatgtgcttgcatggagtgtaggctgcataaaattagttatgaataacaatcttaagtataaatgaaagtaaataaacgtgaccatcaaatatgaaatcttacccaatttctttaacatttctttttgtttgcattattg

SEQ ID NO: 16495 - DNA, 234 bp, Glycine max
agcttatctgcccaagaatttcatttatttcatgatgaaaactgtgaagagaagtgccacaaattgaatggcatcaggcctcacatccgatgctgatgtagtctaagataatatagccgctgatcttgtttcataatgatctaacaatgtgacaccattcaccctaactatgctatcctataaaccaaactaataataatttttctgcccgtgtgtcgatcggaattaagataa

SEQ ID NO: 16496 - DNA, 307 bp, Glycine max
ctataaatctaagcttaacattggaaagtgcatgagagacagattatgaatttatgaataatgagagcaatagacagtaactcgtggccattttgtgagatgtgctaccttggaaagccccaaggctcttatagaagagatgggagaaaaatgagttagaaagggttatattgagaggtacagatggacacgttaagggccatatgataggctatgttacaatttctgaactcattatgtgaacgtcttttatacaaagtttcatggtacaaaaatatataatgcttcctttgcgtgtaatgtttta

SEQ ID NO: 16497 - DNA, 426 bp, Glycine max
  unsure (1)..(426): unsure at all n locations
atatagttcatccaccntcttcttttatgcccaccgaagtagcctatagtgatcgatgatcgtatgaccacactgcctgaagagtcgaaccacgcttcgccactaccatacaaagtgaaacgaactcacaacttttggaaaggaactaacaataggatgcactcagcaccacgaatcttgtgcgacctgcacatatagtatagaaatacagcctatattcataacttcacacacatcaaatcgaaggctgttgtcctttgggatatacccgagaggtgctagtaccattctcaaactgaatacaacttccgaatctgcaatattggtcatgaccggcttcttccaagctttcgatgctttgccaaagaaacgttgagaggaccacctcattttcctattgggaagacacgcgtagccttaacttcn

SEQ ID NO: 16498 - DNA, 229 bp, Glycine max
tctaccatggatggttaaacatcagttagttgtttgcttctgccctttacgcggtcaagcgtgtctgcttttgttgagaggtttagcctagggttatggctgctgcttaatggttaatcatattccaatcgtcttctaatgtactcagacattgaatatcttttgctgatatttctccggcatgtttcactgtattgcgctttcattttgtactactattgtttaaccc

SEQ ID NO: 16499 - DNA, 133 bp, Glycine max
ggatctctaagcacgcggctgcaagcttttgaactatgcaacctttctctcctacagaacaaactgtctactagtgattggaccctttcctctcttcggagcataagctcgctgttactgctccacagaaccc

SEQ ID NO: 16500 - DNA, 397 bp, Glycine max
tctgtgcagaaaggacatcgcagatcctgcttttgcactctgtctcctatgcagatccatccttgttggtagtctatcttctattagcctccaagcaaaaactgaaattttgctaagaattataatcttccataattccttacaccagtcctgttgctgaccccctttagaagcttccaaaatcagattgtatgcactacgagtggaatatacccttgtttgatcacctaaccattcccattcatacgatccttgccgctgaatgtgtataccttctatgtgctctaaaaaaatgactgctgactcaatttcattttctaacagcgggcttattacagaaactaccactcccaacctgactgcatgtgctggcccatgtgtctgatggtatgggttt

SEQ ID NO: 16501 - DNA, 511 bp, Glycine max
  unsure (1)..(511): unsure at all n locations
agggactgacgnnnntttgaaacccattgaaaacccttgnattgacnacgttagcacgtacaccgngatccgctagagtgcacctgcaggcgtacaagcgtgtttccaacttatttggcactttgtggcccggggaggcaagggggacactaatagtttttttacacatgctcacaacgcgcataaaccgactattcactgatgcccatctgcaaaagaggtcacgtactaccacagagcccatatgctcagtactatcaacaccgggtacccatcaatgctctaaagcttttccaacactcaagtaaaagaacatttcaacaactcaaactatcatcagggaaaaaacagaacaaaggctgaacatgctgatataccgccgatcgacatcgcagatttttcacttaaaaaccccaagactattcctttgatccaaattgttcacacgcggatctagttcaaaagtttactggaaagtactacacataatcctgccatatgaccgttgggg

SEQ ID NO: 16502 - DNA, 394 bp, Glycine max
  unsure (1)..(394): unsure at all n locations
agcttgttacagtctgatgatatatctattctgacctctntgaatgcagggaattggaagtttttagatactacaaatggttctaccggatttccagacatcagaaaaataaatggaaattctgtaattgaattagttagtatgcccacaaagataactggtgtacattatgtgcaggtgagttgttgaactatatgactagtttcagaagaaagtcagctttcacatttgatacagtttcttatttgttctcttatattttaaaataacaccagcttctaatgaagtagcttctaagttctctaccttttggtatttaaatactatctacttacaaagggccctttaagttagtgaacttccagctctgtcctcttgatatgccgaagaatta

SEQ ID NO: 16503 - DNA, 392 bp, Glycine max
  unsure (1)..(392): unsure at all n locations
ttgcatgctanagcgccacttgacgcggtgcgccaaattcaaacgctgttgcctgttgtggccggctatatgaatatgctatgccgtcacgactcaaaaccaccgccaatttatgtacttgcttatccttcaatcactctataaccatgataacaaaaattaaaggttattgagctgtttaaagatattgattaagaaatttaaattacaaatatttaatttaaatatgttgcttatactttgaaaatatattatttttaaattattattttaaatttattcttgattatcttaaattttggttatatcttaacttagcagtttattgtcaacgtaataatctaattattaacattctgcactattctttaatatttaaattatttaaaaat

SEQ ID NO: 16504 - DNA, 427 bp, Glycine max
  unsure (1)..(427): unsure at all n locations
agctngtagggttaaagtctcacgattgttacgtgcttatgcaacaattgttagccgtggctatacgagacatcttgccaaacaaagtcaggttcacgataacttgcctgtgctttttcttccatgctatgtgtagcaaagtgattgatccagtaatgtttgatgagttggaaaacgagaccgcaattatactatgccagttggagatgtattttccccctgctttctttgacatcatgattcacttgattgtgcatctggtcagagaaatcaaatgtcgtggtcctgtttatctacggtggatgtacccggttgagcgatacatgaagatcttaaaagagtatacaaagaatctatatcatccgaaagcatctattgttgagaggtacattgcagaagaagccattgaattttgttcagaatactt

SEQ ID NO: 16505 - DNA, 414 bp, Glycine max
  unsure (1)..(414): unsure at all n locations
tgtaggattatggggtacccatcacatgtggtactatgtggcggtcgggcgatggtgcacaacaagttttccacatccacaaagcgcgcacaaacccaccatcccctgttgcccacctccaactgagctcacgtactcccacgtagcccatatcctcgtttctctcaacaccgggtccccatcaatcctcccaagcttccccaacatcaaagtaatacaacattcacacagcacaagctatcacagccaagcaaaacagggcaaaggcagaaaactctgctcaaaacaccaaccaaaatcacagctnttctcacttaaagaccctagtaacaattccttcgatccatntcgttaaccgttggatcgacgtccaaaatttactggaagtctatagtacataagcctacctttttg

SEQ ID NO: 16506 - DNA, 431 bp, Glycine max
agcttcttcctcgaaccaactcgccgacatcttcaccttttgcttgtctccagtagtttttcaaggtctctgcaacaagctgggaatgatgaatatacattcccagcttgcggggggctcttagcagcatcacaagagttagttagaatagttagttagttagctagtatggctaggtttctgttgtaaccaactatcaagcatattccatcttgtataaattctctgctatcattcaataaagcttcgagatgttattctgatcatatgatacattcacgttgctcatttctgctatatggctgaatttacttctaatatataattaaaattaatactcccattaattgattaaaataatcatcaattacagattgtcgagtttaggtaaagattattaaaaatatggcagttgttaccaaattatcaat

SEQ ID NO: 16507 - DNA, 249 bp, Glycine max
ctaagcttacattgaatatgcaacatggaagtctgggaacaatgtaatgcttatgatcaagtatgggaagtcgcgtagaagctgctatataggatgtaattcaactgtcctgccattatattccagcctctgactcctggtggaccactatgagccaataattcatcgcaaatgtgaaatatactaatattcttccggcgacaaggggaaatcccacggatacgtgtagtgctataccttccctcacac

SEQ ID NO: 16508 - DNA, 393 bp, Glycine max
tgcggctgcagcttacatttctctccagaaggatattttggccgataatgttgtcagtttatctattccaagcttccaaagattagaatcgcctgatatcatactgaggtgtgggcctagaagcagtgctcttcctttttctggattccatctacaataaaaagaacccatcagtttattagaccagaagttatcaaaatcgaaacagaaaataaaaattgaaattggcaacgtgcgcttagcgagacactgcttgcttagctcaccttagtaaaaacaacacactggcttagtgcgacagggttatgcttagctagtcatgagaaataaattctctctgcataattggcttagcgagataggcactcgcttatcccagagcacttttacttc

SEQ ID NO: 16509 - DNA, 428 bp, Glycine max
ccttggggaagcattaggcctgcatcatctccatgtgttatgatgatgccaccaacaaaacgtgtactaattgcccatgatgtctgccaaacatattcccttaacccattatcgtctgtgaactgcacaagcacacattttgagcaactgcatcctcatcaaaaggattatattaatatttaaaaatatatatatataaaaaaaacagtacatcagacctgtgttccaaaggcacgggcaaagttttgcccaaggttatgactggttcctgcttgtaatgctttcttgtcacccatcatagcctcaattgtataggtcttacaagcaccagcaaatgtttccactttagatattcgacctgtaacaacaggtattgcagcttgctcataagcaaatctggtatagatgtcaatcatctgtatagcctg

SEQ ID NO: 16510 - DNA, 409 bp, Glycine max
agcttgtagtgaggtttggctacaaaaattcattggtttttctaggattcaaaggattagattctaagagagcacaactcctaaacttatccaagtggtcattttaatacaattagcttgctcactagcttttcacttccatttgcttttgaccttattacatcagcacacattttctttgattgtttttttaacacaatttatttatcgtgtgtgtgcttatgcttttacctctttctttacatcccaattaactccactcccccaaatttggggtaaatttgccttgaaccatatgctctcctaaattctaaacaaggtatctggagataatcatttaggttcagggtttaattattgacaaatcattcaactcataaagagtgcaaagggtacagttatcattaaa

SEQ ID NO: 16511 - DNA, 354 bp, Glycine max
  unsure (1)..(354): unsure at all n locations
tgtagaatggctagacatgatacatgtcagggtttggtttggttcattgataaaagggatgccccacattatttccatgacacaaatgcaaagatgatgatttggaaattttatgcaaaactggtcatgcatgcacctatgtggacgctcaagtgtcaaatttttatggtcatgtgatgctagggctcacgattcatntcctctattttaaatcaacccaatgtttccaaaatatgctctnttatcaatatatgcatttatcctagttcatttcgtgcgtccggggaaattttcacagcattcacccttcaggtgtagacacgttttttcttcaaaaatcgggtatgatctatg

SEQ ID NO: 16512 - DNA, 307 bp, Glycine max
  unsure (1)..(307): unsure at all n locations
agcttganatcaatcggggttgagaagaatgaagcaagtccaatctcacattgaccgtcagtagttgaatntgtgactttaattccaagcgtccaacatccaatattacctaagcaatcaatcaagtgtccaaaacaaaatctatttcatcactattcttatttcacattggcactgttgtgttgtttatacttgtatcctgataaaaatttgtttcaagttaaaaatatagggagttatatactatatggtatatgccaagattaaaaaaaaagtttgaagttaaaaaatacatataattgtggct

SEQ ID NO: 16513 - DNA, 423 bp, Glycine max
agcttcccacaacacaggtttcatgaatttattgactatctttatcatctaagattgtcatctgtgttatctgtctcagactacttatccctaggtttcactcaatcagaatcaaatcatttcatatacaattgttactttccaatcctcaagcattcctgagtgaagttgaagaactctattctcaaaacatattgagccacccctccaaccttgagttggaaaggcagacacttcaacatcacaatgagcaaggatgtaaaacacacgacaagatacctatgacgacagattatgccttagctttcatggcaagtcgttgtaaatataatcatccataaatatataatcatatggcaaaataggtagactgaaactgaagccatatattagagaagatttaagcacctaatgacaaaactt

SEQ ID NO: 16514 - DNA, 357 bp, Glycine max
  unsure (1)..(357): unsure at all n locations
tgtagccaagtngatcttttaactcctgttatacttctgttcgagtatatgatccttgtttagagacaactgcacaacaagcggaacaataacaaatgattaagaaacaggccactgttacaaaatttcataattatatgaaaaatatgaagaaaaaaaactcattgtgtatagaatatgttatatcctatgccaccatggatcanatagaaaaggaagataactaagcaacgggtaaaatcttgcagaatgacaggaaaaatactgtgaagataaaacaaaaccaaaatcaccgggaatgttattatgtgggtcacacctacctttagcagaattagcccactatggtgaggtgaa

SEQ ID NO: 16515 - DNA, 372 bp, Glycine max
agcttctagatgagttatgtctgcgaatctgacatcctgtgaaaagttatgaccatgtgaatttctcgagcgcttccgttgtttaatttcaagcgtctcgatattttatgtcctcaaatcagacatcggagcgaaatgatatgaccattcgaatttgtcgagagcttccgtttttcaatttcgagcgtctagatgagttatgtcaccgaatcagacatctgagtgaaatgttatgaccattcgaatttgtcgagagcttccgatgctcaatttcgagcgtttagatgagtaaggtcaccgaatcggacatcctgtgaaaaagatatgaccattctgttttgtcgagagcttccgttgtcaatttcgagcgtc

SEQ ID NO: 16516 - DNA, 383 bp, Glycine max
  unsure (1)..(383): unsure at all n locations
tgtntaccccatgttgagattgcttacaatagagctgtttatagcaccactaattgttctccttttgaagttgtttatggttntaacccactaactcctcttgatcttttgcctatgcctaatgtttctgtttttaagcataaagaatgtcaagcaaaggcggactatgtgaagaagcttcatgagagagtcaaagatcaaattgagaggaaaaataaaagctatgctaaacaagccaacaaagggagaaagaaggttgtcttctaacccggagattgtgtttgggtgcacatgaganaagaaagggtttcggaacaaaggaaatcanagctcaacccaggggagatggaccatttaagtgcttgaaagaataatgacaatgc

SEQ ID NO: 16517 - DNA, 369 bp, Glycine max
agcttgtgcaaatcaagtctttcccgcattttatctctagcatgcattgtatgttggtctcgtcctttgtcatgggaagcgtgaaacttcacactacattcttagtttcatgtgttaggcaccacgagccaaccatgttgggatcataaacccgtttcacttaaaaacaaaataattgaacatggtacctaatgcatggttaactaggaaatggtgtttcttcgggcatctcaatttcataattacattttccatgcataagcttaaagtatgcccgagtcattcatccctatgagatgttgttgaagtattggcgatcagaattgccattccttggattatagggttgaaccaagctcatgcttttac

SEQ ID NO: 16518 - DNA, 432 bp, Glycine max
taactaatcaaatgggacaatgggctacgtatttaaattaacaacagtcccagaattgtgaccgattaccttctcaatctgtccaaaatcccaaaaatgtgagtgtgattgcattgaggtcgggaaagcagtgtcaaagacctcaaccagtagcatcttgctcatccgcaaatgaacctgcccaacttcactctactccagaaaaagatgatgacaaaaatttaacgagtaagttacctaacaatttatatgcaggtgaatctttcactggtaattctgatttacagaagcagcatatccctctttcattccctccaagagcaattttcaacaaaaaaatggaagaggcagagaaggagatcttggaaacatttagaaaagtagagggtaacatacctctgctggatgcaataaagcatattccagatatgc

SEQ ID NO: 16519 - DNA, 280 bp, Glycine max
agctttgagcaaattcaattgacaataatttttgactcggatgtccgattgagtcctgtaatatatcgagacactcgtaattggaaacagaagctctgagcaaattccaacgacaataacttcttactcggatgtccgattgaatcccgtaatatatcgagacgctattaatggaagatagcagctctgagcaaattcaaacggcgataacttttaactcgggtgtccgattgagtcccgtaatatatggatacgctcgtaattgaagacagaagctctg

SEQ ID NO: 16520 - DNA, 358 bp, Glycine max
  unsure (1)..(358): unsure at all n locations
tgtacgactgtgtctcgtgtatatctagacgctggaaatagattacagagggtttgatcaaattcacaagacaatcgctattgactcggaggtccgattgagacccgtcatatatctagacgctcgttatagataacagaggctctgatcagactcaaacgacaataactnttgactcgggtgtccgattgagtcccgtaatatatcgagacgctcgtaattgaaaacagaggcactgagccaattctaacgacaataactttttactcggaggtccgattgagagctgtaatatatagagacgctcgtcattgaatacagaagctctcagtcaattctaacgacaataactttttac

SEQ ID NO: 16521 - DNA, 321 bp, Glycine max
  unsure (1)..(321): unsure at all n locations
agctggcctcaattcactttatacagtaactccatccaaaatagtacgtttctatggaatttaagtccatgatccaaacaagagaacaagtttcattgttttaagactgtagacctatagcaataatcattttatctgcctgatctcagctttaataaaataggggaaataccataattcgggtccttgactaanaattctaaaacaacatgatataaatttccagaactgaaatgatctgcaatggcaaatttttattcccatggatcaaantcagtgcgagtaagacaaaaaannaggaacgagaaaccaatccaaata

SEQ ID NO: 16522 - DNA, 463 bp, Glycine max
  unsure (1)..(463): unsure at all n locations
tctagcgtacccgctattggtgctcagaatatcccaaattcaaatccctcttattactagctattttgaattctttagttcctgaatgtacaaccttcaaattgttactcgttcccgtatttgttttctgcaaaaaagaaaattaatctgaaacaattcaggctgaattgttatcgttattattactcgaaccataaggaataacagctaaacaagtaatttaaaatgtaacttttaaattatgtggtatttttttaattacaattttacttcaatatctaattttgttaatctacttaggtcgttttttaaatataaatatgaatttaaaggtgatctactgataatataaagtacttgctaatcacaaattatgatacctatcattttcaattntaacttanatttattaatatttaataattattataagacaattttttacatgtgctgcagtgattcc

SEQ ID NO: 16523 - DNA, 403 bp, Glycine max
  unsure (1)..(403): unsure at all n locations
agcttataattgttttattgaattaaaattgaaaaaaaatgaanaattatcattcgataataggtcaagtatcttgtttgcttactattttattaataaatctaacgttgaattttaatgcttcactggtggtgcactttttgcatacttcaccgtagacagtaccaaagtagacatagaatcctaagagcaggcaaatttactgtacagggcttgttttataaacaatttaccaaacagggttccttttaaaacatattacagacagggtctgttatggacgtggatgccgccattgctatcggcgggagagcttgtaccgccactggcaatggcgggaacaaggatgccgccattggcaacagctggactcaacctataccgccagtacgaatggcgggac

SEQ ID NO: 16524 - DNA, 379 bp, Glycine max
  unsure (1)..(379): unsure at all n locations
ttatgggcatatagaaattctcctaaatatgtcaccggtttaacactntntaaatcattatatggtcgtgagccagtgtcaccagtagaggtaatttacaatctgtttgactacaaaagcaaagtgagttgtcgaatcatgattattggaatatgatgctcaacgacttaattaatttagatgaagaacatttgattgctttggaaaatatgatcagacaaaaagaaataataacccgattttataaacgaaaaggtgaaattgaaaacctttcatcaacggaatttggtttggcatatagatcagaaatacaaaaaaaagtttgggccaatggtcacctaatttggatggtccattcaaatcaaaaagatttttgata

SEQ ID NO: 16525 - DNA, 107 bp, Glycine max
tgaccgcactggtgtctggactatttgttttgcgtttcgagtgggaaaatgtcccttatacaagatctcgagtttaggaaccgggtcaagcgacaacctatatcgag

SEQ ID NO: 16526 - DNA, 432 bp, Glycine max
  unsure (1)..(432): unsure at all n locations
agcttacttgcttccctgttcctttctcactcagttttcacgcaaataggtaagatttggaatctggacttttgatgtaatgatttgcaggtagcatcacgctaagccctacacagaggcttagcgagaacaggcagcagggacaaaaaggaagaagagcgcgctaagcctgcgccagacaatacacaaaaacgcagcacacgcttagccggcacctcgcgctaagcgcgctcatgcatctcagcgaaccgctaaacgcgcgcccgtggcactaagcgtgtgccagcagcaccaggaggaaggcgctaagcgcggngctgggcctttgggcccgttagccctcgcgctntactttntgcacccatttttcactaactacanctcccttctaaattctttttgcacccctatcttcactaactgcacccctat

SEQ ID NO: 16527 - DNA, 369 bp, Glycine max
  unsure (1)..(369): unsure at all n locations
tgtgcaaatcaaatcactcctacatttcatctctagcatgcatnttctttctntacccactcctcacgtntggttttttagggaaaaacaccataactaaacgcgccgcaaggtatccctatcgcaccagatccaaatctagaacgatgggtgatcaagaggagacgcaggaacagatgaaagccgacatgtcagctctgaaacaacaaatggcctccatgatggaggccatgttaagtatgaagcagctcatagagaataacgtggccaccgccgccgctgtcagttcggctgccgaagtagacccgactttttggcaactacgcaccatcctccctcaacatagtatgactgcgaatggacacactg

SEQ ID NO: 16528 - DNA, 423 bp, Glycine max
  unsure (1)..(423): unsure at all n locations
agctcgccctaacctgtggaatgagctatataaatagttaaaacaactccctctagttcagttgtaaagaaagaaagatacccacatataaaacatatcctcctaagaaagcaccagagtaataatgaaataacctaccatagcgaagggaaccatgaaatgattttaccagccttgggtgcatgaatattgatgttaaaagctttgatgacctgaaactcactcaaagaggatctcatacagcttgaagtaagataaccggcccacaagcaaaatatgagcaaacataaggatcattgcttgctgctatgagacaaaaagattatganagcaggcttgattgtggcaacttaagattgcccaaaccacaaagataaaactagcaagaacaacatctttagcttgcaggtgaacaactaattt

SEQ ID NO: 16529 - DNA, 307 bp, Glycine max
gacactactagaaactcacgcttatgaatgatatgagtcgaactcaactgctatatgcattttctatttataataatcatccatactctatttattcatggatttcataaaaaaacatctaatgtgaatatgattaattaacacacatcacttaataaagcatataaatttataccttaatcatatcttcgtatctaatttaataatataataatgaatgaggagtccctcccgaaaaacatccatttgagaaatgaaccactcctctcacattaaaagtttaccaacacatgtatggcgcgtgtac

SEQ ID NO: 16530 - DNA, 364 bp, Glycine max
  unsure (1)..(364): unsure at all n locations
agctnggacccgaaaatttaaagaatttatactcattaagaagactcagctcagccacaacgttgcaagattcagatttgcccttcctactccttcttcagtattaggccttcctgttggaaaaaacatacttgctaggtttaatttggaaaagattttcctgatgttgctctaatactatatttaacttatcccgttgaataaaacaccataaactttaaatacaagaattataataataaagaaaaagagatgtaaaactattttatattaactgttaagcagggggaaagatagccaaggagaggaagttatgagatcatatactccaatcacgttggattcagatattggctacttcgag

SEQ ID NO: 16531 - DNA, 444 bp, Glycine max
  unsure (1)..(444): unsure at all n locations
tatcatcacttattagccttattagagatatttgattgttggaccatatgaaacaatgttttttgtgtatttaattttccaacaaattttctaactgagtcaagatggtattttatattccaaatttcaagtaaaataaaaatatttgagcttccaaggatatatgatggctcatggctgccacaaatatttcatgcttaacatctttatacatgaaaatattggtagcacataatggcttgagatctgttaggaacaaccaccgtgagctcatagcagttgtttatctttaagtaaacattgtacttcatgctcttaccttngctacacagtcaaggagtggactgagcttgaacaccctaacctttttcttcttgttgcttttattatggcacaactggtagttgtaatgaagtaaagttctctttctaatattggtactct

SEQ ID NO: 16532 - DNA, 381 bp, Glycine max
agcttatcctctagggatccctacatatgttcattttaatctccaagcgtgagtaactcatcccttacctctaagtgacctcgcgtgtgcagtttggcagtgatagcaacgtctctagctaagattcctcaagtttttcctctggttgttctgcttggttttccaagcattagagtgaacgagaatgaattacaacttcaatttcactgtctccttgcgaggggaatttctctttctactaatattatttcgaaaattccaattgagtgaatatgcgaaaatgagttccgaaggtggtatccaaatttcaggataatccaacggttaaggagtctaggatcgtagttttactacaatgggtttggatgtatatgtgaaaag

SEQ ID NO: 16533 - DNA, 285 bp, Glycine max
acatcacgcaggttcatctcagagctcttatgcacacaataaaattcaaaagttggagaatctgcttggaaacctcgtattctgagcttcaagtacgaatcgcagaagatccacacattaatcaagtcttataacctatagatcaagatgtatgaatttataattctacttattcgacgatttaactatgatctgatactttacaaaaaaaaaacattcttttaatttagggacctacaaatggttctactcgtgaagatcatcgaactacgaacaatcttaact

SEQ ID NO: 16534 - DNA, 401 bp, Glycine max
  unsure (1)..(401): unsure at all n locations
agctnttcaaggaagctacttattctatttatagaaacatgtgtaacacttgtggcaactttgatgaatgagagtcttgtgagacacaactcaaagttaaagttctccctttttcttccttcaatttcgtgctcccccctctctctttctctccctctttcttttccctccattgaagcatcctctccaagcttcttattcaaggctcatcttggtggtgaagctcattcttccatggcttattccctagtggatggcgcctcctctcacctcttctcctttgtcttccgctgcatctccatggtggaaaatcaccattaaaggacctcattgaagctcaaagatccagcctccatagaagccccacaagcaagcttccatcaataatcttaccttttctc

SEQ ID NO: 16535 - DNA, 296 bp, Glycine max
tttgacagtaaaagaagtgagggaagtgattatccttgttcctatgatctacctcggctctaccttctctgcttacggtatactagtggccacagggaacgttttctttcttacacaagcaagcggcagcatggaatcaaatatcactaccaatggtaatgatatcggtattctttctttgatcaaggagggcgtgaaacttatctcaccattcatcttctttattatcagtttcccatttcgatgctttttgagaaatatcacagctaacgatggtaggaaagccaaacgaaatg

SEQ ID NO: 16536 - DNA, 418 bp, Glycine max
agcttgcatgatttacatctccctctttctcaagcaaattcttcttgatatcatcaaaatcttcatgatttacattctccccttttttgatgatgacaaccacctataggttaggagcaacaacaaagaaaatatctatttgcatatagtttactcccccttggttttacattgattgcttatatgagacaattgaagatttcatatttttcatatataaaaagttatctcataaaacaatagatattttgcaataaactctcttcaagagaagaatattacaataaagatcatgtaggaatccttatagattttgcaagtgtttggccaaggatttcttttgagagagcatttgacaatgaagttcttttggaatctctctcattgtcttttgagaggataagacacttttgtcaag

SEQ ID NO: 16537 - DNA, 251 bp, Glycine max
  unsure (1)..(251): unsure at all n locations
aggttcgaggtacttactcgttgcagattgatgaacgatgatgaacgtttgaagaacgtcggagaacggtcagaacctttgcgagagtcctcacggaaaacgttacggaaacgtttctgaagcgcctcggcttagattttcttcacggatacaatgcttccaagcaaattctaaagagagagaagtgcctaatgggctaaaccctgatcttcttcacttcctgccctatntatagcaaaatatgggagatg

SEQ ID NO: 16538 - DNA, 303 bp, Glycine max
  unsure (1)..(303): unsure at all n locations
agctagcctcanagagatctatgaaggataaagcggctgaaggaaccagttccgctcccgaatatgacagccaccgttntaagagtgctgagcaccaacagcgcttctaggccatcaagggatggtcatttccccgggagcgacgtgtccagctcagggacgacgagtataccgacttccacgaggagatagttcaccggcggtgggcatcactggttacccccatggccaagttcgacccagacatagtccttanattttatgctaatgcttggcctacagaggagggcgtgcgagatatgc

SEQ ID NO: 16539 - DNA, 446 bp, Glycine max
  unsure (1)..(446): unsure at all n locations
tgcgagattcctcacggaaaacgttactgttacgtttcggaagcgcctcggcttagattttcttcacggaaacaaattttccaagcaaattccaaagagggagaagtgcctaaagggctgggatccttttcttcttcattttctcccctatttatagcaaaataggggagatgcttgccgcccagctcgcccaggcgagctcagctcgcccaggcgagcagggttgcttcctccagaagcaaccgccttctggaggaatcttctggagggcccaagtgggcctgggtgctatttgcacccccatttntactaaatacaccccctctgctgtttttttttggtgattctttcttcgtaaagttacggaaacttacgaatttcgtaacgatacttgtttttttccgtatgttacngaccttgcggatacataatcatccctttttgac

SEQ ID NO: 16540 - DNA, 392 bp, Glycine max
ttttttccccctcattataagactaggccggtattgattcttaatgggccattcaaaccatattgacacacctcgggagttctctggaattcttccacaatgtttggattccaagccaatttatctggcaggacgaggcgaatttctattataagctccccttgtctatatacaaacccaacattgatcttctccccctgtccttacttaacttcttcgaaatatttttctaaacttctaaacctggggcacctgacgatagatttcttgccatacgaaccttccgggcaagtaactccaatggttagttccatatattgctactacggaacagaccatcaggttgttggttccctttgcaaccttttaaatgtcttaaaatattaccctat

SEQ ID NO: 16541 - DNA, 323 bp, Glycine max
tcagttgcccattggcgtaaatgaggatgttaccgtcttttatgactctgtggagaggcaggcagaggatgtaggaaagctcgttgagcgcgtctttgagaaccacagagatgtcaggctccataaaaccgttggggtgggagtgacaaacgatggatatatgtgatctcttggccatgaatcacatgcctccccacaggcaacgatacagtgtgaaggaacaatgtgctctgaggatgttggggtaggaaccgagggatggggatatgacctctctacggacatagtctaattcaggcccagagccgttcactttgatggat

SEQ ID NO: 16542 - DNA, 334 bp, Glycine max
  unsure (1)..(334): unsure at all n locations
agcttgtaaaagtcttgcattttagtctcactgatttggtgaagaacttaaaacataattgttgtatgcactacattataggagttatgtttaatgttcctttaatttaattttcccattagaaaagaacatattctgaccgtaatttcttttctagagatgttagctacaacaaattaactggaccaattccaagcatttttggtgatcttccgcacttgaatatgctgtaagaaattttccataatttttctatatttntacaccaaaataatctcatacatttctgagtagctaggaagtgctattctatttcattaaacttttcttcagt

SEQ ID NO: 16543 - DNA, 453 bp, Glycine max
  unsure (1)..(453): unsure at all n locations
ntgttcaaccgaaagcttctttcanagacatgacaatggtgaataatgcaaaaacaccaatacgactaaagagggatctaattcgtgagaacttggcaaggataaactttcagaatggcaacccatcgaagccaatgtttcatactgatgattcagtttttgaaggccaatgcattccttggcaggatgccctggttgtgaaacttttangcaagactattggctacaatattttgaaggcaaactcacgaggctatggaaattcaaggtgggttttgatatgatggacatcangaatgactctnttatgttaaagtttgatctgggagaagatagagatctagttatggatgaaggacctctgatggtttttgatcattacttaacaatgcaactntggtctccggagnttgcattttctacgacaacaattgacaagaaaatggtgtggat

SEQ ID NO: 16544 - DNA, 321 bp, Glycine max
agcttccatcaatggctcatgagcggacatggatgccttgtgtcttgttggaacaagtgcgaaaccaaccaaacacagagggcgggcaagcaacagatgatccgtgcgctactcttttcgtaccttcggtcaaatgtgtcaaatagatctgccaagacagctaccaccggactttccttgctatggtggtatgcaaggaaagcgtcgattgctgctatgtccaccaaaccatccacgtttggaaagaggacgagccccaaaattagcaaagctaacacatccataaacgagacctaatctccttgattggccatacccctc

SEQ ID NO: 16545 - DNA, 400 bp, Glycine max
  unsure (1)..(400): unsure at all n locations
ntgcggatntggtcttcgccgatgaaaggatcgaagttggtctgaaaagatgcaaatttaatcatcttgcttggacgaatgagaaaactgaggcaaatgaagagggtgagaatgaaggagaaacccatgttgtaactatcgttcctacatggaaaatcccgcaccagctcaacaacatcattacttagccaatatcagcccttctcattacccaccacctagtcatccacaaaggccatccctaaatcaaccacaaaacccacctaccacacaaccaatgctaaacaccacctttagcacggaccagaacaccaaccaaggaagggaatttgcagcaaaaagcctatagaattcacccgaattctgggtcctatgcaacttgctccatatctactgatat

SEQ ID NO: 16546 - DNA, 157 bp, Glycine max
atccttaagcactgaggctgcacttttgatcccgttttctttcttaccggcaccgccgattttacataccggttatcgccacctccactacgggcgctttaaccttctccaacttttttgcatgcccaacccttagttcacccacactgggacctta

SEQ ID NO: 16547 - DNA, 348 bp, Glycine max
  unsure (1)..(348): unsure at all n locations
nttcaaaacaaacaacaatttatatatacattntaacttttttatagcacaacaatatacttaaacaaaaaaatatttacagttatgttttgtaagaagtaccacccttgtttaaaaattacttgttttaggaaagttacttttgtttattattttgggtaactagcattgctgtttaagtctataaaaatggtgatgaggaggttgcaatgttgcttctgatgcagttagcctacttatggagttattattacctaatttatttattttctggttttgatctattcttttgaaaaaatgtntacgaacatacttatgttatgaaattagacttctcttcatcttact

SEQ ID NO: 16548 - DNA, 370 bp, Glycine max
gatgaaaaaaagctcaaggtcaattcatgataatcaaagaatgagttcaagaatgttcaaaagatgtttaagatgatcaacatgatcaagattgaataaaaaacacttcaagaatcaagaatcaagattcaaggttcaagcttccaagaatcaatatcaagattcaagactcaatattcaagaatcaagagaagacttaaatgagataagtatgaaaaggttttttcaaaaacttagtagcacatggatgttttctcaaaaaatgtttaccaaagagtttttactctctggtaatcgattactagaatattgtgatcgattaccagtagcataaaatgattttgaaaaagttctcaatgaatttcaacgt

SEQ ID NO: 16549 - DNA, 399 bp, Glycine max
  unsure (1)..(399): unsure at all n locations
tctggaagaagcctcttaatgaagctcttggaggaagtctcttaatgaaggttctagagaaaactacatgaagctacctcggtaaaaacgctgcccagccttagttaaccgttggatcttctcaaaatttggtttgcaacttcacaggacaaattgacataatctgaccgttgggatcgttgagaatatgtttagagtgtgctagaagcttccgttctcgagagcatctcttatttaagcatttcagcctntgctttcgtgtagcttaggaaaaacgtcatttcttcttctttctttcttccaaagccatttataaagttccaagaactttatgcatcacccacaaccaccattatccaccacaaatcatcattgttcttcattgaaacccacaccgag

SEQ ID NO: 16550 - DNA, 362 bp, Glycine max
tatgtctactattattgagatcatctctctctccgtcattgtaggagccacttgagcttccaggtttcttcatctttgggcgtattcattgaaagattccagcccctttttgcacatgttctgtaggtgcatcctatctagagccatgtcataattgtactgatactgaccaacgaacgcaaccattatgtccttccatgaatggattcgagaaggttacaagttagtgtaccaagtaacagctaccccagttagactttcttggaagaaatgtatcagcagttcctcatcttttgcgtatgcccccatcttccgacaatacatctttagatggatcttacgtcaagtagtccccttgtact

SEQ ID NO: 16551 - DNA, 216 bp, Glycine max
aggaccttaaattatcttaaggtgtggttatggagtctcctgagagcgaggacgcgtagtcctctaaatgctagggcgtgtaaccctctgaagttcaggacgcgtcaccttttgaatgcgatggagtgtactcctatgatggcaacgacgttctatcctctctaagtgacggcatgtccctctttgaaaatggggaacatgtaatcccctgatggc

SEQ ID NO: 16552 - DNA, 484 bp, Glycine max
  unsure (1)..(484): unsure at all n locations
tgtatataaacttttaacacncctatatttatagcatacaagagtctttagatataatatctgaatatctctcataaacttattatagtgatgaacacaactcttattccatagatgagtcactatcncgcactgaaaagagacaccactgactattcttactttatttcattccgattcgtgagaatgctacctacaggcattgcgttctattcacagtgagtatacacacgccacaaagtaactctcaagcttcgttgcgtctcgagcactcctccacttataatcataagacggtcatccttacggacaagnttntgcagaactgaccgaatatcttccctatagccctcctccttccgctttcgaattgcggtgttaccgttctcctctctcccgaaaatctatattattccgcgataccaccataccttatttagcacaactcacatctcgacctcctcacccctgaactgctagaaac

SEQ ID NO: 16553 - DNA, 310 bp, Glycine max
  unsure (1)..(310): unsure at all n locations
taaactcagcttgaaagttatgttttcaccttctcgctaagccaatttgttggcttancgagcttccgctaagcgcaacactcatgggctaagcgcaaggaagactctcgaagaatatgagtttgccacgtgtgctaagcacaccgccttatgtcactaagtgcaatacttcagttcatctgctaaacgagaaggcacgcgctaagccgaaattgactaatgtgcgctaagcagtccatatgtgcacttagtgcatgagcacgaacaaggccacctatttaagcgtgaaatctgaatcttgagagtgagt

SEQ ID NO: 16554 - DNA, 414 bp, Glycine max
  unsure (1)..(414): unsure at all n locations
agcttccttaagaagattcctaaagaagctagagcttatctacacatacctctctaatagctaagctcacctccttgagatgagaagctagaacttagctacacaccccctataatagctaagctcacccccatgacaaaaaatatgaaaatacaaaaaaaaaagtccttcctacaaagactactcaaaatgccccaaaatacagggctaaaaccctatactactagaatggccaaaatacaaggcccaaacgaaggaaaaccctattctaatatttacaaagataagcgggcttatacttagcccgtgggctcgaaatctacccaatgcccttgcgggataggattgcataagataatacagccaaattcgcccgtttctcatttatggatggnttctcggggataatcaata

SEQ ID NO: 16555 - DNA, 366 bp, Glycine max
  unsure (1)..(366): unsure at all n locations
ctcagcttgttcttttataaaatgagaagttctgaactcatcacgttatctaaaacaaaccttggggtggatccaagtgcttcaatcattcatttgcatattcatgttttggtggcatactcacctttgtttatttctttaggattttcatcataactaagaaaacaccaaggcacccctataacactcgatccagaaaaatggataatgaagagggcgtgcaggaacagatgaaggccgatctatcggccttaaaagatcaaatggctntcatctcggaggtcatgttaaaactccagaaaactatagaggataaagccacggcaaccgcctccagtacagttagggcagcggagccggtgctgc

SEQ ID NO: 16556 - DNA, 410 bp, Glycine max
  unsure (1)..(410): unsure at all n locations
agctgccgagtttaagctcagncgtattttgggcttttatcccattgcgatcagtacttgctgtctatatatttattctttaactagactttctagccgtgaaagccgaacactatatagtacagcataaggaaaacgatgtgaaatttattattatacttttttactattgttaaaaaattttaattatgagatctttttttagaaaattattttttataagatcattttttaatttctaaatatattaatgataattntttcttatatatctttacttaattattgcttcttcaaatattaatgaaaaataattaaatgaataaaaagttaaaagaaataatttaaatatgagtaaatatattaattaattgttttaagacacatgaattaattaaaagagtcttata

SEQ ID NO: 16557 - DNA, 383 bp, Glycine max
acactctgagaactcaagcattgactggcgtcatcaaaagatgataaatatgtgaccatggcatgtgtgtcaatcatcaatcatctttgaatcatctatctggctatctttcttcaacatcatctctcgaacatctttcaatcaggctttccatatctgtctacggaatattctgatgaatatctcttgatctgtctagacagttctgatcagcagtctctcttgcggaaaagttcgctggacaaaacttgcgatattcatattgctcactctctacgctctttgacatcagagcgagggactaaccgactgacatcatgagtgactctcttctgccttacaaaagattcagaggactaaccgcctcagaattcgtttgatgc

SEQ ID NO: 16558 - DNA, 414 bp, Glycine max
  unsure (1)..(414): unsure at all n locations
agcttagctaataggctaactntttttgctacttgagttgagtctagtcttacatgagggaactcagtttaagttagtctaaacctaagagggctgtctaaatcgggcctagtcttacatgagggatctgcggacaaagcttggatattcagcctgacgagggatcgaaggtttagtaatttaggctacagcatagaacacaagagcacgatcgattagagaaatatatttctatgcatcagcttgtttgttagaaagacccaacatatctacctactgctgtcattttatttaccttacattttatagtttttagcatacaagtttagtttaaattatgtttgaaattatcacttatacatgttatctcaatgatgcttcaattctgaacttaatttagactaacattagttc

SEQ ID NO: 16559 - DNA, 292 bp, Glycine max
tcgaggtacttacccgttgaagatttttaacgatgatgaacgaatgaagaacgtcgaagaacgggtcatacctttgcgagattcctcacggaaaacgttacggaaacgtttcggaagcgcctcggcttagattttcttcacggaaacaatttttccaagcaaattcgaaagagagagaagtgcctaaggtgctggaccccttccttcttcatttcctcccctatttatagcaaaataggggaggtgggtgcccgccagctcgcccaggcgagctcagctcgcccaggcgagc

SEQ ID NO: 16560 - DNA, 347 bp, Glycine max
agctttatggtcaaacttgtgatatcgctatactaaaagtattcgtatgcttatgttgcatgtctactttcaccgctaactgagagaaacttgacccaagagctcacccttgtgtctttctcaggtgttcacctactactaaaggctacataagctatgatccccatactacagacattacgattacacataaggtgtacttgtatgagaatcatgtaccacagctacaatgatcatcatctacatgaaatattcctaccattgcacccatttattttggccttaattctccttcccatgacttgatttatatcacactcgagcctctacgacacactagtgattct

SEQ ID NO: 16561 - DNA, 343 bp, Glycine max
  unsure (1)..(343): unsure at all n locations
ntgacaagacagtacacactgctgactgcttcaacatgtatcaatatggaaatctactctaaagatacatctgataagacccataattataacactccccctcaagctggagcatatnaattatatgcaccaagcttggaacatataaactgaattctaggcccccttaaggacttangcaaaatatatgctggctgagcatcggaattcatgaattcagagacagtctctttatacagtaacttcttccgaataaagtgacagccaatctctatgtgcttggttctctcatggaagaccggatntgaagcaatatgcagagcagccagattatcacaataca

SEQ ID NO: 16562 - DNA, 340 bp, Glycine max
agcttattatccaaggctcttcttggttgtgaagctccttcttccatggcttattccttaatggatggcgcctactctcacctattctcctttgtcttccgctgcatctccatggtggaaaatcaccattaaaggacctcattgaagctcaaagatccaccctccatagaagctccacaagcgagcttccatcaagtggtatcaaagcacactagcttcaagtacgtgctctttagacctccattaatgatatgctttaccttctcttccattgataattcttcattattctacatgcatctcctcacatgtctcgatctacatgtcggtacatgattct

SEQ ID NO: 16563 - DNA, 376 bp, Glycine max
tattcttgtggtatttccctccttcttcttattgtgcactagcgtccatagcacatgcacaaatgaaaaatatactttgttgcattgtgcttgagtgtatattgttctactgcatgttctggttatttccactattgattgcacattatatatgttcttgagaatcaattaactcttatcacgttaccaatgtaatcaagttgaccattttctatactatagcactgcaccaccgtactccttctggttgatagtcatcatcttctgaggtatgtatttatttgtgacactcctgtgcttattacatgcttgttgatacatgagtacttgtttatattaggagttacgtccattgtgagcgaaccttatttcctgt

SEQ ID NO: 16564 - DNA, 298 bp, Glycine max
agcttctcagatctggtcatggaaagacttgtcaactgccttcattaggaagtaccaatacaacacggatatggctcctgatcggaaccaacttcagagcatgaccaaacgggaacatgagtccattaaagaatatgctcaaaggtggagagacctagctgtccaagtcatcccacctatgacggacagggaaatgatcacaattatgataaatacgttgcctacgttctactacgagaagctgataggatatatgccggctaactttgcaaacctcgtctttgccggagaaagaatc

SEQ ID NO: 16565 - DNA, 364 bp, Glycine max
gaagacttgcaactactctatggatcatagctggtgaggaaagacagttgcaactgagtgagtcttatgatatccgcctacaagcctactggaatgccaagttctacgaagaaaagaccgagatgttacatgactgcatgatagttaaaagagacttcttggctgggcggacagtgttattgtataattctaggcttggactcatgagtggtaagttgaggtctaagtggattgagacttatgttgttacttatgttggtgcttatggtacagccgagatcataagcgagtccacaaacaagagcttgcatgtcaacggacatcgacttaagccattcctcacgaacccttctttattggacgt

SEQ ID NO: 16566 - DNA, 256 bp, Glycine max
agcttgagcaacattatttcttatagagaatacttatagtgtataccaaaataattgccacaaattgttttttttttatgatttcaaggtggtgtaaacttaatccgaaactcattacaaaagtttacaaatcaaaacttaattatattttttaatttaaagacttaattaaaaaatctcaaataatttaaagaggtaccaattagtttaacaaaaaccaatagtaacaagtgaggatccttaaactttttttttt

SEQ ID NO: 16567 - DNA, 391 bp, Glycine max
  unsure (1)..(391): unsure at all n locations
ntcattgatgggacataagggaatccctttcacttgctgtccttgcggctggcccatgcttttacccctcctttctagggcacttctcctcaggtcggcgcgtgtaggcttatatcctagcccgaaccttccgtggttctccttgaactccaccaagctcgccacgccatcgttgttccaacccaaacccattccgggctcgtacccatgccccaacattatacgggctaccatcaatgcagcaccggatgagcagggttgcactgcgggagactcgacataagcgtttctcaccacctccaatgcttgaaaagccgtttccaaggactcctccatggcttccacatatggtgtagaagaaggacaacttaatagaatgtttcctcccctg

SEQ ID NO: 16568 - DNA, 387 bp, Glycine max
  unsure (1)..(387): unsure at all n locations
ttatgcaaccaaataattcacaatattagcaaaccaagtagtggggaaggaatcagaaatattatacaaaatgtacaaatggtcatctggaaaatcatctcgaatgggtgagtcctcggacgcacgctcaatcctactcaggtggtcagccacaaggttctgtgcaccgctccgatcacggatctccaaatcaaactcttggagccaaagcatccacctaatcaatctaggctttgattaagccttcttcaacaggtacttcaaagctacatggtcagtataaacaataacacgagtaccaagcanatatgaacaaaatttcttaagagcaaaagctatcgctaatagctccttctctgtggtagtgtaattngcttgcgcaacatn

SEQ ID NO: 16569 - DNA, 346 bp, Glycine max
  unsure (1)..(346): unsure at all n locations
ttntattttcagtagatgaagatgaatctgtggccaccttatggactcctctaaggacaatagcatcatttcttgcactgaattgttgggagttggaagccatcttctcaatcaaattcctagcctcagcatcatatcaccaagagctccaccactgacagcgtcaatcatactcctctccatgttgctaagtccctcatagaaatattgaagaacgagtttctcagaaatctggtggtgaggacagcttgcacacaatatctcgaatctttccaagtactcatacaagctctcttcactaagttgcctgatgcctgaaatgtcttntctgatggcagtggttcta

SEQ ID NO: 16570 - DNA, 277 bp, Glycine max
agctttgaagcttgatcaatttgaaaattttatatgtatgcttggagtacttgcaataaatgaaataagctaaaacttacaggagagattgctagttattttaatgtgtcaataaacagtcctaatttataggactgacaaggtttggttagctgcttaattcacgcctagattgctaccatgcaagtttcgtgggtcttgattttattgctattctatttcgagagacaagtgtgtaacgcttatcaaaagccattttcgtatgattgaataaagc

SEQ ID NO: 16571 - DNA, 358 bp, Glycine max
gacactatgaatactaagctgtagtagtcactgaatccatagtgcagggattgcttacaacaccatgcatctgtgaggagtcctcaagttcattatttatgctgtgaactgcaaataaagagtgcacacaatgcaaccatcagaccatatatccatgaggcaatcacgaaaatccaaatatctaactgcaatcatgtcatgctcctttgtaactgacacttatgcaatggttgtccgttctaataatacttggtcatggggaatcagttcgaatattctatatcagacttcaagcaaccgagcatatgaagcaaaagatatactgacattcatcatgtgggtaacacacaatgaacta

SEQ ID NO: 16572 - DNA, 426 bp, Glycine max
agcttgtagaatggctagacatgatacatgtcagggtttggtttggttcattgataaaagggatgccccacactatttccatgacacaaatgcaaaaatgatgatttggaaacttttatgcaaaactggtcatgcatgcacctatgtggacactcaagtgtcaaacttttatggtcatgtgatgctagggctcaggattaatttcctccattttaaatcaacccaatgtttccaaaatatgttcttttatcaatttgtgcattcctccaagtccatttcgggcatccggggaaatttcacagcattcacccttcaggtgtagacacgttttttttcaaaaactagctatgatcagcgaatttttcttttaaagaaaagatggaaatcatctcttttcaaagcatgccgattgtttagctagacaac

SEQ ID NO: 16573 - DNA, 443 bp, Glycine max
  unsure (1)..(443): unsure at all n locations
tgagcacctttttcctcacttcttccttcattgatgggttgagccttctctacggttgtatgattggtctatagtctccttccatcattttcttgtgcatgtagttggcagggctgattcctttaagatctaatatgtgccacccaattgcttccatgtgtcccttgaggacctttaccaacctattctcttcctctgctgttagctcactgtgatcaccacaggcttggtctcgctctcctccaagaacacatacttcaggtggttgggtaggatcttcaactccaccttggtcttctcggatggactcccactttntaattcttcaaagctggtcccccttgcacgaatgttttcttcatgatctaagtctttcaagaaagtgctcagatcctttttctcttcaatatgtagatgatccacaacatngatcaaaactttct

SEQ ID NO: 16574 - DNA, 417 bp, Glycine max
agcttcacactctgagctccaccattcagttcgacgattatcgcgagattttctgcaccgccaaagtgtcctcgctcgattccttgtttccaacccttgaactttcaaagctcaatgagaggaaaaagaacaaaaatgtttagtgctccaagctcgattacttgaaagtcttgaacgggttaggaatctagatgttgctatgatgccttttgaagagcttgttgttgatcctacgaagaaaggttgcttcaaaacatggtcatttttcgacttgattttttctttttcttttttggcattagcatttaacttaattatggcttggaatattgaattttcatgtgttttgcctgaaatccagattcaatccgagaatgtttgttcttcaaacctggctttgttatgcatccttccctt

SEQ ID NO: 16575 - DNA, 354 bp, Glycine max
tgtgtcggcttgtggggccacactggaatccgcttcaatggtgcctcttcctagaccacttcgcggggagcttcttcgtagccaattctatgttgcctcctagtagcacttctttaacgtcttgagccgaacgcgtgatgacttgtcggtcacgggcctagtacttttgcttacctttggctttggacttggtcgcctgctggtcggccatgggtcgtatgcaacgctccagcctttgtagatgaactgaggggctttggacgtggtggcggtgtgtttgttgcccgctgccgcccatccctagctgctgtggtgtctcgccctgcgcctgcctggggcacaatactttctgat

SEQ ID NO: 16576 - DNA, 354 bp, Glycine max
  unsure (1)..(354): unsure at all n locations
agctggttgnttcatacaatacgctgattttcgatctattatggcatcttattaaatgggctacaacacaaagtgaactctgataaattgaagcaagaaaatggaatacttgcttcatgttataaagccaccgatagagcttgcacttctactactcttaatatggatgattccaatctttgcaagatgagtttgaaaagttcaaaaaggaacactatgaataacatatgaagttgcaaactaaggctccctatcttaattttttttacaacaatgaataaaggatagagtgatcgtaatcacttacttagcgtgcagtaatatactaccgagaacatcggttcggggtataac

SEQ ID NO: 16577 - DNA, 339 bp, Glycine max
gtctcccattcttcttttatctgatgaattaccaacaccgaatatccgtacactttgagctacttaaactttaagtcgattgctgctccgattcctatggctcatgctacgtactcctacatattatttgtacgagcgaaacacaatctactcatgaaaggaaaacattgttatctggcgaaaccaacactaccccacattcatgacccactgcattagacgcaccatcaaaccatatcatccactttgctctgccataatcttcactctcttcctcaaatagggccataatatcctcatcggggaattctagatgcataagctgataatcacttatgg

SEQ ID NO: 16578 - DNA, 378 bp, Glycine max
  unsure (1)..(378): unsure at all n locations
agctngagaaatcttaggaaatcgctatagatgctgttatcacggccagactacacaggtgaaccctcttagaggtaagggatgagtttatcgcatttggggttagaatgaacatgtgtaaagatccttacgggatcaaattggggtttattttggtatgtttattgtattgtaattcttcatgtatgattataattgcaagattcttatattgagatcataaaattatgattaaaattgcgtgtaagtgataaattgaatatgtgatgaattgtgagaaaacatgttgctttgagatcataacattgttattgagattgggtatatgtgcaaagttgaacatgtgttaatctgtgagatacacgtaaacatgtgatg

SEQ ID NO: 16579 - DNA, 449 bp, Glycine max
  unsure (1)..(449): unsure at all n locations
tatctgagtaatgatgatgagacattagcttttatattgttgcattgaatgttgcttctcttacgatcctccttttttcttctttggccataactatagcctgctctttgtcaccgctctgcactctccacttcacacactctgtttccttacaaacactttgcatcctatcaattatatcgcttttaaaatatattgaataaaaaatatgcttaattttgttctaaaatataataacagatacatcccttttcatgatataagaagatttatatgaaattntatttaaaagtttaatctctgtaaaaaacattatatcattaatcaatcatgaatcttaattgtcagcataacttataaaataattattataaaacttaataatttgttttcagtgtatttattataaaaaataataaatgtatcatatatgataaatttatgattaa

SEQ ID NO: 16580 - DNA, 273 bp, Glycine max
agcgctagaagactccaaataggaagatgtattaattttctccttgcttgagaatcataggtcaaatttctattggagacacataatgtttacgagaggtaatgatgtgttctctgtgcaccgctatctttggcaaatcggctactatggctttcaaatcttgccaaatttcaaagagttttcacaaagcttagaagagttggttcttacgaaagggaaaaccgaactttactattactaaaagtcaagttccaaaactatatattttttttc

SEQ ID NO: 16581 - DNA, 404 bp, Glycine max
  unsure (1)..(404): unsure at all n locations
actatagcttgcatctatcggtgctgaagatataagcgtagctcggtgggattcttccccaaattgtattttacaggatctcattaggtacaaatatgagcttcctcagtataagttctcttagttntgtttccttgggctcggtttggtcctcccaagtgcttgtttagatattcttttatattgcaatgatatctgaggagtgtgttttctaactagatgttaatggggtgtcaacataattgggatgccatgttcatcttgctgagcactcctcttcttttttattaaaaaaaaaaatcattcgtaattcacaatcaacatcaagaacaaaccctcgtgtaagcatataagaatgaaaacttgtgaatccaacatgtcaaacaatgaggacgtgctctgat

SEQ ID NO: 16582 - DNA, 411 bp, Glycine max
agcttgaggaattttagggaaccacaagtgactccgctattgctggcaaactacacatgtgagcccgcttagaggtaagggatgagtttatcgcaatttgggttagaatgaacatgtgtagacatccttagaggataaaattagggtttatattgggatgtttatgattataatcacgagattgttatgtttgactggccaattaatgtcctaatgcaaattggttgataaaattgggtgctcttagtattttttttttgtgtttttgattcctttgattttgatatgattatgtgaaattgtttgagggatttcactccccatgttgtgagaaacatttttgtataatttgtttgtgttctggataagatttactagattatcgtgataaattgttatattgggatcatg

SEQ ID NO: 16583 - DNA, 353 bp, Glycine max
  unsure (1)..(353): unsure at all n locations
nttgagtgaaaccatgtgactcttcacttttaaatttgtttttcaacgctcaaggacactggtaatcgattaccaaaacattgtaatcgattacagccttttgaaaatatttggaacgttgtacattcaggttgaaaactctttcaaactcagtttactactggtaatcgattacaacaatatggtgatcgatgaccaaagagtaagaaactcttgggaaggttttgcgaaaacctatgtgctattcaatagtttgaacaactttttaatacttatcttgattgaggtctttccttattcttgaatcttgagtcttgaatcttgacatcttgcatcttgaatcttgattcttg

SEQ ID NO: 16584 - DNA, 333 bp, Glycine max
  unsure (1)..(333): unsure at all n locations
agctntccaaagttttctggttttctatttcttgaaaacttgtgctattcattcttttcatctcttctccctttgccaaaaagaattcgccaaggactaaccgcctgaattctttttgtgtctctcttctcccttttccaaaagaacaaaggactaaccgcctgaattcttgtgtctcccttctcccttgtcaaagaattcaaaacgacacattctgagaattcttttgattcttccctttcccttatacaaaacttttcaaaggactaaccgcttgagaattattttgtatccccattcacaaagtatcaaaggtttaaccgcttgtacatc

SEQ ID NO: 16585 - DNA, 232 bp, Glycine max
tcttgcgaacttcctcaaagactgcttctctattagtgtacatgtcatctaccgcatccactttcaaagtgcttgcgatatactgtgggagagtaatgggtttcttcccaaaggttatctcataccgtgaaactactgaccctgaatgtttcgaagtattgtatgaccactcctcccaatgaagtaatttcccccacagagttgggtcttatgaacaaattcacacatcact

SEQ ID NO: 16586 - DNA, 75 bp, Glycine max
agcttcgtatacaaagcgcttatcggcgttgaggctccatcgtgcatgggatatagcttaatggatggcgccgcc

SEQ ID NO: 16587 - DNA, 310 bp, Glycine max
  unsure (1)..(310): unsure at all n locations
tatactgggcgtaccnccccacttcttcttattgagctcctgagcacgtagcgcctgcacaagtgagaaacattctctgttgcattgtgcgtgacagtatagcgtgctaatgcctgcaccggtgggtgccaccattgatagaagaacacatctgttcgcgcgagtcaaataactccaatctctctaccgccgtattcaaggggaccaatttcgatcctatatcactggaccaccgaacgccccaaggttgtgagtcatgaaataccgacgtctgtatgaatatgttagactgaatggcttatcacatgct

SEQ ID NO: 16588 - DNA, 204 bp, Glycine max
  unsure (1)..(204): unsure at all n locations
agcttgtgaaagagactattggacgtaatttgaactgtngcgcccattctgtagccctaatgaataggatgcaaaccacttattcttcaattgcagcaaaatcctacctttatggtgagagtcattgtcctggattaacctagtgggcgcattcccacaaaatcctagggatcatcttctgtagcatggaaatgggaatgtggt

SEQ ID NO: 16589 - DNA, 305 bp, Glycine max
cagcgcgcgttgagcgtgtcttgtgcgatacctgattctcttcatattatctgcatttgattgctctgaatccctacatgtctaatatctgctagccgggcgcaaaaaaaatatgtattcttagcaattaaatatggatctctgataaataatggtttttgaagatattttaattctatttacacacaaagaacaacctctccatacactatataaattgcttcatcccaaacatgcaggttggaagaagttcagccaatgactattgggaataaacagatacctcacagaagatgctaataaat

SEQ ID NO: 16590 - DNA, 409 bp, Glycine max
  unsure (1)..(409): unsure at all n locations
agcttatcgaaattgtttaagaggagttttagtaagtnttataatttattatatgcaaaatttaagtttctttccttcagttctctataaaatgtatcgttaataaatcttgtaaaaaattatatttcggaccaattaaattaaatgtactctatgggagagttttgctgataaaatgattaagtatcttatcataactgatacaagtttttcaattattataatcttgcaattgtataagacaaattcctttagagtatgtttggatggagaaatttaatagggtaattcaattttttaaaggattttaattacttttcaattaaataagatgtttggataaaaatttaaaaagaaattgaaatttaagtattctcatcacggattntagttaactaaaatattagca

SEQ ID NO: 16591 - DNA, 352 bp, Glycine max
  unsure (1)..(352): unsure at all n locations
ntataagcgcgggttcgggagacaaatgttaagcgttctcgatatgcgaagatgatattccgagtactttggatttggtacgaccatgccctcctgatttccagctgggaaattggcgagtggaggaacgccccggcatttacgcaacaagcataatgtaaacctttacgggtttaaaagctctatagttgggcctaggctttagagttttttttccttttgtaaggctttgcgtcttttgttttgaattataatacaaggatctttcttcattgttcctggtctctatccattctcattcatttgcatgtctacttctttctctgaaacggcagatccgatgacgagtccc

SEQ ID NO: 16592 - DNA, 332 bp, Glycine max
  unsure (1)..(332): unsure at all n locations
agcttattgtaaaatcttggacttagccttggtagaagtctccatagaggccattgcctcccttgccagtattatgatcaccccgtgaggtgcttcacctttggggacttccacctatcacctatggtagaagaatntgaagacatcctatgatgccttctagggggaaggaaaccatacctcttctcagggttctatccctcattagctagaatttccaagatagtccacatctcggcgcaggaattataccacaggaagcaagtcgaaaatggggtggttggaataccaagataatatttggaggcaaaagcaagaatcttggcaggtaa

SEQ ID NO: 16593 - DNA, 341 bp, Glycine max
  unsure (1)..(341): unsure at all n locations
ctgtactagtcatatatatgttacaaaactatcaaagcttaaattgaatcgattattacagatatatgaatacttaaacatacctgccaattaggggttttgtggctttttgcaaattccgcccatgtntctggatcaaggccatacttgatcgtaggatcagatatctgccaaccttcattgtcagcaaagacaaattttgaagtcaatgaagacttaaattgcctccatctttgatcgaggccgtacccgaatcaaataaacatgaaaatgcagtaactatgaagtgatcctatgtctgtttccaacgagcaatgacaaaccaaatgttcataatatac

SEQ ID NO: 16594 - DNA, 424 bp, Glycine max
agcttgtgcaaccgcatatcagaaacattttttatttttattctacccgtgcggaataacagagacgtgggacataatctgcttgcagacgacattcggaaactctgccatggattgttctttttgtctgatcacctgattagttgaactcttgttcagggatatgcatcttttcatgttaagtaagtaacttcctgtgatattaaagaaaaagacacgctcttcttatttatatagagaaagataacgatactttgatgaacaaaacctagcaagaaattgttacccattatcctctgcaaagaaatagtactgatgaataatgatgcacgatgaacccgtgctccatattggaattcccaccccactttgaatcgcgatgggagggtagcatgtatctaacattattgacattataccttag

SEQ ID NO: 16595 - DNA, 283 bp, Glycine max
aactaagcttcgcctctcatgcggaagttccagaacagagtttagctttttttgtcaaagataacacctcgggataagccaggccgaatcttgcgccggtttgacatgaaaaagatagaggtgagcaccttatttatgctactaaaaaaactagcttgtacttcaggatctagaatggctaagtttaagttacttgggaagaacacgaattgcactgcatttgatcaaagctcaactaatgattgcccttcccgcagatgactgcgtgttatttggcctgata

SEQ ID NO: 16596 - DNA, 336 bp, Glycine max
  unsure (1)..(336): unsure at all n locations
agctngagtcatagcatgactgttgcatacgctagcttattgtatattatttaattgatgtgttattatggcctgatcggactgtgcgattcctgtgtattgtgattgatgattgaaaggtgtgatcgatggatgataagtgtgattgatgaaacgcaaagagatcaaataatgcgagatatgctaaggaaatcgtatttggctactatatgctgtgctgcttctctctagtagttagaaatgtgataacttactccccggttgctatttgcgtttggatcctgtgatgatgttgaactttgtgttccggggagcatatgaataggtggatgacta

SEQ ID NO: 16597 - DNA, 457 bp, Glycine max
  unsure (1)..(457): unsure at all n locations
gcttgtataaggaataacaacatanatacaaggtcgtgcactaacaaggtataatggactcacacggtttctctgtatctataccagcagcacaaatacagtttaaccatgaaacccaaccatcatctgctgttcacccttcgtgcgtatatttctaagtgtaaagcaaataagcaagctatacaaaaaagccaacccttaccaactccttcaacattcacgtaagtcctgtatcatcatatcaatcgatctcctttccttcacaaagagatcgaaacaatcataacgttaaacaattcagacaagccctgtgattcatctcccattcacaataagagaactttctttctttccctttcgcattaatccatgcccaagctctatgttttgccagatcccatgcggccacacaacacaagcttcccaattcccattggcccctctaaaataacattgt

SEQ ID NO: 16598 - DNA, 345 bp, Glycine max
  unsure (1)..(345): unsure at all n locations
agcttgtatgaagagatagacaganaaattcttagaaattttttggaaattgtctattcactaagcgcagaccttgcgctaagcgctcagtcttcacgcgctaagtcgagcttgctcatgctatgcgcatagacccctgattggttggctgaatagttcaactaagcgcacatcactacgctatgccccacatcttcatggtaatttcaccttaaccagtgggcttagcgtggatgatgtgctaagtgccacttcttctctggaaaatnttttattgtagcagcactaagcgcgctatcctatgctaagccccagatccattctgtaacttgagtttttaagcta

SEQ ID NO: 16599 - DNA, 434 bp, Glycine max
  unsure (1)..(434): unsure at all n locations
cttgtcctcggatccctcttgttggactagacttagaccaaacaacattattgtaacaatatacttaaaaccaaaacttaatccgcagatccctcttgtaagactaagtttcaattctgcttcattcaagttctaaggctacaatacatttcccaatgctaaagacacctaactatgcacacaaatgggtgatcagaccaagagcatacaaaatntaagcactgaaagaagcattgaacacaagaagcattgaaccctaacaataatgagattacaaaacctangtatctntgcataagctgctcctcttgcttcctccggagctcttttcccaaaataggcactgtggtgtgctctggaatgttgtaaaaatctgtgcaaaagttttgtaccctaattctgcacaagacaggctttaaatagctctgaattca

SEQ ID NO: 16600 - DNA, 57 bp, Glycine max
agcttattcagtgtgacatgcgtcttaatttcttaagccaacagccagagataattt

SEQ ID NO: 16601 - DNA, 234 bp, Glycine max
gatgggacataagggaatacctttcacttgctgtccttgcggctggcccatgcttttacccctcctttctagggcacttctcctcaagtcggcgcgtgtaggcttatatcctatcccgaaccttccgcggttctccttgaactccaccaagctcgccacgccatctgtgttccgaccgatacccattcccggctcgtacccatgccccaacattatacgggctaccatcaatgc

SEQ ID NO: 16602 - DNA, 381 bp, Glycine max
  unsure (1)..(381): unsure at all n locations
agctnttgaatgtttaggatgttctagatagagaaaggtccaagttctagagagttctgagagattttgctgtgtgaagatttgcagagatgagagctcgaagcggaagccgttctgagagcttgagatgagttagtgagtgattgtgagatcctagaggtgaaggagacatcctcaccacttgtatttttgcaatctttcatcttgttcttctctgtgttgtaaaggaggtttctggactatggaaagctaaatcctctattggatcttccctgtaggtacctgatgtaaatatatttctatttatgtaatgatgttttgtgtgttctctgcgatatctgattttcattccagtatgcctttaccttgatcacgtagatg

SEQ ID NO: 16603 - DNA, 407 bp, Glycine max
ctcactgcttggattgcaagccccctcctttttatgatttggtcctgccatcccaaacaaacaaatcggacgttacacgacaattatagttgctgtctgaataccatacccactcgagtgtatcacacaattatgtcttttctctaatgaaacactcttgccttttaccactctaattccccttgagttcttacgcaatgcaagagattatggccacaacaaagaacaattcaccaatatgtgtcatgtcatgctagagagaccaggaaaagggtgaccaagaaaaacgcttacaatgtttttaggcacaaatgaacgaaataaagatcagaatttaggacattcaagtaacaatcttaatgcaaccaatatattaccttaaagagatttgtttaaaagttcttcag

SEQ ID NO: 16604 - DNA, 417 bp, Glycine max
agcttggagaggatgcttcaatggaggataagaaagagggagagaaagagagaggggggagcacgaaattgaaggaagaaaaagggagagaagttgaactttgagttgtgtctcacaagactctcattcatcaaagttacaacaagtgttacacatgcttctatttatagactaggtagcttccttgagaagctttcttgagaaaacttccttgagaagcttctttgagaaaacttccttgagaagctagagcttagctacgcacacccctctcataactaagctcacctccttgagaagcttccttaagaagattcctaaagaagctagagcttagctacacatacctctccaatagctaagctcacctccttgagatgagaagctagaacttagctacacaccccctataatagc

SEQ ID NO: 16605 - DNA, 366 bp, Glycine max
  unsure (1)..(366): unsure at all n locations
ntataagtacgggtctaagacacgaaggccaagtcgcttctatatgcaaggatgactccccgaggggatcagatttggtacggccatgtcctcctggtttctgactaggaaattggagagtggaggagcgcccggacgtttacgcgacaagcataatgtaaccctttgtagctttaaaactctacgattgggcctaggctttagagtttccttatgttaaggaattatgtcttttgttcctgaatttataatataaagatctctcttcatcttttcctccgcctctacccattctcattcatttgcatgtgtatttctctacgcttaaaaatgccagatccgacgacgagtccctaaaggtactga

SEQ ID NO: 16606 - DNA, 314 bp, Glycine max
tagtcctttcatgaaaaactgggtttgaggcaatatgaagagcagtctgattatcacaatacaactttattggcgactcttcacaaaaccttcaattcctacaaaaactgttaattcacatgagctcacaagtaaccatacacatagatcgatattcagcttctgcattggaccgagcgaccatagtctgtttcttgcgttttccaagaaaaagatttccttcaatgaagacaccatatcctgatgtagaccttctatccatgggacaaccaccccaatcagcatcacaatattccgatagttgtgtattaccc

SEQ ID NO: 16607 - DNA, 360 bp, Glycine max
tgtctcagcgtctatgcgagacagagactatcatgttatctatcatcgccaagtaccaagaagagttgggtctagccacggcccacgagcatagaatcgcggatgagtatgcccaagtatatgcggaaaaagaggctagatgaagggtgatcgactctttacaccaagaggcaaccatgtggatggatcggtttgctcttaccttgaacgggagtcaagaacttccccgattgttagccaatgccaacgcgatggcagacacctactccgcccccgaagagattcatgggcttgtccgctattgtcagcctatgatagacttaatggcccacataattagaaatcgttcggaaacttgta

SEQ ID NO: 16608 - DNA, 402 bp, Glycine max
  unsure (1)..(402): unsure at all n locations
agcttgactcataccaaacatgacaagtttaacatgctttcatcaaatttcttcacaaataactatcataaggcataaacctagtaaaactacccatcatatctcccaaaacccaatacccacgaaaatttatgtgagaagaagtctacccaaacctgaaatgtgaagtcccacaatggagaggtgcgcttcacgactccgaaaatggcttcctttcgcgatttggagcagaaatggtgtacaaaggttggagctntgatggagcttcaatggtgaggaagaagacaggaatagcaacgtgagacagagagggagaaaagcttcttgaattttggggctgagtgaggagagagagagagaaacgtgcttgtgttaaaaaggcttctctttttttttttttta

SEQ ID NO: 16609 - DNA, 391 bp, Glycine max
  unsure (1)..(391): unsure at all n locations
nggtgacctttcacactatatccactcaaattcccattatctggaaagtcattaatggtgcaaaatatcatcgcatgcaacctaaaagtctcaccctgatttgcatcatacacatcaaccccgtctacctaaaacttacgcatgtcttcaatcaaaggagtaaggtacatatcaatatcgtttactggctgtcttggacgtgatatcatcatagacaacataatgtatttgcgcttcatgcataacgaaggaggaaggttgtaaatcattagcaacacacgccatgaaatgtgattagtggacaagttaccaaatggattcatgccatccgaagaaagaccaagtcgaaggtttcttggttcggctccaaattcaagatacaagtgatcaa

SEQ ID NO: 16610 - DNA, 228 bp, Glycine max
agctctttatgaaaggatatgactcttcacaattgattttaaattccaacgttcagatgcactggtaatcaattaccaatatcttgtaatcgactacaccattttgaaatcaattggaacgttgcaaattcagatgaaaacttttgaaatcaaactctgccactggtaattgattacaggatactggtaatcgattaccagagagtataaaatctggtaacttacaaa

SEQ ID NO: 16611 - DNA, 463 bp, Glycine max
  unsure (1)..(463): unsure at all n locations
ggtcgcanatntaattacagaagcaggtgcaaatcgtgtacttgcttgtgacctccattctgggcagtccatgggctattttgatattccagttgatcatgtgtatggacaggtaacagatgattatgccatattgtcattacaatataatagcatggaagaaaaaaaacatttaatctattaaactcaaacaaacaaacatgccttggatatgttgtatatttgtaattgatagttactccaataatttgttaattcattgtattgatgcatctctagtttgaattgaaatgaagtgacaaccttctagtgacatgccaattttactgttagtaggtatataattatttaaatttccaatttctgttgtaaagaaacttcaaatctagtattgtttagatgtgctaaaatcttctattgttnttttttcctggttcagtcactcgtggactctaatgttttg

SEQ ID NO: 16612 - DNA, 409 bp, Glycine max
  unsure (1)..(409): unsure at all n locations
agcttgatccaaaagctgctacttctatttttctgggatttaagccaaacacaaaaagatatgtcactcttgaccttaagaccagagccatttctgtctctagaaatgtcaattttttatgaagatatgcttcctttcactatccaaaataaacttgattccattacagtcttacttgtgtcaccttcttctcttaatattgattaatttgatcatcatattattgaacctgctatcattatttctaatcttgttacttcacaaagagacactcagatacttagaaggtcaatgagatagatacaaaggccaagcaagtataaagactttcacatcacatatcatcatcaattgtntccaatctctctataggtactacttttcatcctctcaattttttcctttttat

SEQ ID NO: 16613 - DNA, 421 bp, Glycine max
  unsure (1)..(421): unsure at all n locations
tgtggaagggtgcctataaagtattntatgcnttttcactatgataccaccccaagagattgtggaaaaattgtaccttgagaggactagaacccaagactttatgacatttgaaggtaagacaaaccactataccaacatatatttatagtttatatatgataaaaataaatcttataatatatcattattttaaaaattatatatttattaatttatgaatgagatttgctaatggacatacattccattttcaatttgagcgtattaacaatcaacacacaaaaaatggacaaaaaacctttatcttttnttattttaattagcttggttaagagtattacaataatttaatatttaattaaaaaaaatatgatttctctctccggtatatcttacctatcaacgtgtttcccttatg

SEQ ID NO: 16614 - DNA, 468 bp, Glycine max
  unsure (1)..(468): unsure at all n locations
tgagtccaatgaacatgagacctggatgacccgatgcacctcacgcatctggcgttgccccctggcttaccaacttgcattgtttactgcccttttggggcgaagcaccttcatcctctagagggactgggcgcatggaaattccattcatctctactgagatcactttcccatcagggttgcccaagaaaataatcacccataatgccactcgtgctgaccacaatatgatggggcacatgtcggatgattacaaagccctactccgtgattctatgccttataggcctacgatgaatgggccttttaaggctgcttattggagtctcacgaaaatagtttagacaattactgtgtctacgaggaatagctctagatgcttccgtttcattgcgggagatcgaacttcggtgccatgttattaaggccatcccttttctttgttttgggatgaaagcttcctccccn

SEQ ID NO: 16615 - DNA, 347 bp, Glycine max
agcttgtacttaacattgcttgtttattctgtgtaactctggccaaaagtctcaaccatcaaatcctcttccttctctgccttctgcttataatacaacaagcatactgccacaataaatagcagactcagaggtgctcgaagcgcaatgcagtatgttacaaacaaaagcattgttgatgaatatattggatgacggacccaacgataaggtccaaattgcactacagaagttggctccaccacattttctgaatacttagcgagatacaatgtagcattatactgcaatatcagagttgtattgattaaagcccagattccaagattgctccacccacccggtat

SEQ ID NO: 16616 - DNA, 345 bp, Glycine max
atgtgctattccaagttcattaatcataccttttagccagattgattccttcactccttcaactagggccatgtattctgctttagttggggacaagaccacaacctaattgttgatttgctttcaaactgattgttgtaccaaacaaagtaaacacatatcctgttaaggacttccttgtgtctacatttactacaaaatctgcatctacataacctgtgactgctgccttgtgtgctgtcttcttgtaccttaaaccagctttcaaagatccatttagataccttaatggccacttcacagccttctaatgtgcgctgtccggatcttccatgaatctactta

SEQ ID NO: 16617 - DNA, 379 bp, Glycine max
acctgcaagcatgcaagcttcttaagggagcttctcaaggaagtttcttttgaagctacttaggctataaatagaagcatgtgtaacacttgttgtaactttgatgaatgagagtcttgtgagacacacttcagagttcaacttctctgcctcttttcctccttcaatttcgtgctcccccccccccgctctctctctttcttttcccccattgaagcttactctttaagctttttatccaaggcactctcttggtggagaagctccttcttccatggcttattccctagtagatgacgtttcctctcacctcttctcctttatcttccgctgcatctccatggaggaaaatcaccattgaaggacctcattgaagctt

SEQ ID NO: 16618 - DNA, 356 bp, Glycine max
tgtctgatgtctggggtagtagttttgacaatcaaagggttactagtttgtcaagcccccaattgtggacgagtgttgtctagtgtcgggtgtggtaacctcgacgactgtaagagaattgcatgttgatgtggcttgttaagcccccgagcctagacaagtattgtctaagttgcttttgtcaagttgttcgtgatggacatgtctttggcgtgtcaagaaaggtaagtcgtcggattttacaacttttcccttttttgactattggagaatgcattaaagataggcattatgttctgtctattgctgcacgcgtgtgcggcgcatgcacaatacttttgcatacgtgtcgctca

SEQ ID NO: 16619 - DNA, 363 bp, Glycine max
agcttcaaagtgttgagcgttatagaggatatattgaaaaaaatttaaatcccacattgaatagagatactatcgagatagagtatacaagggaatgacaatctccatgagttagcttttgaaattgagttatgtgaaaatttcataaatattttaaattagttaagtcattcatgatgtaataataatttattaaataaacatttaattaaattattttctcatgcgtatttttattcaagtttcgataccaatacttacaacaggttattaaaatgtaattgacttttgcttctcttcctcatgtgagtaaacaaattcaaatttgtctctaatcagcgtgtgtgcagtctttcaatttta

SEQ ID NO: 16620 - DNA, 357 bp, Glycine max
tataaattatttatttaagcaatatattatcaagatattcatttcaatattttttaagcaactcatagaaatattttgctaaaaaaatgttgaaatgttgcaagaccaaattagactttcttttttatcaagacaaggtatttcacaaaactaattactaaaaatgagtgttttacaaaattatttgttttcatggatgatttttaccatgtaggatataggaggcatcaccctaattgttaccttatgtttttgtctgttctataacaggatgttgtatcccaatacattccatctttgtcaaatattttgtgttgccttaaccaatgctaaattgaataaaaatattatttttgg

SEQ ID NO: 16621 - DNA, 359 bp, Glycine max
  unsure (1)..(359): unsure at all n locations
agcttatcctctagggatccctttatatgttcattttaatctccaagcgtgagtaactcatcccttacctctaagtgacctcgcgtgtgcagtttggcagtgatagcaacgtctctagctaagattcctcaagtttttcctctggttgttctgcttggttttccaagcattagagtgaaggagaatgaattanaacttcaatttcactgtctccttgcgaggggaatttctctttctactaatattatttcgaaaattccaattgagtgaatatgcgaaaatgagttccgaaggtggtatccaaatttcaggataatccaacggttaaggagtctatgatcgtagttttactacaatgg

SEQ ID NO: 16622 - DNA, 339 bp, Glycine max
  unsure (1)..(339): unsure at all n locations
tccacatcaagcaagttcatctcanagctcttatgcaaacaataaaattcaaaagttggagaatttgcttggaaaccttgtaactgtgcttaaagtacgatttgcagaaaatccacaaattaatcaagtcttagaagctatagatcaagaggtatgaatttataattctacttattcaacgatttaactatgatatgatactttacaaagacaaaacattcttttaatttaggtacctacaaatggttctactagtaaagatcatcaaactacaaacaatcttaactagaggttagttgaaatttaaatggtaatgaagatgcgaagccgtgacaaatg

SEQ ID NO: 16623 - DNA, 363 bp, Glycine max
agcttgaggaattttagggaactcttgagacgccgctattgctggcaaactacacatgtgagcccgcttagaggtaagggatgagtttatcgcaatttgggttagaatgaacatgtgtagacatccttagaggataaaattagggtttatattgggatgtttatgattataatcacgagattgttatgtttgactggccaattaatgtcctaatgcaaattggttgataaaattgggtgctcttagtattttttttttgtgtttttgattcctttgattttgatatgattatgtgaaattgtttgagggatttcactccccatgttgggagaaacatttttgtataatttgtttgtgttttgg

SEQ ID NO: 16624 - DNA, 277 bp, Glycine max
  unsure (1)..(277): unsure at all n locations
ttcgagtgaaaccatgtgactcttcacttttaaatttgaatttcaacgttcaaggacactggtaatcgattaccaaaacattgtaatcgattacagcctttngaaaatatttggaacgttgtaaattcagtttgaaaactttttcaaactcattttactactggtaatcgattacaacaatatggtaatcgattaccaaagaggtaaaacttcttggtaaggttttgtcaaaaacttatgtgctattcaaagtttgaaaaactttttaatacttatc

SEQ ID NO: 16625 - DNA, 337 bp, Glycine max
agcttatggcatgtgcagatgatatgtatcttcgttgctgcctcgaatctgtacacaatagtgcattgaaagcttcccaacacaacaaacctgtgagcttgaatacagttaaatttgttggtgaagcagaatgtgattctggtcagttagtcttgggacattctgtagctgtaagtaataatgcttctgataattggactctatgcacagtaatggggactaagaagtatgataaatatattgaatagtcctttgcttcagcactttggtgcttcagaaggaaatgataatttgaacagcatgaacttcactgatgctaaaaacatgacatgctatg

SEQ ID NO: 16626 - DNA, 310 bp, Glycine max
tagctgaaaatattgaaaactgatcggaattgataatatagcagccaattagtggcctaacatgggatagcacgtttaggaacagttattttcatgtttttgtataaacaggtgtttggaaaactttggaaaggacaatcaaatcaatacaattatccaatggtcaaatctgtggtgcagaatgaaatgcaacaatccaatgaattgaaagcaagaaagatgcatgttgacaagaattttgcttcctcagtgcctagaaatcatgaagtgtcgaataagtaaataatcttgatcctccacatctgattga

SEQ ID NO: 16627 - DNA, 357 bp, Glycine max
agcttgcatgatttacattctctctctttctcaagcaaattcttcttgatatcatcaaaatcttcatgatttacattctccccctttttgatgatgacaaccacctgtaggttaggagcaacaacaaagaaaatatctatttgcatatagtttactcccccttggttttacaatgatttcttatatgagacaattgaagatttccaacttttcatatataaaaagttgtctcataaagaatagataatttttccttactattttatcttttatctttttctccctctttgtcaacatcaaaaacaaatcatgaatagagaggagaaaaatgttaccacttgttgtaatgtatcaaaa

SEQ ID NO: 16628 - DNA, 324 bp, Glycine max
ttaacacagttggaagataactgggacttttaaatgtgttgttaggagttcaattagtgatgtatgaagaaaactttgttaagaaaactaaactcattttatttatctttacgtcttgaaataaattagtctttaactattgatcaagagatatctttggtaaaaaaaaaaatctatcaatactctaattagtattgaaataaatctattatactcagattataaaactcattccaccactcattcacctgagagagattgtttgcaatctcttcttgattcttattcggaagacattatgtgctcctcaagagattaagaaaa

SEQ ID NO: 16629 - DNA, 357 bp, Glycine max
agcttcctcggttccattcctgttaaggcaaacatttggaaagttagtttttaccaagaaatgctacccttaaaacaaaaatggcatacaaccccctccaataaatacaaacatcaatgtaaatttagagcaagcttatgcgcatacttcttcacgaacgttcacttgcacaagacattcttataactaagaaaaatgcacccatatacaatcaaggcaccttcgttacctagattatttacatgtacttccaaggtgtatttgttacctacatcacacacatttcctttgctaaattcacatacatgcatactctaagcactttgtctatcaaaaattgcatacgtgcacatcttg

SEQ ID NO: 16630 - DNA, 375 bp, Glycine max
  unsure (1)..(375): unsure at all n locations
ntggccttggcctctcttatcttcctctctttgtgattctttatccgagccactgtatgattttcaggcggtggacaaactgcatagtcttcttctatcggttcccaaagatctagtgcttcaagatgggtagtcatccttgcagcccataggtcgtactcctcaccatcaaaaactggtggtggtattatgtgtgttgtgtctgcttccattatggtttctctcaactcacagatccctcaagatgatgactctgataccaatttgttgaatattagatcaaaaacagagaagagcacatatatntatgaaggatacatagttgttattcatttgctcttggttagagttaaatatacaaaacaaaaaatccct

SEQ ID NO: 16631 - DNA, 356 bp, Glycine max
agcttctatatttgctgaaccattttatcaataaacacaagttgagttttattcagaaaattagagtttatctcttttatcttagtgagagtgattctcctaaattcttgagtgattcaagaacaccctggctgtatcaaaggactttcacaacctttgtgtgttgccctcgctggaaagagtgattctttccttcctatcatctccacccttgttctttcaaaccacaattccagaaaatccacctctgcccaaaattatctcgtgaccataactcccatttcacacactcaaattaagtgattcttgagcctaaattgaatttcaaaacgagacctttcacctcgttttggaat

SEQ ID NO: 16632 - DNA, 318 bp, Glycine max
tggttcgaggtacttacccgttgaagatcgaagaacgatgaagaacgaatgaagaacgtcgaagaacggttgaaatctttgcgaaattcctcacggaaaacgttacggaaacgtttcggaagcgcctcggcttagattttcttcacgaaaacaatttttccaagcaaattcgaaagagagagaagtgcctaaggggctgaacccttttcttcttcacttcctcccctatttatagcaaaataggggaggtggttgccgcccagctcgcccaggcgagctcagctcgcccaggcgagctcagctcgcccaggcgagcca

SEQ ID NO: 16633 - DNA, 408 bp, Glycine max
  unsure (1)..(408): unsure at all n locations
gcanatcgtaatgaaggcagcgaacgctgatcacatcatagaatgtaccttaccagattggtgtgcattgaaagaacaacaattgttaacagtttcatcttggctcgaatcgcaacacttaccttgggatagacgctaagacgaatatgactcaacttttgattgtaatgccatctttatccacatagatctataagagttgtcatgtgtaatttattcgccaatacgcgctaggtgcggatctctttcggcatccaaatgtggatgctttgtttttggtgagattattgaccattcagctgactaccatttgtatgtactatataaccattttgttctctgttggacgatcttagatgtaggcctttgcgatgggacaacgtgattcaggttcccatttaacaaacg

SEQ ID NO: 16634 - DNA, 241 bp, Glycine max
tatgcaaattatgcgttccaaatctcaactcttagtctccttttcaaattaactgatttccaccacaccaataggcatttgacatttcttcaacaaaaaaaaacaatatcatttagcattaatcataaaaaggtgaaataaaaccataaagaggggtatccaaacataattaaacaagctaaagggttagaatattggtttaataattaccactacccaatgaatgaaaattaccacctta

SEQ ID NO: 16635 - DNA, 350 bp, Glycine max
  unsure (1)..(350): unsure at all n locations
agctttcatcatctttctcctcatgtgagcaccactcatgattgagtaacattaaacatcttccggcanaacatggaatcatcatttttgagcaaatgtgattacaaatgagtcgttcaccctcgatagatatcttgcacaaaatatccagtattcatgatctaaatatctttctgcaatagatccttttggatgtgctcaattaccaacaaatatctttctccccaaaggtctatgttggatttcccctgcagttactttttgggccaatttttctatatacaaatatgttcaagggaaatccgattcgccggaaagcacattcgggcatcaagtgtttaaattaaaat

SEQ ID NO: 16636 - DNA, 335 bp, Glycine max
tcatgatgaatcaagattgattcaaagaagttttgatgataacaaaggggatgaccaaaagctcaaagatcaagaacacttcatgataacaaagatgatgatctcaagaatcaagattcaaggtccaagaatcaagatccagaattcagactcaagattcaagaatcaagagaagacttaatcaagataagtattaaaaagttttttcaaaaactgagtagcacatgaatttttctcaaaaccttttaccaaagagtttttactctctggtaatcgattaccagattattgtaattgattaccaattgcaaaacggttttcaaaaagctttcaac

SEQ ID NO: 16637 - DNA, 342 bp, Glycine max
agctttaactcaatctatggtttggagcttgcaaaaacagaaatttaagcacgcacataattttagccatgaatcatgtgaaataattcctaacaaatcaaattgaaccttaatacaaaaattacaacggggccttattccaggaggtggagttgaccaatgccatttgattctttcaaaaattcagaaatcaagtctatagtaaaaccactcaaaacgaggtctggttaatgatttctcataaatttttcatttaaggctgtgtgttgataggtgaaaaggaatgaaatgaagtagaatgaactaaattgatactaggttccattggttctattgtttaaa

SEQ ID NO: 16638 - DNA, 154 bp, Glycine max
tttattgtaagaattgtgaatattatcagcaccaatgctttgcatgtggcaagctggggtcatttgataaaattaaaggtgcccaagtataacttcgccaaataaaataagttctctttatacttaatgcttagctcattcaattactttttca

SEQ ID NO: 16639 - DNA, 345 bp, Glycine max
agctttgcctttagggcttgtatctcatcactttcttccgaagctttaacctcattgtctctcacagtctttagatttgggagccaatccaatccttgtgttcggactctcagccacttatgatagccgccgatgatcccattacggcttcccctaagctctctgtccttcacgccgcatcccatgccttgcgaactccttggagtaccctcgcgttgtggtcactgaaaccccgtgcaatgaaaggcgtgatgctttcgtctgatggcactcctctcatgaggtagccaagctgtcttatggcgaggacgggattataattaatacaaccccttgttccatcaa

SEQ ID NO: 16640 - DNA, 327 bp, Glycine max
tatcagctacttggttactctccctaagagaatggagccaaacaaagcttccttgttgttcctcaaaagccttgaaatttcaaaacatgctttaagacaagtgaaatgaagggcagccatgattcaaaagtgaaatagccccaaaggaatcaaattccaacatgaattgcttgaatcttctactccgtgcaatttcaattccaagcatgatagcctcgagttctgcagttacaactaaacaatagcatacatcaataacaaaagagaagttcgctttgccattataatccttgagaactccaccaacaatggccttcttcgtgtctc

SEQ ID NO: 16641 - DNA, 364 bp, Glycine max
agcttggtgaaacatttaaggttgtttatacctttttcagatcctcttgaatatttttatactttgtttcttgtcttttaacgtggtgttttttttttttttgagaaatcgtcctctaaattgggaaaaaatgtcagttcattcatgttgcgtaaattataatcatattactttttctaataatcgtattcccccgccccaaagaaaaggaacacaagaattaattatattcctataccaccacatactatatatctgatcaccacaaggcacaaaaaaccacatagccttctcgaatcaagtagcaagctataaagcacggacactctaatttcttgtcatattcgttggccgacatgacact

SEQ ID NO: 16642 - DNA, 374 bp, Glycine max
tcaccacttccgactaaacttccagctggagctcatataccttcttgtgcttggcctggtacgtataatttttcaaaaaattgctgtctggttttttgtttgcatatcctgtttttaactggcatgttcttttcttctgtaactgcaaaaaaatatttacttgttgagtggcttctaactttaataatctttaacaatttttaattaaggaatgatgcccattgctgattgcatgaacaaatgaattggaatccttccaatcctttgaataacttctcatgctatcatgcatgaggaatatagtgcaattttattcatatgccgacatatataaattcttgacccaatccagtatgttattaacttattatcta

SEQ ID NO: 16643 - DNA, 359 bp, Glycine max
aactttacccccttgcccgaagattggtagactatctttactgttccttaactcttatcagatagcatctggctaggtgggtgcaattggcattttataattaaagttctttttgggaaaccaagccacagaattgcccaaactgaggatccaacaatcggaaacgaccaaaaatttggggtgttagtttaacaactttcaagaggccaggtccgaaaaaacttactaatcagtgaacaaagcaaatggctttttattataccactgatgaatgaaaatcatgagcctgacccacacaatatatatttcgtggaagtcagcgccgtccaattaaactaattaatgggaaaaaatcttgt

SEQ ID NO: 16644 - DNA, 368 bp, Glycine max
ggacctataaaactaagcttttcaaaagggtaaaggctcacagtcactttgttctacatcatattcaaactggtccaaataaataataaaggcatctcgactcaaagaaagtcatataagtctcatacaattaatatagaacctatatcctaatgtcacatgctatcagagcggggtgttcccgtgtcctctagcgtgaggttcttcatagtcatccacctattcatctgctcgccccaacacaagttcaagatcatcacaagatccaaacacaacaacacacagggagtgagttatcacattcctagctaataaagaaacacgacaattcaatgtacatattatataaatgagataccacttcgctt

SEQ ID NO: 16645 - DNA, 264 bp, Glycine max
agcttctatataagctgaaccattttatcaataatcacaagttgagttttattcagaaaattagagtttatctcttttatcttaatgagagtgattctcctaaattcttgagtgattcaagaacaccctggctgtatcaaaggactttcacaacctttgtgtgttgccctcgctggaaagagtgattctttccttccaatcatctccacccttgttctttcaaaccacaattccagaaaatccacctctgcccaaaattatctc

SEQ ID NO: 16646 - DNA, 346 bp, Glycine max
gctgaaatgaacacgaagctctcaaaaaatctagtgggcctaaattttcacacaaatgtcccatatcgggaaataatatatcgagacccccgaaattgaacaaccggaacctctcgagaaatttgaatgggcataacatttcactcggatgttcgatccggggacataaattatcgagaccctccaaattgaacaaccgaaactctcgacaaattagaatggtcctaacttttcacgcgaatgtcgattcggggacataactcatctagagctcaaattgaacaaccgaagctttcgagaaatttgatggtcataagtttcacacggatgtccgattcgggaacat

SEQ ID NO: 16647 - DNA, 342 bp, Glycine max
agcttgacatatagacctgtcaattgtctccttctttgtttcctggatacacagcatatctatgtgttgtgtgttgaccatccttctaattgctggccacttgacccccttccctaaacctcttacattgtaggagatgatattcatggggttgtcctcctgttccccagtctctcggcctctttggggtctctatcttccatttccattagcttcggcacataccccttttgcatagacccagaagtcacacctaaatccattgccatgttccagatatgctctgcctctttatacggattgtgagctgagatttcttcctcagatgctggtgatgctatt

SEQ ID NO: 16648 - DNA, 382 bp, Glycine max
tgtcacaaaatatgtcaaaggtactatatttattaataactaattttttaccgtgcagtgcatgcagtaaacaatttgtcatgtaattttaggttaattttatgttaaataacatagttgtatagctaaaaaaattattgaaattttttattgaaaaatttgctttgacatataataagtcaaataataaataaatagttcaatctaataaatgtaagatgacatgtgttattgttaacaaaacaattatagttattacaaaatgttgtaaatgtatgtaaattgttgaaaaaaatacgtaaattttcacttatttttcatatgtctcaaataccctatcaaagaaataaagataaaattatttaagcttatattaaaaata

SEQ ID NO: 16649 - DNA, 353 bp, Glycine max
agctgggatgtctactagttttgtcaggaatatatatatatatatatatatatatagcatgttgagagacaaatgtggggaaaagttatgctggttcttgaagaatccatgccatatggatgctacagagtgaaagggacttgttttagtgtagagagatgaagaaagttctacgttaatttggaatatgatttggtgtttggaaggagaaccgtaaaagagggtgcaagagttttccaacgtgttccagaggcttcatgtgttactttgtcaacatattggtcatattcatcggactacagcttttctctttaagtaatgttttgggcaatttcacactaagttgggattaa

SEQ ID NO: 16650 - DNA, 378 bp, Glycine max
tttataaaaactcactatgtgattgtagccaattaaaatatttaagcttttacacatttaaaagagtaaaattagtatcaatttattttttcttttatcttttataattttttatattcttttttaaaaataaattttatgaaaacaacatgtatgaaaacaaaaataataattatttaatatattcaagtaaacaattttctttgtggaacaattattccatagtcaccaacgtacatctgtccatgtccgtaatttaaaatgtagtataaaaaatcaatgtatattatgagttatatcccccacaaatttatgaaacatatatgagtattgttcccataacataatttttttggatttgttactgggttaatggat

SEQ ID NO: 16651 - DNA, 269 bp, Glycine max
agcttgatgaattctatgtaaatactgaaatcacgactttgcttctcagatagactacaatctcctacctaagacctctagtttctattccttgttcattgttattattgtgttttaaatcatccaagtttgacatatgttacaaaattggtgtaagtcatgggaggaacaataaaatataagattaagaagaaaacaacattgccttatttttttctatcttctttttattcactattgaagttatgttttggaaattcgctagaaat

SEQ ID NO: 16652 - DNA, 318 bp, Glycine max
tcagagatggttttgaagtttcttctgccatcttttgccacggtgacattaggtgtgggtttctcatttggaccgattaactcagcaaggccggcccaaacaggaactggaccaacccatgcaagaatggagcctgcagcccaaaaaagaactgggccaggaacaacaccaggagcaagagcagcacctgcagtattaggagaaacaccaggagcagaagcaacacctgtagtagtaggagcaacaccaggagcagaagcagaaccaaaagaagaagaaccagaaccaaatatagacccaaaaccagcaccaacagca

SEQ ID NO: 16653 - DNA, 350 bp, Glycine max
agcttctcgttatattatgtgtttgaatcggacttccgtttgaaaaattattaccatttgaatttctcgagagctttggctgttcagtttcgagtgtctcgatatattatgcgcctgaatcggacttttgtgtgacaagttatgaacatttgaatttctcgagacctttcggttttcaattaagatcgtctcgatatgtgatgcgccagaatcggacttccgtgtgacaagttttgaccattggaatttattcgagaccttccgatcttcaatttcgagggtctcgatatattatgtgcctgaatcggactttcgtgtgacaagttatgaacattggattttctcgagac

SEQ ID NO: 16654 - DNA, 332 bp, Glycine max
tctcgatatatgattcgcctgaatcgaactttcgtttcaaaatttatgaccatatgaatttctcgagactattcgttatacaaattcgagcgtctcgatttattatgtgcctcaatcggacctccgtgtaataagttatgaccatttgagtttctcgagaagcttcgctgttcaatttcaatcttctcgatatactatgcgcctgaatcggactcttgtgggaacagttatgaccatatgaatttctcgagagcattcggtggtcaattaaaagcgtctcgatattttatgcgccctaatcagaccttcgtgtcacaagttatgaccatttg

SEQ ID NO: 16655 - DNA, 350 bp, Glycine max
  unsure (1)..(350): unsure at all n locations
agcttgtcttttgtttanatatgatttatacatgattaaggacttgtaggatccaatttaggaaaatttggatgatggtaagggggatttctaaatctgcccaatttgtgcagcaaaaagctgtcaaattttgtgcaacagaaaattgtgtttgtgcagaaaatgttgtgtattgctggttgtggaaagggtattacatattgggctctatacgttttctagcagatcccaacggtcaaaatgtaaacttatgtactagggacctccattaaaattttcgagtcgatccaacggtgaacgaattggaacgaagagaatgttactggggtatttgagtaaggaaagttgtg

SEQ ID NO: 16656 - DNA, 372 bp, Glycine max
  unsure (1)..(372): unsure at all n locations
tgttatctcattanttgaggaacatggagcgcttccttgttcttccttgacaccaaccaaacttaagttccttatctgcttcaactttcccaaatctcttattaactctattccatcggcaacttttaatataaattgtaagcctaaactgtaatgtttagaaacttgcgtccttaatatattatagaacatgaatttcagggttcactatgaaccatctaatttgtgctaggaagaagatcaaccaatttgcttatgtgaaatgaagtgcatgccatgtagtgggtatatattatttaattgttttgaaaaatacccttttcattccacaatgattgatgtnttaaagaaatcatattgaccaatgttttt

SEQ ID NO: 16657 - DNA, 354 bp, Glycine max
agctttaaaattagaataactatcaatagagaggtcagatttgtttaaagccaaattttatccatttaaaatgtctcattgattcattagcaattaaatgattcattgattcacaaattactaaagaagctttgtcatctttttttcatactcatcctcaacatcttacacttgaagaagaatcatcccttgattgagacatttcaacaaacatcctaaaagcaacaaaaaaaataggagaaagagaacacaatgacataaggctacataaacacaagactgcattcaaacaccaaacccagcatccaccaacaccaatacctcaaaatgccaaaaaacaaagaatcgggagat

SEQ ID NO: 16658 - DNA, 349 bp, Glycine max
tgaatataatgaaacttgctaacttaacaaagctaagattcacttatttctcgcaagtttccttcatccattaaagttgatagcgctacacatggccgttactgtgaaaagagagatagtgggaactctaaacactttttgtagcatatcttcatagaactacaacttgccagtgtcgtcttgcgctcaaagttgacttttagtgtacaaatcaaatataacgttaacagcataagacaaaaggaattaagaatattaagacaagacaatttaaatcttcccttttgtgcgttgtggcacgagttgcttattgaacctatggacgctactttttgatgatggctttttg

SEQ ID NO: 16659 - DNA, 330 bp, Glycine max
agctttctaagtgtttattccttctaaaaacaaaaaacaagcggacccctttatatatatagattccttttcagctcgcatggaactttgaataactttatttcatcaaacataatcaccaaagagacattcctaaaacgcagacagaaagtacatatggcataaaacctcaaaatctgagctaaatgaatggcaattatattataaatgaatcctctgccattgacactgattcactgaacaggagacttaccttcattcctctttacactttccaatgtccacaagccccatggttggcccaatccctcccatagccacaagttcagt

SEQ ID NO: 16660 - DNA, 384 bp, Glycine max
tcttagtttcagatgatgcagatgggtttgtatctacctcatgcactcctctaatgactatggcatcatttctggcgctaaactgctgggaattggaagccatcttctcaattaaatttctggcttcagcaagagtcatgtctccaaaggctccaccactggcagcatctatcatacttctctccatattactgagtccttcataaaaatgttggagaagaagctgttctgaaatctgatggtgagggcaactggcacatagtttcttaaatcgctcccagtactcatacaagctctctccactgagttgtctaatacctgagatatctttcctgatggctgtggtcctggaagcagggaaaaaattttctaagaatactctct

SEQ ID NO: 16661 - DNA, 349 bp, Glycine max
agcttcttatccaaggctcatcttggtggtgaagctccttcttccatggcttattccttaatggatggtgcctcctctcacctcttttcctttgtcttccgctgcatctccatggtggaaaatcaccattaaaggaccccattgaagctcaaagatccagcctccatagaagccccacaagcaagcttccatcacgctaaggcgttggaccattaacgatctcttggggtggtcgacaaaagtggggcttttgctcctacatatccttaattgcaatgagaaaatcaaacctacgtatttcttgcagaagtggtaaagttacatgttgattttatgcttttgaatggtc

SEQ ID NO: 16662 - DNA, 341 bp, Glycine max
  unsure (1)..(341): unsure at all n locations
tggactagaagaggtataatattaatgactctacaatgttacattagtttttattttatcctaacatgtttgttttaccagcacaacgctaaagctgataaagcaatgtgtgatataactgaagatattcaatatgccactgtaaagttaaatacataggcttttttttttttgaaaataacaatggttcttagatattcatatatgtcttttctatacaacaatctctttctgcaatagctaccatgatcccgatcaataattgtttgtcactccatcanagagatttgtcgttgaagttggggatgatgacccgcaatcacacgatcctgcatctacac

SEQ ID NO: 16663 - DNA, 343 bp, Glycine max
agctttatggcactttgccaaattctttagctcatgactgtgggctcaaaattctggatctcaatgcgcccccactattataaagtttttcgcctaaatctttgttcaattgctttgatcttggaagtttatatcttggaaacaattcaataaaggatgtggtgttctcattggtttcaaactacttaacaaatttaaacttattggtttgaaaacccaacaatttacaggtgccttttgggagactaaaaaccaagctggggaccaagctgggattccccagcttacccttttttgatgtctctttcaacaactggagcgggccatttccaaaatcctacat

SEQ ID NO: 16664 - DNA, 343 bp, Glycine max
tggagaaacgatgaatcttgacagatccacttttatcgtttgatgacagacccaagaaagccatgtttagaaggctaaaaatcgattctggaataaagccttggaacttgttgtgggataaagacaatctctccatggaatatgatgagattgcactaatatggcctgacaataggcttcctgatagatctaaatccaccaaaaatgacaaagataaaccaccaaaaggaatcgacccattcagaaagttgccatataagcttaacgacgctaagattgaaaaccctgttatatgctaagccgagggccctccaattattatgtgaaagatcccagtgaatga

SEQ ID NO: 16665 - DNA, 363 bp, Glycine max
agcttcatgatgaatcaagattgtttcaaagatgttttgatgataacaaaggggatgaaaaaaagctcaaaggtcaattcatgataatcaaagaatgagttcaagatgttcaaagatgtttaagatgatcaagatgatcaagattgaataaaaaacacttcaagaatcaagaatcaagattcaaggttcaagcttccaagaatcaatatcaagattcaagactcaatattcaagaatcaagagaagacttaaatgagataagtatgaaaaggttttttcaaaaacttattagcacatggatgttttctcaaaaaatgtttaccaaagagtttttactctctggtaatcgattactaaaatatt

SEQ ID NO: 16666 - DNA, 363 bp, Glycine max
tctggaagaagcctcttaatgaagcttttggttgaagtctcttaatgaaggttctagagaaaactacatgaagctacctcggtaaaaacgctgcccagccttagttaaccggtggatcttctcaaaatttggtttgcaacttcacaggacaaattgacataatctgaccgttgggatcgttgagaatatgtttaaagtgtgctagaagcttccgttctcgagagcatctcttatttaagcatttcagcctttgctttcgtgtagcttaggaaaaacgtcatttcttcttctttctttcttccaaagccatttataaagttccaagaactttatccatcacccacaaccaccattatccaccac

SEQ ID NO: 16667 - DNA, 343 bp, Glycine max
agcttgtaggactatggggtactcttcacatgtggtactatgtggaggtcgggcgatggtgcacaacaaggttttcacattgacaaatcgcgcataaaccctccatcctttgttgcccacctccaactgagctgacgtactcccacataggccatattcttgtttctttcaacaccgggtccccataaaatcctcccaagcttacccaacattcaggtaattcatcattcaaacagcacaatctatcacattcaaaaaaacagggcataggctgaaaactctggccaaaacaccaaccaaaaacacagcttttttctctttaagaccccagtaacaattcctt

SEQ ID NO: 16668 - DNA, 327 bp, Glycine max
  unsure (1)..(327): unsure at all n locations
ctaccaatggacttacctcgaattaatttctttgatagcccccttttagcctatgctcccctttctttgttattgaaagctccagttacaatgctctctcaagntgaacaaactcatagataatcaccgttaacccttaatgaattttggaactatgcaattgccactgggaataactgtgcgggggcatgtttcattggaaaatatgaattttggcccatgcttaatcgttttatttttggcccatgctctgaaggtatatttattttgcctactctcttgctctacatcttaaaattcatactgtctaaataaaatgaaatagtg

SEQ ID NO: 16669 - DNA, 358 bp, Glycine max
tgcttggaggctactatactgatttgattgcaatgtgaactttgttttcaacagaagaactggtttaataagctcatcaaaatcatccaactgtaaatccaaggaatcgttgtcacagaaagctgctggctcaaatgattgatcgaccacatctgcaacttctttatttacaacatcaatgctgatgtagccataaagttccttttcaagtttaccattctgcctatgtagctttggagccaccattatcccagatttagaaacattagcatgaaataaaccataataacgccctctactgttgatctgatctgcagctctctaactttttttcccttgctttgttttttgggagatg

SEQ ID NO: 16670 - DNA, 207 bp, Glycine max
tcacacggcactgacttttcctaggccacgagtccaaagtttagctgcagttttgggtgtatagcgtgtggaattgcttctatctacgttggccttaaacttttacgcttaatactaaagaaaagtgcgaccagagactcatggataatacgtacctgtgacaatttctaaaggttgttctaggaaatgagcgtgcatgcatgactt

SEQ ID NO: 16671 - DNA, 364 bp, Glycine max
agcttgcggactataccttcgactcatacacggccgtgtttttgtctaggcccggattcaaggcgggctgcagcaccggctccgcttccctaactgtactggaggcggatgcggtggctttatcctctatggttttctagagttttaacatgacctccgagatggaagccatttgatcttttaaggccgatagatcggccttcatctgttcctgcacgccctcttcattatccatttttctggatcgagtggtataggggtgccttggagttgacttagttatgatgaaattcctaaagaaataaacaacggtgagtatgccaccaaaacatgagtatgcaaatggatgatcggagcacttgga

SEQ ID NO: 16672 - DNA, 322 bp, Glycine max
  unsure (1)..(322): unsure at all n locations
ttataagtgcgggtctgggagacgaaggtcaagtggtcgcgatatgtgaagatgatgttccaagtaccttggatttggtccgaccatgccctcctgatttccagctgggaaattggcgggtggaggaacgccccggcatttacgcaacaagcataatgtaaacctttacggttttaaaagctctatagttgggcctaggctntagagttttcattttgttaaggctttgtgtcttttgtctttgaatttataatacaaggatctttcttcatctgttcctggtctctacccattctcattcatttgcatgtttacttctttt

SEQ ID NO: 16673 - DNA, 342 bp, Glycine max
agcttaacattgtaccactttttggtgctggaactacttcacatggacttgatggggcctatgcaagttgaaagccttggaggaaaaaggtatgcctatgttgttgtggatgatttctccagatttacctgggtcaactttatcagagagaaatcagacacctttgaagtattcaaggagttgagtctaagacttcaaagagaaaaagactgtgtcatcaaaagaattaggaatgaccatggctgagagtttgaaaacagcagtttactgaattctgcacatttgaaagcattactcatgagttttttgcatccatttaaccacaataaaatgtgttttttg

SEQ ID NO: 16674 - DNA, 375 bp, Glycine max
  unsure (1)..(375): unsure at all n locations
tttattatttcattctcttccttatgtctccttaccaatnntctctaaagtgtaacaaagtaatgaatttgtacccaattagaaaaatatgaattttacaatttcagttaaaataaaaaaatagcattattatccatttgaacctttgaactaattcattatcactagaataatttaccttaaaatgctagaaaaaaaagtcttggtgatcttttggaatcgttccccatgtaagccaaggctgaccaaattgtagcctaatggacaaagtgaaaagccttgctgcaaccttagatggatgaaacctaaatataaaaataattaatcaaaatggtaaaatatcatgtgatgtattatatttaatgaataatatat

SEQ ID NO: 16675 - DNA, 358 bp, Glycine max
tgcatgccagcttgagtttttcaaatgggtttaccatttttctatatccaatatcgcccttctcctcctttatccatctcgcctcttcatctatccccatctacccgtgaagtggaaagcctttcaccgttgtgagaggcttaaccccattgtttgaagcctaatggcccaactctcctaatgtaatacttccctattatctatttaatgcaaatatggcctttattgttcttttttgggctatattggagctgattgggggttgaacacccatactcatgcattgtttatgaagtaatgcaatggaaaatggttattttctaaaaaactgggaaatggcatctaaatgaaatcatgc

SEQ ID NO: 16676 - DNA, 284 bp, Glycine max
tgacatgaggaagtgctgaaggtgttaaacttcttgcttttagtgctgaccacagagtggtgcctggagatatgtcgcgggggtcaagataccttggggacgtcacgtggggtgctattgcccaaaaccaagcttgaccagtcccgacccaacccgggcatagtctggcagtgagaacctgtgatgtacctaatcaggcgagctcctggcagtcaacacataaaatgaacataaaccacacagcaaggaagcttggggtggctggccagctgggaaacctgatt

SEQ ID NO: 16677 - DNA, 334 bp, Glycine max
  unsure (1)..(334): unsure at all n locations
tgttgaaattgccatgcttggattagttanacatacccattctgttttagggtttttgtgatgatgtttgtgatgtttatatgctgaaatttcttatggaaaactgttagaggtgaagggtagagttaacctacggttagaaagtaagaatgtgatgttatgagtggaaaaagagtgaggctttgagggttggaaggttaagtctgaattttgtggtaaatggaggttaaagtgagttaatactagcttgaaatgtcatttaagacttgggaaaaagcttggactgtgctatagagaaaaactatgatcaaagtgaataaagagccctttctag

SEQ ID NO: 16678 - DNA, 351 bp, Glycine max
agcttcaaacatgaaattggattaatactgcatgtggttgcaattctttttttaaaactccataggatcctaaaccctttttcattattatttggttaatttttatggaaacaataaatggaatatataaatatttatacattcgctataaagaaagaaaaaaaaaggtggtgcgcgcgtttggaacatacaaaaagaaagtgtttgatatgccatgggatcaacaatgcatccaacaaagagtaaacaagaattagacgcaaatcacattgtctcagataacttacgcaatccgtgtagaacttgagaataccaaagaaaaagataaaaccaaaatcaagaatctaaact

SEQ ID NO: 16679 - DNA, 191 bp, Glycine max
  unsure (1)..(191): unsure at all n locations
cttggaattatgaagatgtctctactcttggctattcatagacaatagatttggtccatgataataatggattaatatgaaggaaagatattgntagatatgaaatcattcattaacattcaagcaacggcttacattggtgcattattttgaaggtcttgtgtgcttaacttaaatatttttcataaact

SEQ ID NO: 16680 - DNA, 357 bp, Glycine max
agcttaggcaccttataacctcttgacaactcaaattgtaaaatataatcagggaaggcagaaacaaagtaaagtggttatgcatttcctacttcgaagccatgcctattcaaagcatgttcaattatttgattgatctgaggattttgaattgctttgaggcttaaacctctatttggaccattttgtccttgaagcatttgattttgttacatattagctaagacttcatctatattttgatttctattaactaaaataggatttggttgttctctatcattcattatccaagttgggatattaatatcactttcaggattattattattaataggtccctcttgtataggtatt

SEQ ID NO: 16681 - DNA, 348 bp, Glycine max
agctttctggtgtacctgaagatgctattaggctcagcctgttttcattttctttatttggggaggccaagagatggttgcattcattcaagggcaacggtttaaagacttgggatgaagttgttgagaagtttctaaaaaaatatttcctatagtctaaaactgcatagcgaaaagctataatttcttcattccatcagtttcccgatgaatctttgagtgaggcattagaaagattttgtagcttgctgcggaaaactcccactcatggtttttcagagcctataaagctgaacatcttcattgatgggttatggccgcagtcaaagtatttactcgatgcttctg

SEQ ID NO: 16682 - DNA, 348 bp, Glycine max
agcttcttatccaaggctcatcttggtggtgaagctccttcttccatggcttattccttaatggatggcgcctcctctcacctcctttcctttgtcttccgctgcatctccatggtggaaaatcaccattaaaggaccctattgaagctcaaagatccagcctccatagaagccccacaagcaagctttcatcacttatggtataattgagatcaaaagtgagtccacaaataatagctcaaggtcaatggacaccggctgaaaccattcctcacaaatccctccttattggatgtagtggtggaggagacctccttacttcacccttcttctcttccgccatgactt

SEQ ID NO: 16683 - DNA, 365 bp, Glycine max
agctttgaaggtgcgtagcccattattttccatagtagaatactggtaatgtgtctactatcattgtcatcgttttttcgtcattgaggcgccacttgagctgccaggttctccacctttgggcatattctttgaaagatccgtgcccccttttttgcacatatttggtagttgcatcctatccgaagccattataccgacactgcctaacgaaggcaaccattatgtcctcccaggaatggactcgggaaggttccaagttagtgtaccagataacaactaccccagtaagactttcttggaaggaatgtatcaacaattcctcatcttttgcgtatgcccccatgttccgacaatacatcttt

SEQ ID NO: 16684 - DNA, 343 bp, Glycine max
  unsure (1)..(343): unsure at all n locations
ttctcataagtcctaaatgacatttcaggctatgattaactcactntaacctccatttaccacagaatccagatttaaccttccaactctcaaaggctcactctttttccactcataacaccacattctcactttctaaacctaggttaactctacccttcatctctaacagtttccataagcaatttcagcatataaacatcacaagcatcatcacaaaaaccctaaaacagaatgggtatgtctaactcatccaaacatggcaaggtcaacatgctttcaacaagagtcttcacaaataactatcacgaagcagaaaactaacaaaactacccatcatatc

SEQ ID NO: 16685 - DNA, 363 bp, Glycine max
agcttatccctcttaagattattgttgccacaatgtctaacatataaatcttgtgtttgtcttcttcttccctacactctttaatttctgctgtgtacttttaattcccgcttttacttttgcttaagtttctgtttctgttccttactttcttaacttagtagtaaaagcctaattaaatctagtaacattaagaaggataagttttttaattagtcaaggaaaattaataattaattcaacccccccttcttaattattccgaggccacttgatccaacaagttttagaaaagtcaggcagagctagaataggggcgttgatgagcttttcttttagcaaagtgaaggcttgctcttgtct

SEQ ID NO: 16686 - DNA, 389 bp, Glycine max
ttggagtttccaagtgccaattcgtcttcttctttagtcctttcctcttctggcttcaattcatcagtgggctttccttctgtgtccagcatcttgggatgttcccagcctttgatgacagctttccaggttctgctatccagtgatttgaggaaggccaccatccttgctttccagtattcatagttggttccatccagaattggtggtctgttcactggtcctccttctttctccatgttcatcaaaatttatctccctaggtctcactcagtgatttcgagtgcccgctctgataccaattgaaattctgataccaatgccagatgtcgtacaggatgtcacgacatcacgcttcagaacatgcagaatatctctgagtgtatgaa

SEQ ID NO: 16687 - DNA, 351 bp, Glycine max
agcttgtctcagcgtttatgcgatatatagaccaacatgttagctatcatcgccaagtaccaagaagagttaggtctagccacggcccacgagcatagaatcacggatgagtatgctcaagtgtatgcggaaaaagaggctagaagaagggtgatcgactctttacaccaagaggcaaccatgtggatggatcggtttgctcttaccttgaacgggagtcaagaacttccccgattgttagcccaggccaaggcgatggcagacacctacttccccccccaagagattcatgggcttctcggctattgttagcatatgatagacttaaaggcccacataattagaaatctg

SEQ ID NO: 16688 - DNA, 366 bp, Glycine max
tctacagaaggtttgttcctaatttctctactcttgcctcacctcatcctactaagaggaaatgcaagcttagtcccagaggtgatggacctttttaggtcttggagatgatcaataacaatacatataggttggacctctcagaagagcttggagtcaacaccacttttaacatttctgatataatttccttttgtatgtggagctgatactaacgaggaggaaccaacagatttgaagtcaaatcctcttcaagggggaggcgatgatgcaattctacctacgaaaggaccaatcactaaagcaatgatctaaacgatctaaaatgattgggctaaactgctgaagagggccctaggtctcatg

SEQ ID NO: 16689 - DNA, 365 bp, Glycine max
agcttgtccgcaaaaaaatcactattaaggattttaagattcgatacctcagtttttctcaccaagtaaaaatggatcattttaaggtccaacgccttaaaaggaccaccttccaagtaaaaaaatcgcttgattcgcccttttgaaagaactacgtaggagcaagagccccgcttttgtcgacctcaaaaataaaaaagaaataaagtttagatacataatttcacacaattctaatctaaggctgttgtcctttgggataaacgtgagaggtgctaataccttcctcaaacgtaaatacaactcccgaatctggaatattcttcatgaccggtttctttcggtttttccgatgttttccacaa

SEQ ID NO: 16690 - DNA, 379 bp, Glycine max
  unsure (1)..(379): unsure at all n locations
ttacaaaaatagtttgagaaaaaccttaaaattccattttttccaacatgcaactaaaacattcaaagctttacaaagtccatactaatgtctacctaaggtgtaaatgggatgggtaaaggtgtgtatagcccatgaggcatcaccctaaacttggcttgtaaacaagccacacacatagtgcaatgcttatggacacttttcttcatatggggccaataaaacttttctttgagtaagacaagggtcttgtctatcccaaagtggcccatgagcccacccttatggctctctntcacaagtaatttcctaatggatcctttgggtatgcaaaactttccctctttgaacaaatacccctcagccaaataaaatcatc

SEQ ID NO: 16691 - DNA, 363 bp, Glycine max
agcttaacacaaagaaggcatatgaagaaccccaaaggcgcgcttaccgcgaatcccgcacttaccgcgcgatcactgtcatactcgctaagcccagaaggcccgcttaacaagatgttacgtgaattttaagataccttatgcccataaaatgagtaggaagcaaatgaaaaagatacacggagactcaaagctctttaattaataccttcaaagcgtgagcatctcaaataggggaaaccctccatctttagtcattctctctttctcttttattatccatccctcttcttattctatccacatcagcccctaaagtgtaaagcatctcatggtaatgagaggctgaacccccattaaata

SEQ ID NO: 16692 - DNA, 270 bp, Glycine max
tgcaatatatttgcaaccttttcgatgccatttaacgttatcaatggaccggaaacaacatcgcgtgttactaaattcctcatgtaaggccctgcatgatcccacaaatatcgcgcttcttatatccctctcctcttaaaaaatgaacctgctgacaaaaaaaatatttaagtatttttacccctttaatactatccttcccattggatagtaccagaaatctttattgaactcacgcaatttgacacaaaaagacactgtcattctcat

SEQ ID NO: 16693 - DNA, 354 bp, Glycine max
  unsure (1)..(354): unsure at all n locations
agcttttaacttattctatgttcccgnggtggtccacattttgtttcatgtatttttattctcttgtccatttgctttttatacccctttttgacatgcttaagccatttatttaagtcatttctcgcttaatctaaaaataaaataaatttccactgatcgtttaaattatatcatccgttaattttggttaaaatgaattccgaccgttcggtcgttccgtaaccacgttggaaataaaaaaagaggtaaaataataatataataatcaaaaaataccttttagtaaaataaaagcgaaagatcaatcggacgttttctctttgggatttctcattcttaattgaattgact

SEQ ID NO: 16694 - DNA, 343 bp, Glycine max
tgcatgatttacatctccccctttctcaagcttattcttcttgatatcatcaaaatcttcatgatcccgactcgttggtggaggatgcatgaatgacaatcaattcatggggctccgaataaaagtggataatggaggatatgcgaagagcgctaggcaatcaattcgcggttctcccgactcgttggtggaggatgaatgaatgacaatcaactcctggggctccgaataaaagtggaaaatggaggatacgagaatagcgctaggcaatcaattcgcggggctgcagactcgatggtggaggatgcaagaatgacaatcaacttatagggctacgaataaa

SEQ ID NO: 16695 - DNA, 346 bp, Glycine max
agctacaataattacattcacttctacacacaaaataagggagtgaaggagtcatgcgttcacacattatgaaagacacactcatccaagatatatatatggtccaaaaggttcttgcaacactaatccacgcatcaaaggagaaataagctaactaacaacatacacacaggatgatagaggttcgctaacacattatcaatcaatatcaagactacttgcatcacccaatggcttgccataatgtccaaccgcacttcgcaaattatagagatggtcagtctcataactcatgactcaacaatgaatttatggtatagcatacattatagatgcaaggcacata

SEQ ID NO: 16696 - DNA, 361 bp, Glycine max
tgaggaatgcaaggctagggtttatggttattgaagaccaagaaccgcgtatatatatagtttgaaaaattctgtggaaacccaattcccagagaaagtgactgtcaatggatggagggcatacccatgagatatcacatggggttgccttcggtccaactatgaaggataagttgtgaagacttgcgtaaccccaccttatcatacattaattggccagcgtaaaacctccacatgtaaccaaatgatacgtgcctcagtgaaacgtaacgcctattcgagcattatttggtattccatatttttgtaaacatgctctgggcatgttctggaaggtaatttctggctgatgaattataat

SEQ ID NO: 16697 - DNA, 315 bp, Glycine max
agcttcaccgtgttgacgccgattgaacatttcctaaccgacgtcatgcaaatatcgttcagggattgaattgaaaactcgttaggcgacatctgtcgtgaagtagcgaccgatatttttcagccgacattgtacaattttttttagaaaagctcgctggtcgataatggcctttatacggcagagtaagttttcttgttttggtgtggcataaaaaatgtacaatgtacttccgctaggtttttcgtgcgagttcaaccgactttttgtttcagacaggaaaacatttagcccacctctgcaaaaaatatattt

SEQ ID NO: 16698 - DNA, 325 bp, Glycine max
tctatataagctgagccatgttatcaataaactctagttgagttatattcagaagattagagtttatctctcttatcttagagagagtgattctcctaaattcttgagtgattcaagaacaccttggctgtatcaaaggactttcacaacctttgtgtgttgccgtcgctggaaagagtgattctttccttcctttcatcatcacccttgttctttcagaccacaattccagataatccacctctgcccagaattatctcgtggccataacttccattttacgcactcaaattaagtgattcttgagcctaaattgaatttcaaa

SEQ ID NO: 16699 - DNA, 353 bp, Glycine max
cagcctgtacattttttaggcattttcatattctgacgaactaaagatgacgaagttccttacaaaggagaaataaagggctcctcccgcattagacaataggaaagatttacaaatgttatcatcaccagtctaagatataagattcaaactattcatagccttattgaaagaaccagcatttaacaaagataaatagtttatgagatgcacttatacaaaattattttcacgaaaaattcaagatttgttgaaattcagatgtcaccaatttcatcattgatctggatgaactccccaatcccagaatgttcatattagtaggtaggaaacctaatgcaatattgatatac

SEQ ID NO: 16700 - DNA, 349 bp, Glycine max
cctgctagcatgcaagctctggagttttcaagtgccatattcgtcctcttctttagaccagtcttcttctggcttcaattcatcagtgggctttccttctgtgtccagcatcttgggatgttcccagcctttgatgacagctttccaggttctgctatccagtgatttgaggaaggccaccattcttgctttccagtattcatagttgcttccatcaaaaattggtggtctgttcactgagcctccttctttctccatgttcatcagaatttatctccccagatcttactctgtgatttcgagtgttggctctgataccaattgaaattctgataccaggggacagatg

SEQ ID NO: 16701 - DNA, 360 bp, Glycine max
tgtcatttcatctccgctctttgtttagtggtatctgagcaaatcagccaacttggacctgttctgactatcctcgtggatacccaacttcaaattcttcgaaaaagcatcataaaacttgttgtaatcttccttgttctccgcaatttcattgaacatctcaatgcacttcttcacgagattcttcctgatcaccttcaggatcttgttttggtgcagcatctcacgaaagatgttgagcggcaagtcatcggagtcaacaacacctttcacaaatccaaggtactcaggaatgagctcctcacaattgtccattataaacacccttctgacataaagcttgatgttgatcatcttctt

SEQ ID NO: 16702 - DNA, 302 bp, Glycine max
agcttgggaggattgatggggacccggtgttgagagaaacgaggatatgggctacgtgggagtacgtgagctcagatggaggtgggcaataggggatggtgggtttatgcgcgctttgtgtatgtgaaaaacttgttgtgcaccattgcccgaccgccacctagtaccacatgtgatgggtaccccataatcctacaagcttgagatgaggaagtgttgaaaggtggaactttctgcttttattgttgaccacatagtggtacctggagatatgttcgcggggtcaggagacctttgggata

SEQ ID NO: 16703 - DNA, 204 bp, Glycine max
tgaagcccagctcgtccaggcgagcaaggttgttgcttctggaggaatcttctggagggcccaagtgggcctggttgctattagcacccccctttttactaaatgcaccccccttctattttttgtaattatttttcccgaacgttacgaaacttttggaaatttcgtaacgaaacttaatttcctttcccaagggtaccaaat

SEQ ID NO: 16704 - DNA, 364 bp, Glycine max
agcttcaacattcaatttcgagcgtctagatatattacaggactcaatcaaacatccgagtaaaatgttactgtcgtttaaatttgcttggctctccagcattaaatttcgagcgtctcgatatattacgggactatatcagacatccgagtaaaaagttgttgtcgtttgaatttgcttagagattcaacattcatcttcgagtgtctcgttatattacggggctcaattagacatccgagtaaaaagttattgtcgttggaattggctttgagcttcaatattcaattacgagggtctcgatatattacgggactcaatcagacatccgagtaaaaagttattgtcgtttgaattttctcat

SEQ ID NO: 16705 - DNA, 392 bp, Glycine max
ttgagccacttcaaacgacattaactttttactcggatgtctgattgagtcccttaatatattgagacgcttgaaattttatgttgaagctcttagccaattcaaacgacaataactttttactcggatgtccgattcagtgacgtaatatatcgggacactcgaaattgaatgttgaaactttgagccaattcaaacgatgtctgattgagtcccgaaatgtatcaagacgctcgaaattgaatgttgatgctttgagcaaattcaaaagacaaaagctttttactaggatgtttgattgagtcccgtaatatatccagccgctccaaattgaatgttgaagctttgagcaaattcaaacgacaatatttttttactcggatgtctgattg

SEQ ID NO: 16706 - DNA, 355 bp, Glycine max
agcttgatatgaggaagtgtttttggtgaaacttcctgcttttattgttgaccacagagtggtacttggagatatgtcgcgggggtcaggagaccttggggacgtcaggtggggtgctattgcccaaaaccaagcttgaccaatcctgacccaacccgggcatagtcggtcagtgagaacctgtgatgtacctaagcaggcgagctcctggcagtcaacagataaaaggaacaaagaccacaaagcaaggaggcttgtggtggctggccagctgtgaaacttgattgatatgtgagatatggtctctggtaatcgattaccaagggtgggtaatcgattacaaggcttaaaaatg

SEQ ID NO: 16707 - DNA, 333 bp, Glycine max
  unsure (1)..(333): unsure at all n locations
ttgaaaagtgatgtttctcaccttctcgctaatccaatctgctggcttaacgactgtccgcaaagcacaacactcatgggctaagcgtgaagaagactctagaanaagatgagttgtacaagttcgctaagcacaccacttcatctcacaaagcgcaccgcttccgttcatctgctaagcgagaaaggcacgcgctaagccaacattcactaatgtgcgctaagcgggccaaaagtgcgctaagcacatgagcacgaacaaggccacctatttaagcctgaaattagattttaaaaagggagtttggactgggattcagaggtttgcatgtct

SEQ ID NO: 16708 - DNA, 362 bp, Glycine max
agcttataaaatttagcattggtcagcacttgtagtttagcagttaacatattacatgtcatatacgttatttgttattttaaaacttagtgcaatgaagtactttcgaaggtaaggagaatggacatccacctcaatggattgaaccaaaggtatgtcgttattcccgtattgaatgaaatttcaaataaataccatgtgttacctacaaatgacaaagcttaattgggtattttcatattgcacgtagagtcatgtacaagccggagggtatgagtgtggatattatgtcatgcattggatgtggtgcatagtcagcgacggactgaagaatgaatggaacactgtatgcatactattaa

SEQ ID NO: 16709 - DNA, 373 bp, Glycine max
ttgtactctggattcacacgatcaacaattttatcaatatccgtgagatatcgaggcagaacaattggattaacaacaaaccgctgcagtttgtgcgatttgattactggtttgacatgttgttgctagtgtagatagttggaatcgtcgagtttctcggcgatagaggttggaaatgaatgcgacgaaaaactctgtgaagcggaagccatggaagttgaagaaggatatggaaaattcgaagagaataacttctacgaaaaattggctctatataccattttatactgagtgaaaagaaatagagaaagataaatgtagagaaaagaaactgatattattgaatctgaaagttatttacagagttagttac

SEQ ID NO: 16710 - DNA, 358 bp, Glycine max
  unsure (1)..(358): unsure at all n locations
agcttctttaatgagggtatgtttgtgttcttgtgtaagaagntggtgaagacacgggagcagttggctatcaattacatgctgaaaaaacgtgactttcattagaattgtattagattgagagttggtaaaatatacacagtttttttagaacgcaaaagaaaaaagacaaggggccaaaaaaattattttctcttaattgtcaacatgcttgttgataccaatatgttctacaacttctataatgacaaaatatataaataattcgtctcctagatccacagttataccttgcccttataatataaaaaatcacgaccaacatgatttcacaagaatcagaagataataattcaat

SEQ ID NO: 16711 - DNA, 349 bp, Glycine max
tattatttacgtccagtgcatagtgccatattttaaagatttatgaactataaccctcttttaaaaaagaaaaaaaatgtattcaattttcttcaaatttgtccaggaaatcattgattactaatgttgaaattaattgaacaaaagtattgtccttactatgaaccctcccttacattaacacggtcctagcaattactcgtaaatgtcctcctatatttaaagacatagggtaaaatactcaagactaattttcaagttcaaaagttaaagtcataatccaccaatttaaagaaaacatgaagctcaatgtactattgaaatttatgacctgaattttcaagcccta

SEQ ID NO: 16712 - DNA, 377 bp, Glycine max
ttaagtcacctgcagcatgcaagctttgtggaatctacaagctttgacaaaattgaatctttaagtgacgtgacgaggaatccatggggtatctcactataagtaaggggagtgtattataaaatataccattttaacaccataattagggttagggaacctttctatgaagatatctgcctgtccttgtgcatgctgatttttcttcaaaaaaaattacgttttaactaatgggatgcgatatatatattgtgatgaatgatattgttttggctgtttgaaagctgttcgtgaggaaaagataattgtgcgtttgtttgaattgttgttgatgttgctattgaagaatttattgatatgtgatgataatgatgatt

SEQ ID NO: 16713 - DNA, 173 bp, Glycine max
  unsure (1)..(173): unsure at all n locations
ttcacacggaggtctgattcangcacatcatatatcgagactctcaaaattgaacaatggaagctctcgatatattaaaaattgtcataaactttcactcgaatggccccattcagggcccatcagatatcgagacgctcgaatttgaacaacggaacccctcgagaaattca

SEQ ID NO: 16714 - DNA, 343 bp, Glycine max
tacctcgacaccaacatcggctattgcaacgttttggcttcaactgggagtgaaaaagatgagtcatgacgtggagaggaataccagaactgcgactgagaggaagaaacattactgacgtgactgacttagagtgtgaagcccacaagactttagaaaattgaagtcattaacatctattttctcaaaaaaccgaaaaaccgatgttaatgatgtgttggttatgctaacatcaatttttttataaaaacttgatgtaacttatcatttaccaacatcggtctttattttggcaaaccgatgttaggaagtgctgtaacattcacatcgattttcgattttt

SEQ ID NO: 16715 - DNA, 345 bp, Glycine max
agcttttagagttcttaaatgggctcaaagtacaaatactttcacatgtataaagacatgattgattcttttctcacttttttgtttaagaacctgttttataaagttttgagaattgtttccactactcaccaatcaatttctcatccaaaatttatatagttatgagaattgtttccaaagcatgtgtttctaaaaccaaaattcttaaacattgagagatgttttctcattctcttctgtattattcaaatactcttattcaagtactcaagcatggttgaccaacatgtacagtaccatcttctattaccaccttatattgtttaattttagaatacaaag

SEQ ID NO: 16716 - DNA, 297 bp, Glycine max
tcagctgatcattccctctttctctgtttcaatgataagtcatttactgcacttttggtgtatgttgatgatataattctaacagggaatgatataatggctatcaatcgtattaccatatttatggaccaaaccttcaagattaaagatcttggcactttaaaatttttccttggcatggaggttgctcgttcccagcaggcatccatctatgtcaaagaaatatggtctagatattctctctgattctggaatgcttgcttgccgtccagcttaacacctatggattggactact

SEQ ID NO: 16717 - DNA, 344 bp, Glycine max
agcttcccagctatggagagcttaatcctcagttggttcttcctacgtgatacttgatgtaaatactcttatatctatctaatgatgttgcatctgttctctgtgctatcagtccttcattttagtatgcttttgccttgatcacgtagatgtatgcttagttagggtcattcaacattgggaaatggtttgatccttacaacctgataggacggggctagtttatcgtattttcacgaaggatcaaggtaccgtaacctagttgttggtatgtatgtcttaatgcaattccggtcaagtttaatccaacaagagggatctgaggacgacacttgattatgatt

SEQ ID NO: 16718 - DNA, 354 bp, Glycine max
attaaaacgtttttaaactgtgggtaatcaataaccatatatgtgtaatcgattacacagggcaaactttgaattcaaatttcaacaacctgttgtaaataagtttggccactggtaatcgataacatcctctggtaatcaattaccagagagtaaatttgttgaaaaatactttttaacttaaaattcttggccaaaccttctgctacttcaattgaaattcccttcctatttaatatacccctttctaagactctagagaactgcttgaacatgcatcttgaatatctttaattcctttggcttgaataaagctttgagacgcatgtgaaactttggcatcatcaaaacatt

SEQ ID NO: 16719 - DNA, 353 bp, Glycine max
agctttttacatctttgggtttttccaagctcgaggtgacaggaaaaaggggaaaacactatgcatttcctaggtttttctatttgatctctttaaagtaaatgatcatcacccattgtgttagttgagtatttacaatactaattattcatgggttgtgagaaaaagagttagaaactaagtattatagattattgtgattttctcaaaaccctaggtttgctaaaattggggattttgtctgatcccttgttctattatttaaatgtttaggtcctatggaaaatatagtggttaaccttcccaacaacagtggaaaacgttgattgcgttgtttaagtgagtagctaata

SEQ ID NO: 16720 - DNA, 355 bp, Glycine max
tattattccttttcaaagaagctattgaatttcacattcttgggggaaccacttgatttaaaccatgtacacttttgttttactaaataaaataattaaacttgaatttggggtgtttatcgcttttattttggaaacggacctttcgtaccctaaatattaatatttttttagtttaaaattaaagttaaaaaaatgtttaaaaaaggttaataactattatacctgggaagttccttttcaggattgattacagggataatatactcattggatagtttgagtttgaatttgaattcaatctccttaacaaatgtgtggtttgagattttaaattaaaaaagtgattataaat

SEQ ID NO: 16721 - DNA, 339 bp, Glycine max
agcttcaaaccacagcaacacataatctatgtgtccaaaacccctcaatttaatggattttctatgcttgagaagtgaaatttataatgaggtaaatttgaagcaaactctcacctcacacaagtccataacatcaatctaaacttgctcaaactggatttacacctaaaattccaccgaatcaaaatttgacttctcaacacccaattttgccctagaaatggctctttgttcactttggtcatttgtttttctctctagcacagtccaagctttctcccaagtcctaaatgacatttcaagctagtattaactcactttaacctccatttaccacag

SEQ ID NO: 16722 - DNA, 374 bp, Glycine max
tctatataagctgaaccattttatcaataaacacaagttgagttttattcagaaaattagagtttatctcttttatcttagtgagagagattctcctaaattcttgagtgattcaagaacaccctggctgtatcaaaggactttcacaacctttgtgtgttgccctcgctggaaagagtgattctttccttccaatcatctccacccttgttctttcaaaccacaatttcagaaaatccacctctgcccaaaattatctcgcgaccataactcccattttacacacttcaattaagtgattcttgagcctgaattgaatttcacaaccagacctttcacctccttttggaatcacctcatttggaaccctgtag

SEQ ID NO: 16723 - DNA, 351 bp, Glycine max
agctttatacaattaatataagacctatatcctaatgtcacatcctatcagagcgttgtgttcccgtgtcctctagcatgaggttcttcatagtcatccacctattcatctgctcccccgaacacaagttcaagatcatcacaggatccaaacacaacaacatacagggagtgagttatcacattcctagctaatagagaaacaagacaattaaatatacatagtatataaatgagataccacttgcttaaacatagctcacgtaacttcaccactccctcattcaaaattcacttttcaatcatcaatcacattacacaagaatcccacactcctatcaagatataataa

SEQ ID NO: 16724 - DNA, 361 bp, Glycine max
tatacccatgagtattatttttatgatcctcataactgggagattgagaaacatagacttcctcttcaatgtattcttttaaaaaagcactcttcacatccatttggtacagtttaaaatccataatacaatcaaatgcaagcaataatctcacaacttctaatctagctattggagcataagtttcaccaaaatctatgtgctcttgttggttataaccttttgctactagccttgatttattcctagttatcaagccatgttcatctagcatatttttgaaaacccattttataccctataatatttggcttactaggcataaagtagtagttcccaaacttcatttcttttaaattga

SEQ ID NO: 16725 - DNA, 349 bp, Glycine max
agcttacctgtcagagcatatggggggactctaatgtctcatgggatagtgttccctcagttcacacttctgggggattactatgcttatggaatatttctgtttttgaagtagacagcagggtgaaaggcagcaacttcctaatgcttgcaggtagatggataaagcatgatcagaggatatacattgttaatatatatgctccttgtgacctacaggggaagagagctttgtgggaagagttgaggcagctaagaatctctcacactgatggtctttggtgtttccttggggactttaatagcattagaagccaggaagaaagaatatgcacataaagaatgggaaa

SEQ ID NO: 16726 - DNA, 362 bp, Glycine max
  unsure (1)..(362): unsure at all n locations
tcttgagatgcctttcagtaatctcactagatgttttggtaaaatccactatctcactagatacatagacattgaagtagtcaatgaatctagaggcaagcacaaaataaagaaattcatagtccactaatcgatgactctataacataatatcttcaatcaaaagtacccaattcatcttgataccagactttagaccatatacaatctgcagatcatcattagttacccgagcgtgattacttgacctcnaaatgagaatgtaggtaatgaggtacacaagcattctgtcctctacagtcagaccacctactcttgggtgattcctcaaattccttgttgggtaaaaagccatcccctat

SEQ ID NO: 16727 - DNA, 355 bp, Glycine max
agctttgaatctccatacatggtttgcacatgtcgtgtgatgcaatcctaccacgcaagggcattggatagaagactccaagtagattgggctagagatgcaagagaaggccctaaggttctcatgagccttagggcagatttcgggcctatgggctaagtatgagcccacttatcttagtacatattagattaaggtttcattattttttgggccttgtatttagggctccataatgtaggtaaggtaccctagaaatgtaggatttttcaaccattgtattttagggcacctagactagtttttgtattaggggtagttttataatttcatatgcattaagtgaatatttgat

SEQ ID NO: 16728 - DNA, 274 bp, Glycine max
  unsure (1)..(274): unsure at all n locations
ntgaactttcgtatccttctggactttagctttcattccaatcagtttattttggaaaatattcatttatttttaattaatttctaacatttttagatattacttattntaattaaaacttcctagttaagttcttggaaatgtatattacaagtgtatgtaaatcaataaattgatgacattatttcacctaatcattcatttcacattccaatttatatatgtaactgcatttgaatattaaaaactaataatttaatgatttataataatt

SEQ ID NO: 16729 - DNA, 363 bp, Glycine max
  unsure (1)..(363): unsure at all n locations
agcttctatataagctgaaccattttatcaatatacacaagttgagttttattcagaaaattagagtctatctcttttatcttagtgagagtgattctcctaaattcttgagtgattcaagaacaccttggctgtatcaaaggactttctcaacctttgtgtgttgccctcgctggaaagagtgattctttccttcctttcatcatcacccttgttctttcaaaccacaattccagaaaatccacctctgcccagaattatctcgtggccataactcccattntatgcactcaaattaagtgattcttgagcctaaattgaaacttcaaacgagacctttcacctcgttttgggatcacctca

SEQ ID NO: 16730 - DNA, 335 bp, Glycine max
  unsure (1)..(335): unsure at all n locations
tgcctcanagaggtccatgaaggataatgcggtcaagggactagttccgctcctgagtatgacagtcaccgctttatgagcgctgtacaccagtagcgcttcgaagccatcaaaggaatgtcctttccactggagcgacccgtccaactcatggacgacgagtatactgatttccacgaggagatatggcaccggcggtggacatcactggttacccccatggccaagttcgatccagaaatagtccttgagttttatgccaatgcttggcccacaaaagagggcgtgcgtgacatgaagtcctgagtaaggggtcaatggatcccgtttgatgc

SEQ ID NO: 16731 - DNA, 362 bp, Glycine max
  unsure (1)..(362): unsure at all n locations
agcttatggtaagacctgngacctaaccatggcggaggcctccacggaggccattgcctccctcgcccaacattatgaccagcctttgaggtgcttcacctttagggacttccaattaacacccacggtcgaagagtttgaagagatcctgggatgccctctgggaggaaggaaaccgtatcttttctcaggattcttgttggatcgagtggcctcagaataattaagaagggggggggggttgaattaattattactagacctttactaattaaaaatttacccttcttaggcttttactatattggtaagaaaataaagaatagaaaagaaacttaaccaaaagtaaaaggggaattaaa

SEQ ID NO: 16732 - DNA, 247 bp, Glycine max
atcttttcataaattatttgtgtattgattacatggttttgtaatcgattaccagtgacaagttttgaataaaaaaccaagagatgtaactctttcaatggttttcaggtttttctaaagctataactcttccaatggtttttcttgaccaaacatgatgagtctataaaagcagaccttgacttgaaattcaataaacttatatatatacttttacatcctttgaaatctctttgaacatcttttt

SEQ ID NO: 16733 - DNA, 364 bp, Glycine max
agcttccttaagaagattcctaaagaagctagagcttagctacacatacctctctaatagctaagctcacctccttgagatgagaagctagaacttagctacacaccccctataatagctaagctcacccccatgacaaaaaatatgaaaatacaaaaaaaaaagtccttcctacaaagactactcaaaatgccccaaaatacagggctaaaaccctatactactagaatggccaaaatacaaggcccaaacgaaggaaaaccctattctaatatttacaaagataagcgggcttatacttagcccgtgggctcgaaatctacccaatgcccttgcgggataggattgcataagataatacagc

SEQ ID NO: 16734 - DNA, 302 bp, Glycine max
  unsure (1)..(302): unsure at all n locations
ttgttctttttataaaatgagaagttctgaactcatcacgttatctaaaacaaaccttggggtggatccaagtgcttcaatcattcatttgcatattcatgttttggtggcatactcacctttgtttatttctttaggattttcatcataactaagaaaacaccaaggcacccctataacactcgatccagaaaaatggataatgaagagggcgtgcaggaacagatgaaggccgatctatcggccttaaaagatcaaatggctntcatctcggaggtcatgttaaaactccagaaaactat

SEQ ID NO: 16735 - DNA, 367 bp, Glycine max
agcttgccacctagctcgtcgagctggttgcttcctgatgaagtttcttgagtgcacccccaaattgattagttcaccaccatttttgtttccctcaaattgatcatggaaacgttacggaagtacctcggccttgattttttccttctttcttcttctcctcacgaattttaagtgatttctgagtttctcaagtgttgaacccctaaaactcatccccctcacgccattatataagaaaatgggggaggtagttgttgcccaccacgcctagggttgctttcacctgaagcaatcccttttctagaatattccagatgggcccagatgctatgtacaccccccagtttgattagtgcaccctcat

SEQ ID NO: 16736 - DNA, 377 bp, Glycine max
ttgcggatttggtcttcgctggcgaaatgatctaagtgggtctgaaaagaggcaaatctgatcatcatgctttgataaatgataaaactggggaaaatgaagagggtgagaataaaggagaaataaccaatgcccaaaaccaaaaaggaattttgtagcaaaaagcctgtaggattcaccccaaatttcggtgtcctatgctaacttgctccattatctacttgatactgcaatggtagccataacccctgctaggtttcctcaacctccattttttttagaatacgacttcaacgcaatgtgcacttatcatggaggagccccgaggcattccattgagcattgtatgaccctgaagtgtaaggtgcaaagtctaa

SEQ ID NO: 16737 - DNA, 358 bp, Glycine max
agcttccatcattactgatgcttctattaaaaatctagaagtttaggttagacaactagcaaaatggttatttgaacatggaagtggatctttctcagcaaccacacagatcaacccaaaggaactttgtaattaattacaacaaggtgggggactatggatggtttgaaggataaagatgaaaaaaagaacatagaaagagtttaaaaagaaaacgagaaaaatgaagtggtgactagcgaaaaaaagtggaagaaaaagtggtaagtgaagaagggaagaagagatcaaatgaacaaactactaataaaggtaaagctatagtaaaccatccaccaattgagcatcttctttatcc

SEQ ID NO: 16738 - DNA, 286 bp, Glycine max
tcaacatcagaccactttcagtgtgctggaactacatcacatggatttgatggggcctatgcaggttgaaagccttggaggaaagaggtatgcctatgttggtgtggatgatttctccagatatacctgggtcaactttatcagagagaaatcagacacctctgctactgtcaagcacttccacatctttggaagtccatgttacattttggcagatagagagcaaaggagaaagaaggatcccaagagtgatgcacgaatattcatgggatactcttcaaacagc

SEQ ID NO: 16739 - DNA, 341 bp, Glycine max
agcttgtggtgttataatacatttgcttttcatccagcattttattacgtaacaaggaatttttttataattaaagtaaaacatataatgctaaattattttttagttaagatatccaaatatacaaaaaatatattagttattcaaaagtaagtatgatatgattgtcatattttggctttttattagtttatttttctcatctaaacacaacattagttttttttttttaaaagcccgttagttctatttaggatgcaaataacaagatcagacaaataaagtaagttgaaggaagatatatagaggatgggattggaatagttgagaaattttgaaag

SEQ ID NO: 16740 - DNA, 206 bp, Glycine max
tccaataaggataatgcgttcgaagggactagttccgctcctgagtatgacagacaccgctttaagagcgctgtgcacctatatcgcttcgaggccatcaagggatggtcgtttcgacggtagcgaccctttcaactcatggactacgagtatactgatttccaagaggagatatggcaccggcagtggacatatctggttacccc

SEQ ID NO: 16741 - DNA, 351 bp, Glycine max
agctttgagcttattcaaccgactataaccttttactcggatgtctgattgagtcccgtaatatatagagaagctcgaaattgaatgttgaacctctgatccaattcaaaggacaataactttttactcggatgtctgattgagttccgtcatatatcgagacgctcgaacttgaatgttgaagctctgagcaaattcaaacgacaataaatttttactcggatgtccgattcagtgacgtaatatatcgagacgctcaaaattgaatgttgaacctatgagccaattcaaacgacaataactttttactcggatgtctgattgagttccgtcatatatcgagacgctcga

SEQ ID NO: 16742 - DNA, 339 bp, Glycine max
taaacattcaatttcgagcgtctcgatatattacgggactcaatcaaacatacgagaaagaagttattgtcgtttgaatttgctctgatcgtcaacattcaatttctagcatctcgatatattacgagactcaatccgaaatccgagtaaaaagttattgccgtttgaattggctctgacggtcaaaattcaatttccagcgtctcggtatattacgggactcaatcagacatctgagtaaaaagttattggcgtcgaattggctccgtaggttaacatttaatttcgagcgtctcgattattacgggactcaatcagacatccgagtaaaaagttttt

SEQ ID NO: 16743 - DNA, 353 bp, Glycine max
agcttctatataagctgaacctttttatcaataaacacaagttgagttttattcagaaaattagagtttatctcttttatcttagggagagtgattctcctaaattcttgagtgattcaagaacacctggctgtatcaaaggactttcacaacctttgtgtgttgccctcaccggaaagagtgattctttccttcctttcatcttcaaccttgctctttcaaaccacaattccaaaaaatccacttctacccagaattatctcgtggccataactcccattttacgcactcaaattaagtgattcttgagcctaaattgaatttcaagacgaaacctttcacctcgttttgga

SEQ ID NO: 16744 - DNA, 225 bp, Glycine max
tggcaagaccacaacatggatgtgcatcactttttctatggtagacaggttgtctaaggcgagcctgaattatgtctattcaaggactggaatatcctatgggataggtccctgggtttaaccattttgaactttttgaccgattgacaacaccattcggataccatgttcattttactccaaatgaacatatgatatacacgtctgtcatttaaatacaaatgt

SEQ ID NO: 16745 - DNA, 359 bp, Glycine max
agcttgcctaattaacctgaaattgagagaaaatgattattaaacacacaaaatgaaaatactaagtatttataacctatacttaacagaaaatacttatagcattacaaaataaccataaattgggagagtttgatacaatttatacaagttttatacacataagttagtcgttttcaccgactaacaactcccctaaatttacagttttgcttgtcctcaaacaaaaagagaacaactcacttgtcctcaagtgacaatgacatgcagtgactatgtacaaaggtgtatgctacaaagctactgattgcatgataagagaatggagtaaaatgccctcatcacttgtttttcacaag

SEQ ID NO: 16746 - DNA, 345 bp, Glycine max
tgagaaaagatacgatttccttcctcccagtgggcatcccaggatctcttcaaacttttccaccgtgggtgttaactggaagtcccccaaggtgaagcacctcaaaggctggtcataatattgaacaagggatgcaatggcctccgtggagacctccgccatagttaggtcccagatcttaccataagttttgcggaaagcttgtcgttggagttgacccatcaactgtcataactctttcaaactaacgattcctaggctcttaatcttgacctgatagaatctccttttaagccaaggcatttgactcgatcccatttttttactaaaaagtgaaaacatgtg

SEQ ID NO: 16747 - DNA, 350 bp, Glycine max
  unsure (1)..(350): unsure at all n locations
agcttaagcagttaggttgttatgtgaagtgatatgaatgactttattacatctctaacaaacaatgaaacatggacaatcatgcttgaggtgttggaatgtcnaacgtgtttctaagactgaaacttcctcaaccccagtaacctattcgtgttaaaataaaaaagaaaaaaaaaacttgatgaaagaaggcagacaccataaaaccacaaacaagaaagtacgggaatttgagtgttaaaactagatacctcgccagaagtttggaaaatccaacagatgcgtccattcaaaaaatcaagaaaatgtatttttcccatgtaacatccaacaacaacctagagaaatgc

SEQ ID NO: 16748 - DNA, 362 bp, Glycine max
  unsure (1)..(362): unsure at all n locations
taatcaaatggagattatgaaggagcacttcttaccatacgacactgaccataaaattattaaataatgatcatttcaataattaaaacaaaaaaactagcttaccaatgacttgacatgaactaaaatttttgaatttctacaataatattgtgtctcaggaacacgtctacattattgatcacggtgaagctagcaaccctcgttcagtagaaactaatgtagcatgtttttttttgtggtttggtctttacttgtctacttcagttgtcaggaatcaacaaggcaccagaaattggtgcaatttggcaagctatcctttttntaaagcacaagaaatatgcatttcaaacgtagagatc

SEQ ID NO: 16749 - DNA, 350 bp, Glycine max
agcttgtgtggctctatccatatttgaagcagagtatatcgctgctggtggttgttgtgctcatatcttttggatgaaacaacaactagaagattttggtatcttccttgatcacattcctttgatatgtgacaacacaagtgcaataaacttgaccaaaaatcttgtcatgcattctagaactaagcctataaaaataagacatcatttcattagatatcatgtgcttaaaggagattgtgttatagtatttgtagatacaaccaaccaactagttgacatctttacaaaacccttgtctagggatagatttataaaataggacatcatttcattatatatcatgtgct

SEQ ID NO: 16750 - DNA, 364 bp, Glycine max
  unsure (1)..(364): unsure at all n locations
ctaagctggttggttaaccaaactttagcaatataaaaagtttatgttacacgggactgaagtgtcccaaattgcaaactgataaaagacaagaaattttgtttgcaggtacttactccttcgtactccctccaaggaagcttccccatgaacatttctataattgtacaacccaaactccaaatatcaacaacaaaagcaaggtcaaagctgttatctttttgcacaaccgcttgaaaaagctacatgtatgtggaataagtgtttatagagaatgcatgagacatcatgaagtaaaatagagttataaacttagggtgctcanggttttggtgaagccaatttttggtgtctgtgccaacta

SEQ ID NO: 16751 - DNA, 366 bp, Glycine max
agcttgtcaagctgtctctctcctatttgtatatatatatgttatttgaatgaaataaaactaagcaactgagggaaaagtttctctcctcacatattcaaactttaagtgtatgcatagatctcctacaggtaatttagttcctctagacttggaaattgaagccacgttaagaaagaacaaagccgaaaggagaaggaaattgttgcaagacaggatagtagcatccattttagacgaagaagttcaatcttgtgattcagcatcatggagattattatttctattccacaaataaattgtgatttgtgtcgaagagagcattacaaggacaattgttatctctattccacgaataattctggg

SEQ ID NO: 16752 - DNA, 328 bp, Glycine max
tgccgctggagctgccccattaactgccctatctcttttagactggtgattcctaggctcttgaccttgacttgatagaacctctttttaagcgaaggtgtttgacttgatcccatgttttactaaagtgaaacaaaatcgctgcgaatcaaaactccgacatctatcatgggtggaatggatgaatgcatgaagaaatgcatatgatacagatgcaatttatgaatacgggagcccgggaaattgtctccttcttagatacaacgtcttggggtagcacagtgcccgacatatgtatttaagaaggtgacacggaccctccattggt

SEQ ID NO: 16753 - DNA, 349 bp, Glycine max
agcttgctctaaatttacattgatgtttgtatttatgggaggaggttgtatgccattttttaagagtagtgtcccactggtaaaactaactttccaaatgtttgccttcgcaggaaatggccccgaggaagcttgcctcaaagaggtccaggaaggacaaggcagccgaaggaactagttccgctccggagtatgacagtcaccgctttaggagcgctgtacaccagcagcgcttcgaggccatcaagggatggtcgtttctccgggagcgacgcgttcagctcagggacgacgagtatactgatttccaagaagaaatagggtgccggcggtgggcatcactggttac

SEQ ID NO: 16754 - DNA, 344 bp, Glycine max
  unsure (1)..(344): unsure at all n locations
ttggagtttccaagtgccaattcgtcttcttctttagtccagtcttcttctggcttcaattcatcagtgggctttccttctgtgtccagcatcttgggatgttcccagcctttgatgacagctntccaggttctgctatccagtgatttgaggaaggccaccatccttgctttccagtattcatagttggttccatctaagattggtggtctgttcactggtcctccttctttctccatgttcatcagaatttatctccctagatctcactctgtgatttcgaatgttggctctgataccaaatgaaattctgataccaggggacagatgtcgtacccgatgtc

SEQ ID NO: 16755 - DNA, 355 bp, Glycine max
agctttgagccaaaatcctgacttaccataaactttgacctatggtgagaatgccaatccttaccctcgaaagcaaaaaaaaagaagagaaggaaaatttccaatcaaaggaaaaaggagaaggagaatttccaatcaaagaggaagcaaaaaaaggagagaaggaaaatttccaatcaaaggaaaaaagagaggaaaggaaattcccaatcaaagagtgggagatagcataaagaaaagaaagataattcccaatcaaagaatgggagaaagaaaaaaagagaagcaaataagaagatagctcctggtcaaagataccataagaaatgtgccgagaggtccttggaccggacaa

SEQ ID NO: 16756 - DNA, 316 bp, Glycine max
attatgaaatctcttctttggtaatcgatttttcatatcataattcaaataagttcatgcctttatgtcaccaattcaaaatttcaaaatgccatcttcatggtactctttggtaatcgattaccaactcaaaaatatcttacttctgaactgattaaactctgataaatgcattttgataaaagaatttgaagcccaaatattgcaaataaaaatgagattctgttaacaatttgactaagcccttatctgtgattttcttgatcttgtgtgttgacttgaaacaatctgcgcttttattcagtaaattcttttg

SEQ ID NO: 16757 - DNA, 360 bp, Glycine max
agcttatgcatggaaaatgtaattatgaaattgttatgcccgaagaaacaccatttcctagttaaccatgcattaggtaccatgttcaattattttgtttttaagtgaaacgggtttatgatcccaacatggttggctcgtggtgcctaacacatgaaactaagaatgtagtgtgaagtttcacgcttcccccttttttgtttttgttttgtagaggaaaacgcaaggatgagcaaacatgaaaacaaatggtatgcaattttgcagatcaaaaagtttgttgaacgcatatgcatgatgatgccatgactcatgcaaaatgtgaggctggaatatgataacggaaaaatgcaggatatg

SEQ ID NO: 16758 - DNA, 286 bp, Glycine max
tgagcacctcttttcttacctcttccttcattgttgggtttatccgcctctgaggttgtcggactggcctgtaatcgtcttccatcattatcctgtgcatgcagtaagcagggctgattcccttgagattcgatatgttccatccaattacttccttgtgtttcttcagaatgtctaccaacttgttctcttcttctctcgcaagtgcatggctgattactacagttttagtgtcatcttcctctaggaacacatacttcagatgattgggcaatatcttcaactc

SEQ ID NO: 16759 - DNA, 429 bp, Glycine max
  unsure (1)..(429): unsure at all n locations
atgnnacgattgagccttagttgacaccttggatcgcacacagtggacctgtaggcatgccagcttgactacatgcgaatatgttatacaggatttttgcaaacggtgaaggaagatgaagcaaggacactaccaatcaccaatttaaagggctccacaagagcccaaaatgtgcgaagataaatataaataaacgatatatatatatatatatatatatatatatatatatatatatatatatatatatacatatatataatacttctacttctaatttttttcttattccacacgccacatattatattttctctcctctcttttctatttctctcaataggcattgtataaaatttattacccaccactctttttcctattttttgtataaaaaaaactctcgggctcttatactagtgttttttt

SEQ ID NO: 16760 - DNA, 324 bp, Glycine max
ttctacagggcgaaagcctagccttaagaacttttagtttctttattggatactctgaacactctatgggcgagggtgtttatgatcccacacttaagactatattttagatgggaacgcctcatttttttgaggatgttgagtttggtgggaataaagttagaaacattatttgtacgaagaattggttagaattcctaaaccaattcatattactgcttctgacaatgcatagattattggcataccctaatttcattcgggaactattgcttgatggaatgcaacctttgattgaccggttcagggaacttgcaccctttg

SEQ ID NO: 16761 - DNA, 353 bp, Glycine max
agcttgtaggattatggggtactcatcacatgtggcactaggtggcggtcgggcgatggtgcacaacaagtttttttccacatccacaaatcgcgcataaacccaccatcccctgttgcccacctccaactgagctcacgtactcccacgtagcccatatcctcgtttctctcaacaccgggtccccatcaatcctctcaagcttccccaacatccaagtaaaacaacattccaacagcacaaactatcacagccaagaaaacagagcaaaggcagaaaactctgccaaaacaccaaccaaaatcacagcttttctcacttaaagaccccagtaacaatttctttgatccaat

SEQ ID NO: 16762 - DNA, 311 bp, Glycine max
ttgaacaatatacttggcctttatttaactgtctttgggcttggcggccacgctcaacaaagtactttcgacacctactgtacgttgatttcaccaatgctgttatgggaatgttgcaacaatcctttaaaaccttattgatacattctgagaggttcgttgtcatgttttcgtatcgacgtccttctctatcgtaagccatcgtccatttttcctttgagatgcgatcaatccatgttgctatggctggactcaattcacgaaattgttctaaattttgatcaaaaatgtgcttgcatggagtgtaggct

SEQ ID NO: 16763 - DNA, 355 bp, Glycine max
agcttcttgttgttactatgatttttcaatatttcttccctccctctttcatctggtaatccaacagtgacctattggaacaattacaaattgtcatgtcttataattttgttgaatttttagtaactactaactagcttaaaagtcatacctaccaactgattgatcgatcgtgcaaaaagttttatactactagcatattataataaaattcattgtcttatacgttaaaatttgtttatttttatagtaattactttaaaagctatatttataataaattctgatgggttaatgatttacaatagcaatgcatggaaattaaactgataaataataattatataggcattaa

SEQ ID NO: 16764 - DNA, 206 bp, Glycine max
tgcagtgtgtatttgccgctcacagcattcctatgaagccctatttactgggcaaactcccttggacagttacatatcctaatgaatgctgttatcagtgatccagcttcataacagattgcctttataagttttaaattgcaattgtggactaaatgacacgtttagtgttaataaaaattgtggacaaaatgacatacttacaa

SEQ ID NO: 16765 - DNA, 354 bp, Glycine max
agcttcttatctcaaggctcatcttggtggtgaagcttcttcttccatggcttattccctagtggatggcgcctcctctcacctcttctcctttgtcttccgctgcatctccatggtggaaaaccaccattaaaggacctcattgaaactcaaagatccagcctccatagaagccccacaagcaagcttccatcaagtggtaatcagagcacaagagcttcaagtaggtgctccttaaacctccattaattttttttgctttaccttctcttccatttttgtttcttcatttttctgcatgtatctcctcacatgtcttgtgataaatgttgttaacatgattctttaaagttt

SEQ ID NO: 16766 - DNA, 369 bp, Glycine max
tcatgctaagcatagtgtcgctttcactattgtaacgagggcgtcgtgtgagataaaaatgattatgcttgtgtccggattagaagtaaaaaataaagtcaagtaaataataaatgaataaaacaactatgtcaattgtgaaatgaagaggcaaggattaaaatattagaataaatgaattgaaaaagttattatgtttctttgttagaagggaaatggaataatgaatgaaagggttttgtttgtgtttctggtgagatggggtggcagagaaagaaaaaaaaaaaaagtgaagtgtaaacgtaaatgaaaataaaaaaactgttggagtttgataccttggctaaaaatttttaaatatgaatgaaa

SEQ ID NO: 16767 - DNA, 356 bp, Glycine max
agcttgtccaatgctttcccatattaacctttctgatgtcgcacataagacggagtcaccccgtaaaaaaccggccaaaccaagcgacccttcttcattatgcactcaaggatcatgacaagctcttcaagacagtaagttgaggaagcatagttttcagagaaaacaacaatggcaattcttgactgctgaattgccttgaaaagagcatgtctaatctcttcccctcttctgagcccctcatcatccatgaaggtgtggattccctggtcacaaagagacttgtaaaggcttccagtgaaaccacttcgagtatcatcgcctctgaaactgaggaacacatcataagtccactc

SEQ ID NO: 16768 - DNA, 216 bp, Glycine max
tggcaggcgcgatctacagaatttatggccgtttatagggggggaacagtctcggacctccctttgaattgcgtgacatcctccgccggaatcctcgactgaattttcgccactgaatcttatggtattatgaaacaagctaaaaccacctctatgcggatatgaatacgaacatccttttatggaaatctgtggtttaacatttttatctccaca

SEQ ID NO: 16769 - DNA, 350 bp, Glycine max
agcttgtgtttttctcacagatttgacatgcatgatgccctttcacactgtatccacttaaatttccatatgctggaaaatcattaatagtacaaaacaccattgtgcgtaacctgaacgtctgctgcacatttgcatcccacacatctaccccttcttcccacaattgtttcaagtcttcgattaatggcgtaagatacacatcaatatcattccctggctgccttggacccgcgatcatcatacacaagataatgtatttacgcaaaatgcacaaccatgggggaaggttgtaaatcatcagtaaaacaggccacgaactgtggttgctgcttaagctaccataagga

SEQ ID NO: 16770 - DNA, 360 bp, Glycine max
  unsure (1)..(360): unsure at all n locations
tgtaactcttggcaatttctttaaaactagtcacttaaaaagttatgactttagaaggaatcttcagaaacaagtcacttgaagaattgtgacttttggaaatgtatttttcgaaatcagtcactggtaatcgattaccattaaggtgtaatcgattacacatcaacagatgtgactcttcattttgaattttgaaaatcttaacgttttaaaacactggtaatcgattacatgattatggtaatcgattacagctttgtaaatcagtttgaaaaaaaatgttggctactggtaatcgattactacctttctgtaatcgataccanaaaagtaaactctttggtaaaagatttgtgaaac

SEQ ID NO: 16771 - DNA, 339 bp, Glycine max
  unsure (1)..(339): unsure at all n locations
agctttgagggtgcgtatcccaccatcttttcatagtttagtaccgntaatgtgtctaccatcacgattatcgtctccctttttgcacatgttctgtagttgcatcctatccggaaccatatcagaatagtactgatactgcctaacgaaggcaaccattaggtccttccaagtatggactcgagaaggttccaagttagtgtaccaggtaacagctaccccaataagactttcttggaagaaatgtattagcagttcctcatctttgcgtatgcccttatcttccgacaatacatctttggatggttcttggggcaaagantccccttgtacttgtca

SEQ ID NO: 16772 - DNA, 205 bp, Glycine max
tcaagaaaaagatggcctcagcaaattccttatttccagaagggaattctatcaatagacctccaatctttaatggagagggttaccactactggaaaacccgaatgcaaatttttattgaggcaatagatctaaatatctgggaagccatagaaatagggccttatatacccaccataatagaaagagtttcaatagatggtag

SEQ ID NO: 16773 - DNA, 349 bp, Glycine max
agcttgaccaatcccgacccattctgggcatagtcggtcagtgagaacctgtgatgtacctaagcaggcgagctcctggcagtcaacagataaaaggaacaaagaccacaaagcaaggaggcttgtggtggctagccagctgtgaaacttgattgatatgtgagatatggtctctggtaatcgattaccaagggtgggtaatcgattacaaggcttaaaaatgaagacaagaggctaagatgttctcttgtaatcgattaccacggggtgtaagcgattaccaggcttgaaaacgaggtcaggaagctagggaagcctctggtaatcgattaccaaggggtgtaatcga

SEQ ID NO: 16774 - DNA, 362 bp, Glycine max
  unsure (1)..(362): unsure at all n locations
tctcagcggttatgcgagacattttccaacatgttagctatcatcgccaagtacgaagaagagttatgtctagccacggcccacgagcatagaatcgtgggtgagtatgctcaagtatatgccgaaaaagaggctagaagaagggtgatcgactctttacaccgaaaaggcaccatgtggatggatcgggttgctctttccttaaacaggagtcaagaactttccccgatggttaccaaagccaagcgatggcagacacctacttcacccccaagagattacnggcttctcgggttttgcagcatttgataacttaatggccacattataaaatcgtaggaaattgatgtctcttaaccttg

SEQ ID NO: 16775 - DNA, 358 bp, Glycine max
agctttagcttctttaggaatcttcttaaggaagcttctcaaggaggtgagcttatttatgagaggggtgtgtgtagctaagctctagcttctcaaggaagttttctcaaagaagcttctcaaggaagttttctcaagaaagcttctcaaggaagctacctagtctataaatagaagcatgtgtaacacttgttgtaactttgatgaatgagagtcttgtgagacacaactcaaagttcaacttctctccctttttcttccttcaatttcgtgctcccccctctctctttctctccctctttcttttcctccattgaagcatcctctctaagcttcttatccaaggctcatcttggtg

SEQ ID NO: 16776 - DNA, 321 bp, Glycine max
tcttagtttcagatgatgcagatgggtttgtttctacctcatgcactcctctaatgactatggcatcatttctggcgctaaactgctgggagttggaagccatcttctcaattaaatttctggcttcagcaagagtcatgtctccaagggctccaccactggcagcatctatcatacttctctccatattacagagtccttcataaaaatattggagaagaagctattctgaaatctgatggtgggggcaactggcacatagtctcttaaatctctcccagtactcatacaagctctcttcactaagttgtctaatacctg

SEQ ID NO: 16777 - DNA, 361 bp, Glycine max
agcttgcatagatgttttcatttgtttggcaccttccatcttgaacttctttagaagttctttagtatattttggttgttgattatatacacctatgttgtcttacttgatctaaaaccccataaagaacttaagttctcctatcatgctcatttcaaactcacttttcattagttaagagaaatccttgctcatagattcattagtagctccaaagataatatcatctacacaaatttgaactatgatgaaattctttccaacttctctcttaaaaagagttatattcatgaggtgcctattcagaccatacataacctttttcagtttaaaaacatggtctagaagggtgtgtcttcaa

SEQ ID NO: 16778 - DNA, 316 bp, Glycine max
tcaatggaggaaaagaatgagagagagagaggtggggcacttaattgaaagagaataagagggagagaagttgaactttgaagtgtgtctcacaagtatcacattcatcaaagttataacaagtgttacatatgcttttatttatagcctaggtcactaactaaatgaaagcttcattgagaagcttcttcgagaagctagagtttagctacacaccctctttaatagctaaactcatctccttgagaaacttccttgaaaagctaaagcttaacttcacacacccctttaatagctaagctcaccccatgcccaa

SEQ ID NO: 16779 - DNA, 364 bp, Glycine max
agcttgtggctggctgtcgagacttagacagactatggcattggcgacacaatttgaagctcactgtggagtaaaggaggtatgaccaagcttgtggctgcattcagaggtttccagaatatgtcaagagaagctgatcgaacgtacgtatgctagtagcaacgaaagtgaaaaatcgtgaattaaaatatgataatttcaacgacggtgatgggtataaaccgtagtagtcttgttacaaacaaacacggttcttataaaatcgcctttgtagcattcacatcaaaggcgattttataaaaaccgtcaaacaccttcataaagttgattaaaatttcaaatatatcacaaaatcgatgtatat

SEQ ID NO: 16780 - DNA, 322 bp, Glycine max
tgaaagaaatctcaagaaccggtggttgcttatggactggatgtacgcacgggttgttgccgaaccagtataaaattcttgtgttgttcttcttcgtccatacactttttaatttccgttgtgtactttacttttatgctttacttttggttaaggtacatgacttaatttttaagcctaattgaatcctattacattaaaaaggattatctttacttattcaaggttacttaataattaaattaacccccctattcccaattaatttcagggccctttatcccacccattgaccctgagcatctgcccgttatgtcttctt

SEQ ID NO: 16781 - DNA, 363 bp, Glycine max
agcttgtagaggtatgtctcgcttcggtttaatctattagagccttctcgtagtcgattacacagttttttctgagagaatgactgatttattcaggagtctttcctttaatcgattaccatatgatataattgattacttctctttctataattagttcagaagtgaacaagaatactttaatcgattactttgagtatctaattgattacattgttcttgagttgtttccaggtgtttagaaggacactttaatccattaaaaagataatctaatcgattactttgttgaattaatcgattatcttgtagatttaatcaattacaggcaggtataaatgttttctctataaatagccagct

SEQ ID NO: 16782 - DNA, 309 bp, Glycine max
  unsure (1)..(309): unsure at all n locations
ttgctgatttagttntcacttacgaaaggatcttagtgggtctaaaaagaggcaaatttaatcatcgtgcttggacgaatgagaaaaactggggcaaatgaagagggtgagaatgaggtagaaacccatgctgtgactgccattcctatacagccaagcttcccaccaacccaacaatgtcattactcagccaataacaacccatcttcttacccaccacccaattatccacaaaggccatccttaaatcaaaccaccaaaaccacctaccacacaaccaatactaaacatcacttttagcacgaaccg

SEQ ID NO: 16783 - DNA, 345 bp, Glycine max
cagcttttatagagatttgatcttttagcctcactaaagtccctcaatggtgattctcagccatggtgtcgcagcggatgataaaggagaataatagagaggaggcgccatctactagggaataagccatggaaggagaaacttctcctccaagagagtgccttggataaaaagcttagagaggaatcttctatggaggaagagattgagggagacagacagagagaaagcggcttggataattgtaggaagaaaaagagagaagttgaactttgaagagggtgtcacaaaactcttattcgatagagtgctgacaggtgggacccatgtgcctatttatagcct

SEQ ID NO: 16784 - DNA, 437 bp, Glycine max
  unsure (1)..(437): unsure at all n locations
tggaggtgggnatgaccgttgatncttggnancntccagcgactctgtgacactctagaactctccagcgtgtgcgagtgtctttttccattttgtatactctgatttccaccctcccagatgctgtaatatataagagaagcgcccccctgagtgagcacacctttggcgcttgttattttcctctactcttaaaaatataacctgtttacaaaaccaatatttatattactgccccccttttcttctcatccttccattttgcctaacccttcacctttacctaaaactttcaataaaccttgtactcgcaattggtcgagtactaacatcccaaaataaatgacaattggccacgttcgttccactggagcgcttccaaactataactgaatcgttttgaatatgaccctccactcactgggattcccagagag

SEQ ID NO: 16785 - DNA, 353 bp, Glycine max
agcttctacttatgtggcagggttggcttccttcactttcttgtctccaacgcgagctttgaccaccgctcttccttcccgcgatgcttctcttcatatccgcctgagtgggcttatagcctaaaccatacttcccacgatttcctttggcatttatcaggctagttatgccgccgttgtctttgcctaaacccattttgggttcgtaaccattccccaacaaaactcgggccatcattactgctgcatcggacaggcaagcttgcccagagaaggagtccacggaggaaatgcttaccacctcaaaagactggaaagcagtttctaatgactcctctgcggcctccacataa

SEQ ID NO: 16786 - DNA, 375 bp, Glycine max
tgacttataaccaatatttttttttctaccaagccactactggctataaagaatcaacaagattttttgaaattttgcacaccgactaaaccatgtgaacatcttatagatggatatatcactcaatagttttggtcttttctctcaaggtatacaaggtgtcttgagagctttgtatctttacaagaatttacagaaagatttacaagaaagaatgaaaaaatgattcatgtcttggttcttcaatgcttcttctatatatagatttcatctccaagtattcattatctcttaatggttgaattctttactttgttcttcgtctgaggccttgaagtttgtgaggcatttagtgcttgcataaatgcatgtaca

SEQ ID NO: 16787 - DNA, 339 bp, Glycine max
gcttgagatgatgaagtgctgttggtgaaacttcctgcttttattggtgaccacagagtggtacctggaaatatgttgcgggggtcaagagaccttggggacgtcaggtggggtgctattgcccaaaaccaagcttgaccaatcccgacccaacccgggcatagtcggtcagtgagaacctgtgatgtacctaaacaggcgaactcctggcagtcaacagattaaaggaacaaagaccacaaagcaaggaggctcgtggtggctggccagctgtgaattttgtgtgatatgtggattatggcctctggtaatcgattaccaagggtgggtaatcgatta

SEQ ID NO: 16788 - DNA, 355 bp, Glycine max
  unsure (1)..(355): unsure at all n locations
tgccttgccccttgatatatttgagggactcatggtcactatgaatgacaaattccttgggataaaggtagtgttgccatgttttcaaagcccgtactaaggcatacaactccttatcataagttgaatagttaagggtaagaccacttaacttttcactaaaataagcaattggatggccttcttgcatcaacacagccccaatcccaacatttgaagcatcacactcaatttcaaaagatttttgaaagtttggcaacgcaagtatgggggcattagttagcttttgcttaagaacattganagcttcttcttgtttctctccccatttgaaaccaacatttttcttgagcac

SEQ ID NO: 16789 - DNA, 357 bp, Glycine max
  unsure (1)..(357): unsure at all n locations
agcttggtttgttgtacttacttgttgaagactgaagaacgatgaagaacgaatgaagaacgtcgaagaacggtcgaaaaccttcgcgaaatcactcatggaaacgttacggaagcgcctcggcttggattttcttcatggaaacaattntcctaagcaaattctaaagagagagaagtgcctgaggggccgaacccttttctacttcacttctccccctatttatagaaaattgggggagaagcttaccacccagctcgcccaggcgagcagggttgcttcctccaaaagcaacagccttctggaggaatcttctggagggcccaagtgggctggttgctatttgcacccccattt

SEQ ID NO: 16790 - DNA, 343 bp, Glycine max
  unsure (1)..(343): unsure at all n locations
agctttgctttttacaaagtgtgagtgggtgccacgtgtcaacttcctaaggccatcgttttttagttcctctctcctcagtcctaactgttactcttgcgggaaagaaaaagaagaagaacagattacaccatcaacaatcagcccacaattcagtacaaaagagggaagaaggtaagatcaatagtgggcggcgacagtcatggtggccagattcncgtctctaatggttgcagcgaaaagaggggtggggggaaagaagaaagggaccgagaagagagaaaaggagaaagaagaatatgaaggggcggaatgggtgggcggggaaaaaaagagggggaaa

SEQ ID NO: 16791 - DNA, 194 bp, Glycine max
tatgtgatctcaatacaatagcttatggctatttatggcacgcactggaaggatgcacgagcagcttcacttgtgctaaattattgtaaacgagtcaattcttgaaggatggcaatatacagactattgttgacagaccgatcgttgacatttttacacatacacggatcctctataattccaggggttaaatt

SEQ ID NO: 16792 - DNA, 349 bp, Glycine max
agctttttggagtagaaacatgttaccaactcattttatttcaaaaaggaagtcatatctagtcaaggtctgagagaccatacaagtttcctaacgatttctaattatgtgggccattaagtctatcatatgctgacaatagccgagaagcccatgaatctcttcgggggcggagtaggtgtctgccatcgccttggccttggctaacaatcggggaagttcttgactcccgttcaaggtaagggcaaaccgatccatccacatggttgcctcttggtgtaaagagtcgatcacccttcctctagcctctttttccgcgtatacttgggcatactcatccgcgattcta

SEQ ID NO: 16793 - DNA, 379 bp, Glycine max
tatacatgagtttatgataaggtgtggggatgatgatgcggttgattatgttgagaaggtggtcagcacccgaaatcgaacttttcaatccattctttgtacccttagtggtccccacttgttttgcatgcttttattttcatttcatttacttttcgtacccccttttgacgtgcttcagtcatttatttaagtcattttctcgcctaataaaaaataatataaatttccaccgatcattcatattataacatcctttaatttctgttaaaatgaattccgaccgttcggtcatgccgtaaccacgtttaataacaaaaaagaggcaaaataataatataataatcaaaaatatctttaataaaataaataaaaaaaa

SEQ ID NO: 16794 - DNA, 331 bp, Glycine max
  unsure (1)..(331): unsure at all n locations
ttattgacacacgatctgggacttgtaggaattgatctgagccagaatggatgggaagaactgtgatccatcgaaaataccgcacttaaagcagacatttttggcagagatatctgtgccactaaaaattggccaagtgctaaaaatgctgtgtggggtggctgtgaaagtctattgcaaaatgagctcatgctgtttgctattaaatccccaccgtcaaaacgtacgcctaggccctataaagttccagaataatgtttgtcttcctcctgccggtaaccaattggaattaatgatctgattctgggggcttcaacttacaaaactggcn

SEQ ID NO: 16795 - DNA, 358 bp, Glycine max
tgtagaatggctatacatgatacatgtcacgtcttggttcggctcaaaggtaaaaaggatgccccacattaattgcatgacacaaatgccacaatgattatttggatattttatgcaaaactggtcatgcatgcacctatgcggacactcaagtgtcaaattttatggtcatgtgatgctagggcttacgatttacttcctctatttaaatcaccccacgttatcaaaatatgttctttaacatttctgcatcatttgagtcatttctgccgttcggggaaattcacaacattccccttcaggtgtagacccgttttttttctcttcaaaaatgggcataacaatgaattttttttca

SEQ ID NO: 16796 - DNA, 320 bp, Glycine max
  unsure (1)..(320): unsure at all n locations
agctattttatgtttttangtgttttaggcagccaaacaactttgctcacaattgcttcaccagcacaattctattagaaaaactcacactacactacgtattacaattggttgaagcaccttccaaaagaggtttaatggctattgtttgtttgtctttatgagaccacatgccttttcatttcatcaattatgaaacttaatattgtgttgttccatgcaagtggatcaccaaacgtgaagatgtgtatcttgtcattaaagcatttgcagtaagtggggagtggatgaatgctgaagccaaatcctttgtcaaattc

SEQ ID NO: 16797 - DNA, 257 bp, Glycine max
tgggatggtcgatgttcaacgagtcttgttttgactggcttgtgcactaagcgagatgtcttcttcacgctaagtctttttaattatgtttttgcatcaatttcctttcaattcttcttcttttgaatccctgctatccgagaattacaattttcctttttctatttaaacccacagtaatttagaggaaatcaattcattctaatcactttttaactatcggataaactcaaattctgtccgtttcaatctacaac

SEQ ID NO: 16798 - DNA, 223 bp, Glycine max
  unsure (1)..(223): unsure at all n locations
agctttgagcaaattgaaatgacattatttttatacacggatgnccgggagagncccgtaatatatcgagacgctcaaaatttagatccgaagctctgaaaaaatcgaattgacaataacgttatacacggatgcccggtagagtcctgtaatatatcgagaccctgcaaaatgagaacggaagctcgtaggaaattcaaacgacaataactctttactcgga

SEQ ID NO: 16799 - DNA, 382 bp, Glycine max
ggatcctctatagacagtctgcctgcatgcatgctatataagtgcgggtctgggttacttaagtcaagtgttcgcgatatgtgaagatgatgttccaagtacttcggatttggtccgaccatgccctcctgatttccagctgggaaattggcgagtggaggaacgccccgacatttacgcaacaagcataatgtaaacctttacggtttaaaagctctatagttgggcctagggcttagagttttcattttgttaaggctttgtgtcttttggttttgaatttataatacaaggatctttcttcatctgttcctggtctctacccattctcattcatttgcatgtttacttctttttctgaaacggcagattcgatgacgag

SEQ ID NO: 16800 - DNA, 500 bp, Glycine max
  unsure (1)..(500): unsure at all n locations
gcgaacgaccccggacgnaggaacagtgtaacgagcagaaacaaaatactaagtagagcatagcgcgaaanannnnnnnnnnntaaccagctgtgacgccccggncannanaanganccgcaggcaagcaagcangcggggaggcggaggccgttaagtttcacccacaaaacggncagccccacgaacaggcnaccgaagcgccccgcccagaagaggaaagagccgcgcccggaggcggaaacgaggacancagggcccaagncgggcaggacccaccccgnccggcaccacacgccggacccggacgggcacgaaggaaacccacgcaccaagcgaacagcgcgcgccacaacgccccggaaaacaagagggaagccgccgagcgcgcaaccgggcaggcaacaccccgaacaagaaaagccccccagccccgccacccagccggaaacgggcgaaacaacccggcaggcacaaggccaagacgcaccgangccccc

SEQ ID NO: 16801 - DNA, 368 bp, Glycine max
agcttccacaacatccaagcaattttatttccaaacatcatgaactatccaaaaccaagaaaatagggcaaaggcagaaaactctgcccaaaacacattccaataccacagctttccttactcaaataccccagtaacattctctttgttccgattcgttcaccgttggatcgactcaaaacttttactggaggtccctagtacataagtctacattttgaccgttgggatctactagaaaacgtccagaaccccatatgtactaccctttccacaaccagcaatacacaagcattttctgcacaagagccaaattctgctgcacaaaatttgacagctttttgctacacaaattgggcagatttcga

SEQ ID NO: 16802 - DNA, 380 bp, Glycine max
  unsure (1)..(380): unsure at all n locations
agctttatcaacgtcttgaaaaaaaatcnatttctaccccatacatccttttgtgataaagcacgggcaccacaacgggccacaaaacaaggttaaatatatttttgctagttttcatgattggctatatccttcaaaaacaagaatgtaactcaaactcataatttgttcctttattcggcttgattataccaataaataagaaaaacatgtggattagtatacagaacagaatagaaagaaatagtaaacaagataagcatgctacaaacaaacagtatgcttgttctgccaaaagacatagcccatcaccttattttcccaatggagatgaagctttaccatccacaggagaaggagatagaacatagaactagtat

SEQ ID NO: 16803 - DNA, 265 bp, Glycine max
tgcatagcttgccgcccagctcgcctagtgatgctagctagtccaggcgagcaagttgcttccccagaacaacagccttctggagaaagatctggaagcccaagtgggccagattgctatttgcacccccctttttactaagcgcacccctttctatttttttggtaattctttttcccgaacgttatgaaactttacgaatttcgaaacgatacttatttttcttccgcaagggtacgaatccttacggattatctatgtactc

SEQ ID NO: 16804 - DNA, 251 bp, Glycine max
  unsure (1)..(251): unsure at all n locations
agctttattccatatattgtttattgngatcttactaaacctaatatttttatgtgaaaccgatcatgctgcttcgaattctccgagaatgaacatttataagtgacaagatgaacttgacacatttgntgatatatgatatatataatttcacatgttttataatattgaggtattccttcattcttatgcggnttgnttttacatttattcaaatatacattgtaattaaagtcaaatattcaatgatt

SEQ ID NO: 16805 - DNA, 157 bp, Glycine max
  unsure (1)..(157): unsure at all n locations
agcttgtgactgagggtggtttgataggattacaggtcaagtttgcattgatagactactagtagttattcattcattttctaagntacttctctttcatgtatatgtgaagaagaagagaaaaatattagtagattgcatttgttatttttttttt

SEQ ID NO: 16806 - DNA, 270 bp, Glycine max
agctttatgcaagtcaattttatgtggcatctcagagaggatctttttcgggcatatttgcgcaaaatctcttgaactaggaagatgctgtccatcatctttctgttcttaatgaaagcagtttgagtttccccaataatagtctcaagcaactggggctatgcggttggccagaattttagacacaatcttgtataacaaattacaacaagatatgggtctaaaatggttaacctaggaggtctgatcatgcttaagaataagcgccat

SEQ ID NO: 16807 - DNA, 222 bp, Glycine max
  unsure (1)..(222): unsure at all n locations
ctgcatgcatgcaagcttaggtaagagacctccaatancaactctaagctcgantttcacttcattttcttgctctattctcacttgcagtttcaaaaccttattttgcactcttgaaggttggaaacttcaataaaaaatccctcattcttccttctaaattttgtggagcctacaagaaggaagaagggtctctcccactcttgaaccatatgcttgttg

SEQ ID NO: 16808 - DNA, 259 bp, Glycine max
  unsure (1)..(259): unsure at all n locations
aagccgaccggcaggcatgcaagcttctgataataggacttagatgataaattcttcagattgtcggcgagcgctggaggcagtttaaatctgactcgactaggaaatgggcacttgcagtcgacaaggacggtgcggacgacatngtctgtgaaaaaaatggcattagcaaggagaaatggactcagttntgtcagacccgcagagacccctcatgggaggtatgcactttgccattctaggtggtttccacaacaaa

SEQ ID NO: 16809 - DNA, 366 bp, Glycine max
  unsure (1)..(366): unsure at all n locations
agcttcccttgcaacatctttttttttcgtatataaattaaaacaccttatatttataaataaagagttttagaaaaatattgaaatttttataaataaataaggagaaataactntattaaaataatcattttgaaggaaaataaaaatgatattttatttatttatttgataggaaataaaatagagtatttgtttataaaataataaacaaataaaaatagagtaaataataggtttgagtatcctaactataaatagaggcatcttaggtcagttttcagactgacgatacttcctatgcctcctcttcctctcaatttcgttttcccttctcctcctcccaaaatcttttttttccgcata

SEQ ID NO: 16810 - DNA, 334 bp, Glycine max
  unsure (1)..(334): unsure at all n locations
agctttacaaaagtaggtcactctttttttgttaangntgaagcaacaatgacaaattttcttgcactgagaattacgctcgagtttctctcttttggaaagcttcaacttgacttcatggtgcctcatgatgacctcttaaagctccaaaaaagaatcgtgaaagggatctcactcttttagaagaagcaaaaaaaagtgacaactgtcaattgatggcaacttgctaagtcattttaaggaacttttcttatgagcattctgaaggtacatcataatggagattcttatgttagctgagaaaggatccaaactcaagtagatccttgtgatg

SEQ ID NO: 16811 - DNA, 240 bp, Glycine max
  unsure (1)..(240): unsure at all n locations
agcttgcagttgtgaacttgctaagnatcactataaaatgngcgtacttagcgagcctatcaataactacccaaataacggtgtggccgngtgagttgggaaatgggtagattggtaacaaagtccatgcagatgtcgtgtgaaaccttcttcggtgatggtaaaggctgtaacaacccgggcttcttagcaggtaggtatttgttttgtcggctattcaaccagaactgtcattatttt

SEQ ID NO: 16812 - DNA, 349 bp, Glycine max
  unsure (1)..(349): unsure at all n locations
gctnctgagagagngaccccctttttgtataggggggcaagcaagccaccattcttttttatgtacaagggtttgtttgaaggcatgggtctcattctccccttgactatattctattgggctccacttgagaacttgaacatggccccttcctaattccacctaaacagttgggccattgggaaagccctttacattttgcgcccattcttcaacatttagcctagtttgtcgactttcctgtatttcttctagatgaagttgactggcaacattggatgggtctccttgaacaacgtgtccaaaaagtatttgactttaactcaaaccgctttcaccacttcaagga

SEQ ID NO: 16813 - DNA, 361 bp, Glycine max
  unsure (1)..(361): unsure at all n locations
agcttccaaatctggagaangnttttaatgtatatcctaanggaanncnaaccatgcaacttctacaaaaagcatccgttgacaattgcaaatgccttacaagtgtggttcctgcatcaagaaccaaagatcttgtaaaacttgaaaatctagttgtgcaacactgaaggattgatatcaattgttgcagtgcagacccaaaaaaaacaaatcttgagcatacgttcccctgtctgaagtcattgatactatgtgatctgccaaggttaaagtattttttgcagtgtgacatgatgaagaccattgctttacagcttcatccttgctgcaagatctggacctgtgcctgcaaaaaattact

SEQ ID NO: 16814 - DNA, 165 bp, Glycine max
  unsure (1)..(165): unsure at all n locations
agttagttcttatcaagnattaattattcattcntnaaaacaannatgggagtattttcattcttatttttcggctgcttccatttaagaacatttgcattatttcgatagtggcattaataagagacatgagcatggccttggtgggctttttttttttttatg

SEQ ID NO: 16815 - DNA, 82 bp, Glycine max
  unsure (1)..(82): unsure at all n locations
agcttaagagagttcatcctttgagtttatacaaaaactngcgagaaagccaggagtggcttaataacaaaacaacacttgg

SEQ ID NO: 16816 - DNA, 173 bp, Glycine max
  unsure (1)..(173): unsure at all n locations
agcttgttccgagcccatattgaataagcattctcaaagacatgtctncctatgatattacctcatgagagcgacgccactgaccatggtgtgcaccgcttatcgtgtactcaggggcacttgacgaagtcctcactaacatggcaccacactgggtataagaaggaggccta

SEQ ID NO: 16817 - DNA, 371 bp, Glycine max
agcttgcaagtgaaatcgaattattcgatttaagtacgcaacacaaagaatagtttactctagaatcagaaagtatggtcaaaagagtattctatatgaaatatatctcaatacgagtcctcgaactatagagtatcaacattgctaagaacaagaaatcacgaacaaccatactatctatgcaattaaggcaaaacaccatactactaacatacctagaattataaggttcttataataagtatacaacgtacatataagaagtatgaatttaatagttaataaggatgtattaaagaatcacaaacttcaactactgcattcacgactacacacaaaataaagtgagttaagtagtcatgcgtttacac

SEQ ID NO: 16818 - DNA, 115 bp, Glycine max
  unsure (1)..(115): unsure at all n locations
gcttagttattggggataatttttccccaccccccccacccgacacagcccaannnataccaaaaaggacgccagaaggcaaccaaacaaccggaaaaacccgggggagaaaaaa

SEQ ID NO: 16819 - DNA, 370 bp, Glycine max
  unsure (1)..(370): unsure at all n locations
agcttgacaatagtcaaattttgtttgctcaagatattacatngatatgcgtatctctgagtataaataatgcatcaaggcttcacaaaagaataatgaatgattgatcaaaaagaccatactcaagttcaaagatagatgatcaatatgctctatgcaaccctttattttttattttcgtagtacaaagtatgttgatgcaaaaaatttaagtaataattaagaaaaaataccattgattagttaaaatcaattaaaagcatatcaccataaatttaacaatactcacctgaagtgataatctgacattgattgtatcatataattntactggttctaatttttttcccacaatttcttgtggcaacat

SEQ ID NO: 16820 - DNA, 356 bp, Glycine max
agcttcacatttctctccttaatttattctggccgagaatgttgtcagtgtatctattccaagctttcaaagattaaaatcgcctgatatcatactgagttgtgggcctaaaagcagtgctcttccttttcctggattccatctacaataaaaagaacccatcagtttattagaccagaagttatcaaaattgaaacagaaaataaaaattgaaattggcaacgtgcgcttagcgagacactgcttgcttagctcaccttagtaaaaacaacacactggcttagggcgacagggttatgcttaacctttcatgagaaaatatcttcctctgccttaatggcttagcgagatttgcc

SEQ ID NO: 16821 - DNA, 395 bp, Glycine max
gatccttaagcaccgcggctgcagctatacctacaaaaatatgttaattttttaggtagcttgcttgtggggcttctatggaggctggatctttgagcttcaatgaggtcctttaatggtgattttccaccatggagatgcagcggaagacaaaggagaagaggtgagaggaggcgccatccactagggaataagccatggaagaaggagcttcaccaccaagatgagccttggagaaaaagcttggaaggatgcttcaatggaggaaaagaaagagggagagaaagagagaggggggagcacgaaattgaaggaataaaagagggagagaagtggaactttgaagtatgtctcacaagactctcattcatcaaagttaccacaagtgttacaca

SEQ ID NO: 16822 - DNA, 274 bp, Glycine max
  unsure (1)..(274): unsure at all n locations
agcttgtgaggattgatggngacccgtagnttagagaaacgaggatatgggctacgtgggagtacgtgagctcagatggaggtgggcaacaagggatggtgggtttatgtgcgctttggggatgtggaaaactttgtgtgcgcccaatcccccaccgccacctaggaccacatgtgatgggtaccccataaccctacaatcctgagttgaagatttgtcattgcatcaactccctccttttatccttcacctcacttgcaccctttacttttcc

SEQ ID NO: 16823 - DNA, 371 bp, Glycine max
  unsure (1)..(371): unsure at all n locations
agctngaactattctgaactctaatcttttttttcattcncatagtcatgttcttcatcagtttgatgtagactctggtgtagctttattctgatgctggatgctctcttaatctagagcctttgatttgtcctataagtaaggcctttgttgtcacacaatcttccaagttcaagtactttgagggaagcactcttcatcacgcatatggggttcaagaattcttctaaggcttttatccttgacagtagttttgagataacctttccaagcttgttatgagcacctcaaaatgtatacacacatatgattcttaaagatgttataacttgaacaattaataagaatgttagtcatcgtatacaacccat

SEQ ID NO: 16824 - DNA, 322 bp, Glycine max
  unsure (1)..(322): unsure at all n locations
ctgcatgcatgcaagctntataagcgcgggttgggagatanatgtcaagtggncgcgatatacgaagatgatgttctaagtacattggatttggtaccgaccatgccctcctgatttccagctgggaaattggcgaggggaggaacgccccggcatttacgcaacgagcatgatgtaaacctttacggttttaaaagctctatagttgggcctaggctttagaagtttttccttttggtaaagctttgtgtcttttgtttttgaatatataatacaaagatctttcttcatctgttcctacgccactacccattctaattca

SEQ ID NO: 16825 - DNA, 263 bp, Glycine max
agtatggagatacttgcactatatagggctccaatatgaatttctgactgcaagatgaaaatgggatgttataatttgcaccttttcatttaatcattttactttttgcagattatcgcagagagcttatctgaagaagaaatagctggcttaaaagaaatgttcaagatgatagatgcagacaacagtggtcaaatcactttagaagaactttaaactgtgttgaaaagagtggctgcttatcttaaggagtctgaaatttt

SEQ ID NO: 16826 - DNA, 362 bp, Glycine max
agcttattgaaatcaaacaagaataattttatcctcacattatataataaataaatcatgagtcatcaaaacataaatcatttgtctaagtcacttgcatctagaagtcctaattttcttctaatggtgtagaaagaatctttggttagtggttttgtgaagatgtctgcaagttggtttttagtatctacaagttttaaaaatacagtcacctttttcctaagactaagtgctaattgactaccaacacttaccaagatgaggttttgttaacatagaaggttctatcatataaaaataattttattaggaatacaatataataattttgaaaagcataaaatttttttgatcaatcaatc

SEQ ID NO: 16827 - DNA, 370 bp, Glycine max
  unsure (1)..(370): unsure at all n locations
agcttgtaaatgtctctcaattcatttgttgtgaaaagaaagaaagnngagtggattgataaaaatattgaagatttcctaaaagtgtgcatcaaagaggtccgcgttagaaataaaccttatacccacttcaataagattggttaggaaaatattgcagaaaaattcaacaagacatcaaagttaaactatgaattcaaacagttcaaaaataggtgggataattttaaataagagtgacaattacagactaaacgtattgaaaatgatattgctattggttaggatgtagagaagaagattggctactaatgatatatggtgggaggccaaaatgcatatatgcatatgtgtagtatttctttttaaa

SEQ ID NO: 16828 - DNA, 224 bp, Glycine max
  unsure (1)..(224): unsure at all n locations
cctgcatgcatgcaagcttatgtccgcagagggatacttcntatagaagcagctgaatcattttcttcctacaactcgtcaaaacttgatgtttttaagcaacatttcctgttactggaaaagatttcaaggataggtatcttcgaaaaccttatgtattcgtggaagagagacagaaagtccactgtctaaatactcttttttctaacggttgccttttcttt

SEQ ID NO: 16829 - DNA, 305 bp, Glycine max
  unsure (1)..(305): unsure at all n locations
agcttgagagcctatgcattaaatgacgtataggaagggagcccaaaaccttagtttccaaaagattctaggtttaaaaggaaccttaggtcttaaaagggggagaaacatctctaccactgggtaatctgaaatttgctttcaaacctcctattgtaattgaaagatgataacttgccatggaaggctaaagcttttgntgggaatttctgctgagtcttgatgtaaatattctntactatctaattaatgttgntctgatgtgttcactgcttctatctgcacttaattcttgcatgcttttg

SEQ ID NO: 16830 - DNA, 69 bp, Glycine max
  unsure (1)..(69): unsure at all n locations
agcttccacatttgaacatagatattgctcctgnggctagaaggatcaatgttattttcattctcatgc

SEQ ID NO: 16831 - DNA, 365 bp, Glycine max
  unsure (1)..(365): unsure at all n locations
agcttggcatttctaacattnatttttctattcaagagacaaccattacaataaccatacttttaatcaagttgagaagaatttcatccatggtagttcttcaactcatgatgctggtgtcaatttcaacactaatcaaacttatgaaggacaagcaagtaaaccgggcttgaatttcaacatggccacaaaaatggaggatccaaaaaggctaaggaggtatatgtgttattacttttttagacttaaatatgcttattgtttatgaaaacatgattttttttttaatttctactcaatttttggttcagttacatttctttttaggatcaggaaaaaaagaaagacactccgtaccttttttt

SEQ ID NO: 16832 - DNA, 375 bp, Glycine max
agcttgagggacgctgttgagagaatttcttaatttataaaaaaactgatagattatggcatctagttacactaaccattacatggaacaaaaggacaaaagttaaacgtcattcatttcttcacatggacgtttttttctctatatattacatatataattcacatgagacaattttattgaggtgatttaagattattatggatagcaaaattttcttcacaaatatttcactttttagaactcatccattttaattttgattttaaaactgaaactgattcgatacaaaaattgaaattgatctttaggtaaatttgaaaataatttttttaaaatttgtaagacaaaaaagaataagagaaaataaaaaga

SEQ ID NO: 16833 - DNA, 360 bp, Glycine max
  unsure (1)..(360): unsure at all n locations
agcttcggaagaaagtgatgaggtttcattcnctaaagcagagcttgaaagagcccgggtagtcaaaaaaaagntcaagtccataaccatcaaagtctgaaaagagtatgatgaactaaaggacgtcaatatggcccccggtgaagccttggaacgagaaaccaagaaggcccgaaaggaagaacaagaccaaagcaaagttttgaggggctttatagggcagcaatagtgagctcaagctccgaagaggtgaaaggaatcatcacgggtcaaaggcatgatcttgaaggatgagctaaaggcttgctttatgtcgaaaagaaaattgtcccaacagttaagcgagactgaaaggaatat

SEQ ID NO: 16834 - DNA, 373 bp, Glycine max
  unsure (1)..(373): unsure at all n locations
agcttttgctaaagaattattgcattttgtatcactcaagcctacccatatacatgcatatttgntatcttgggaacaaggataagatcggtttaaagcataatcaaataccgcgcccaatcccaaacagagattaattcagggtaagtggtaacgtgggcacgatttgctgcgcaatgtcattttctgctttcaagtacttggggacgggcacgaatggatgttaagcccatgatcaacagatcgctgtcccgtgtccagctccggacaatcgagaagcgctactgggaggcagcctagtatcctttaaattcctacctattattgctgtcgnttctttaagataatgatcggatgcctaacttaccctaag

SEQ ID NO: 16835 - DNA, 366 bp, Glycine max
agcttgcaaactgtacctccgactctaacttcgtcgggtttctatcctggcccaagtttatcgtgggctgaagcactggttccgcttccctaactgcattggaagcggttgccgtggcattatcctctaaagttttctggagttttagcatggcctccgtgatagaagccatttgatcttttaaagccgatagatcggccttcatctgctcttgcacgccctcttcattatccatttttctggattgagtgttataagggtgcctttgtgcattcttagttatggtgaactccctaaagaaacatacaacggtgagtatgccaccaaaacatgaatatggcaatgaatgaacggagcacttggatc

SEQ ID NO: 16836 - DNA, 349 bp, Glycine max
agcttgtatctgtagctcagttaattttgctggatcctggaacgagccaattgaatgacatattaagttcagtgcgcaatcacaactagaagtgaggaaaagtaatgctgataccaaaatgaactaaaaaaaacaacagcatcaatggcatcaaacaaaagcatagtgccaaaccaaataacttatagaacattaagaagcatgagtttctagattcatgataataccgtaacaaaagaagaaacttccctatttactaatttctagaaaagccatgagttttctattcagaatcccacactctcacgttctgtttataaggacaataaaaataactaacaataatatg

SEQ ID NO: 16837 - DNA, 248 bp, Glycine max
  unsure (1)..(248): unsure at all n locations
agcttgcccagagaaggaatttccttangtatatgcttaccacctcgaaagactggaaagcggtttctaatgactcctctgcggcctccacataaggcataaaggatgggcagttcaccaagatgtcttcctcgcctgatacgatgaccagatgcccttccactacgaatttcaaattttggtggagtgtagagggaacaactcccactgagtggatccacggacgccccaacagacaactgtagggg

SEQ ID NO: 16838 - DNA, 353 bp, Glycine max
  unsure (1)..(353): unsure at all n locations
agcttgagatgaggaagngtttatggtgaaacttcctgcttnaattggtgaccacagagggggacctggagatatggcgcggtggtcaagagaccctggggacgtcaggtggggtgctattgcccaaaaccaagcttgaccaatcccgacccaacccgggcatagtcggtcagtgagaacctgtgatgtacctaagcaggcgagctcctggcagtcaacagataaaaggaaaacaagaccacaaagcaaggaggcttgtggtggctggccagctgtgaaaattgattgatatgtgagatatggtctctggtaatcgattaccaagggtgggtaatcgactacaaggctcaaaa

SEQ ID NO: 16839 - DNA, 366 bp, Glycine max
  unsure (1)..(366): unsure at all n locations
agcttctctatatgngangcttattttcggncatccgaganaaaanggaggaccatttgattttctcaagcggtttcttttctcaatttcgagcgtctcgatatattatgcacctgaatctgacctccgagagaaaagttatgaccattcgaattgctcaagagcttccattgttcaatttcgagcgtggcgatatattatgcgcctgaatcggacctccgagttaaaagttatgaccttcgaatttctcgatagcttccggttttaaatttcgatcgtctcgacatattatgcgcccgaatcggccatccgtgagaaaaggtatgaccatttgaatttctcgaggcctctcggtattcaatttcg

SEQ ID NO: 16840 - DNA, 395 bp, Glycine max
gatccttaagccacctgaggcatgcagcttgtccttagacccttagttgtactgacttagaccaaacaacagtattgtaacaacatatttaaaaccaaaacttaatccgcagatccatcatttaagactaagtttcaatcctacttcattcaagttctaaggcaacaatacatttcccaatgctaaagtcacctaactatgcacacaagtggttgatcagaccaagagcatacagaatttaagcactgaaagaagcattgaacataagaaacacaatcaattagatattaaagtaattacatcagctgttctttagaaatccccaacaagggtgtttagccagccattacagaaaaaccctaacaataatgagattacaaaacctaggtatctct

SEQ ID NO: 16841 - DNA, 367 bp, Glycine max
agcttgcttctacaaacctatacttctgttcacacaccgacattgctattacacttgaatatgaagaccatgaattttacataattaagctccaagatttcttcaatgaatccaaagtaaggcatggaagttacacgggaattgtcaagtgttgacattcaacccttagactaaccccattgtttttcattgtagtcttttctatagaagcaaagcctttgtctttgatgttttgatgatgatcgtgatgatttgatgaaaatgcacttctcaagtttaattcaagacaatgatcctagaatacaagatacaacgttaagaagatctctagtattataggaagggaattcctaattgaaataacaaa

SEQ ID NO: 16842 - DNA, 229 bp, Glycine max
  unsure (1)..(229): unsure at all n locations
nnnncgccgggcgtataccgattcgtatgtttgaccaataatcactgaaggacggtcataaatccgcgtattctcacttatgaggcgaagcatccatgcgtcgggggcaccatcactgtcttaaagaactaccctcggcttgccctcatcgagaactgttggagtcatttgcgtctgccagctggagccatacattcggatgagaacctgaatcgcagcggattagccg

SEQ ID NO: 16843 - DNA, 334 bp, Glycine max
  unsure (1)..(334): unsure at all n locations
agctntgttacttgtggtagtatgtaatagtcgtcttgataagtgagattttggcggtgtaggaagcaagatcctagcggtgtaggacacaagaccttggtggtcttttgtgaagtagagaagtagatgacatgagatcatttaaggtttgatttcaacctggttaaaggtcttgttactcatctggtgatgcttccttttgctttgaggagcttctcctctgatgcttgtgaggagttagtttgatttacacttggttgaaggtcttgtcaaccatctagtgattctctattatgcttgatggaatcatggactttatgctatgcttgacata

SEQ ID NO: 16844 - DNA, 367 bp, Glycine max
agcttctagcatatgcatgtacttttttgtatagtaggattacttcaggaagccctgtgattatcatgcctagaatataatgcaactgggaagcaatggttggctgattactactttccctattccccaggacttgaaccccatttttctgaaaaactattctcagcttatccctaatcataattttatatttatgcttaatttcaggcagctaaggtccctgttaaagagtatgcatatgatgaaaagaaggtggcaaacgtacaatctcacctggtacatgcccttttccccatgcttaattaaacttttgtttaatatagtaaccaactgcaaattatcttacgaaggattatctggataattc

SEQ ID NO: 16845 - DNA, 369 bp, Glycine max
  unsure (1)..(369): unsure at all n locations
agcttgtaacaaatctttacacttggtttgatacatgcagnccttctggacccttacccgccacttcggcgtcatggggagactcaagaagcccaacaggtttaaccttttgaatgtagtctgaacaaaattcaatggcttattctgcaatgtacctttcaacaatagatgcttccggacgatgtaaattctttgtatacccttttaagatcttcatgtatcgctcaaccgggtacatccaccacaaataaacaggaccacaacatttgatttctctgaccagatgaacaattaagtgaatcatgatgtcaaagaaagcaggaggaaaatacatctccaaatggcatagtataattgcggcctcatttt

SEQ ID NO: 16846 - DNA, 218 bp, Glycine max
  unsure (1)..(218): unsure at all n locations
tccggcgcaaaaggnatgaccatatgaatttctccaccggattccgggggacaaggtatgaccatttgaatttctcggtagcaaccgttgttcaaaatccagcggctcgacaaaatatgcgcccgaagcggaccaccgggggacaaggtatgaccatttgaagttgtcgagagcatccggccgtagatttcgagccgctcgatatattatgcgccccg

SEQ ID NO: 16847 - DNA, 58 bp, Glycine max
  unsure (1)..(58): unsure at all n locations
agcttgtgatccgaagctatgagtgagttgtcgangacacaacacgagcagacatgct

SEQ ID NO: 16848 - DNA, 266 bp, Glycine max
agcttcccgccaatggtattttaagtttatatgataccattgtttcctttggatttaaggaaaatactgttgatcagtgcatatatccgaagattagtgggagtaaggttatttttctaatcctgtatgtttatgatatattgctgcaattaatgatcttggtcttctccatgagactaagaaatttctctctagcaactttgaggtgaaagatatgggagaggtaagctatgcgatagggatagaaatattctgtaatagatcac

SEQ ID NO: 16849 - DNA, 328 bp, Glycine max
agcttgaccaatcccgacccaactcgggcatagtcggtcagtgagaacatgtgacgtacctaagcaggcgagctcctggcagtcaacagataaaaggaaaacaagaccacagagcaaggaggcttgtggtggctggccagctgtgaattttgtgtaatatgtggattgtggcctctggtaatcgattaccaagggtgggtaatcgattacaaggcttaaaattgaagacagggggctaagatggtctcttggaatccactaccaaggtgagtaatctgtctcaccagaacagaaacgaggacaagaagctaaggaaacctctgaggaa

SEQ ID NO: 16850 - DNA, 340 bp, Glycine max
  unsure (1)..(340): unsure at all n locations
agcttcaagtttgtggtcatgtaattctatngcttangattcatttttcctatttaaaatcaacctagggtttccaaaagatgctcttttattaatttatgcacacatccgagcccatttaagcattcaaaaaaaatttcacggcattcacccttcaggtgtacacacatttttttttcaaaaacctttgtgttctgatcagtgaatcattttttcaaagcaaaactggtagtcacttctttccaaaatcatcttggctttttagtcgaaatttaactattttttttgttttgcgcttggttattttaattcctaggattatgagaaaactaggcgtatt

SEQ ID NO: 16851 - DNA, 320 bp, Glycine max
agcttataatatattgatatttctaatattaaacattggaagctctcgagaaattcaaatggtcataacttttcacacggatgtccgattcgggcaaataacatatcgagacgctcataactaaacaacggaagctatagagaaattctaatggtcaaaacttttcacacggatggccgattcaagcgaattacatatcgagaggctcaaaattgaacaacagaagctttcgagaaattcaaatggtcataacatttaactcgaatgtccaatttaggcgcattacatatagtgacactcgaaattgacaacggaagctc

SEQ ID NO: 16852 - DNA, 320 bp, Glycine max
agcttccatcaagtggtattctaatctcaagagcttcaagtaggtgctccttaaacctccataaaagtcatgtctagtcatgaaacttgtcacataagatttcttatgttgtgttgaattttattttcttgtttctttgtctaactcatttgttcatgagtgtatgaaattcttttagcctattatttgatttgagtcaaatctttcatgttaattagtccttaacatgttcatgcaaaattcttagagagtctttgattgtgaaccttttcatgaacttttaggtttccttatgattgtgtcaattgtgaatttgagtt

SEQ ID NO: 16853 - DNA, 308 bp, Glycine max
  unsure (1)..(308): unsure at all n locations
agcttccgtaactttntcgtaaaatcacgaaaaaaggggggngaacttatcaaaagggatgcaaatagcaattttcaaattttcgaatctggacccttccaaaatattttcgaaacagggttgcttcctccctgagctcgcctgggcgagctaggcggcaacctcctccccctttttcctataaataggtgaaagggggttgttccaaatatccataatccctctggctatgcatttcagttgtttntggtgaaaaaaattgtttccaagaagaaaatgccagtcgaggtgctggctgaacgctttcg

SEQ ID NO: 16854 - DNA, 376 bp, Glycine max
  unsure (1)..(376): unsure at all n locations
agcttgaacagataatcgctgaaattcatcttaaccccaaattaaattagcaacacttcctcgcactctaaatcaagcttgttggagaaaagaaggaagaatggaagattgaagagtggtgagatgaaggcagactcgatctttgtgtggcacacgtctgagatgaaggcagagcaaaaatgcacgtgtcaacaaatgaagcaacgtggcacacccaaaaaatgaaaactttccatctaaaaaaacgtggcacaatcagaggagtggcaattggacactcaaaatgaccaaaaaaccattaaaagggacaaatgtcaagacctcaaccatgagcattntagtaatttttccatactctagttttagtatatagata

SEQ ID NO: 16855 - DNA, 375 bp, Glycine max
  unsure (1)..(375): unsure at all n locations
agctntgtgtaattgattatatggttttttgttatcgattaccagngacaagttttgaataaaaatcaagagatattactcttccaatggttttcaagtttttctgaaaggtataactcttctaatggttttcttgaccagacatgaagaagtctataaaagcaagaccttgacttgcatttgaagaacaataattacaactttatatatattcttttacagcctttgaatctctttgaacatcttcttgaacttcttcttcttcttcctttgccaaaagctttcttagttttctggtttccgaaactttgttctttcacagaaaacaaaagtgtgctattcatctttttcattctcttctccctttgccaaaaa

SEQ ID NO: 16856 - DNA, 282 bp, Glycine max
  unsure (1)..(282): unsure at all n locations
acatctatactacttttggttgccttcctttttgggcgcaagaattacaaagcccaaacaaaacaaaattatcgtaatttttttttacaatgctgacaataacgtataatgagtattggtgcttaaaaatagtaaatactacgattttgtatattacattatatacttatatagacacaacctagcacataacttttagacacatctaattagaaatttataaatcattaaaatataaaaaatagntaatatgataattaaaaataaattctaaaaacacac

SEQ ID NO: 16857 - DNA, 392 bp, Glycine max
  unsure (1)..(392): unsure at all n locations
agacagcctgcatgcatgcaagcttgcagtaacgttatctctcttctttcattattccagagctcagntgagacaccgcaacacagctgccgctaagtaatgaaattcctaacagaagagaaaaggaaaacatgcattcacatttcacacgcacacactactctttctctctctgtgatggattcagagtgagtaaaagcaagcaagcatttgcatttggattgagacccgcaatggcacccaacaacaacagaatcaagggatctcatttccctattctcgcttcccactttctatgcctccttgctcccctcctcctcttcttcgcatctcccctttatggtctcattctcaaatctcacttcttttcaattattagttttggtactagt

SEQ ID NO: 16858 - DNA, 367 bp, Glycine max
  unsure (1)..(367): unsure at all n locations
agcttgttttccgaaaaaaatcgtantattttaaaaagatcgcttagggagttggcaaaggcaaatagtcatttctttaatataaaccttgaatcaaacatgtatatctaccatgggacaatgcatgcatatggcaaatgcttgccaaatatacatattcatgccatgagtagccagaaaaaaaaagtgcaaatacttcatcattcgtgttttttaccattctattctaagttttcatcatctaatatcacattttcttcatgatactcatgtatatagggagggatattaatattagtaagctcaccggcatctggaagtccatcttttcgcagtacaaaagttctcttcctttcatggtctatga

SEQ ID NO: 16859 - DNA, 370 bp, Glycine max
  unsure (1)..(370): unsure at all n locations
agcttgaaggcaaactggattttttgttaacttnggaaccaagctggccttgaatcagaaatttgtacctgtcgcaagggtttggggtttgtgcttctctgctgaccaccatacagacctttgcccttccatgcagcaacctggagcaattgagcagcctgaagcttatgctgcaaatatttacaatagacctcctcaacctcagcagcaaaatcaaccacaacaaaacaattatgacctctccagcaacagatacaaccctggatggaggaatcaccctaatctcagatggtccagccctcagcaacaacaacagcagcctactccttccttccaaaatgttgttggcccaagcagaccatacattcct

SEQ ID NO: 16860 - DNA, 370 bp, Glycine max
  unsure (1)..(370): unsure at all n locations
agctntgtatattaactcatcttattactgtacaaaaataacattngnagacaggaaaagagngaaaggtgnatcctttctccgcccttttttctatttttaaagtttaaaattgtttggggatctgaatttctgtccaaggggtttcaaatcatgtggtattactatggtatgtttatattggttaaaggtttttttaaagaaaaattatggattgattctagggatgtaccttggtggatacaaattatctagcttactagctatttcttctcgctatataaaaaatccatgacaactgattttgcatgcacccagggattgcatatttatgggtgacaaacccgcattttgggccattacttagccc

SEQ ID NO: 16861 - DNA, 398 bp, Glycine max
  unsure (1)..(398): unsure at all n locations
acgccgggatcttaagcacctgcagcatgcaagcttgagcaaatcaactagtaactttatatncggatgggcgaaagagncccggaatatatcgagaggctccaaattgaaaacggaagctcatatcaaattcaaaggacaataactttttactcggatgtccaatagagtcccgtaatatatcgaaacactccaaattgaaaatggaagctcgtatcaaattcaaacgacaataactttttactcagatctccaatagagtcccgtaatatatcacgacgctccaaattgaaattggaagctcgtatcaaattcaaacgacatttacttttaacttggatgtcccgatgagacccgtaatatatcgccacgctccaaattgaaagcagaagctctaa

SEQ ID NO: 16862 - DNA, 380 bp, Glycine max
  unsure (1)..(380): unsure at all n locations
tgcaagcttcgagctggtcaanngtaattgattgttgcgcaaaagggcaaagggctgtgtggtggtcagcagaggagcataaaccacagagtctggcgacaggtgcagatttttgattcatggcaagttgggttaccaggttaaccaaggcatctagtttaccttcaagcttcttagtctcagctgatgaagatgaattcgtggctacttcatgcactcctctaatgacaatagcatcacttctggcactaaattgctgggagtttgaagccatcttctcaattaaatttctgacttcaacaggggtcatgtctccaagggctccaccactgccagcatctatcatacttctctccatgttgcgagtcctttataaaaat

SEQ ID NO: 16863 - DNA, 363 bp, Glycine max
  unsure (1)..(363): unsure at all n locations
agcttatcatgaactattatcaaattcatccattctttcagaagattacaaaaacttgggaaaatattttaaaaagctatctaaagatcataagaaacttgaaaaagatcttcaagataaagatatgtttctttggacaagtccactcagatatgtaatgcttgtgaaacttttaaggaaaaagagtgcaagctatgtcttgagaatgagacaatcaccaaaaaaattgctttattagagaactttcaagagttggaaaacaaattgaaaggcctataaagatatgatctgtagaggaaatgtacacaagcacacaaagattatgagaaccttgaaagagntaagtatatctttgggtggaat

SEQ ID NO: 16864 - DNA, 298 bp, Glycine max
  unsure (1)..(298): unsure at all n locations
agcttgcaatatcagntcttcaattattctataaaactaatatcctagacttgagatatcaccaaattagttgttgtcttgcatagcattttgcatcacatcatcctctggaagcttttttctgactgtttctcccttgtgaatcattcatcccatattttgaatggcttgtcaatgtcaaataatactggacctgtgtcttgagaatgcaagttttttatattttcaagatatttacttttttttttattttcaaataatactggaattgtgtcatttagttatttgtattgggggg

SEQ ID NO: 16865 - DNA, 340 bp, Glycine max
  unsure (1)..(340): unsure at all n locations
agcttcacataggcaagngntnncttcttaattccaaatcatagatatgtcataaattgattttgcaggtcatttcccatcaaatcaaggataatatgcataatcatcatggatcaataagactttctaaagtcagacttcgtaggaaattggttttggttgctctggcctttcccctctctcttaccctttgttttgtgaagaataggagagtacacccaaagatttggttagtaacttaaatgggcgatcacttcctatcccttcatgtcttaaccaagttactattacccccctcctttttctccttttgacaactctgtacatggaacaccccttg

SEQ ID NO: 16866 - DNA, 348 bp, Glycine max
  unsure (1)..(348): unsure at all n locations
tacataatnatnnggcggcatacgggggcgtttctttggacccccatatatatatatatatatatatatatatatatatatatatatatatatatatatatatatatatattcctactttacccaaaaaaaaaaagaataccctaataaattgcccttgattagaacaagtgagtgcatagacagagacatggggagagccgaaagataatacgttaacatttaaaattgcatctctaacgtggctatagtgcgtttgcaaattgcaataaatgagtgagtggtcaaccgtggggactcttcccggaaacatatataaatataaagcgcgcttaaatcccagagtggg

SEQ ID NO: 16867 - DNA, 370 bp, Glycine max
  unsure (1)..(370): unsure at all n locations
agctngacgacatgaaactgaatttggtattttgaatcccttnntnnnnnaccaatatttggctatttatcatggctatctacttgaaatactaatcccataatttcttgtgtctttggattttagttggaattctcaaaatcataatttagagacaagctttattccaataatgatttggatctcaacttgatttcaaacatagaaggttaattatcattttatacatctttttaaatgtatagagaagattgaagagagaacaatgtatatagtaaatttatctaaacatgattactctagagatggcaacggggacaaatctgcctatcccatttccattctcacaaaagtggaatgaanttgaatt

SEQ ID NO: 16868 - DNA, 337 bp, Glycine max
  unsure (1)..(337): unsure at all n locations
agctntttggagtagaaacangggacttactattttattncaaaaagaaagtcgtatctagtcaaggtctgagagaccatacaagtttcctaacgatttctaattatgtgggccattaagtctatcatatgctgacaatagccgagaagcccatgaatctcttcgggggcggagtaggtgtctgccatcgccttggccttggctaacaagcggggaagntcttgactcccgttcaaggtaagagcaaaccgatccatccacatggttgcctcttggtgtaaagagtcgatcacccttcctctagcctctttttccgcatattcttggagcatacttg

SEQ ID NO: 16869 - DNA, 346 bp, Glycine max
gcttacttgtattggagcttatttattactatgataaatgtctatagaaagtgaattttttttaaaaggattccttttgtgagtgtgttaagaataaatgatgctgaatccttatacaacatcttcttacttactaaatgaagaaagcattgaatggattataagttttcaaaatattaaaaacattaacttttatactcaatgctttctttatgaagtattaggagggtattgtaggaggatataggagaatgtcaggtttaacttggttatatcagctgtgttatacacggtttcttggaaactgttgttcttgtcaaattatttgtcaaaacaaaccaaaaca

SEQ ID NO: 16870 - DNA, 367 bp, Glycine max
  unsure (1)..(367): unsure at all n locations
agctagaagcgattcacattattgtaatcgannaccagagcagaggngcagaaaatattatcaanagccacatctttttatgtgggtcttgaatggctatcaaaagcctatataaatgtgactcgagacacgaatttgctaagagttctttagaacaaaaaggtcttatcctcttaaaaagtaaaatcattttatcctcttacaaattccttggccaaattacttgtgattcaataaggaattatttaaattctcaaattgttcaatctatctctttcaagagagatttcttcttttcttcttcttcattctgaaaagggattaagagaccgatggtctcttattgtgaaagaattctaaacacaaa

SEQ ID NO: 16871 - DNA, 328 bp, Glycine max
  unsure (1)..(328): unsure at all n locations
agcttatgagcagggatggtttgtcngatctatggagatatataattagctgataactgataatacactgatcatcaattttccttttagaacaaaatttatccctagtacacatatcaatctcgattcaataataaattaataactagatagttataaatcaattgataataacaatagcacactaaaacaaaatgcatgggaagtttgctgtggaattggcttgttctttttttttagtcattagtccattactaatcataagattcacattgcagctacaggtggagttgttttgcttgtcattaattagggggggtggaagaag

SEQ ID NO: 16872 - DNA, 358 bp, Glycine max
  unsure (1)..(358): unsure at all n locations
agcttgaatccctctataagtacttatttgggagcttgntgagaaaccaactgatcaaaagattgttggttgcaagtggaaattcaagaagaaagatggtgatttgaagttgaagacaacctttctccatggtggtttggaggaaagaatttatatgcaacaatcagaggcgtttgatgtaccaggaaaataagaccatgtgcgtctataaaagaagtctttgtatggcttgaagtagtcacctaggcaatggtataaacgatttgacttgtttacgattgatattgggtattaagaagtgagtatgatagttgtgtttataataagaaattgccccaagattcttatatttacttgc

SEQ ID NO: 16873 - DNA, 365 bp, Glycine max
agcttcaagaataatggccttggcttacttcttattcccataaggaaattcaataaataggcctcctatttttaatggagaaggttaccactactgggaaacccgaatgcaaatcttcattgaggcaatagacttaaacatttgggaagccataaaagtaggaccttatgtacccaccatggtggctggaaatgcaacaatagaaaaacctagagaagagtggactaaagatgaaagaatattagtgcagtacaatttaaaggctaaaaacatcattacttctaccctaggaatggatgaatactttagggtttcacattgtaagaatgataaggatatgtgggacactctacaagttacacatg

SEQ ID NO: 16874 - DNA, 341 bp, Glycine max
agcttgtgataaaaccattagatattctcctaaacgaccttcagcaacggaatatgttgcagtaaaccaacaaaggacatggcttgatatttattttttctaacacatgtcacaatggcgaatgtaaaaaaattacatgcaagtcatttatatattttaatgaaactagaataccttctggtgacggtgtcatggaattcattcgacaaaacatgaattgaatcggaattcttagagcgaactaatcaacccttaaagaaaaatagcttatccttaagagtataattaggcatggatgaaggatttgtgaatgtctgtgcatgaaacttttgatgatgcca

SEQ ID NO: 16875 - DNA, 346 bp, Glycine max
agcttattccgcacaatggtggcctcttatgattaggaatgaagcggcaattccttcttctaatgactcatggacacttattcctgatccaagtacaattcgggtgaaaggtccgccaaaatcaacaaggataaagaatgagatagattggctcgaaccatttgagcaccgacaaaaatgtagtggaagagaaggatacaacaggcatcgatgtccaatgcaatctgaatgtggaagttgtcaaattaattgatttatgtattttgtttggctacttcaatgaaatggtagctatccatgatcaatttggttttaaattattattattatattttgggccgacata

SEQ ID NO: 16876 - DNA, 369 bp, Glycine max
agcttgcatttggaattgttaaatccccactccatcattaggattagtacctgacatctcaaacaaacaaatcaaacgtaacaagacaattatagttgctgtttgaatacctcacccactcaagtgtatcacacaattatggcttttctctaatgaaacactcttgccttttaccactctaattccccttgagttcttaggcaattcaagagattatggccacaacaaagaacaattcaccaatatgtgtaaggtaaggctagagagacaaggaaaaggttaaccaagaaaaaggctaacaatgtttttaggcacaaatgaaggaaataaaattcagaatttaggaattcaagtaacaatccttcatgc

SEQ ID NO: 16877 - DNA, 124 bp, Glycine max
agcttgggaggattgatggggacttggcttgtataggaacgaggataagggctacgtgggaatacctgagctcacctggaggtgggcaacaggggaaggtccattaatcctaaaagtcgcccac

SEQ ID NO: 16878 - DNA, 362 bp, Glycine max
  unsure (1)..(362): unsure at all n locations
cccnttttgntggngnggnganggngnggaagaagaccgggataacaatgggattggatcccataaagatagnggggggaaatgttgatctttgtatgggggnggtgaatgaactcatgtgtttaagttgactgtcgtcccgtaccattggcaggagcccacacagacctaccaaagacaatttctatggggaacgtccctgaggattccacccttaaaagtggtggatgactgcaaaattgtttccgaggttttcttgatggcttattgtttctttgggctatctctctttttcctttcctctctctccacttcaatcttacaacttcctctctaattgctaccctctccctccatctact

SEQ ID NO: 16879 - DNA, 374 bp, Glycine max
  unsure (1)..(374): unsure at all n locations
agcttgtaggattatgggggacccttcttttgtggtactaggnggcgancgggcgatggtgcaaatcaactctcccacatccacaaatcaaacatgaacccaccatccccagttgcccaccatcaactgagctcacgtacccccatgtatcccttatcctcgttcctctcagtaccgggtccccatcaacccctccaagcttccacaatatccaagcaattcaatattcaaacatcatgaactaccctaaaccaagaaaacagggcagaggcagaaaactctgcccaaaacacattccaataccacaactttccctactcagataccccagtaacattctcttcgtttcgaattgctaaccggtggatcgactc

SEQ ID NO: 16880 - DNA, 366 bp, Glycine max
  unsure (1)..(366): unsure at all n locations
agcttgttatcgattacacacattttattatctattaccagaggagattttcagaaaatattgtcaacagtcacatcttttcatttggntcttgaatggccatcaaaggcctatatatatgtgacttgagacacgaatttgctaagagttttcataacaaaaaaggtcttatcttcttaaaaagcaaaatcgttttatcctcttacaaattccttgtccaaaacacttgtgattcaataaggaattatttgagtgcttaaattgttcaatctatctctttcaagagatatttcttcttctcttcttctttattctgaaaagggattaagagactgagggtctcttgttgtaaataaatcttaacac

SEQ ID NO: 16881 - DNA, 368 bp, Glycine max
  unsure (1)..(368): unsure at all n locations
agctttcatctagccaagattatttcttttgngntacaagagaacctaacgattcctaattatatgggccatcaaatctatcatgtgttgatagtaattgattagcccatgaatctcctcgggggcagtacacacttcggccatggcttttgctttggctaatagacgcgggaggtcttgacttccattcaaggtcaaggcgaacctatccatccacatagtcgcttcttgatgcagtgcatcaatcaccctcccccttgcttctttttcggcatacacttgtgcaaaatcctccactagcttttgttcatgggccatggactgggtcaattcttccttgtattgccctatgatagctagcatgcttt

SEQ ID NO: 16882 - DNA, 370 bp, Glycine max
  unsure (1)..(370): unsure at all n locations
tagcttgtgaaatcaanggaattcatgattccgnnngacacaagncgntcaattctattcttagaaatgtgacctaagcgtttgtgccataatgctcctgagtttgtattatcaattctacccttagtaccacgcaattctgcattaaaggattcaccataggagaatacagtatcaagtaaatatagattatcattaaccaagagtgaaccggttccaacaatatctgaattaaaagacaacctgaacacattgtttccaaatgaatacaaataacccaatttatccaaataagaaactgaaaccaaatttcgtctaaatgacggtacaataaaagtgtctttcaaatccaaataaaaaccagtactaa

SEQ ID NO: 16883 - DNA, 369 bp, Glycine max
  unsure (1)..(369): unsure at all n locations
agctttaagccaaaatcccatcnctccataaaccttgacccagggagagaatgcccatccttgcctttgaaagaagagaaaggaaagaaaataaagttcccgatcaaagaccggaagaaagcaaaagaaaatttccgatcaaagaatggaagagagcaaaaagaaaaaaagaaaaaagaaaatccccgatcaaagatcataagaaaacaaaagaaatctgcaaaaaggtcttaggaccagacaaatatctaaacagtacaaaattgtcaccaccaaataaggaaagaaaggaaaccacaacctgaagtggtcctttcctttggttgccgaccaaaaatcctatgcgtcagtgattntttcgccttgact

SEQ ID NO: 16884 - DNA, 373 bp, Glycine max
  unsure (1)..(373): unsure at all n locations
agcttcaagaataatggcctttcttatcttttatttccagaaagaaattcaatcaatagacctccaatctttaatggagagggttaccactactggaaaacccgaatgcaaatttttattgaggcaatagacttaaatatttgggaagccatagaaatagggccttatatacccaccacagtagaaagaaccacaatagatgggagcacaacaagtggaagcacaacaatagaaaaacctagagatagatggtctaaagaggatagaagacgtgtacaatataatttaaaagccaaaaacataattacatctgccctgngaatggatgaatatttcagggtttcaaattgtaagagtgctacggaaatgtggg

SEQ ID NO: 16885 - DNA, 290 bp, Glycine max
agcttggaaggagccaaatgtttatggtagaaggcgagttccaaggaacatggggtgtcaagagacgacgaagagaggttgctgcagcagcaagcagccgtgatgataaccaccaccagcagtcaccacagcaagaagttggtgaaaattcttcaatcagcacaacaaagagaagctcaagatttcgcggtgttagcaggtcatataagaaggaatttccaattgttctatagtttcaaagaccgctaactacttttgtcttttgctgaatttgctaacacaaattagac

SEQ ID NO: 16886 - DNA, 311 bp, Glycine max
  unsure (1)..(311): unsure at all n locations
ctaggnggcggncgggcgatggngcacaacaagnnntccacatccacaatgcgcgcataaacccaccatcccctgttgcccacctccatctaagctcacgtactcccatgtagcccatatcctcatttctctcaacaccgggtccccatcaatcctctcaagcttccacaacatccaagcaaaacaacattcaaactgcacaagctatcacagccaagcaaaacagagcataggcagaaaactttgccaaaacaccaaccaaatcacagcttttctcacttaaagaccccagtaacaattccttcgttctg

SEQ ID NO: 16887 - DNA, 358 bp, Glycine max
  unsure (1)..(358): unsure at all n locations
agcttgtaattgattacactaagtctgtaatcgattaccagagcagattttcagaaaatattctcaacagtcacatctttttatgtggntcttgaatggctatcaaaggcctatatatatgtgacttgagacacgaatttgctaagagtttttcagaacaaaaaggtcttatcctcttataaagcaaaatcgttttatcctcttacaaattccttggccaaattacttgtgattcaataaggaattatttgagtgctcaaattgttcaatctatctctttcaagagagatttcttcttttcttcttcttcattctgaaaagggattaagagaccgagggtctcttgttgtgaaagaat

SEQ ID NO: 16888 - DNA, 369 bp, Glycine max
  unsure (1)..(369): unsure at all n locations
agcttggaatgtgcatnngggctccnattttgaatcncctatgcgggacctacatacataaaacagccccaccatcccaattttacaaaatcatattcatacaccattggggcatttcaccaagcacttggtgagcgcatgtttggacatgaattgcaagagaatgggagcaatgtggcatgccccattgctttagaatacaacctaggcctaaggcctttcattcaaatcctcaattcaagaaaacaagcacaaaaaacaaaccaaaactgccccacaaatataagcatgttctcacaatttagagtaccaaaagatgaagaaagtttaccaatgggaagcaaaaacatcaaggatggaatacttact

SEQ ID NO: 16889 - DNA, 328 bp, Glycine max
aatacccaagcttttcagagagatagctcatgacctaaaactttaaaatgttaaaccaatttttgaaagaactgcgttcagattttgaagacaagtttgatgtaagagaacataaacattttacataaaagttcattttccagtttttatttatttttggttaaaagaagtctattcagaaagtgttatatctgtcatcaccatccaactggcataacattctctataaagaaaacagaagacccaggatcaattaacttgtgatactcacaggaataggaagcttacctgatttttccgggaaagccccaccttttcccaccaagaa

SEQ ID NO: 16890 - DNA, 361 bp, Glycine max
  unsure (1)..(361): unsure at all n locations
aacaacatttcaacagcataagctatcacagccaagcaaaagcagagcaaaggcagaaaactctgctcatacaccaaccaaaatcacagcttttctcacttaaagaccacaagaacaattccttcgatccaattcgttaaccggtggatcgactccaaaattttactggaagtctatagtgcataagcctacattgtgaccgttgggatctactagcaaagatcaagaactcattctgtactactctttccacagccaaccacacacaatgcatttctgcaccaagctaaaatcctgctgcacctattttgacagcanaattctgcataagtgcagaattcgaaaatcaacacttccctca

SEQ ID NO: 16891 - DNA, 149 bp, Glycine max
tcaagctcaaagggtcggcttcttcttcctctggcttttacaaatctgattctgaccagctcgccggagctgaacggaaccttgccatcccgccgccgtcggatgtcggttgcttaggactcttctgtacggttctctatatagctttt

SEQ ID NO: 16892 - DNA, 139 bp, Glycine max
  unsure (1)..(139): unsure at all n locations
gcttcaccaccaagatgagccttggataagaagcttggagaggatgcttcaatggaggaaaagaaagagggagagaaagagagaggggggagcacgaaattgaaggaagaaaaagggagagaagntgaactttgagttg

SEQ ID NO: 16893 - DNA, 194 bp, Glycine max
agacactctcaaacactctagctgggatttgctttactaaggaatttatccttcctaagatggagccaaacccagtcaccctctttaaaaactagctcttttcttcctctattgcctttagttgaatacacctttggttggttctctatttggatcttaaccctctcatgcaacttctttacaaactctgacct

SEQ ID NO: 16894 - DNA, 342 bp, Glycine max
  unsure (1)..(342): unsure at all n locations
ggacgtggtagcgaatgatgttggcaaggacagtcaatgagaactggttgtcggcaaaaaggtatgagttgaggacgatgagaatggagagggaggatgagagatccgttatgaggggcatggcagaggtgagaagagagatgaataaggataatattatatttctatttntgttagacaatgaacaagaagtcgtaccaaaatttagtgagttataagttcttaggtatttgtcaagtccatcatttctttttattttgactattcctcatcattttttaatcaaacatttataatatttttactgtatccaatntgttatttttatggaataaatgcact

SEQ ID NO: 16895 - DNA, 216 bp, Glycine max
ctatacatatacccaagctctaaatccccaacagctatcacaactgtctttcttgcatcccttcagtatagctgtgccaccacagtcacctatattcaaggaaaattcagtcaaactcaacatgcaacaaaaacaacattaactaaataacaacatgaaagactcatccgagatacaacacacaataaggtaagaacctgtggctacatagaagcg

SEQ ID NO: 16896 - DNA, 235 bp, Glycine max
  unsure (1)..(235): unsure at all n locations
tgtgcaaatcaaatcactactacatctcatctctagcatgcattttctttctttacccactcctcacgtttggttttttagggaaaacaccataactaaacgcgccgcaagggatccctatcgcaccagatccaaatctagaacgatgggtgatcaagaggagacacaggaacagatgaaagccgacatgtcngctctgaaagacaaatggcctccatgatggaggccatgttag

SEQ ID NO: 16897 - DNA, 426 bp, Glycine max
tgtatctttgagcttcaatgagggcctttaatggtgggtctccaccatggagatgccgtggtagacatacgatatgatgggagatgatgcgccatccactatggaatacaccattgtagaaggagcttcatcaccaagatgagccttggataacaagctcggaacgatgcttccatggacgcaaatacagagggatagatagagagagggcggatcactaattttaatgaataaccgacggagagacgtgcaactttgagagatgtctcacctgactctcatcatgagagctccgaccgtgtacacatgttttatgtgagactatgaacttgctgacatcttcctgacataccttcttgagagcttgttgagacacttcttgatagctgagctactcaccaccgtttatactagccactcctgaag

SEQ ID NO: 16898 - DNA, 185 bp, Glycine max
cggtcacgcttaagcttggttccagccactcttaatcttgaaaaccagtagccaattttcccagtatgtcactttgcttaagcatgatggactcctcacttaagcgccattgacactacaaggcttcgataattgattttttcactgtcaatggcttccaaatcaaccctaatagaatcccaatc

SEQ ID NO: 16899 - DNA, 296 bp, Glycine max
  unsure (1)..(296): unsure at all n locations
aggatttccttttagtagggaatctatccttcctaagatggcgccaaacccagtcaccctcgttaagaactagctcttttcttcctctattgcctttagtttaatacacctttgtttggttctctatttggctcttaaccctcttatgcaacttctttacaaactcttacctagattccccttncttatgtataaaaaaagttgtctatgggaaaggaattaagtcttaccgtggttggggattgtacccatttacaacctcaaaaggggagtgtttggtggatttttaaaccccc

SEQ ID NO: 16900 - DNA, 372 bp, Glycine max
agcttactgggcagtgaagacttgcttcttctctatggatcaagctggtgaggaaagaaagttgcaactgagtgagttagatgaaatccgcctagaagcctacgagaacgccaagttctacaaagaaaagaccaagaagttccatgatagcatgatagttaaaaaagacttcgtggttgggcaaaaagtgttattgtataattctaggcttggactcatgagtggtaagttgagggctaagtggattggtccttttgttgttactaatgtttttccttatggggacagtgagatcaaaagcgactccacaaacaagagcttcaaggtcaacagacatcgacttaagccattcctcacgaacccttctttagt

SEQ ID NO: 16901 - DNA, 402 bp, Glycine max
  unsure (1)..(402): unsure at all n locations
agcttaacanacttagaaatcatgtgatcatgtattccgaaatatagggggagaaaacggatgcaccttttatcaagtgatcatgtattccgaaatatagggggagaaaacggatgcaccttttatctatatacaattgtttgttgcttgcttgaatcttgatttcaggtattgtattgtcatcatcaaaaagggggagattgtagatgcaattggctttgatgttttgatgatgatcatgattatgtgttgcaattaatgcaaaggggcttttcaagattaaaattcaagacaatacttcaagattacaaggcacaacatcaagatgatcactagaatattaggaagggaattnctaattgaattagcanaggtttggccaagtgatttaaaataaaaagt

SEQ ID NO: 16902 - DNA, 201 bp, Glycine max
agagtatacccaagctctcaagccccaaccgagagcacgataacgttcttcacttgaagtcaagttccatggggcgccggaccttctatattcaaggaaaatagagtcgaactcatattgcaacaaaaacaacattaactaaatcaaaacatgaaaaaccattccaagaaacaacacacaacaaggtaagaacctgtttct

SEQ ID NO: 16903 - DNA, 258 bp, Glycine max
agtctagtgcataattagggtacaacttttacaacattctacggacttgaaagaaaacattggcacatcagccacaatgcctattatgggaaaagagccctagaagcagcaaagaggagcagcttgtgcattgaagcctaggctttgtcatttgagagagattattgagtaaagagtgaatgtgagatgctgaaaagaggaggaggaatcccccttctggggaagaaactatcattctttgttttaaactcatttatt

SEQ ID NO: 16904 - DNA, 394 bp, Glycine max
  unsure (1)..(394): unsure at all n locations
ttggacctgggctgagacactcgaacaccaagngtactatagaatcctcaagctggctgatcgagtcctttgttccgttctatttatggccacaaaggcgcggtaatcgcgcatcacattgagacctacctcgagtccacgggcctagtcattggattgagcgcgtgacgagaaaaaactcgcataacgttatttagtcctttacaggcgggtgatccccagtaagaaacctttctcatacagtccacaaataaaaagctgtgtttaaaaaaccagttaatattcgctaaaagattatattaattttttcccgaacaagttaagaccgcccgtccttgaaaaataaagaccttttgaaatgccaagggggccccccaacaagttgcgtctcccc

SEQ ID NO: 16905 - DNA, 101 bp, Glycine max
aagctccaaggagctacatcatgtggcatcaatatgcatcttcatctatgtggatgtccgatcgcttactctatcttggtgcccgatgaactactcctaat

SEQ ID NO: 16906 - DNA, 284 bp, Glycine max
  unsure (1)..(284): unsure at all n locations
attccttcattctntttgtaaaaggctatctatatattgttggaagggtcaaaagctctcaaaacactttggacatattgagagaaaagactaaaagagtttattggatatatgtctgtaagatgttcacagtttaatcaacgagcaatcttaaacaacaaatcttttgatttgtttagagcctgtagtggcttggtagaaaaaagaatagtggctctttgtcaagcttggtgtagagcttgattgtgtgagagccaaaagtgacattgaacaatacttttcac

SEQ ID NO: 16907 - DNA, 191 bp, Glycine max
cggttcgaggtacttacccgttgaagatcgtagaactatgaagaacgaatgaagaacgtggaagaacggttcaaacctttgcgagattcctcacggaaaacgttacggaaacgtttcggaagcgcctcggcttagattttcttccgggaaacaatttttccaagcaaattccaaagaaagagaagtgccta

SEQ ID NO: 16908 - DNA, 258 bp, Glycine max
tctccacgattcttgagtacgcgttctcgtgccgcttttcgttcgctgcgatggtcccgcataggcgcgccagcactggatccccgccctccttcgcgagccgagccgtgttcccgtgcgccacaaatgttgctcgctcttggaatgacgtgtacacaaaccccaaatatgggttgttgtctgcccaagggtcctccccaatttagtctaaccaaaatccattattccaattccattttaaaagaaaaaaatcttctt

SEQ ID NO: 16909 - DNA, 246 bp, Glycine max
atcaacagcattggagccaacatagagaagaacctgatagaggaatgcagggcggtgatgactagaagccagaggagagcgcaaggagaagaaaagaaagttgaaggagactagtcagaggaaggaagggcagacaaagaaggggagaaggagcccccatatcctttagtactgtcaaagaagaatagggagcgctacttcaagtgtttcttggagatattcaaggggctggagataaccatgcta

SEQ ID NO: 16910 - DNA, 148 bp, Glycine max
ttctagctttccataggtgcattgagatctttttctggttctctaaatcgcgggaatgtgctcatatatttggggcaattatggtttgtcttctagcttgattgggtcgaatcgaaggcttgcatgatatggccctaagcctataatg

SEQ ID NO: 16911 - DNA, 358 bp, Glycine max
ctatagcatacctaagctttaaagccttctctcgaagtatctgaatgctaagtaatccaagggtgaggtaacaaaagcactatgatgctcaagttacggctcgacgatgagtaataaatgaaaatcaacagtgtcctttacctcaagaatctcacttctgtttatacatatcgtgatagagcttggatccatgggccttgttgcatagttaccattttagggtatctatctttaattattgctttaaggggtgggttgtttagataatccaaatattatcttttaaatggttaagttaattctctggtggggttttggctttccaaccttcaaacatgctttagtcaagagggaggtc

SEQ ID NO: 16912 - DNA, 191 bp, Glycine max
tttaatggcggtttttcaccatggagatgcagtggaagacaaacgagaagatgggagaggaggcgccatccacttaggaataagccatggaaaaaggagcttcaccaccaaaatgagccttggataagaagcttggaacgatgcttctatggatgaaaataaagacggagataaagagagaggggggagca

SEQ ID NO: 16913 - DNA, 306 bp, Glycine max
  unsure (1)..(306): unsure at all n locations
gcttcatgtccaaaagatattatattttagggtctgaanattccctgtttttcttcgcacttacaatctcaagtaaaatcactccatagctaaagacatctgatttcacagagaattgcccactcacagcatacccaggaggcatataaccactgaagaaattttatagtaagataatcaaaagttgaaagagtaatataaaaaaatcaaaattggatagaaactaactaagttccggccactgtatttgtgtttgcctcaacttgatctcccaagaaagatcgagcaaggccaaagtctgatatt

SEQ ID NO: 16914 - DNA, 253 bp, Glycine max
tgtgtggaggaacacgctacataatgagagagccagacatgaacagcccatggttgatacatggactgagatgaaaaagatcatgacgaagcggcatgtgccggctagctactcaatggacttgaaattcaagctccaaaaactaacccacagcaacaagggggctgaggagtatttcaaggaaatggatgtgctcatgattcaagctaatattgaataagatgaggaggtgactatggctcgagttcttaat

SEQ ID NO: 16915 - DNA, 211 bp, Glycine max
tgaaatgtccttctctagattcatgcaataatatctcccacatcaccattttaaaggtatcccagctgacatttgccctaggaccattactttatcccttcttgtgccactccctacaaatactgttgaatgcctcttacaaaaatttgaattcttaagccatcagggggcctatgggcggaacaaacaataagaaacttcttaagatgct

SEQ ID NO: 16916 - DNA, 298 bp, Glycine max
  unsure (1)..(298): unsure at all n locations
gatggccacgctattggtattgctgntgatataacccttgtacacatggtcgaatccctcaatgtcgacgatgaaggcctatataaagtttctggtggtggctttgatcttgatgaggagaagcaacgacagnggttggatggctaggtggaattctgcgtaactcctgaatggccatggagaacaagagtagatgattacacctggaagtagcccacatgtaaccaaaaatggagatcaacactatgctagataccaccccagtgacgacactaaggattatctttctgctttcact

SEQ ID NO: 16917 - DNA, 248 bp, Glycine max
tgccacccagcttgtctatgcgagctctgttgcttccttcagaaagcaccgccttctggtggaacttcctggaaggcccaagtgggcctcattgctatttgtacacccttatttactaaatacacccctacctttttttgctggatttttttccataacgttacgaaactttacgaattacgtaacaatacttgtttcctttccgtaattgtcacaaaaccttacggattacgtaatcatcccttttt

SEQ ID NO: 16918 - DNA, 414 bp, Glycine max
  unsure (1)..(414): unsure at all n locations
atcatgaacaactaagtgcgttctactataaaaagcgatcaaataacaagcctagattcaaaaagtgctatgctgcctcctaatagcgcttctttaacgtctttagctggacgccttatgacttggcgggcactgacctaatactttgcttacctttggctttggacttggttgcctattgagcggccatgtgtcggaagcaacgctctaacctttttatggatgagctgaggtgaactttataggtggtggcggtgtgtctattggctgctaccggccataccaatgctgctgtggtgcttcgccctgcggcccgctggagcgcagtacttttgataaagctcattgtaacgggtctgtgacnttctgtggcaaaacactcttagactgcgaaaccctttatagctgactccg

SEQ ID NO: 16919 - DNA, 329 bp, Glycine max
ttctccactaagttgcctgatgcctgaattttcttttctgatggtattggtcctagatgcagggtagaatttctccaagaacaccattttaaggtcatcccatctgacaatggacctgtgagcaatattatatccaatcttgtgccactccctccaaagaatgaggaaaagcctttaaaaagatatgatcttcttggacatgagggggctttatggtggaacaaacaatatggaactccttaagatgcttatgaggatcttcacctgctaaaccatgaaactggggcaacaaatgttttagttcagtcttgagaacatatggaacaccc

SEQ ID NO: 16920 - DNA, 241 bp, Glycine max
  unsure (1)..(241): unsure at all n locations
aatcgcttcacaataagaagctcaatgggccagatccaagttaaaaagggtggcccaataagtggtccttatacgtgtccttcttctttagaccagatttttgggtcgcccaatttcttcaatntctccttagttttttttttcttctaattccgataggggataaattcccactatcattcttatgtattttttaaaaaaattaaactcatgatataaagatgcatccctcattaatata

SEQ ID NO: 16921 - DNA, 266 bp, Glycine max
aacaaatatcccatttccacaagcccaggcataagcacaccatccccaggtggccacctttaaattgagctcacgcacacctacgtagcccttctcctcggttctctcagcaccgggtccctatcaacccctccaagctttcacaatatccaaacaattcaattccatttgtcatgaaactaccttaaacaaagaaaaacagagtggaggcagaaatctttgcacaagattcattcaaattccatagagtttttcctacccacata

SEQ ID NO: 16922 - DNA, 51 bp, Glycine max
tagttcagcttatcatcctcaaacagatggtcagaatgaacgaaccattca

SEQ ID NO: 16923 - DNA, 187 bp, Glycine max
atacaatgcgtcactttagatgctcaaacttgcctcactcatttgccttatagccttagttttttaggaagcatgaacaggaatcaagcgcaggctataagtgctgcaaaccacgaggctaaacacatcccatgattctgatgatggatggctcatattctcacaaatgttgacccattactttcaa

SEQ ID NO: 16924 - DNA, 405 bp, Glycine max
  unsure (1)..(405): unsure at all n locations
gcttcaacattcaacttcgagcgtctcttatattatacgactcaattagacatccgagtataaagttattgtcgggtgaattntctcagaacttcaacattcaatttcgagcgtctcaatatatgacgggactcaatcagacatccgagtaaaaagatattgtcgtcttaattggctcagagcttctacattcaatttcgagcgtctcgatatatgacgggactcaatcacgcatccgagtaaaaagttattgtcgtttgagttggctcagagcttcaacattcaatttcgagcgtctcgatatatgacgggactcaatcaggcatccgagtaaaaagttattgtccgttgaattggctgagagcttcaacattcaatttcgagcgtctcgatatatgacgggac

SEQ ID NO: 16925 - DNA, 186 bp, Glycine max
ttgagcaaatgcaaacgacaataacgtttttctcgaatgtctgcatgaatcccgcaatatatcgagacgctcgaaattgaatggcgtagctctgagcatattcaaacgacaataacgttttactcggatgtctgactgaggcccgttatatatgtgagtcgctcgaaactgatcgttgaagctctg

SEQ ID NO: 16926 - DNA, 411 bp, Glycine max
  unsure (1)..(411): unsure at all n locations
tgtccgatgtagcagtaatgatggcccgatttatgttggggaacggttaccaacccggaatgggtgtatgcaaagacaacggcggcataactagcctgataaatgccaaatgaaatcgcgggaagtagggtttaagctataagcccactcaggcggatatgaagagaagcaccgcgggaaggaaaagcagtggccaaagctcgcagttgagacaagaaagtgaaggaagcccgccctgccacataagcagaagctttataagcgcaggtttgggagacgaaggtcaagtggtcgcgatatacgaagatgatgttccgagtacattggatttggtacgaccatgcnctcctgatttccagctgggaaattggcgagtggaggaacgccccacatttacgcaacgagcataat

SEQ ID NO: 16927 - DNA, 317 bp, Glycine max
  unsure (1)..(317): unsure at all n locations
tcagaccaaagcaactcaaaatctaggcatctaaaacttttcaatttagtggattttcaaagtttgagaagtgaaaatgagaatggggtaaatttagagtaaactttnacctnacacaagtctataacatcaatccacactttntaaatttattttaaantttaaatttnnnagaataaaaatttgagtngtaaaaaccaatttaccctaagaatggtcttgcttcaattgggcattggggttctcggttgcggagggaagcattttataaatttaaataaatttaaaataggatttattatttaacttatttacaa

SEQ ID NO: 16928 - DNA, 484 bp, Glycine max
cccccccccccaccacggaggaggagtcaaccggcacaccacgtaaagaggaccggcgggaatgagccctgaaaaccggaccctaagacacagagcagcaactggaagggacccacggctaattataacaaaaacacgcccaagaaaaagctaagggccaaaccaagaaaaaggccggccaaaaaggggccttaacgggccctcttctcagaccaaaatgcgggtcgccaacttctcacacggcccgaaagcgcggcccctccattccgaaggggacacaaccaccacacttcacgagccgaaagaaacaacccacgaacaaagagcataacaggaaacagaccacgcgctcacaaaaagtcataacacaagggggaacaacacacaccaacgcgcacaacaaccccaaaacccacgaaaacacccgcgcgaaagacgcaaacgaccgcgcgcacacaagccgccgaacctcccgccaacgacc

SEQ ID NO: 16929 - DNA, 265 bp, Glycine max
cttccttcttacactgatcctttgttcttaatccttttctagagggagctgagcctcgagatccaatctccttatagcttgtttctttctaaacaatattggtagttcttcgtagctccttttccttcctaccatgaagctccctgtgacacctcttttatccctccaaatatccgaattaaaaggataattaaaattcatggcgaattttttttgttttaaaaaaaacacaacattgacctttaaatttgatttcaaataggat

SEQ ID NO: 16930 - DNA, 330 bp, Glycine max
ttctatgtacccatatttgtccacattgctgttcgtgcatttttatctctcgtttggttactttttataccccctctggacatgcttaagccattctacttaagtcatttctcgcttaacttaaaaataaaataaatttccaccgaacgtttgaattgtattatcccgtaacttcggttaaaatgaattccgaccgttcggtcgtgccgtaaccacattggaaatcaaagatgaggtaaaaaataatataataataaaagaaacatcttttagtaaaatagagcggaaaatcaatcggacgtcttctctttgggatttctcattcttaat

SEQ ID NO: 16931 - DNA, 241 bp, Glycine max
  unsure (1)..(241): unsure at all n locations
tttatgtcatgcctgcagctgtttgaagttttggaccacatttacgacctnccaactatcatgatataagaatctcactccttctaaaagaatcggagtacatcgattatttaatgatgggtcaaagggaacaattggcaagttttggatgtttcataatgtcatatatgcttgaatggaaatgaataaaagtatttgattaactgttctgtgaactcttttgcccgaacaatgttcacca

SEQ ID NO: 16932 - DNA, 593 bp, Glycine max
  unsure (1)..(593): unsure at all n locations
cacctctgacccgtctggctnatctttttctgtngtgtgattttatacatncgcncttcgatanattgtggnnnnnnnantttgantttgatatccttcgaaacccgngatacttagaggngnctgcnggatgcgaacttncgancaccagcagattattatatcttattattgaagaaaatttcgaggattgtgcttcctctggctgtgctctcttgggcagtcttcttgaactagacttttactctcgtaggaccgttggctctgcgcttgaaagcgaagagatgcacatctctagcttgatgcttattaaacatgcttatagttacttttatgcgcacttacatgtgttcttatttgagaatgaatgacgttaacactgtaatagtgtctgaaatcaaactcttgcaataacataaatatttgtgatatgtataacgaatatttgggtgatatattttatttgatgaagatgactgttaaaggaagagagaagtgcttcttcgataaataagaggacactggcttccaatgatcttaactaatcttggtgttcacccaagaacatatgttgaatgacactaaaacaagcn

SEQ ID NO: 16933 - DNA, 601 bp, Glycine max
  unsure (1)..(601): unsure at all n locations
ccgccccactcctcacngnacttactgtgtagttactactgtctttgtctcntgnncnnccacgcggncccaagangnnaagcagttgaaatttgaaacactcggacaccccgcgactttagatcgacctgcagcatgcaagctgagagtgtataacattttcttgttacactaacaagagattgtgcatgtgcttatgcaagggtaaagggtcgagggcgctcctgaaaacgctcaaacacagggtgcttgtacatgatgcatgctattatactgctgtccaattggacgggtcagatgtaggtcattctagctttaatttcagctctagcttttatggtggaactttcttctttttcattgacatacatctgagtctaaaacacacactcaaactgttgttctgatgcaaacatatcacataactatcgcgggctctcagcccganaaagtacagggtcatatatttggatcaatcacggcagcgacctgccctacgcatactatgcgctggttaccgccgatcttgactccacttcgctcgcaactcttgtgtattcantcgcttgctccactcgcgacctcaacttacctgcagcct

SEQ ID NO: 16934 - DNA, 156 bp, Glycine max
tctatcaccaagtcttcttgctcctcaagtttttattaaaagattggcgtgataaggtaataattattatatcaactgtttcatgacaatgatctataattctatttatctttgaatagcttaaatttaataatacaattataactattttacttc

SEQ ID NO: 16935 - DNA, 186 bp, Glycine max
tctttgagaaaacttccttgagaagctagagcttagctacacacacccctctaatagctaagctcacctccctgagaagcttccttgagaagattcctaaaaaagctagagcttagctacacacacccgtctaataactaagctcacctccttgagaagcttccttgagaagcttcctagagaaac

SEQ ID NO: 16936 - DNA, 304 bp, Glycine max
tgacataatgcttaaccaccatggatagtttcctaacacctcaacgcttaaccatgcatggcagaagcttaacaaaaggcttatccactatggacagaagcattacatctctatgtttaaccagtcctggctgaagcttaacacaatgcttaaccactaccaattaactggccttgctctacattgttaccaaaccagagaaacaaacatgaccaattaaatgaacaaaccactccagaagcgttgacttggatgaaccgtctatatttgcgttaatggaggattgaaaaacccccaaacttca

SEQ ID NO: 16937 - DNA, 247 bp, Glycine max
  unsure (1)..(247): unsure at all n locations
tttagacatcaactgtgatcatgtaattcgtgagaatcttnattcaggctggctcgtgtgtcttcttgtagtcacttctcatgcgcaagtagtggacatgtatacntttactatggcgtctacatcatgagtatttctaatgaagatcacctctctaaactgagaatgagtataaacatctgccatccttcaacttaaggggggggattagttccttcgagttatgtgtaataaaagcaggtgacca

SEQ ID NO: 16938 - DNA, 286 bp, Glycine max
agcttagattgttagatgaagagagaatattcttgaatggtctttatacaccgtggaaaacagattatctgagcatctaagtaccttgaagtttgatatgctaagaaatagattttctaacaatactggatggtttatagattaacattgaagcaagaaaagttggaatgaagcatggaagagagctggagagtgatctattaaacagaagtatagaacagaaatatcaagtacttacttcatgtgacaagctgttccagcctgtaaaattaggttgtatgtctaa

SEQ ID NO: 16939 - DNA, 214 bp, Glycine max
ctcaagctcgagtaactcttaaaggataaaagatcacattttatgttttgatgttgacacaaatagccagcaaaaatgctacccttctttaaaacttctacgactaggaaaacaacaggaaatttcttcaattggatctaaaggatcttaatgaacttcatcatcttccgaaagaagacacaatttatcgttggagagatcgttcaaaaccaca

SEQ ID NO: 16940 - DNA, 229 bp, Glycine max
agcttaagctccttcaactgcacaaggctcttaatatttgaagagtatccttgcggaaccttcacccgatgaagacactgacaaaaacttatctttgccttcttggacaaacgatggcaggctgcgggcaatgaaatctttttcccatcaaaccttggatgcaactgcgatcgtatacccatatcagctagatcttgatgggtattcaagccatccttcgtcttgcctt

SEQ ID NO: 16941 - DNA, 363 bp, Glycine max
  unsure (1)..(363): unsure at all n locations
ttagaaagatatgatcttcttggacatcagggggcttcatggtggaacaaacaatatggaactccttaagatgcttatgaggatcttcacctgcaagaccatganacttgggcagcaaatgtattagtccagtcttgagaacatatggaacaccctcatcaggatattgaatgcacaagctttcataagtgaaatcaggtgcaaccatctccctaagagtcctctcacgaggtggaggttgagccatattctcagtatgaaaattagtagtggaatgctcacaatcagaatattcagaatcaccctcaacagaatgctcataatgcacagaatgaccaggatgcacactatgcctaactaatc

SEQ ID NO: 16942 - DNA, 289 bp, Glycine max
tgtatccgagaaaggttccctaagaagaggatgtttatctgtcactgctgctctacaacatccttattttcttctgggtggtgatgaagtagctgcaatcctttcaaaattaagcttgaacaaaaactgagttgctaagcaaagtgagtatatcgttacaatttctgataggttatttttttttactcattggttattgtcaaattttttgtagtccgcttgagcagattttttttttgtccctccctttgcaggaaacttagaaaataatttacaatgaatttgaaac

SEQ ID NO: 16943 - DNA, 283 bp, Glycine max
tgtttacaattgggacataaaatgtttagtttcaaatatggccggagatactcataatgtgtcttgcacttattacagatagtccaaaaagtaccagcatttgtttgtggaggaggaatggagggtgtttgcggatgtggatgtgccccaacatcattatttcctgtatcatgctagaaggtgcattctagtgaagtttaatataaccattctagtggggagcattatcctgaaatccttccaatctcctgtgctggtattatgctagctttttgaccttatt

SEQ ID NO: 16944 - DNA, 257 bp, Glycine max
  unsure (1)..(257): unsure at all n locations
agttaacaactagctttgagtaatagtttttacatcaatctctgaaatttataatgaaatgtatgaatgaggacatgatgaaggccatgattgtatatacaagccaattgaccaaaaagcttaccttgaattacaattgtatccttcgcaccctttgtgagctgaattacattntcaaaattgaaccctaaacttgaatgaatatctctagataccttggttagattctaggagagcagatagttcaagggcaaata

SEQ ID NO: 16945 - DNA, 439 bp, Glycine max
gtgtctcataccccccaattcaatggattttctatgtttgagaagtgaaatttagaatgacgtaaatttgaagctaaccctcacctcacacaagtccataacatcaatctaaactcgctcaaactggatttacaccctaaaatccaccgaatcaaaatttgactcctcaacacccaatatttccctagaaatggctcttggttactgtggtcatttgtttctctctctagcacaagccaagctgtctcataagtcctacatgacacttcaagctaggactaactcactttaacctccatttaccacagaattcagatttaacccttcaactctccaagccttactcttttttcacttataacaccacattctcactttctatacctagggtaactctcccttcatatctaacaggttctgaagcacttcatcatataat

SEQ ID NO: 16946 - DNA, 172 bp, Glycine max
  unsure (1)..(172): unsure at all n locations
caagcnaaacaagaaaccgaagcagaaggagcggaaccctccatcatccgttgtggaacacggcccaagtgcctcctaacaaagacacaatcggtatcgctgatacagagggcgctactcgagttgacaagcttctggatatcggggcgaaacttcgaaaaatcggagcccc

SEQ ID NO: 16947 - DNA, 520 bp, Glycine max
  unsure (1)..(520): unsure at all n locations
ntgacctgagccctcgagancgcgacctctgagacacctgcagcatgcagcttaacattcaatttcgagctgtttgtatatgacnggactcactcagacatccgagtaaaaagatattgtcgttcgcattggctcanagctctcacattctattttgagcgtctcgatttatgacgggactcactcacacatcctagtaaaaaactattgacgcttgcattggctcatatcttccacattcactctcgagggcctcgatatattgcgggactcaatctgacatccgaggtaaatatcattgtcgctcgaattggctcagagcttcaacattcaattttgagcgtctcggtatatgacgggactacatcagacatccaagtaaaacagtattggcgtgtgaattggttagaagttaacatttacactcgagcgctcgatctatagcggtactccatcgacatccgagcgcaaagtcttggggtntgactggccagagctcaacattaatccgagcgttccn

SEQ ID NO: 16948 - DNA, 331 bp, Glycine max
tcagttagcacctcctcctattgatggtgtttggcttcctaaaagtgctgtctatgcattagttgatctaatagtagttgtgtttgggcgcccaaaaagactttttaaggagtgtgcaaaacgcatacagtctgggatgaatataattcaaggttgttcaccaactttttttgtgagttggaaattttttcttcttttgggtttgatcccagttttttgcttggcatataaagcaaaactcacttgacagcaccacttattttaagtacagaataataattacttattatggtatgtgaaatcagtttgtatgaattggctgtccaaatac

SEQ ID NO: 16949 - DNA, 340 bp, Glycine max
agcttgcaagtgcttccttatgatagtagtattagaagtagtcaccaacaatttccaaggtaccttccgttccaaatgactcgaatcaatccacaaggcatacctccagcaatgatgcctcagtataataaaggacatttatggcctcacccaccaactctcacagatttcccaaaattcgtgcatgcttgggaggtaaactaacttgtcttattatttgattaatgagcgacataatatatgctatggtaatttcctttcaaaagaaattaaaaattatttatttgatccttacattccctagacataaaaaattctcttttagttcttgtctaaaaca

SEQ ID NO: 16950 - DNA, 110 bp, Glycine max
cagcttgaaagagtgtaaccctccataatgcatattgaaatactggtaatgtgtacactatcattgtaagaatcaactttcgctagtaatgggggcgctacgtgaggaac

SEQ ID NO: 16951 - DNA, 329 bp, Glycine max
agcttggcaaccaacatcatcattccctctcttacttttcctttgagaaaccaagctaggtaagagagaagtgtttgtgtgaacttgaccccatggctacatttgggaggaggtatccaatatgtttggattggggctccattttacctttatttgttttaaatttttggtgaagagaaaaagggtttgtgagaaaaatctattttgctggaaaaggcttgtgaaactagatgaatgtgcttctttcttcttggttttgctttgaattttctttggtatagatcctactacaaaggagaatctgctgaaactttatcaaaatttttata

SEQ ID NO: 16952 - DNA, 336 bp, Glycine max
taaagaaaaggccaaactcccttccaaaatctgatttttggcgtaaataggtggcttggttcgtgctcgtgcgcttagcgcaattctgaaccgcttagcatgcattagtgaattttggcttagtgtgggcttttctcgctcagcgaatggattgaagcggtgcgcttagtgagatggcccttcgctcagcaaacatgcacagctcatccttcttccaaattcttcctcgcgcttagtcgaggaatgtggcgttcagcagatggctcgctaagccagcagattggcttattgagaaggcgaaaattagaacttcacaaactcacctaattaacctaa

SEQ ID NO: 16953 - DNA, 211 bp, Glycine max
ccagaacatccattatgtagatggatccagttcataatggcatggaagcccttttaatgtttacaggatagttttggaatcaatattgctagtaattgcattgtcatgtctggaactcctcactaactgccacactctttacttctcaaaaattggattgcttcggaacattccaagatatcctctggtccacttttatcatcagtgatgt

SEQ ID NO: 16954 - DNA, 427 bp, Glycine max
caggcgggacttatcaagagtagaagcaaaccataatcgacgcataaactaagattagctagtcttacctaacttcgtcttggtataaaacgatactgttagcacgcacggagctttgaacttaccctcttcatataagtcatgcctaccataagagaatcacgcatgtgtgatcatcaatattgtacgagggaagcaaagagaatactcttgaatacacactcaagactactgaggagatggtgtgagaattcccacctctctaagggtgagcgggtacgtaccattactaattgcacaatcagccccgcgcatatctgctagcccttcgactctcgatctccacaacacgccttccacgcacatctcctactactttcactcctgctctgcggcgcaatgctctccacagctaccgtccctaccg

SEQ ID NO: 16955 - DNA, 130 bp, Glycine max
  unsure (1)..(130): unsure at all n locations
tcgtatcggaggaagaacgaggttttttattctgccagngagtacgacgtgcagaaagtgccctttaagttcccgaccgcgaattttccggcaagcgcaccgggttattggcctgaaaaacatgtttccg

SEQ ID NO: 16956 - DNA, 486 bp, Glycine max
  unsure (1)..(486): unsure at all n locations
agctntggaccatagcaactcanaatctatgtatccataacccctcaatttaatggattttcaaggtttgagaagtgaaaatgagaatggggtaaatttggagcaaactctcacctcacacaagtctataacatcaatctaaacttgctcaaactggttttacgcctaaaattctgccgaatcaaaatttgactcctcaacacccaattttaccctagaaatggctcttgccttcactttggtcatttgtttttctctcttgcacagcccaaactttctcataagtcctaaatgacatttcaaactaggattaactccctttaacctccaaataccactaaattcagaattggccttccaactctcaaagtctcactctttntccactcataacactacattctcactttctaaccctaggtcaactatacccttcatccctagcnagtttncatcaacaatntcagcacataaacatcacaagca

SEQ ID NO: 16957 - DNA, 186 bp, Glycine max
cgaatgtgatgcccaagagcatgttaacgcctcccacctgaggtcgagttccatggtggtccggaccttcgacggcaattgccgagaggtaaggggagagatcgacctcccagtacagatagggcctcacacttgccgagttacattccaagtgatggatatcaacccagcttatagcttgtctgt

SEQ ID NO: 16958 - DNA, 344 bp, Glycine max
acactctcgaacactcaagcttcgcaagccagcttccatcaaatctcaactcatctaatatcctatacaaagggtccgtaggagtagaaccctcaccattaacactagatgaagaacgaagactcatgttggttcttaagttgtggttctttcttgttgggggtttgaaaacaaaaggtaaaagaaactacggttgaaactagccaaaataaacactaaaagaggtgtgaaagataaggtaaaaactaattggtaaaaagcaagttatctaggtggtttgacaatggaagataaaggaaatttaaagcaagctagatagtttcctatgtgaaggcttagatgac

SEQ ID NO: 16959 - DNA, 311 bp, Glycine max
  unsure (1)..(311): unsure at all n locations
agtgttttacatntttccccaacaaagaaaaactgacctacacaatcgtattgaacaactaatcacatcactgcatgatgaacaacttcacaaattttgcagttttaaggggttgtggctggcaaccaccataatgaccacaatatccacctctttgtgatgcacgttacccacacttaagttctctcaggcaaacctaccaaaccacatgcacagtcacacacaatcacaaacattggaaaaatatgaaagaacaaaatgaaaaanaacctaaatccatattntgccttaaacatgtgacaacaatcttt

SEQ ID NO: 16960 - DNA, 147 bp, Glycine max
ctctagctccaagaccaggcctgactcacttccaaaatcttgtctttgcgtttttaggcggctaagttcgagctcgtgcgctgaacacaattctgaaccgtttctcctgccttagtgacttctggcttattgcgtgcttcattggct

SEQ ID NO: 16961 - DNA, 203 bp, Glycine max
tcatctccaaaagtggagtaatgctccctcatcatccaactgccctataaatattaaatttctctttaaggcaggaatatgtttgacattgtgcaatgtccatagggatccactggaggtcttgatgtcaatatcacctctttcacaagtcaatagattttccatctgccatgtaaactttcccaaacttttcagaaatatag

SEQ ID NO: 16962 - DNA, 262 bp, Glycine max
  unsure (1)..(262): unsure at all n locations
ctttattgtataattagaacctgaaagtgagagcttggttgctagcagtgtattgtcgagagggttataagagttttgtgtctcacaagcatctttagcctttgatgcacatcagataggaattatatttcatgggttaggtaatatgttcttaactaaccattaaaggacacgtgaatatgtaaatgtgcttcanattatttatgctgagcaaaatttctctctttatatgctgaggaaacatcttttggattcgtggact

SEQ ID NO: 16963 - DNA, 229 bp, Glycine max
tcgtatcggaggaagaacgaggattattaccctgccggtgattactacgttcagaaaatgcccgagaagttcccgccagcgaattttccggcaagcgcaccgggttattggcctgaaaaacatgtttccggcgaggcttatccgccggcggttacggcaacgtccggcggaggggaaccgtcggtttatatgattcccgggcccgggacgttctatcatgcaccatttt

SEQ ID NO: 16964 - DNA, 325 bp, Glycine max
gatatagcccttgtacacatggtcgaatcccccaatgtcgacgatgaaagcctaatcaaagcttctggtggtggctttgatcttgatgaggagaagcaacgacagtggttggatggctaggtggaattctgcgtagttcctgaatggtcatggagaacaagagtagatgattacacctggaagtagcccacatgtaaccaaaaatggagatcaacactatgccagataccaccccagagacgacactaagtatcatctttctgctttcactggtgttctttcccttaggtatgagtttagagctttggctctgtgcattcccaat

SEQ ID NO: 16965 - DNA, 191 bp, Glycine max
tcaacagaagctgccaaaaacaaaattttgttctaagcatgcagatgcataagcttaaaaatcgaagtacactaatctcaaaacaaatagtagcaattgtaagtacccaaagagcagaccaaccatacaaaggcagaactttccatggttaaaaccatagattaaaattcaaagggcatataaactgaaag

SEQ ID NO: 16966 - DNA, 330 bp, Glycine max
tagtgatgcaagttcacaaagcatgaattgtgtcatttctaaaacttgatgataaattcatcaaagacaataatttgaagagcacaatgagcctaagtgtttatactcaacatgcaactatgggttggagtttatttggatggattacatagatttttggctaaagaactaattaaggtccattttctaattttcctatgaattttcatatttatttacctagtaataactttagacgattcatgatatggttttggacagtttttatgtttttaaggcttcctaagtcattatattggttagtggggtttttattcctagagagaaata

SEQ ID NO: 16967 - DNA, 213 bp, Glycine max
gcacgtggcttattaatggatcaacatgggattgcttgaatggagcaaataatgggagtactgcgctttttctttaatatatactagctgatatgctttcttatgattggggacggatttaatgtggctgtaacgtgagtactgattttaaatactcgatgtacgtagttgtcttgtcagcgatttttttctctatatatatacatgagtgat

SEQ ID NO: 16968 - DNA, 283 bp, Glycine max
tgcagaatcggtagagttatggggattattgtttaccatagaaattagatgcatcacaggaagttcttcttcaccaagtgatgctgatttgcaatcccttttagagctccttcaacaaattttgatgaaagtgtctgcttcaagatcaaagaacttgtggctaaaggtacattgtcaccacctatgtctttctttctaggctctccgagagctgcagtattttttttgctctaactgggatttgtatgccctggtacaaaacatgctggaataaaataatttt

SEQ ID NO: 16969 - DNA, 170 bp, Glycine max
caagctagaagactctaccttcgaatgcacccccttatcctatctttgccaagtaaatcgcgggctgtaacagctgatctagccttcctagcagagctgaaagcgcccaacgtagcataatctcatacaactatgggaatcattaccatggcctgcatgacataaaccat

SEQ ID NO: 16970 - DNA, 309 bp, Glycine max
  unsure (1)..(309): unsure at all n locations
ctataatagggtgagaagtgaagtaaaaaagggttcaaccccttaggcacttctctctctctcgaaatagctgaggaaaattagtttcgtgaagaaaatccaagtcgaggcgcttccgtaaccgttccgtgagtaattacgcgaagattctagaccatttttcaagattcatcgttcgttcttcattttcttcagtcttcaacgggtaagtacctcanaccaagcttttcaattcattctatgtacccgtgggtggccacactttgttcatgtatttntattctcgcttcattactttttatccccctt

SEQ ID NO: 16971 - DNA, 302 bp, Glycine max
tcgaatcgaaattaacccaaatgaataacttataacagagcaaaaaattgaaataaagaaaagggcaaaatcgcaatgcacttacaacgattcaaggaagggaaaggaatgtacaaatgctaaaagggtgaaattgaagagagagagaaaagggcttcgttttgagatttgcaaattcgtggggttgttatggggaggagagggctaccattatataggctcctaggtaaactttgtaattacgataacgccctcgtagtttttcgtcctcctataaatttggcaaggattttttttttttt

SEQ ID NO: 16972 - DNA, 162 bp, Glycine max
aatgctgaagctttggttctaagagaggatgcatccgtagattatactgtttcttgatatcccagctatattactggcctcaggacactcagctttacttagtgatgcagagcagcacacacttttaggctatactcacagattttgtaaaaaatgcttgct

SEQ ID NO: 16973 - DNA, 220 bp, Glycine max
  unsure (1)..(220): unsure at all n locations
agcttgagaggattgatggngacccggtgtttagagaaacgatgatatgggctacgtgggagtacgtgagctcagttggaggtgggcaacaggggatggtgggtttatgcgcgcattgtggatatggaaagcttgtngtgcaccatcgcccgaccgtcacctagtaccacatgtgatgggtaccccataatcctacaagctagagatgaggaagtgctga

SEQ ID NO: 16974 - DNA, 116 bp, Glycine max
  unsure (1)..(116): unsure at all n locations
cgcaaactaagtgctcacctttagtagaagttaatctttcaagctgntncatgtaaaccttttcctctatatgaccattatagaatgtcgttttcacattcatttgatgtaactca

SEQ ID NO: 16975 - DNA, 620 bp, Glycine max
  unsure (1)..(620): unsure at all n locations
cccctcccacgctctacgtacatatatatatngccgtgttgattacgattgtcttctacctcacggccttataagtgtgngctcaaggtangggcattgagtccttcgnagacccccgatncctanagtcgaaccgcagcatgccagcctggtgtactttgttcgctccaagacctaataacgagatggacatcnaactgcaaacatgaatataccatccataaatcgaactgaactgaaaccggaatatattcatcaataaagaacgattcagcagtaaccaaatacctcccagagtttcattccagctacggagataatctacctacctagccatgcgactactaccggaacctttgctattgctaccatcgccactgccatgccgtgtgtgactctaaaaccacccccttccccaagttaatttgtgagggtttgacacacggtctagaagatantcttaatatccatgtcactttctatggcacccacaacaagactaactgttgatgactacggctgagatcgacgactttggtctgcccctttcggcctctttgccggagtccggacatcgctcatgtgcgaacaacattnctcanctaatccgaacgtcaccg

SEQ ID NO: 16976 - DNA, 332 bp, Glycine max
  unsure (1)..(332): unsure at all n locations
attgatttgttattatgnctttatcgaagtgtgtgattcttgtgtattgcgattgatgaatgaaaggtatgattgatgattaacaagtaaaattggaatgacaaagtggtgaattaatgtgagctatgctaagtaaatattagttggctactatatgttgtcttgtttctcttcattagttaggaatgttgtacaagtaagcttcatgatgatgaaccaagttgattcaagtagttctgatgatgactaagatgatgacaaanagtccaaagaatgatttctagattgagtccaacaagtcaagatcaagtntaatttcaagcttcatgaga

SEQ ID NO: 16977 - DNA, 125 bp, Glycine max
gcgaacttgaatgttaagggaaggttcttgcaggcccgaaaaatgaatatatatataacatatcaatagatgtatctatatatctatatgtgcatctataggccatactgggacaaaataatttt

SEQ ID NO: 16978 - DNA, 420 bp, Glycine max
atgaggcaacatcatctcatctctattgttcgccaactaagtctaatagttatcggctaactatgttaatgcttaagaagatggaagcttatcagatatttatgccatggtctagattatttggctcgctttgcatatctgtacatctttaactatcacaaacattatatcactcaccaagaacattcgctagattacaaataaaaaactccaatctagtcaacatggttagggagggactattaggtaaactctcttatttcacattcatattcctcatggcttggtgatagtgatttgatgatgatctagacctcaatgaaagagagcacaactcttgcgcacagagaaatcagagcatgagctttgattcatcataaagatgatattggatgtcatattaaagcatctaaaacacat

SEQ ID NO: 16979 - DNA, 243 bp, Glycine max
  unsure (1)..(243): unsure at all n locations
tacccataaatagttagccaataattccttttacataccttngcacaaaacgtcgaactatgttaccctagaattaatatctatgaaggcaatgtaaggcacaacggagatatgaaaacttaagctcaccttccactcttacctagactggaggtgctggcctacaatccaatctatcgtctgggttttcagcttcataatcacaagattagcggtttccaaaaataccctagggtttttttt

SEQ ID NO: 16980 - DNA, 388 bp, Glycine max
  unsure (1)..(388): unsure at all n locations
gcttgttacttcactagcttcttaccatctttcttaagcttgaacacccacttattcttcaaggcttttctgccttcggaaactttcacaagcttataagtatcattcttctggaaggaatctatcttttcttacatcactttccttcaatagaatttatccttatgaatttcaacttttgcaaaacttcctggctttccttcattgatgatgaagatgtactccaaaccatggtaccttctagatgactggtgctctctatttgatcttctgaacagcaactggctttcttgctcaacaccttcatcatcaccatactttatagctagctcatcatcaaccctaaagtcattatcaagatctaccncttctatggcaattcttctag

SEQ ID NO: 16981 - DNA, 234 bp, Glycine max
  unsure (1)..(234): unsure at all n locations
tgtaaggttaaagtctcacgattgtcacgttctgatgcaacaattgttagtcgtggctatacgagacatcttgccaaacaaagtcaggttagcgataactcgcctgtgctttttcttccatgctatatgtagcaaagtcattgatcctgtcaagtttgatgagtnggaaaatgaggccacaattttactgtgctagttggagatgtattttccccctgcttttttgacatcatg

SEQ ID NO: 16982 - DNA, 331 bp, Glycine max
ttgcacgtatcagtcatgtgtatggaccatatcgtagccaaagtgctcatcgataatggttccagtttaaacgtgatgcctaagagcactttggagaaattaccattcaatgcttcccacctaaagtcgagttcaatggtggttcgtgccttcgacgacacccgccgagaggttaggggagagatcgatctcccagtacagataggccctcacacatgtcaagttaccttccaaataatggatattaaccccccctacagctgtctgttgcggcgtccgtggatccactcagtgggagttgttccctctacactccaccaaaagttgaaat

SEQ ID NO: 16983 - DNA, 431 bp, Glycine max
  unsure (1)..(431): unsure at all n locations
agctcgagactggcgcgaagcccaattntatttactcgtgctaagcgcagcatcgtgatttcagagcctatntaaagtctatcttgtgcagaattagggtaccacctttagcactgttatgacaacttctacagacaaccagggcacagaattttagagcagccacaggcctatttggggaaaagagccctagaagcagaaaataggagcagcttgtgcattgaagcctaggttttgtcattcgagaaagattattgagtacagagtgagtgtgagatgctgagaagaggagggtgaatcccncttcttgtgtaaggaactatcattctttggttttaatctcatctattgttaggggttctctggtatgggtgtctaaacaccctagttagggattctaatgaacaactaatgtaaatacctaatatcta

SEQ ID NO: 16984 - DNA, 208 bp, Glycine max
agttgataggatagaacctaatgtctatctcatataccagatgacgttgatgatcccacaacttgtcctcaagcctatgcaggtgtcgtgggattcaactgtgattgggaagcacaatgatactgtccccttgttcataaagcatgaagatcatggggaaatagcacacgatggtcaatgttttaacatcatattcttaaaaattatg

SEQ ID NO: 16985 - DNA, 245 bp, Glycine max
caatgcccaagctagcttccttactccatgctcgatgccaactttttatcgacagtttattatccgcaggggtcaatgatgatgggcctgtaccgatcaacatgccttcgttcctattgagagaaactccagtcattgctacccaccttaagacatgcccaaaggacgtaacagcctctgactacatctccgggcaggttacgggagagagaaatgcctaagttcacaggggcctttacacatgt

SEQ ID NO: 16986 - DNA, 629 bp, Glycine max
  unsure (1)..(629): unsure at all n locations
ccctccgctcgccctctgtcantacattctacnttccactgttacatntctcaactctcnctcatgttgtaccagggtccncnnagtgggtgnnattgaagcccttggnaaacccgncganctctagagtcgaacttgcagcatgcaagctngagtcatccaaattctaccacacgtctctttctcttttcagacaaccatcagcgcccttagtcaagttctctcttattctcaaatcagcttcccttgctcttgagcttcactgctagntagctcacaattctcttgcgtcttttcctctaccagatactgatgctaaaactaccaaattagacctcttgcgtgttgggataagcctcaaaatcctcagagggaagtgttgtgcggtgacactgcccaaaactgcgaatgcagtacttcttggtagttagcgtgttggcccagctgacactgagtaaagggtgtataatacatgcatctgagttactcaaaccttacaaaataagagtatgcgcgacagtatgcagtctttagcatgatgtgtggaacaggacatcaacnaatcacatcnctaatagaaacctatataggagaagccatcttgtagcgctactctcaaagtcattctg

SEQ ID NO: 16987 - DNA, 258 bp, Glycine max
cccacaccatccaagcgtaacaacattctttctgcatttgcttttacagccaaactaaacaaggctaaggcagaaaactctgccaaaacaccaaccaaatcacagcttttcttacttaaagaccccagttacaattctttcgaaccaaatcgttaaccgtcggaacgactcctaaattctactggaggttttatagacattatcctaccattatgaccctctggatctactagcaacatccagaacgcaatttacatt

SEQ ID NO: 16988 - DNA, 150 bp, Glycine max
tataatactcctgattgaaagttagattgttgttaagtcaaagctatatacctgatgacgaagatgatccttacacttaacctttgcatttacttgagaaatgagaataggctgtgcagggaatgactcacttggcgaacaggtgtacat

SEQ ID NO: 16989 - DNA, 316 bp, Glycine max
aaatgcccaacattgtgtggaggaaaacctgtgtgcgagattctttttggcagggtaatgctatatgtaaagtcattactggggttgataatggattacatttacatgtcatgatagccaagtttttgtatttacatgggcacacaatgaaaggtagcatatttattttggttctaaatttgtcttcagcaacaatgaatgcactgaactaacaggtttaactcccacctttattgatgtgttcagctgcattataagctaccaaaattgagcattgaattacaagttcatgatatttgcaatctcacctgttaaa

SEQ ID NO: 16990 - DNA, 141 bp, Glycine max
aagctctgccactcaagagagagagatcatcaactattccattcttttctcactcgctcatgcttaccgctcacatctccctgcatcactcttccactactgcattcctattctaacgcatctttggtgaccaaatctcaa

SEQ ID NO: 16991 - DNA, 299 bp, Glycine max
  unsure (1)..(299): unsure at all n locations
atacctctctaatagcttaacttaccccatgacgaaaaacatgaaaattccaaaaaaaaagtccttactacaaagactactcaatagaatggccaaaatacaatgcccagacgaaagacaaacctattctaatatttacaaagataatcgggctcatacttaacccatgggcttgaaaactaccctaaggctcatgagaaccctcaggccttcccttggatctctagcccaatctacttggagtcttctacccaatgcccttgcggggtatgatngcatcacaagtgaaatgttatgac

SEQ ID NO: 16992 - DNA, 275 bp, Glycine max
  unsure (1)..(275): unsure at all n locations
catgaatttacttantcttgtcaggaatcctcgccataaaattgcatagacctgccaattctaaatgaaaaatgttatacattcaaaaccatganaatgcaatgtaaacctcaacaaacaaacggaagcccacaaaaacaaaaccaagaaacttatgtttacacaaaatagaatagcaacacagacttaaatgacacatgcaataacatttcaatcaatgccaaaatgccataaaaactatgatactattcgttgaactactaaggcaatacatg

SEQ ID NO: 16993 - DNA, 246 bp, Glycine max
  unsure (1)..(246): unsure at all n locations
ctttaactnccaaaccttaccctcgaagctacagtccatctccagcttgcgattacaaccaaccacaacagggcaaaggcggatttctctacctggacacacgccaagccactgttaatgtcacttaaagatcccgtttacgatcctatggaggcaccctggatctgagggcataacttttcaataatgctggaggtgtttaagacctcatcctgcaccgtgaccgattggatgttccatgaccat

SEQ ID NO: 16994 - DNA, 328 bp, Glycine max
  unsure (1)..(328): unsure at all n locations
atttcttaatatgagaatttcttaaattgatatatgcatgganttcattatatatatgtttcattgcttggctggcttatccttgcattgtttgtcggcgtggctaactagatgttcacacgagtagattgcgagaactcgaccttgntaccttttctctatggagctatgccctactatctcaggccttgagcaaggatggatgctacttcttgatgtgccagttttcgttataacgagttaatattgatacgttatgttcccgatggtactattatgatgacacactcctttgatattactgtgactttcgacgagatgatgcgta

SEQ ID NO: 16995 - DNA, 287 bp, Glycine max
taaattaattgctctgatgtaacaagaatcaataatgatcgcttcaacttttaataggttttttattgcaaatccaaagatattttgatgctttgatgatgccaaaggaacacgcttctcaagttctattcaagaccagaattcaagatattcaagaaattcaagaaataatgatcaagaaaattcctagaagtctaggaagaaaattccaagttgaaacagcaaaaggttaagccaaaggatgtaacttaaaatattctttaaagagttctactatctgataatcg

SEQ ID NO: 16996 - DNA, 156 bp, Glycine max
cagcatcaatcaccttgctgacctaacaatttaggtatttgtggctccccataatggatacaaacacaatggatcacattcacaaacaccattcaagtatgaaaacgtcactggtgttccgaatgcaatggattggatggaaaatggagctgtcac

SEQ ID NO: 16997 - DNA, 304 bp, Glycine max
ggactagatggggcctatgcaagttgaaagccttggaagaaacatgtatgcctatgttgctgtggatgatttctctagatctacctgggtcaactttatcagagaaaaatcagacacctttgaagtattcaaggaggtgagtctaagacttcaaagagaaaaagactgtgtcatcaagagaatcatgagtgaccatggcagagaatttgaaaacagcaggttcactgaattctgcacatctgaaggcatcactcatgagttctctgcagcattacaccacaacagaatggcatagttgagagga

SEQ ID NO: 16998 - DNA, 283 bp, Glycine max
agcccctcttaggatccgaacgcttagaagtcccaggtgaggccacagaagcactacgaagctcaagtaacggcttcacgatccccaataaaggacattcaacaatgtcctttacctggtgaatctcacttctgtttatacatataagcgatagacctctggatccatgggccttgttgtaaagtcccaatatagggtaataaatttttaattttggttgaggggggaggatcttccaatccaacaaaattctcatcgccccaagatggttaaggcaaatcct

SEQ ID NO: 16999 - DNA, 312 bp, Glycine max
ctataaatctcaactttgcggattagttttttcggcgaaatgtctgaaaccgggctgaaaaaaaaaagaagtgattttcctactttgataaatgaaaaaagctgggttaatttaaaaaattataaagatggggggacccatgttggtaccaccattccttctgggttaatttcccaacaaccccctaatatctatacttcaattatttcaggcctttgcattatccaccacccaatcaaacaaaaaggctttcccttaatcaatcaaaaaggtagcctggcgcacattcaattcctaacacatacctaaaca

SEQ ID NO: 17000 - DNA, 374 bp, Glycine max
  unsure (1)..(374): unsure at all n locations
agcttgaggtttggtgttggtgatcaaatgttaccattttcctctctctttgatgttgnttagttgagcaatgaagtagtaagcacttcttctagctacctttgactccatttttttttctcatagagcacccatgagagctcatgaaaatttttttttaggtttttgaatctgtttgtgcttttttgggtttttggtgatgttgctatgatgggcttgttgtcgaagtggaggaaagatcctccttggacccaaagttcattcctttcttcttcttcacaaagttctctttttgcttctataaaggtaagggaagatctaatttggnttgattaatgctctgattggtttgatttatacttcgaagtctgaat

SEQ ID NO: 17001 - DNA, 52 bp, Glycine max
tagttcagcttatcattctcaaactgatgtgtcagaatgaacgaaccattca

SEQ ID NO: 17002 - DNA, 344 bp, Glycine max
taggataccctagcagtaaggaatcaattctttctaacatagttttgaacccaggcaccatcaataaaatactgactcttctacttccgactaatgacaaaactaggatacaccgtttataaggatcacgatggaggaacccacgttttgatgccattccttcatgagctatgacctcacaagctcttttttatgtataaatcacgtatctcagcccgaatggtatgacgccatccagtgaaccgggatggctctccataaactagcccaaaagcggacctgctagacatccaatacccaacacaaaccaaaacatcaactacggaaggaatgttctaaccaaa

SEQ ID NO: 17003 - DNA, 246 bp, Glycine max
agcagacaaatataaatgtctacggaaaacatttactttttttcaaagcaccaacctaaactctttcacatcagacccgggcacggacccttgtgcgtgaccccccaagaactaatgagcgatctaaatctcaagatgagaaaatcccaactcttataccttgagactgattaccttttatagtggtcctacgcctgggaggcttaaggggtaccttttgaactaagagactgaagtttttaactg

SEQ ID NO: 17004 - DNA, 418 bp, Glycine max
  unsure (1)..(418): unsure at all n locations
cgtagacacgcgnggctagaaccttcgtacatcaggagtctcagagatatncctcaactcccatgcaagcgcgcaccgtgatctactatatttttcaatttttagttctccgccacaaagaggagcacttcttgaattctggtactcaaatggaacgcgagacctcctaaatttctcgagctgattaagatgacaaccgggtttccgtgtaatacatggacaagaatgacgttgaatcatacaatggaggactatatttattaagatctttaatcatgccccaagattcgtatatacctgttttagaaagaagaaacatgtgtccctaaaaaacattattcctgtctttccaataagcccacgcctaaaatcttgtggctattgttgcaaatgaaaatcggagttatgtctttgtacc

SEQ ID NO: 17005 - DNA, 272 bp, Glycine max
ctcaagattcttggattataaggttcgacttaaataacaacaaccatatctttggtactaacttaaactttactttagagtcaccaacatatccagtcttggaaactacgagacctgacatagaaccatgctagcacttctcatactaatactgagttttgatctgaacactggctaacaaagataccgatttaatcattgttctcctcttggaagaggacatcacttattgcttcaacggagaccgagaggtatactatgagtatcttact

SEQ ID NO: 17006 - DNA, 155 bp, Glycine max
ctttagctataaaacctgaattaaaacgatcagaaacttctggttttctatttcacagggcaaatcgtgaattcaaattttaatagctgttgtgaatcatttctggccactggtgattgattacatcctgtggtaatcgagtaccagagagtaaa

SEQ ID NO: 17007 - DNA, 331 bp, Glycine max
  unsure (1)..(331): unsure at all n locations
atgtgaaaattaacgcaccatggaaaaaaggaaaacaatggtcatcgcgaggcttcttaaaagggctgtttacaccaaatattatattattaagcactggaaaaaagaaaattgagtggcactacgtgaactatttggttttcagtaaaacctaacaattaggttgaccagaattntcctgtaaatataacatttgcctttctccatcagtttaatctttcaaaacggaagggaatgtttcanaagtaatattgtcaaaggtcaacatcatatacttcatctaacgaagtgtgtatgtgcatgcccgtttagtcacanaatagtagcacta

SEQ ID NO: 17008 - DNA, 110 bp, Glycine max
tttggagcaatctcatataaaaccgtgatgattagtatgtaaatatacaggtccttttaacaccatcaatgtgattacatacaacgtttgctaagttatattagaagtgt

SEQ ID NO: 17009 - DNA, 408 bp, Glycine max
  unsure (1)..(408): unsure at all n locations
agcttttggcacaaagaagaagatataattcttagagattcaaggcttgtnaaggattgtatatgattgattggatcgatagaaagatctattgaaaatgcaaaacaaagccttgcttttatagactcttcatgtctggccaagaggaccatttagaagagttattacttttataanaacttaaaaccaatttgaaaaagtcaaaaaccatttgaagagttgcatcttttgatttattcagaaacaatcactggtaatcgattaccaaatcagtgtaatcgattacataaagcttttatgtgaaaggatgtgactcttcacttttgaatttgaatttcaacgctcaaaggaactggtaatcgattaccaaaactttgtaatcgattacagctttttgaaatcaagtgg

SEQ ID NO: 17010 - DNA, 129 bp, Glycine max
  unsure (1)..(129): unsure at all n locations
tgattgaacattgtatgcagnggattgtttggtatgaaatgagtgtttggaaatgatctgattgagcaaatgtatgaattgaatggattgggatgattgggtgattgtttggatcaagtttgccatcct

SEQ ID NO: 17011 - DNA, 393 bp, Glycine max
  unsure (1)..(393): unsure at all n locations
tggctggnntttgaacctcggacatcgggagtctcagngataacccaaacaccgcagccccctgaacatgagaataaaaagtgttccacttggtgccgacccaccacgccagaaacatgattctgctctacactatctctgaaaggccggggtgtgtacaccattgattggacctatgaggagtcttgaatagtcttatccaaccataactcgtacgctaccctagattcccactgccattggtgaaataagtgtggtttgggaacggaatgctgcttccacataccagggagggtggacattttgtcccctataaagggacctcagatttcctttaaaaatcaaggggtctgggacctaccatgtgtgtcgggattgggttaaacatatttc

SEQ ID NO: 17012 - DNA, 319 bp, Glycine max
tgcgcactaaacatcaactgaaatatcaatttaagatcacgaactaaagagaaccaacttgaatctggtaaaaaagtgaaaggagactcattaattttccagccgagaagaggaaaaacgaatttccgagggaaagatggacaagaatgactttgaatcaaataaagtgggtctatatttatagagatatttaaccatacaacaagattgtatgtatattttttagaaagagggattatgtgttcttaaaaaagaatattcattcttttcaaaaaagtccacgctcaaaatcctgtggcaattttttcttttaaaatct

SEQ ID NO: 17013 - DNA, 80 bp, Glycine max
agcaatgcctttcagcaatggttataggtttctcatttcgatatccattgagctcatgatgatttgcatttaagttcatc

SEQ ID NO: 17014 - DNA, 597 bp, Glycine max
  unsure (1)..(597): unsure at all n locations
cgcactagctctcctntgctgtcgacttctctctcggtaaatcttctttnntnctctcgnnantaggagggggggaatgaccgtagccatcaaaccgtgatcttaactcgactgcagcatccagcttgaataggaatgggcgtctattcttatctctcaggagacctacaacatcaaagcagcctaccatnccaatttgacaaaataatattctacaccattggtgcagttcaccgaacactaggtgagcgcatggtcagacctgaattgcgagagaatgggagcaatgcggcatgccccattgctatacaatacaacctaggactagtgtctttcattcgaatcctctattcatgagaacaagcacaaaaaacaaaccagaactgacccacgaatataatcatagcctcacaatttagagtaccacaagatgaataaagtataccgatgggatagaaaaacatctatggatggagtacttacttggtggagtgaatactatccgccgaaaaanactaacactcgatcaacagtggttacgggagccagacagcgcagcctttgtgtccttatctttgacgcgagggagggtgggcg

SEQ ID NO: 17015 - DNA, 118 bp, Glycine max
  unsure (1)..(118): unsure at all n locations
agtactgggctntttgctggtttttcaaattgcaatgagctggtggtcattcaacgacacgatgaggtagaacatatagaaacatggtaattaagtggatcttgttttaattataata

SEQ ID NO: 17016 - DNA, 335 bp, Glycine max
agaagatcaacgacaatgcctacaagattgacttgcctagtgagtataatgtaagtgccactttcaatgtgtctgatctatctctttttgatgcagatggaggagccttggatttgaggacaaatccttttcaagaaggagggagtgatgatgacataaccaagggcaaggaccatgaagcacttgaaggtcccatgaccagaggcagacttaaacaagcccaacacgtcatagagacaaggctggtcatttgtatagctgccattgatgatgattgaaggcccaagtggagaaagatgaaggcccagaggcagaggcactaccaagactactaa

SEQ ID NO: 17017 - DNA, 320 bp, Glycine max
tttgttaagcatggaggttagatttattttttaggccataaagctttaatctgtgtgcctaaggaatataaatgggtgcatggtgtggttctggtttgggatttttttgtagcattttgttgaaagatttttgggacttaaaaaatgttaaatgattgctttgaatctaatttgggggatttcccacacacactaggagatctgttcgataaatttaagaaagagagaacttatttttttgggaaacttaaaacatacctaaactattgcacttttcacaaaacactgtgggcttattttatttaaaatataaaacatac

SEQ ID NO: 17018 - DNA, 329 bp, Glycine max
  unsure (1)..(329): unsure at all n locations
agcttgaatcggacatccgtgtgttaagttatgaccatncgaatttctcaagagcttccgtagttcaatttcgagcttctcgacatattatgcgcccgaatcggacatccgtgtgaaaagttatgaccatttgaatatctcgagagccttcgatgtttaatttccagctgatcgatatattataagcctgaattgcacatccgtgtgaaaaggtatgaccatttgaatttgcgagaggttccgatgtttaatttcgagcgtatcgatatattatacgcctgaatcggacatccgtgtgaaaagctatgaccaattgaatttctcaagag

SEQ ID NO: 17019 - DNA, 188 bp, Glycine max
tctatataagctgaaccttttaatcaatattgacaagtggagtgttattcagaaaattagagtttatctcttttatcttagagagagtgattctcctaaattcttgagtgattcaagaacaccctggctgtctcaaaggactttcacaactcttgtgtgtagccctcgctggaaagagagattctttt

SEQ ID NO: 17020 - DNA, 284 bp, Glycine max
  unsure (1)..(284): unsure at all n locations
agctntgagggaattaaaacgactttttctttttactcggatgaacgacggagatgcgtgatattatacagacgcgcgaaatctgaggcagatactatgagcttagtagaactattttgacaaacaactctaaggctcggttgtgtcccgaaaaatattgagacactcggcatagaaaagggttgctctatctataacgaacgacgaaacctttttctctgatgtcgattgagccccgtatcatatctcgacgctcgaaagtgaaaacagaagctctgagcaaa

SEQ ID NO: 17021 - DNA, 505 bp, Glycine max
  unsure (1)..(505): unsure at all n locations
tgttcccgaaaggtnntncctttgncgtctctatgatactcagctttgtacacacgctgcgcgattatatcttcctacgtaagacgatgctcttttctcggtgtgccgcaaaattacaatgaggtcggtaagattgttgacaagctcacacaatcgtgattgaccacacctgctgttttattactctgaggaaacatgtaccacctcgaaaagacatgattacgatctgatcaaccatgtatctattctgcagatacaaacatcgtgttgataaaaacttacggtgacacgatgacatgtcaaagacgcatccgaattattagggtgataaaaacttaccccgtggcttgaaaccggaagattttccacagtgccaacatttacaagtgctaaaattattaatactgtgtcttgtcgggtgcgtaaatcatgaggtgttgatttcgcactaacgaattgtctgcgacccagtttatattgatggacaagcaccggaatctatcca

SEQ ID NO: 17022 - DNA, 318 bp, Glycine max
agcttagtaagactgaagtcagatcttgtaattattgataggaaagattacttcaaccccataactttggaggtgcaggactctacataatttagcaaccatcaacttactatacccgctaaccaccttaattctatatgatggaattatattcctttcagtttgtaagcatagaaaagtatatgatatatatttcttagaaaattaacttttgttgtaggtagtatgttgaggcaaaaagttacgaagtaaattcttgtttcacaagcgtctgagatgactttgttgtgcttggtgtgccactgctctgatcccact

SEQ ID NO: 17023 - DNA, 166 bp, Glycine max
  unsure (1)..(166): unsure at all n locations
actataagttatgcctattaaaganaagcaaagaagaaaactaagatacctgaatatccctccacatatgttcttaatttcttatggggatcgtcggccttgccggtatcaggatcaacgttgaccactagtctccctgcaccaggttgtctaatggccaacgatc

SEQ ID NO: 17024 - DNA, 295 bp, Glycine max
  unsure (1)..(295): unsure at all n locations
agcttgagatgaggaagngtngaattgtgaaacttcctgcttttattggtgaccacagagtggtacctggagatatgtcgcgggggtcaagaaaccttggggacgtcaggtggggtgctattgcccaaaaccaagcttgaccaatcccgacccaacccgggcataatccgtcaatgagaacctgtgatgtacctaagcaggcgagctcctgncagtcaacagattaaaggaaaacaagaccacaaagcaaggaggcttgtggtggctggccaactgtgaattttgtgtaatatgt

SEQ ID NO: 17025 - DNA, 353 bp, Glycine max
  unsure (1)..(353): unsure at all n locations
gccttctctcgaagtatctgaatgctaagtaatccaagggtgaggtaacanaagcactatgatgctcaagttanggctcgacgatgagtaataaatgaaaatcaacagtgtcctttacctcaagaatctcacttctgtntatacatatcgtgatagagctnggatccatgggccttgttgcatagttaccattttaggtaatctatctttaattattgttttaaggggttggtatgtttagataatccaaaatatcatcttctaaatggttaagtttattctcttgtggtgtatttggctatccaaccatccaaacatgcattagtcaagagggaggtctctatatgatctat

SEQ ID NO: 17026 - DNA, 310 bp, Glycine max
  unsure (1)..(310): unsure at all n locations
agcttaaaaattatataacggaaatataaacttaccagtgtgatatagctctcccaaaattttttcacaatcattataaatttttccaaattataataactagtcacaatctactattaaagtctggatatatttgttgcactttttacacttttggggattaaatgttgtattttcatctttcaaggacgcatttgtcaacgaagtgggaagacaaaaagtaaaaaaaaaatattatgaaaaatatgcccctatgttggcaattagacatgactacattgacaatcattntagtgacaaattcgtccct

SEQ ID NO: 17027 - DNA, 347 bp, Glycine max
  unsure (1)..(347): unsure at all n locations
tagacgaagatgatgatttcagtttctttgtaaaaaggttcaacaaatntctaagaaacaaagganatcaaagacaagagcagaagattcatcctctcttccaaaatgttatgaatgcaatcaaccaagacatctaagagttgattgcccaagttttaagaaaagaattgaaagatctgaaaagaaatctttcaatgataagaaagcaaagaagccctacatcacttgggaagacaacgatatggactcatctaaagattcagaaaatgaagttgtgaacctgagtctgatggccaaaaattatgaaagcaatgaagaggtaacatcttctgacaataacttatcta

SEQ ID NO: 17028 - DNA, 382 bp, Glycine max
agcttaagctccttcaactgcatattgttcttaatattttatgagtatccccgtggaaccttcacccgacaaagacactgacaaaaacttatcttttcctttttggacaaagtatgacaagctgggggcaagtaaattttcttcccatcagaccttggatgcaactgtgatcatatccctatctcagctagatcttgacgggtattcaagccatcattcgtcttgccttgaatgtaaaggagcgtcccaatcacactgtcacatacatttttctccacatgcataacatcaatacaatgtctaacgtctagatcagaccacgacacaagaacaaagaaaatggacctctttttcatatgcaagcttactttatccttctttg

SEQ ID NO: 17029 - DNA, 351 bp, Glycine max
  unsure (1)..(351): unsure at all n locations
tgtcatagagagatgatatattcttatgttccttctgatgaagataacatgatatgacatagtagatagctcaacttcattaatctaaacactatgttacaatataagtcattctaaagaaacatacttcaacatagataacatgtgaaggctgttgatgctatagtgttagtgcngtgtccttggtttagacttcacaaagtctattcaatcttcattctggtgtctcacataagatcttctcaaggatatggctaaactctcttcttgttgtgtcttgaaatgttgntaacatccatcttcttatgagacctcaatatgtgtagatgcatatgataggtgtgatattat

SEQ ID NO: 17030 - DNA, 362 bp, Glycine max
  unsure (1)..(362): unsure at all n locations
agctntttaaatcaaactttgctactggtaatcgattacaggaaactggtaatcgattaccagagagtaaaaactctggtaacttagaaaattttgagaagaactcttttgaaaaacaaaactatgctatgtttgttttttgaaaaatcttttcaatacttcccttgtgaagtcttcttgatttcttcaattgaatcttgaattcatcttttcttgaatcttgaaatcaaacttctcttaattcttgaaacttgtcaacttaatcttgaaatcattctttgggctttttgtcatcatctttgttatcatcaaaactacttgaatcaacttgattcatcatcatgaagcttgcttctacaata

SEQ ID NO: 17031 - DNA, 348 bp, Glycine max
  unsure (1)..(348): unsure at all n locations
cgacatccatgagttataacatcagaatgtgcacatgtcatacagntaaggaaacaaaaaagaaagaaaaagattgtcaataacaattcgaaatatgcacaaaanagaagtntctattagtaccttagaaaccagaaatgcacacaaattatgagaaggtaaacaaaagatgtaactcttcanaacacattcgaatcttgtttctgaataattcaagagttcaagataagagtcaataagaaagtttagagtcaagaatcaagattcaaggttcaagatctcaagaatcaagatcaagattcaagactcaagattcatgaatcaagagaaggcttaatcaagataagt

SEQ ID NO: 17032 - DNA, 377 bp, Glycine max
  unsure (1)..(377): unsure at all n locations
agcttaattntagttttgtaatatttttttattagggtaaattgattttttcattactttattatatcaatttgataaacttgataatacatgacaaattataaaaatgtcacatcagtaaaaaaagaaaaagaataaattaaaacctaaaatgtagataaggagaagttctatttaactagcaataattatatgtacaaaaaattaactcatgcatttccacggtttaaaaattaaaaggctagtaagaaataagaaataaaatcaaggaatatcacaaaatttcatttctgccactacccatataatgactaataacagttgaaaaacaccttcccagctcttcccctatatatacattccttcttctacagagc

SEQ ID NO: 17033 - DNA, 254 bp, Glycine max
  unsure (1)..(254): unsure at all n locations
gatgtgtttttattatatattatttttacctctttttgatatccaatgtgattacggcacgaccgaacggtcggaatttattttaaccgaagttaacggataatacaattcanacattcggtggaaaattattntatttntaagttaagcgagaaatgacttatgtaaaatggcttaagcacgtcaaaagggggtataaaaagtaaatganatgagaataatatacacgaacacaatgtggccaccatgggaca

SEQ ID NO: 17034 - DNA, 373 bp, Glycine max
  unsure (1)..(373): unsure at all n locations
agcttgtgacacaagactttatataagaaacaggcatcatatgtgaccaagatggcccgtggtcatacaaattgcccctttgagaaacttgttgccttattacatcaagaaatggaactctataagtagtattgagaagttggacattccagttttccaactttttaggcctgagtttctcttctgttgttggtagcacaatactgaatattcattcaggcaatgcttcttttaactaattatgttgtgggggcaactgangtgaatcagttttaaaataattaattcaaaaacaaaattaactagaaactattattacttanagcaaataaagaacatactttttttcttatattgtcactggacatattat

SEQ ID NO: 17035 - DNA, 304 bp, Glycine max
  unsure (1)..(304): unsure at all n locations
acgatgtgtattaatgtaattactaattcctatccatntaaagcttaataactggtttatttgaaataatatataaaataattgtgcaccatagattaacttgtcattgtccttttgatggtgaaaatgcagtttgatgttaggtntaatgcgcttctgtgttccatactcaaccttgatgccatggacatgaacgaagaacaacatctatatgttgcttgnggactggatgtangcatgggtcgttgtcgaaccagcataaaacttgtggttgctttcttctttcatacgctgtntacttttc

SEQ ID NO: 17036 - DNA, 368 bp, Glycine max
agcttttgaatgaaacaacgtgactcttcacatttaaatttgaatttcaacgttcaagggcactggtaatcgattaccaaaacattgtaatcgattacagccttttgaaaatatttggaacgttgtaaattcagtttgaaaacattttcaaactcattttgctactggtaatcgattacaacaatatggtaaacgattaccagagagtaaaaactctttggtaaaggttttgtcaaaaactcatgtgctattcaaagttttgaaaaactttttaatacttatcttgattgagtctcttcttcattcttgaatcttgagtctagaatcttgatcttgattcttgagatcttgaatcttgattctttgtt

SEQ ID NO: 17037 - DNA, 194 bp, Glycine max
ttctcgagagctgactatgtgtaatttggagcgtctcgatatattatacgcctgaatcgaacctcagtgtaagaagttatgaccatttgaatttctccagagcgtgcgttggtcatattcgagcgtctctatatgtgatgcacctggatcggacctgcgcgtgaaaagatatgaccatttgaatatctcgagag

SEQ ID NO: 17038 - DNA, 637 bp, Glycine max
  unsure (1)..(637): unsure at all n locations
tggcnnncnnatgatacgcttagacgtcacatggcactatgatactcagctgtctcttgcgagatactatgaccacacacgagccatgtttatacgtccatgaatgatgcccactctcctaggctagctagagtatccgtctactgctacaagcactgactacacatacctgctacatcattcctactatgcatcacatcgatctaattctcattatgagatcttgaccaatgctgctattctcaccatataacgatagtacccacaaaagaaggatggctggcttcctactatcgatcatcctaatacgccatcatactcctctatagatagtgcttacggaaatctctcaacagtaaagcatgtaacagattggtcatagcattcactgagacatgtaataggctcatttgacacttctatcatgtncagatcctatatcattccatataccttgctaaaagattgacgtgaactnatccatctactaccccagnttntgcattatggctacttctagatatatgacttgtacatgatggcntctatggatcattcaaaccggagtgatttactcctagtgctattatctgaagagcttttgggccgttcctactgatcacgtcaactagaaaag

SEQ ID NO: 17039 - DNA, 304 bp, Glycine max
cacacattgcatgtctaatattccttttagatgcttgaaaagtgcaagaaaacgagctgtgttttctgcattttctagaaaacgcgatgagcttgctaagtgagaatgctgagctaagcgagttcatcaatactcattgtatataagctttatgtgaagaacttgctaagcacacttactgcgcttagcgaggtcatattttgaggatgaacactcatcctcttgctaaagtacctgtggctaagcgaggctaattcgctgagcctacgtaacttaaccattttttttttgtgatagtcacatg

SEQ ID NO: 17040 - DNA, 167 bp, Glycine max
ctattatactgtacatttatcagttttcctcttactaatactctgatctgtattttaattctgcatgctacggctgataatagcttggctaattacgtcatgctatgatcgtatgataatgggttgtatgttatcctatgaagctatgtgattcctagtattattag

SEQ ID NO: 17041 - DNA, 127 bp, Glycine max
  unsure (1)..(127): unsure at all n locations
gctttgacgacatcacattcaactgtacgttcgaaaaacgtcgttggatcccctatttgaccgtcgtagaattgctttnttctcagtagggagaaaaatggaaaaaacttctttttttttttttata

SEQ ID NO: 17042 - DNA, 347 bp, Glycine max
  unsure (1)..(347): unsure at all n locations
agcaagaataacaacaaanatctcagcaaanagagagtcttatatacgtatgcaagcggagaaacaaccaagcattacctcctgatgctcaccanattaaaaataccactgaaaccagcatgaccaggagaaccatgagcagatccatctgtattacacttaatggtgccagccgaggagccctccanagcacttccttgatatacttagccttacgaggatgaatatcaatagagaaagctttaataatagaaaattcatgcatagaagaatcatcanatttcataatanntatatatgatatatatatatatatatatatatatatatatatatatacttataat

SEQ ID NO: 17043 - DNA, 374 bp, Glycine max
agcttattataaaaagaaagttatgttagggaagacaaggaagataaaagcactacttgaaccattgtgtcattaaatacgacacttcctgaggatgtttctgatagaatctttctcttgaaagtttcatctttggtgaaggcataaatggcaagaggttttggctttgcattgataaactcaatactttcctgaattttatccaactgcacagattgcaagtgcaacaagagttgaatgagacaatgcacaatatatgtgagaattgaaaacataaaatgggactgttgattctcactgtgattataggaagcagtgggccgaatatctcttctgccattatctcagaatctagtggaggatctaacaaaatt

SEQ ID NO: 17044 - DNA, 658 bp, Glycine max
  unsure (1)..(658): unsure at all n locations
aagtgancactgtgtacgtgcactctnantactcangctatactatccttattaaaagttagttgtntgttaattaagagctatatatatgtgtatgaatataatccttacacttaacgcttttatntatttaagaaatgaagnattgttttgcagttaatgaatcacttggcaaaaaggtttacaataggaaaagacagtcaaatttctgtagtgtaaatatgttatcggctaggttgtatagctcgtatttgatatacacgacttcaaattaaacaagggttatatatatatatatatatatatatatatatatatatatatatatatatatatatatatatatgcacacttgtaaatgggtgtctcgcttataaaaaaaaggtatattacanaggcgctggtgtgagagagaataatagtaaagaaaatgaacttttgaacaacgtgagagatacacctatgcatgtgatgggactatgagggtgctattgtgaccaataagacanagcatgcgatacaggaaccatagtgcacagcgcatgctatactacacacgcgcgccaccaanaactctcaccgagatatgcgcatgctgaccatgactatgatcaatactattcatgcaccatntngttcatcnactccatgctgagag

SEQ ID NO: 17045 - DNA, 385 bp, Glycine max
  unsure (1)..(385): unsure at all n locations
agcttctagagaaagctacatgaatctgcctctgtaaaaatgctgcctagccttcattaaccgttggatcttctcaaaatttggtctgcaacttcacaaaacacttttccatgatctgaccgttgagatctttgagaagttgtctggagtgtgctataagcctcttaatgaagcttctggaggaagcctcttaatgaagcttctagagaaaactacatgaagctgcctcggtagaaacgctgcctagccttcgttaaccgttggatcttctcgaaatttggtttgcaaattcacaagacactntaccatgatttaaccgttggtatctttgagaaaatatctggagtgtgctagaacttccgttcccgagagcatatcttattta

SEQ ID NO: 17046 - DNA, 355 bp, Glycine max
  unsure (1)..(355): unsure at all n locations
tctgtatggtggtcatcataggagtacaaaccacanacccttgtgacaggtacaaatttctgattcaaggccagctgggttaccaagttaaccaatgcatccagtttgccttcaagcttcttagtctcagatgatgcagctgagtttgtagctacctcatgcactcctctaatgactatggcatcatttctggtgctaaactgctgggagttggaagccatcttctcaattaaatntctggcttcagcaggagtcatgtatccaagggctccaccactggaagcatctatcatacttctctccatattactgagtccttcataaaaatattggagaagctgctccgaaatctgat

SEQ ID NO: 17047 - DNA, 377 bp, Glycine max
  unsure (1)..(377): unsure at all n locations
agctngcatttggaaatgcgaaagctccactccatcattaggattagtacctgacatctcaaacaaacaaatcaaacgtaacaagacaattataggtggtggttgaatacctcacccactcaagtgtatcacacaattatggcttttctctaatgaaacactcttgccttttaccactctaattccccttgagttcttaggcaattcaagagattatggccacaacaaagaacaattcaccaatatgtgtcaggtaagggctagagagacaaggaaaaggttaaccaagaaaaaggctaacaatgtttttaggcacaaatgaaggaaataaaattcagatttaggaattcaagtacaatccttcatgcaacaatata

SEQ ID NO: 17048 - DNA, 332 bp, Glycine max
  unsure (1)..(332): unsure at all n locations
cctctacatanagcacgaagacctcttcgaaatcgcacacggtggtcaatgtctcagaatatgtcttacagttgtggattctgtaagtcaatttatattactnttaattacctaagttattgctttcaattcataaatatttaactttgacttaacataaacatgcatctcactgaaacatgtatgtgagtggngaattctgatatctatggattcctcgagccacagttcattcagaggtctgggcaatcgcagtttgagtctgaaagttacataaagaagtggatgcagagttcacaacgcgatgtctatcttggagcctacctaaatgg

SEQ ID NO: 17049 - DNA, 379 bp, Glycine max
cagctttatcagaatttttaaaatattggccgaattatcttctttaaagggtgaatctcaccactttatctaaaatcataacaaactcctttcgactaagtttccatctcgattcattcaacaaactgaaaatgtttcaactaataacaaatggcgtctatatcttgaaactgattggtcacatgaagggttaaaatatatatgttttaatctttccttcttttaatcattgcaactgactttgcatttaatatctctagttgttatgtctatgcaagtcttatcacctttaaatggccttgccttattgttgctaaaccatcatatttaccttaatctttgttttcctcttccttcacctctaataatctctcttttg

SEQ ID NO: 17050 - DNA, 294 bp, Glycine max
  unsure (1)..(294): unsure at all n locations
tttcccagtaggtcactntgcttaagcatgagggactcctcacttaagcgccatgacactacagggcttcgaaaattgaagttttcactttcaatggcttccaaatcaacctaaatagaatcccaatcatatcaaacatgcttccacacatcaaactcttgaaatagcatcaagttacaagttataacaaccttaacatgaaatataaaaggaaaaagacctaaagtattgacttatggagagctaacttcctatgttcctacaacacatctaatggataatactcgatgaaca

SEQ ID NO: 17051 - DNA, 383 bp, Glycine max
  unsure (1)..(383): unsure at all n locations
agcttttgcactgtgaaaaataatttatctacttaaaactttgacaacaaaaacaaatcataattagacagaaagaaatgggaaaaaaatatataaaaatggaacctttaataattaaatgttaatgttaattaattgacaatgattacgacaaaaataaatacaaaatttaagctgatttgaataatatggtaaaattgatagtgtaatatttggaaaaaaaccctttccattaataggtacttgccaattaatatttgcccattatatttttccaataaaaaataataaactctccaatctttcttttctcactttaatccacgngtaanttcattaattattattttattttgctcaatgcttacaccttcctcacatgc

SEQ ID NO: 17052 - DNA, 269 bp, Glycine max
tgatttcacgattcacgataagatgaattcaagattcaagagaagaaatcaagaatacttcacaagggaagtattgataagattcttcacaacacatacatagcacatgtttttgtttttcaaatgaagtcttcacaaaagttaccagagtttttactctctagtaatcgattaccacactcctgtaatcgataccagtggcaagtttgttttcaagctctaactgaattacaacgttccaattatttcaaacggtgtgaccgattaca

SEQ ID NO: 17053 - DNA, 353 bp, Glycine max
agctattacctcagtgtgttccagctccagtggtccgatcgttaccaccagtgactcgacggccaacaaaaacctgtccaaagccacctttgcccagtttcctctctactttgtagacaggtgatcctcctacttgaaccttttattaacatatcaacaataagcaccttgacaatatcaacaaaagaattgagtaataattaaaagaaaagaataccctctccggaaaaggagctgcgttggtgtcatcttcttgagcaacgcccttgtttgcactcaagccaccactctcgtcggccatggcggcagcgtcgtctttcttagtgtgatcggatattattataaggggattc

SEQ ID NO: 17054 - DNA, 377 bp, Glycine max
agcttaaaaccccttgttcattacttaacaagctgaaattaatcacaatcacaagcaaggtatcctaattacatgcaagagataagaatgaaaaataggaaagggaaagaaaagttggcttacctcccagtaaacgctcttttaatgtcactagcttgacgcatcgtcctgttatccaagatccaaaagagttcctacttcaaggaccttcttctcaggtctcttttcctccatcacatgcactttaagacagacattttggctaagtggatctttgtactcatggaacaaatcaaagctgatcttctgatcttctatgcccatctgcagtatcttctttcccatgtctaccacgcagctcgcagtagacatgaatg

SEQ ID NO: 17055 - DNA, 520 bp, Glycine max
  unsure (1)..(520): unsure at all n locations
anggcccaactgtatagctttaaagctagtaaatgttacattatgcttgtcgcgtaaatgtctgggcgctcctncactcgccaatttcctatgtggaaatcaaganggcatgttcgtaccacatccgacccacttgaagcatcatcttcgcatattgcaacgacttggccatcatccnctagacccgcgcttattaagttcctacttatgtcgtanggcgggctctcttcatcttcttgtcttaatcacgagccttgacttctgcttttctttccgcatgcttttcttatatctgctgtgtgggttatagcctaacccanacttccatgattcctgtggacttataggctagtataccgcattgtcttgctataccattcaggtcgaaccattccacatatccggcaccatatgctattgacagagggtgcaagaagatcacgagaatctacactcaagatgaagcgtctatatctctcgctccaatgatgagaagaactgcagagttctcccaacaaan

SEQ ID NO: 17056 - DNA, 363 bp, Glycine max
  unsure (1)..(363): unsure at all n locations
agctttttagggcatgctatgttctacaggtggtttataaaagacttctcaaagatttccaaaccattcaacaatttgctcaacaaggacgcggtatttttattcgatgaagagtgtttgaaggcattcaacaccttaaagaccagtttagtgtccgctgccgtaattatagagccagattgaggtcgagaatttgagttgatgtgtgatgcaagtgattatgctatgggtgctgtattgggccaaaggaaaagcagagtcttccatgctatttactatgccaacaaagttntaaatgatgctcagattaattatgctaccacagagaaggaaatgcttgcgattgtctatttactagaaaaa

SEQ ID NO: 17057 - DNA, 331 bp, Glycine max
  unsure (1)..(331): unsure at all n locations
tctgaggaaggatctgacgacgctggcccagacttggagcgtgctgtcatattctaacctcgcccccacttctcatacctcttatctgaacatggatagggcgaggttattntatggacttgtgatgaagatggacatggacgtgggcttcctcatttcacaccagatttctcagatggcccagtccaactcctcgaggctcggctntccagctctcatcttcgcactctgcgtggtccgaggagtagtctcaggttctctgacctttgagtccctcagccttgccattaanttggcatacataaagaagaactattggaacctggatgat

SEQ ID NO: 17058 - DNA, 229 bp, Glycine max
  unsure (1)..(229): unsure at all n locations
agcttttgttcctttntataaaaatataagttctgaaactcaccacgtagtctaaaaaggcctcgaggtggatccaagtgctctgatcattcattagcatattcatgttttggcggcatgctcaccactgttggtttttttagggacctcaccttaactaaaaaagcgcaaaggcacccctataacacttgatccaaaattaaaatggatcccgaaaagggagtgcaaa

SEQ ID NO: 17059 - DNA, 370 bp, Glycine max
  unsure (1)..(370): unsure at all n locations
aatatatggtccgagtcttctnttatagataatctattaacaccatntaaatcccttggacccaatgacagaccataatntatttcaggcagactagaaagacatcatgcanactaaaaaataatagatacaaattacttctttcatattgatgcatangaagatntcttanatacaatgtatatagccatatcttcatttacaattacaaacaatgctacagaatatggacaacatanaactaagttcctgaccaaagggcctaagcaaatggcaataataaacttatcaatatcatattcanactgccagtgctatntcctattgcgaatatgactcacatatacaacatactgtacagatgacatga

SEQ ID NO: 17060 - DNA, 361 bp, Glycine max
acatgtttcacagggactgcattgacatgtggttgcagctaaacttgacatgccccctttgtcgaacctcaccactcctaactctgctaactggagttgctccaatggcaacaaggagagcctaaagtaattccaattatatatatatatatatatatatatatatatatatatatatgtatgtatgtatgtatgtatgtatggtcatagtatatattatgggcaaacatactcgtccgaataagattgagctcggatttcactactacaaaaagatgatttaacatcgtcaaatctacatcggttattataaaaccgatgtagtaaatatcacagcggcatttttgaaatttacatgaag

SEQ ID NO: 17061 - DNA, 294 bp, Glycine max
  unsure (1)..(294): unsure at all n locations
tgtgtctgttctattcaatgttngtggtgctcgttctgcatatnttaatgaacacgtgtccncaacatgccttgtgttcgcaaacatgaaatgtggatatnttttctgatntctgataatatagaatacgatagtctcgttatcaataaatggagtgctaaagttgttgagtgaccttacactgctgcangacttctgttgtgtcatgtntntcagctgtggcagtagcaacagttatcttgtgcaaatttcaatatcacagctgttaccttaatcagaaaatcccatctttac

SEQ ID NO: 17062 - DNA, 370 bp, Glycine max
agcttgtaggattatggtgtacccatcacatgtggtactaggtggcggtcgggcgatggtgcacaacaagttttccacatccacaatgcgcgcataaacccaccatcccctgttgcccacctccatctgagctcacgtattcccacgtagcccatatcctcgtttctctcaacaccgggtccccatcaatccttccaagcttccacaacatccaatcaaaacaacattcaaacagcacaagctatcacagccaagcaaaacagggcaaaggcagaaaactctgctcaacacaccaaccaaaatcacagcttttctcactcaaagaccccagtaacaattccttcgatccaattcgttaaccgttggatcg

SEQ ID NO: 17063 - DNA, 247 bp, Glycine max
  unsure (1)..(247): unsure at all n locations
gaataatgatctagttttaactctttcaatctaatctcccatgatctgatgttgtggacgataatgaacaaatntccagtccttcatatgaggtggntgatctganggttctttagtctgaagaagatcttcatcagattgtttgactntatctattttagatatatcagactgacctatctatatatctaccanatcatccttaagatccgatagtttcctatcagatgttatagacattaacatg

SEQ ID NO: 17064 - DNA, 345 bp, Glycine max
  unsure (1)..(345): unsure at all n locations
agcttctaacaacactttatatggtatgttaattaatttataattagtgttggatggtgaactaatgttataccaataattaatggatgttttatcatgaaactaaaattttgtggcaaggaattgtggccactggattagtgaacattgccacttcgtggtgtgtacgaaacagaggtccattgtttgcatctattntctaccccttttgccttgtgctcatgacttttgctagttccttgttattagaagaacacctatacttaggaaggtatgcactatgacctaccttgttcatttaaatatgaatatcaatgtgacagtaacttgcaagaaatatatatt

SEQ ID NO: 17065 - DNA, 237 bp, Glycine max
  unsure (1)..(237): unsure at all n locations
tatgaggtcatttcttcattcagctntgaagagaatgtcatagatcactgtatataccacaaggtcagtgggagtaagaatttgttccttgtattatgcgtagatgatattctgcttgtgactaatgataaaggtatgctatatgaggtgaaacaatttctctcaaagaactttgatataaaggatatgggagaggcatcatatgtcatacgcataaagatccatagagaaagatct

SEQ ID NO: 17066 - DNA, 367 bp, Glycine max
  unsure (1)..(367): unsure at all n locations
agctntcaaggtttagaaaaccagtttactttggaaagcttttggcacaaagaagaagaagcagttcaaagagatttaaggcttgtaaaagattgatagaaaaagtgttcaagatacttgaaatgcaaaacaaagccttgcttttatagactcttcatgtctggtcaagacaaccattagaagagttatgacttttagaaaaacttaaaaaccaatttgaaaaagtcaaaaaccatttgaagagttacatcttttgattttattcagaaacaatcactggtaatcgattaccaaattagtgtaatcgattacacaaagcttttatgtgaaaggatgtgactcttcacatttgaatttgaatttcaac

SEQ ID NO: 17067 - DNA, 339 bp, Glycine max
  unsure (1)..(339): unsure at all n locations
gctccgctcgcnccggcgagcanggttgcttcctccagaagcaatagccttctggaggaatcttctggagggcccaagtgggcctgtgtgctatttgcaccctcattnttgctaagtacacccgcctgcctttttatggtgattcttctttcgtatagttacgaaaacttacgaattccgtaacgatacttgttttctttccgtaatgttacagaaccttgcggattacataatcataccctttttgacttactgaatgttacggaacctcactaattgtgcaacgatgcttccatttgattccactgcgcacggaaccatactgattgtcatcaacat

SEQ ID NO: 17068 - DNA, 376 bp, Glycine max
  unsure (1)..(376): unsure at all n locations
agcttgcttgtggggcttctatggaggctggatctttgagcttcaatggggtcctttaatggtgattttacaccatggagatgcagcggaagacaaaggaaaagaggtgagaggaggcgccatccattaaggaataagccatggaagaaggagcttcaccaccaagatgagccttggataagaagcttggagaggatgcttcaatggaggaaaagaaagagggagagaaagagagaggggggagcacgaaattgaaggaagaaaaagggagagaagttgaactttgagttgtgtctcacaagactctcattcatcaaagttacaacaagtgttacacatgcttctatttatagactangtagcttccttgagaagc

SEQ ID NO: 17069 - DNA, 601 bp, Glycine max
  unsure (1)..(601): unsure at all n locations
ngatagaggccgngtggctgacttttaagaggatgggccgaacataaaaacaatcccgcttgccaatcatgaaggggagcggttaatgccatcaaggtgagcangtcgcacgggcccaagcttttggaggacgtanagacccccagaaggttatctacaaggccttgcanaaggtgggcatgattccctgcagcgggcgcagagaagactctggcttaatgcattcgggtgtaccccatgacatagaaacatattngacagtaagggatctattacaatggatgatagaccaaggccggcttgaggtcgacagtgagaagaaggangaacaacatgtatacatgcagtcgacagatgaagaanggacctaaaagcctaaaccctttggaatacacttcaccaggaacacggcttccaaagacctcaacacccctcggcagtgtcnggcggtagatctattatgtttccttacangaatagccgtgcagttccgtggaggtatgccccctcgggaggtangaaagangaagtaccgatatcactcactatcgccaaagtgaccatatcacccggctagngcatacccacagcggcgcgtgtn

SEQ ID NO: 17070 - DNA, 351 bp, Glycine max
agcttttattcaaaagtttactaaaaagaacatttagaaagcttcaaaggataagagatattacattattggcacttcacgatgtatgaatatatggcaactgcccacacccaaaatttaaaactttgcttgtccttaagcaacaaaacaagcataaaccaaatgaaattcccaagacaacctaaacacaaagacactgagagaatgacacctaatatatgagatttccaatcccatggacactttaagagatgaagtcaatattggacattccttgaaacacaatgtctggtctgggaaaatgcacaatgttctgaataaatatttttattgagaacatgatttatgtta

SEQ ID NO: 17071 - DNA, 332 bp, Glycine max
  unsure (1)..(332): unsure at all n locations
tcttgagcttcataaggtccctcaatggtgattntcagtcatggagttgcagcggaagataaaggagaatagatgagaggaggcaccatccactatagaataagccatggaaggagaagtttcaccaccaaaagagtgccttagataagaagcttatagaggaagcttcaatggaggaagagaatgagagagaggngggcatgggaattcaaggagattanggaaaaaagttgaactttgaagtatgtcgcacaagtaggggtgggaataggtcaggccaggctttgaaaggcctgagcctagcctacgatgaatctttgagatctgagcct

SEQ ID NO: 17072 - DNA, 334 bp, Glycine max
agcttgcctaattaactagtgtcgcaacctacctcttcggcgggagggcgacacgtgactcgtgggatgcgtgttccacgaaaggaatacgcgcggagtccccaccaacgtttatttgaggaaaacctcggaaaaaccggaaaagacgcgatctacgaactttaaagtgaatggttcgggagttgtatttacgcacggggaaggtattatcaccccacacgtccgtcccaagggacgacagcctttaatcgaatatgcaaacatgactttgaattttacggtccctttttatgtctttatatcctttataccctttatatattctattctcttt

SEQ ID NO: 17073 - DNA, 320 bp, Glycine max
ctcatctctagcatgcatgttctttctttacccactcctcacgtttgggtttttagggaaaacaccataactaaacgcgccgcaagggatccctatcgcaccagatccaaatctagaacgatgggtgatcaagaggagacacaggaacagatgatagccgacatgtcggctctgaaagaacaaatggcctccatgatggaggccatgttaggtatgaagcagctcatatagaagaacgcggccaccgccgccgctgtcagttcggctgccgaagcagacccgactcccttggcaactacgcaccatcctccctcaaacat

SEQ ID NO: 17074 - DNA, 379 bp, Glycine max
agcttcttctttgcattctctctctccaaaattttgcacattttgcatttttgctttcattttgcattctcaacttccaatcacaaagcatgaacgatacaagtaagttccttacttcttttcctctttttcttgtctgaactttagggtagaaaaccttacatttagctttagatttttagggtttaatgctttttcagaaatagtttatgattaagactttatgtacgtttgtactgtattgattattttacgaacattgaatgtctgatatgccttttagaggcttgaaaagtgcaagaaaacgaactgcgttttctgcattttatggaaaacgcgatgaactcgctaagtgagcattctacgctaagcgagttca

SEQ ID NO: 17075 - DNA, 642 bp, Glycine max
  unsure (1)..(642): unsure at all n locations
nttggccctgtcgacgtgcactccgtagactcgagctctgctgattagttatcaccgcggacaggatcgcagtcggtatgaaaagatgaatattaatcatcttgcttggacgaatgagatagactgggcaaatgacaacggtgagaatgatggacaaacccatgctgagactgccattcctatacagccaagttgtccaccaacccaacaatgtcattactcaggcgataacaaaccttctgcttacccaccacccagttatccacaaaggccatacctaaatcaaccacaaagcctgtctaccgcacttncaatgacgaacaccacctttagcacataccanaacaccaaccaagaaatgaattntgcatcgaaaaagcctgtagaattcaccccaattccggtgtcctatgctgactngctcccatatctacttgataattcaatgggagccataaccccaaccaagggttcctcaacctcattntntcgaggatacgactcgaacgcaacatgtgcatatcaagggagaagcctcggggcatncatngagcactgtatgaccctgaagcataatgtggaaaagctaattgatgtgggctggctgaaattgacgagaaatcactgtgaatctacactgcg

SEQ ID NO: 17076 - DNA, 312 bp, Glycine max
caggtttatggatttgattttcacttgcgaaaggatcaaagcgggcctaaatagaggtagatttgaccatcctgctttgatgaatgctaaaactggggctaatgaagagagtgagaatgaaagaaaaacccatgctgtgactaccagtcttatacgaccaaggttcccacttacccaacaatgtcattacttatccaataacaaccctttttcttacccaccacccagttatccacgaaggccatccttagatcaaccacataacccttctaccgcacaaccaatgctaaacaccacctttagcacgaacca

SEQ ID NO: 17077 - DNA, 331 bp, Glycine max
  unsure (1)..(331): unsure at all n locations
ctatctaaagctaccatggccattactagaggacacatgaataaaactgcagangtgaagacttatggaacatacctaacccaattgtaatactagccacactctacacagtaactganaggagctaatagtgaaataatgagtcagtgatctatatagcctgaacacataacagccttgtctaaataacataaagctgcttatgtgttcttggttggctcaaagacatatttgatgagtgattccttgatggaaagcaattctgggaattccgtcttcaatgtggatgcatccatctacgttgtgcttcgaggagcaacgatcaccttcg

SEQ ID NO: 17078 - DNA, 377 bp, Glycine max
agcttctagccaaatggacttaccttgaattaattcctttgatagcccttttgagccttgtttccctttccttgttttgaagctcactacaagccttaagtgaaaaaccatgatattaccatatccttaaggaattttggagctttggaattgttttgggaataagtgtggggggttttttgtttcattggacaacttgttttgttggctatgcttcatgatgtattttgggccatacttgatgtacattgtatattggttaaatgttggacatgctgaatgaaatgttgttctcaaaggctaaagagtaaaaaaaaaaaataaattcgaaaaaaaaaaattcgaaaaaagaaaaagaaaagcaataaagttgagtg

SEQ ID NO: 17079 - DNA, 218 bp, Glycine max
tctctctttcgaatttgcttagagagattgtctccgtgaacaaaatcctagtcgaggctgcttcgtcacgttaccgttacgtttccgtgagtgatatcgtgaaggattattaccgttcttcgacgcttctcattcgttcttcatcgttcttcagtcttcaacgggtaagtacctcaaacctagcgttgtaatgcactctatgtacccgtggtggtcca

SEQ ID NO: 17080 - DNA, 363 bp, Glycine max
agcttctagccaaatagacttaccttgacttaattcctttgatagcccttttgagccttgtttccctttccttggtttgaaactcattacaagccttaagtgaaaaaccatgatatcaccatattcttaaagaatattggagctttggaattgttttgggaataaatgtgggggttttttgttcattgattaacatgttttgttggccatgctttatgatatattttgaaccatacttgatgtacattgcatattgggtaaatgttggacatgttgaatatgatgttgtttctcaaaggctacagagtaaaaaacaattataaaaaacaatccgaaaagaagaagaaaagcagtaagtgagtg

SEQ ID NO: 17081 - DNA, 367 bp, Glycine max
  unsure (1)..(367): unsure at all n locations
tctgcatgtctagagagttctagagagaagaaggtcctagttccagcgagtttgagaaaatttgttgtgtgaagatctgtagagaccagagcttgaagaggaagccgtctgagagtctgagatgagtttgtgagtgattatgatgtcttagangtggaggagacatccncactacctgtatatctacaatccttcattnttctcttctctatgttgtagaggaagcttcccagttatggtaagctatatcctctngtggatcttccttgtaggtacttgatgtagatatctnnttatctatctaatgatgttttgtgtgttctttgtgctatcagtatttcattctagtatgcttctaccttgatca

SEQ ID NO: 17082 - DNA, 337 bp, Glycine max
  unsure (1)..(337): unsure at all n locations
attattggtgataatctaaaaaggggtacaaaccagacactcttttaaagaattaaggcataatatgggttntggattcctgaattgaacctaaaaatttaaagaaaccccttatagatgataatgggaccattgccgtcgcaaagaacctaacccattttgaaagaaacagtgtgtggaaattagtagaaaaacttgaaaaagaccctgtcataagaacaaagagggtttttaaaaaaaaattacatgaactgggttttattttataaataacagagggtttgcacaaggggtttctcaaaagggggttattttagaaaaacttctctgcgaaaaa

SEQ ID NO: 17083 - DNA, 288 bp, Glycine max
  unsure (1)..(288): unsure at all n locations
cacccacctgacgtnccaaggtctcctgacctcttcgacatatctncaggtaccactctgtggtcaacgaataaaagcatgaagtttcacccttctacacttncttatctcatgcttgtaggattatggtgtacccatcacatgtggtactaagtggcggtcgtgcgatggtgcacaacaagtattccacattcacaaattgcgcataaactcaccatcccctgttgcccacctccaactgagctcacgtactctcacgtatctcatatactctgttctctcaacacc

SEQ ID NO: 17084 - DNA, 88 bp, Glycine max
agcttatgcgcatatttttctactaacgttctcttgcccaaaacatttttttaactaaaaaaatgcgccccttccccattcagggcgg

SEQ ID NO: 17085 - DNA, 326 bp, Glycine max
  unsure (1)..(326): unsure at all n locations
ctcaccttctcgctaagccaatctgctggcttagcgactgtccgcanagcacaacactcatgggctaagcgtgaggaagactctaganaaagatgagttgtacaagttcgctaagcacaccacttcatctcacanagcgcaccgcttccgttcatctgctaagcgagaaaggcacgcgctaagccagcattcactaatgtgcgctaagcggtccaaaagtgcgctaagcacatgagcacgaacaaggccacctatntaagcctgaaattagaatttagaaagggaagttggactgggattcagagttntgcatgtctagagtttct

SEQ ID NO: 17086 - DNA, 339 bp, Glycine max
  unsure (1)..(339): unsure at all n locations
agctttcaagatattctttggccataactcttctcacggatgtctgattttgggacataatatatcgagaagctcaaaattgaacaacggaaactctcgagaaattcaaatggtcatgactttttattcggaagtccgattcagggacataactcatctagacgctcaaaattaaccaacaaaagctctcgagaaattccaatggttatcactttntactcgattcggggacataatatatcgagacgcttcgaaatgaacaacagaatctctctaaaaattcctatggtcataacttttcacacggatgtctgatttgtggacataatatatcgagac

SEQ ID NO: 17087 - DNA, 217 bp, Glycine max
  unsure (1)..(217): unsure at all n locations
tgctcttgtgtggtggaagtgattatgcaagttgaagtggacgtntccattgtgaaatacaatgataaggtactntgtgatgttgttcctatggaggccagtcacttacttttgnggagaccatggcaatttgataaaagagccaatcatgactgttacaccaacaagatctctntcattacttttggtgttgcatanaaaatgttcaatgtatgtc

SEQ ID NO: 17088 - DNA, 376 bp, Glycine max
  unsure (1)..(376): unsure at all n locations
ctttgactcggatgtccgattgagtcatttttataattgagacgctcaacattgaatgcaggagctcttaccaaattcaaatgccaataacttnttactcggatgtccgatngagtcccgtaatatatctagatgctcaaaattgataacagaagctctgagcaaattcaaacgaacatagctnttgactctgatatcctgatgagtcatttaataattcgagacgctcaaaattgaatacagaagctcttagcanattcaaatgacaataactttngactcgaatggtccgatgagtcatgttataatttgagacgcttcaaattgaatgcagaagctctaagcaattcaactacaataactttgactcgatgtc

SEQ ID NO: 17089 - DNA, 385 bp, Glycine max
agcttttggaagtgtagaattcgattcgaactctcgattcatcttcttccactccgcatcgatcaaatttgtcaactcttcacgtgcttgctcctcagaagtgtccttctcatgcatatagcacgttattgaatttgctgtttcacctgtctctagctcagcctacacacgaccgaccaaaggataaaacagtaaaaactaaaatatttataaaaaaataacacatgttaataaaaaacctaacatatttttttttaatttacttagaccttatttattgttaataacaaccacatacgctcattagtcgtacgtttggcaagtgttttgccaccatgccaattgatttagagtaattataatacacccggattctcttttgtct

SEQ ID NO: 17090 - DNA, 351 bp, Glycine max
  unsure (1)..(351): unsure at all n locations
tcagaagcttaagatattaatgatctgagcaatttcgaatagattcatcaaggtaaggggggtctatcaaattcttgaaccctaaccttgttgtctttggaaactaagtttcattgaatgttngtttgatgatcaaaattcgtagctaattccttggatggaactgtattatatgtngtgtttcttgaaattctaaggttaaaaatgagttccttgggtgtcaaaacttaggtttagctntaaatntctctaaaatcggagttntctagtaaaagttatgaacaaaacaagtttaaggaattttatttatntttttagactaaaactgtcatgaannataaagtggtgtta

SEQ ID NO: 17091 - DNA, 377 bp, Glycine max
agcttgaggagacgctaaattagtttatgtttatatccatgtccaactataggagcacagaatcctccatcaagaacctagagatacaaatgggacaattagccaaacaaatggctgaaagacccatcaacagcattggagccaacatagagaagaacctgaaagaggaatgcacggcggtgatgactataagccagaggagagcgcaaggagaagaaaagaaagttgaaggagactagtcagaggaaggaagggcagacaaagaaggggagaaggagcccccatatcctttagtactgtcaaagaagaataaggagcgctacttcaagtgtttcttggagatattcaaggggctggagataaccatgctatttggg

SEQ ID NO: 17092 - DNA, 334 bp, Glycine max
  unsure (1)..(334): unsure at all n locations
cttctgtnggcgctctaaattgtgggaatgtgctcatatatgtggcgcaatattggtttgttttcttgctcgactgagctgaatcgacggtttgtatgagatggccctacgcctataatgcantttgaagcaatggggcatgccacattgtccccgttctctcgctatttatgcctaaacgcacgcccaccaagtgttcggtgaaatgcctcaatggcatttgcgcatgatttatatgaaaacaacctatgggacaattnggttngcgcatgttttctttntttttgaacatgtgttcaatttcgtgagggctagaatacataccncacatata

SEQ ID NO: 17093 - DNA, 301 bp, Glycine max
  unsure (1)..(301): unsure at all n locations
agcttgagatgaggaagngttgaatggtgaaacttcctgcttttattggtgaccacagagtggtaactggaaatatgtcgcgggggtcaagagaccttggggacgtcaggtggggtgctattgcccaaaaccaagcttgaccaatcccgacccagcccgggcatagtcggtcagtgagaacctgtgatgtacctaagcaggcgagctcctggcagtcaacagataataggaacaaagaccacaaagcaaggaggcttgtggtggctggccagctgtgaactttgattgatatgtgggttat

SEQ ID NO: 17094 - DNA, 399 bp, Glycine max
  unsure (1)..(399): unsure at all n locations
gtgtggaagggtgagacttccttcntttattgttgaccacagagtggtactnggagatatgtcgtnggggtcaggagaaccttgggatgtcaggtggngtgctattgcccaaaaccaagcttgatcaatcccgatccaacccgggcatagtcagtcagtgagaacctgtgatgtacctaagcaggcgagctcctggcagtcaacagataaaaggaacaaagaccacaaagcaaggaggcttgtgtggtggctggccagctgtgaaacttgattgatatatgggatgtggcctctggtaatagattaccaagggtgggtaatcgattacaaggcttaanagtgaagacaggaagctgagatggtctctggtacatcgataccaagggagtgtaatcgata

SEQ ID NO: 17095 - DNA, 337 bp, Glycine max
agcttatcctatctcttaaaaatacatggcatccttgccttatataggcagaggacaaaacagaaaaataaaagaatagacttccatatggatttaggtcataacccaacagcagcaacctaattgggtcctttcattttatttaattcgtgtaaactgagctctaattaatattccatatataagcagaatgagagaatatagagtaaataacaattcctataagttaatttgaatcaatagctagcttcattattcattagttggtgtcctattaaatatatcaaaatctaagctctaattaagtatttaaccatacactgactcatgcattact

SEQ ID NO: 17096 - DNA, 413 bp, Glycine max
  unsure (1)..(413): unsure at all n locations
cacacagcagaaacctagcaagactacccatcatatctccgcaaaccccatacccacganaatcaaaggagaaagaagtccacccaaacctgaatgttcgaagtcccactcgtagccacgcacttcacgaccccgaanatgccctcctttcgcgattgnggcagaaatgatggtcaaaggttgaagctntgcttggagcttcaatggagaatgaagaagaagaaaatggcaacgtgagggagagagagagctgtctgaanagtgtggnggctgagtgaagagagagaaaagctntntggttntaaataaaagggttttctctttttctattattntattcaagctccgccacatgtccctatntgagtggagccaaaagggcccactttcccttnttactgtgacccacactc

SEQ ID NO: 17097 - DNA, 136 bp, Glycine max
  unsure (1)..(136): unsure at all n locations
agctttgatgtaacagngcctacactaaaactatctataaactactctaattgtctgcacaactcatctcaaacattctccctcttcattgctcgctctccctcatttgctcaaatcaaattcttgatgttttata

SEQ ID NO: 17098 - DNA, 483 bp, Glycine max
  unsure (1)..(483): unsure at all n locations
aggttaccgtgattgcccttatctggcttttcagctcatgatgcttgtgacacatttgatttcttgactaagatcnacatctttttctctttagagctctgcaaccatgttgataagatgcttcatctgatctcatacccgagtcatttccttgaaactttaatatgactttgtggtccatcttctgatcttgactgtcccgcgacagtgcacttggttttcttctactatctagctgtgaacctggcaagatcaagaaacccgaaaacaganacangccagcagacaagacccaagattacgtggtcggcatgtgctacatcacgagaaatgcagtctcatatccatgatctgaatacagtcatcagcgcatacttgacttctgttttttaaacttccatactactactactcttagactttgattctgactcttgttgagcttaaaacttttgactctgacanagttattccttaaagttg

SEQ ID NO: 17099 - DNA, 377 bp, Glycine max
agcttgaaggtgtgtattccgctatttttcataatagaacactggtaatgtgtctattatcattcttatcatttctttctctgtcattgagggaaccacttgagctgccaggtctctccacctttgggcgtattctttgaaagatttgtgcccctttttgcacatgttctgtagttgcatcctatccggagccatatcaaaattgtactgatactgcctaacgaaggcaaccattaggtccttccaagaatgaactcgggaaggttccaagttagcataccaggtaatagctaccccaatgagactttcttggaagacatgtatcagcagttccttatcttttgcgtatgcccccatcttccgacaatacatcttta

SEQ ID NO: 17100 - DNA, 300 bp, Glycine max
  unsure (1)..(300): unsure at all n locations
gactcgagccaccatcaaagaggtatcagacatactcgatggtatcggaggagactccacataagcattggtcacaatntccaatgcctaanatgacatttctagtgactcctccactacttcaacataaggagtataagacagatgactagctagtatgtcctcctcgcctgatactataacaagctaacccctcaccacanatttcaattnttgatgcanagactatgggaccaccccagtagaatggatccagtggtgacctaacaaacaattataagcaggagttatatctatgac

SEQ ID NO: 17101 - DNA, 378 bp, Glycine max
agctttgatgcaacatttggagatgtttatgaaacaacgagatgatgcgctccatgagaggttggatcaaatggagaatagagatcataatgaaaaagaaaggaggagaagagggaatgatggtgttcctaaaaaaaatcgaattgatggtattaaactcaacattcctccctttaaaggaaagaatgatccagaggcctacttggagtgggagatgaaaatagagcatgttttctcatgcaacaactatgaggaggaccaaaatgtgaagcttgccaccacggagtttttcgactatgctcttgtgtggtggaacaagctacaaaaagagagagcatgaaatgaagagccaatggttgatacatgggcggagatgaa

SEQ ID NO: 17102 - DNA, 307 bp, Glycine max
  unsure (1)..(307): unsure at all n locations
acctcctcctctaaataaccattaagaaagactggtttcacatccatttgttgcaactcaaggtcaaaataagcaactaatgccaagataatacaaagagaatctttcatagatacaggagaaaaagtctntgtgtagtcgattccttctttntgagtaaatccctttgcaacgagtcttgcctggtatctctcaatgttggctaatggaatccctttggtcttaaaaacccatttacagccaagggccttngccctattatgaaactcgacaggggtccaaactccgtactctgcatgggacttca

SEQ ID NO: 17103 - DNA, 314 bp, Glycine max
agctttgatgatgtggtcttcatttatgaaaggatcaaagtaggtctaaaaagaggcaaatctgatcatcatgctttgatacatgccaaaaaaaactatggcaaatgaaaagggtgagaatgagggagaagcccatgctgtggctgccattcctatacagccatgtttcccaccaacccaacaatgtcattactcagccaataacaaaccttctccttacccaccgcctagttatccacaaaggtcatccctaaatcaaccacaaagtctgtctaccgcactttcaatgacgaacaccacctttagcacaaacc

SEQ ID NO: 17104 - DNA, 527 bp, Glycine max
  unsure (1)..(527): unsure at all n locations
tggtgtgctagacgctcttaggacnctagatctcagcttatagtgcgggtcagagacaatgtcagcgtcgcgattgctatatatttccagccttggattgtcacctgcttcgattcagtggaatggcagggagaaccccggattaccccagctatgaaacttatcgtttatagctctataatgggcctcgcttagagtattattatgtaaaactttgcgcctttagtgttgcacttataatacaaggatcgttcttcatctggtcctggtctctacccattctcattcatttgcatgtatacttcttgttcttaaacggcagatttaatgaccagtgccncgaaggtacttatacctgtgacccgtctttaacctgcagcagacatgtatcaacggatatgacgagatgagatggagctctcttcgacttaaaaatggccgcatgagccagatatggctcatcagacaacgagcttatactaggatggtctgaaaagaattataatgacagcttacgactttcggcg

SEQ ID NO: 17105 - DNA, 297 bp, Glycine max
agcttttcgtcttacagaatgcaataagtttatacggataaccactcgggtatttccgcccgtcagcgtgactcaaaagtcagtatgacagatcttgtgagcgcggaagataacgtaaatcttctcgtgtcaacgggcttgtcagccgcgattgacgaagggcgcaaaagacgacgttagtctctgcgtgctatcaggcttttcgtcttacagacaacaaaaagtttatacggataaccactcgggtatttccgcccgtcagcgtgactcaaaagtcagtatgacatatcttgtgag

SEQ ID NO: 17106 - DNA, 534 bp, Glycine max
  unsure (1)..(534): unsure at all n locations
tggtgccctgatgccgtctanggaccttagaatctcaagctgatacacgcagagagtgacgtcgtctttgtgaccttcgttaattgtgtgtctacaagcctggtgacacgcggagaataatttatcgttcggcttacagatctgtatactgtagttgagtacgctgaccgccgaattacctgtgtgttatccttataatcttgtgttgctgtaagacaaagtctgtggcacgcaagagtgagttgtttctggacctttgtcatcagggctgacagctcgttgaccgcggtgattacacatcttcgcgctacaaaatagcatactgactttgagtcacactgccggctgaatacctattgttttccgataactttgcattcgattaaataagctgatagcacacagactatttttgtttgcgcctcgtcatctgtcgacagccgttacctcagatatatctcttcgcctccaatctgttttactttatatttgtggctgaatccggggtatcgataatattgtgtataagcaacg

SEQ ID NO: 17107 - DNA, 365 bp, Glycine max
agctttttgattcattctatgtactcgtggtggtccacattgtgtttcgtgcatttttattctcgttttgtttactttttataccccctgttgacgtgcttaagccattttacttaagtcatttctcgcttaacttaaaaataaaataaatttccaccgaacgtttgaattgtattatccgttaacttcggttaaaataaattccgaccgttcggtcgtgccgtaaccacgttggaaatcaaaaaagaggtaaaaataatataataatcaaaaaacatcttttagtaaaataaagcggaaaatcaatcggactctctgggatttctcattcttaatcgaattgattaataactaaagtgaaacta

SEQ ID NO: 17108 - DNA, 356 bp, Glycine max
  unsure (1)..(356): unsure at all n locations
ctttcatagtagagtactgataatgtgtctaccatctcgattatcgtctccctttccattattgggggtaccacctgngccgccagatccctccaccttttgtgcgtgttctttgaatgatccgtccncctttttgcacatgttctgtagttgcatcctatccggaaccatatcaaaattgtactgatactgcctaacaaaggcaaccattaggtccttccaagaatggactcgggaaggttccaagttagtgtaccaggtaacagctaccccagtaagactttcttggaaggaatgtatcaacaattcctcatctttggcgtagttccccatcttctgacaatacatctttagat

SEQ ID NO: 17109 - DNA, 365 bp, Glycine max
  unsure (1)..(365): unsure at all n locations
agcttatagttatataatttccacgttacaaacatgactcatctatctttcaatgagatgggagtcatatagacatagtggtttggtgattcggggaggcacacaagattggaataataaagaggtcttgattttgaatcctcttattaacataatatatagtaattactaacatttatccataaaataaatatttgacgaaataatttccaaaaaggctatcttagtatacgatgagacagcaaacttggtttttgtttatccggatatataactactgcatataagaatcctatctgaggtatagaacaacgatttgcaataagaatccagtatttccatcatnaaaaaaaaaaaaaaagata

SEQ ID NO: 17110 - DNA, 623 bp, Glycine max
  unsure (1)..(623): unsure at all n locations
cgantctnancnacgtttgggcttgtgnccttggaanccgctgttangtgacnctatgantactcaagcttttcantgngttgaggcanggatgaangaggctggaggttgaacagtangatgcatataatgggctttgatggcaaagatgatgactttgggtcacaattgataganggctttatggcaatntaaagggggagaaacttaagtatggtgatcagtggttagtttacaatangggctttgtaagttcatgggaataanatatggntgtatangatgaagtctcgatcaaattttagtggaggtatttcatggagttntattataagaaggctaatatatatatatatatattcttactgaagtggaaaaattggatttatttctacaccggtgtgttttttttttaagaataagatttggtatatcagaaactagattgatgggtttttacatcaactatgcatgtaaagatattaataccatgtaatctacatatgtctaattgaaccctcctctgaaaaanaatgatattgtaattttattgtagaaaatgaccacatttgtgtgatgaatccaacttgcaatccagaaggaaactaatttgtgatgtttgn

SEQ ID NO: 17111 - DNA, 366 bp, Glycine max
  unsure (1)..(366): unsure at all n locations
agcttgaacataaatataaaacatataggcaaaaaaaagggagagaatgggtagtatcaagcccttgagattgtgttatggaaccattagcaaaggtgaccacaaaggaataaccaaatgcagaaattttggagaattgagatttattgtcaaatatgtgatcaatgtcattagaatccaagacctaggggtgattactaggaaagacaaacataggatttatcatgatgcactgcaaaggcaacggaacccaagcccttatgttccacaaaccatttcaaaagtcagaataggtagccaaagatggtgtcaaataatccaatgactcanggtcttctatggagtagcctctgcattatcgacagt

SEQ ID NO: 17112 - DNA, 320 bp, Glycine max
  unsure (1)..(320): unsure at all n locations
acctgggtatngctcagtttcattatatcttccgtaatactcatcacctctatcatatcntaataattttatatntatgtctaattgcccttctacttcattgtagtaaatntctaaggcatccattgcctaagaaatctcgggcagtaagtagacataactggtacgtgaataatcatcaataatggtgataaagtatcattcctttccgaaagaactaacatcaaaaggtccacaaatatcaatatgcacaatttcaagaagctgagtgcttcttggagctcttttctttgtatgttttgcttggtttcccttaatac

SEQ ID NO: 17113 - DNA, 379 bp, Glycine max
  unsure (1)..(379): unsure at all n locations
agcttaacaaagctctaaaatatctatagcatattcgatgggttttctggggaaatacgaagggagtgtttaagcgtatcataaaaatatattttttaatacattttgttaatatttagtagtagaattttcaaatcataaaatttgaatcagaccaattcttaaaaaaattaatttagtttgattcgaattatataaatactttagatcaaaataaattataccgcacttaattttcttgttttgtatggattaattttaagtcaaaactgcaccatgcacaccctanaattatgcatgcatttacacaatttacatgatcaaattaaaaggaactacttcaatctaggggattgttagcttcaacttcatctctagc

SEQ ID NO: 17114 - DNA, 383 bp, Glycine max
agcttagtaaagctaggcactaactatctccctctttggcaaattttgtctaaaacatacttagacacttcctgagcaggtacgagcagttatgcaagtgggatcagcaactttcattatcagagtaatcaagcacagcggaaattctgcaagttgcaagtcgtttccaggatgtcaagacatctcacatgacatcagctttctgcttctgctccccctgtctccatgctcttactgcagcatcttctatcagctactagtcttttccaggatgtcaagacatctcatgtgacatcagctttcccttgtctccatgctcttactgcagcatcttctatcagctactagtagcttacatcagtcatcatcagcagcagcagtct

SEQ ID NO: 17115 - DNA, 396 bp, Glycine max
  unsure (1)..(396): unsure at all n locations
actcggatgaactgatgagtctcgtcatatatcgagacgctcgannatgaatgttgatgctctgagcaaattcaaacgacaataactatttactcggatgtntgattgagtcccgtaatatatcgagacgctcgaaattgaatgttgatgctctgagcaaattcaaacgacaataactntntactcggatgtctgattgagtcccgtcacatatcgagatgctcgaaattgaatgttgaagctctcagccacttcaaacgacaacaacattttactcggatgtctgattgagtcccgtaacatatcgagacgctcgaaattgaatgttgaagctctcagccaattcangcgacaatacacttttactcggatgcctgattgagtcccgtcatatat

SEQ ID NO: 17116 - DNA, 381 bp, Glycine max
agcttttggcacaaagaagaagaatattttcatagagattcaaggcttgtaaaggattgtatatgattgattggattgatagaaagatttattgaaaatgcaaaacaaagccttgcttttatagactcttcatgtctggccaagaggaccatttaaaagagttataacttttagaaaaacttaaaaccaatttgaaaaagtcaaaaaccatttgaagagttgcatcttttgaattattcagaaacaatcactggtaatcgattaccaaatcagtgtaatcgattacataaagcttttatgtgaaaggatgtgactcttcacttttgaatttgaatttcaacgttcaaaggaactggtaatcgattaccaaaactttgtaat

SEQ ID NO: 17117 - DNA, 327 bp, Glycine max
  unsure (1)..(327): unsure at all n locations
tggtatganatgagtggttggatatgattngattgagcaaatgtatgaattgaatggattgngatgattgngtgattgtttggatcaagtttgccatcattagaagagaatgagcatatgattggaattatgtctgacaatattagttggttgtcaaattgattgtgaaggaatgcattaaccgtatcccggtgagagtgtgatatntaaaattttgagagaaacgactatcatgtagtggttgattttgtgtgaatctttgaagtatggattggatgcatgaacttgagaatgatgaaggccacgttngattatgaatagctactt

SEQ ID NO: 17118 - DNA, 335 bp, Glycine max
  unsure (1)..(335): unsure at all n locations
agcttgtttcttgcaattccaagactctagagagcttcctaataggtggcatgtcccacttgtgctttttctatctaatttgcatcctgcaaaatcaaaatctaaaaagcctgttaaatttaaggaggtacctttgggatacctcaaacccacattggttgtgcccttaaaatacttaatgatcatattaacgaanattaagtgagattccttaggaatggactgacatcttgcacataagcaaacacttaacatgatatctagtctacttgtagtcaggtagagaagtgatccaatcatagctctacatcttgattcatcaacaaatttacctt

SEQ ID NO: 17119 - DNA, 289 bp, Glycine max
  unsure (1)..(289): unsure at all n locations
ccgctccagtgctagtnttgcctaacccgagagaaccctttgaggtgtattgtgatgcatcanagatggttntaggaggagtgttgatgcanaatggccaagtagtggccaatgcttctagacaactcaagactcatgagaggaactatcccaccaatgatttggagtaggttggtgtagtttttgcctttaagatgtggagacagtacctgtttggctccaagtttgaggtgtttagtgatcataagagccttaagtacttgtttagtcagaaagagctgaacatgca

SEQ ID NO: 17120 - DNA, 136 bp, Glycine max
  unsure (1)..(136): unsure at all n locations
atggtcattcacggtcaaatcagagaaggatacgccgttcgcataagctgcttttgctctgtcggtctatctttctaaagggttcacattaatcaattgcctacgataaaanggaaccctctactgatattcttcg

SEQ ID NO: 17121 - DNA, 374 bp, Glycine max
  unsure (1)..(374): unsure at all n locations
agcttcactcttagagtctctntcttagttacccaccttccatgggttctccctatcacttctctctcaaccaaacttaacccacatggttaatttgggataaatagagattacatacatggagaatgtgtttgaagggattttacaacaaaatagtacttatgggttggatcttcattgatgctttgcttgtacttcatttgtggacccgactatttgcttccttacaacacataaaaggattatagagggtggagaggatgtgattttcatttgtgtactatgtaagtgatctctaaaccttctctttctagttctgcaactgtcctttggtagtttataggacccacaggccaaactatcagttatgtgat

SEQ ID NO: 17122 - DNA, 305 bp, Glycine max
  unsure (1)..(305): unsure at all n locations
atcatctcccctttcgtattaggggtgtcacctgagctgccaggtctctccaactttgggcgtattctttgaaagattcatgcccctttntgcacatgttctgtagttgcatcctatctggagccatatcannaatgtactgacactgcctaacgaaggaaaccattangtccttccaagaatggactcgggaaggttccaagttagtgtaccaggtaacagctaccctagtaagactttcttggaagacatgtatcagcagctcctcatcttttgtgtatgcccccatcttcccgacatacatc

SEQ ID NO: 17123 - DNA, 354 bp, Glycine max
agctttttggagtagaatcatgggaccaactcattttatttcaaaaaggaagtcatatctagtcaaggtctgagagaccatacaagtttcctaacgatttctaattatgtgggccattaagtctatcatatgctgacaatagccgagaagcccatgaatctcttcgggggcggagtaagtgtctgccatcgccttggccttggctaacaatcggggaagttcttgactcccgttcaaggtaagagcaaaccgatccatccacatggttgcctcttggtgtaaagagtcgatcacccttcctctagcctctttttccgcgtatacttgggcatactcatccgcgattctatgctc

SEQ ID NO: 17124 - DNA, 330 bp, Glycine max
  unsure (1)..(330): unsure at all n locations
tcgataatgtgtctaccatcacgattatcgtctccctttccatcanttggggtaccacttgtgccgccagatccctccaccttntaggcgtgttctttgaaagatccgtcccncttttgcaaatgttctatagttgcatcctatccggaaccatatcaaaattgtactgatactgcctaacaaaggcaaccattaggtccttccaagaatggactcgggaagattccaagttagtgtaccaggtaacagctaccccagtaagactntcttggaaggaatgtattagcaattcctcatcttttgcgtattcccncatcttctgacaataca

SEQ ID NO: 17125 - DNA, 346 bp, Glycine max
  unsure (1)..(346): unsure at all n locations
agcttgcttgtggagcttctatggttgctggatctttgagcttcaatgtggtccttcaatggtgattnttcaccatggagatgcagcggaaggcaaaggagaagaagagaggggaggcaccatccactaaggaataagccaaagaagaaggagcttcaccaccaaaaattgccttggataagaagcttgaagaggatgctntaatgaaggaaaagaaagagagaaggggggagcacgaaattgaaggaataaaagagggaaagaagtggaactttgaagtgtatcccataagactttcatttatcaaagttacaactagtgttacacatgcttctatttatagact

SEQ ID NO: 17126 - DNA, 321 bp, Glycine max
  unsure (1)..(321): unsure at all n locations
agaagactcanagtgtccttggttgtatactacaatgaagtcaacatgttcactggataaagagaanacttcaagccatgatgaagaatcgacaattaaaggacaagaagaatantttgttgaacaagtggcctcaataacttaagagggggatgaattaagttntanagaatntntatatgagcannattctaattcctttttaaaatatttgtgtagggtaagaatataaaagatgaagacacaattaattcgataatgttcttctaatatgcaagaaaaaataagtgtaataaagataaccgagctaagggaagagag

SEQ ID NO: 17127 - DNA, 358 bp, Glycine max
  unsure (1)..(358): unsure at all n locations
agctttttatgaaaggatatgactcttcacaattgattttgaatttcaacgttcagatgtactggtaatcgattaccaatatcttgtaatcgaatacaccattttgaaatcaattggaacattgccaattcagttgaaaacttttgaaatcaaactttgccactagtaatcgattataggaaactggtaattcgataccagagagtaaaaactctattaacttaggaaattttgagaaaaattcttttgaaaaacaaaactatgctatgtttgttntttgaaaaatcttttcaatacttcccttgtgaagtcttcttgaattcttctcttgaatcttgaattcatcttctcttgaatc

SEQ ID NO: 17128 - DNA, 402 bp, Glycine max
  unsure (1)..(402): unsure at all n locations
gaagcttgagaataacctcaagctagcatgaccaagcttcttatgccatacctaatgatgctctntgactgagagtaagcatgacaccttntgacaggacaaatcaccaagtttaatcttatagagatntccttgttagacgatacacatatccttgttaaaggtgacattgtatccattgtcacatgnatgtattatgcttaacagattatgcttcaaccctttaataagtagaactctatcaatgggaggataaggaggaatccagaccttactaacactagttattagacctttcttggaaagaagagtgaagagttgtcctcgtctagacatatatatatcttgtgagtgattaaagaagcaatcatattccttctatactatagtgctccttgacat

SEQ ID NO: 17129 - DNA, 366 bp, Glycine max
  unsure (1)..(366): unsure at all n locations
agcttatggattttcaacatcctaaggacaaacctggtaatgaagaatctctttcgaatagaattggagaatggtgataggttcaaacctaaatatttcattgatgataatatcttgcaagacctatggttaccatggaaggatgcagtgattgtgaaactattatgaaaaatgatagggtttgtcacaatgcacgataagttgaaatctatttggaaattagcaggaagaggaataagccaatctttgtttttattttggagactcatactagcttttctcanactaaagtgttgttatagaggatgctgatggccattactccaacgacatttgggaagttgatttgcatgaatttcctttcat

SEQ ID NO: 17130 - DNA, 265 bp, Glycine max
  unsure (1)..(265): unsure at all n locations
atgcnccacattatntncatganacanatgcaaaaatgatgatttggaaactctatgcnaaactggtcatgcatgcacctatgtggacactcaagtgtcaaattnttatggtcatgtgatgctaaggctcagtattcatttcctctattntaaatcaacccaatgtttccaaaatatgttcttttatccatttgtgcattcatcccgagtccatttgngtgtccgggaaaaatttcacagcattcacccttcaggtgtatacaca

SEQ ID NO: 17131 - DNA, 371 bp, Glycine max
agcttcacggttgtgttacagcatcttcatcagtcaacattgccattccctactttaattatattgctttaatcatttcttcctatctaaatctttgccataatctccctcctgtctaaaaggctaaaaagcttggcaaaatctcctccgttaagcccccaaaattcacgcgactaattttccaattaaatttatgttgatcttttctggggtactggtgattccccaccacacacaacacctaccctagccattcacatgacactgttagttttgtctcgttcaggataattactgacttgcttcttcttctcttgacaaaaattattcacttgcttatatgcactaaactgttattttttatttaaata

SEQ ID NO: 17132 - DNA, 281 bp, Glycine max
  unsure (1)..(281): unsure at all n locations
ctactctctaacactagctaaccaactaactgtgtttagttaacataactagctagtgggtaagtacaatctgtatatgctaagaatccccctcaagttgaggaatgaatgtcaatcattcccagcttggaatgaagaanatggaatgcacctggagaaaaagctttggtgatgatgtctgttaatgggttggcagaagaaatangaagcaacttgataagaccagagagtaacttttcgcagacaatatgacaatcaatctcaatatattttattctttc

SEQ ID NO: 17133 - DNA, 356 bp, Glycine max
  unsure (1)..(356): unsure at all n locations
agctntatcaatgtaatcgaatatttaaggctataaccgattaattcaacaaatttcacttagaatgagaaataaacctctctgtatcaatcttgatcgtgatattgatacgaagttgtcccatcgaaagcagtgacaaatcttcatcgggaaccatgagtgcacacaaggtgggtattttcttcctgacatgatttatttcatatccaagggttaaccaaaattcaaattttgaaccacttagttaaagaacacaagtcgctaccacttgtttcaaccagacttggtatacctatttactctntaacttctatagagtttgaaaagttagaaaataaagatctacacactaccac

SEQ ID NO: 17134 - DNA, 541 bp, Glycine max
  unsure (1)..(541): unsure at all n locations
cacccataagttaaaatagcttctgcataagcacataacagctttttggagaagctnanncatntagcttctccanatagctggatttaacttatgatgtatctacctctaacttatgattaccttgttcactcctatcttcttcttctacaagtgcttatggagagacattttcaagctaggccttagccattgaatggtcatgtctgttttaactacacatctgatctaatatcatcaacattgtttatgtgaattccgcagatttaaaatatcgttaaagagaactaagatattctaaggccatattttgacgttctttccaccttggatttaatttctcttcatacatataatgattataatcattctgatctcgtctaatacctacttatgggtagactcatgtacccaactctctatccactcatgattatacgctcgatgttgcatactagggagacttgatccacactctgtatcttataagacctctatcaacatcttgacactatcgatatcgatatatgactcaactctg

SEQ ID NO: 17135 - DNA, 365 bp, Glycine max
agcttgtgcaaatcaagtcactctctgattttatctctagcatgcattgtatgttggtctcgtcctttgtcacgggaagccggaaggtccatatcaccttcttaattgtacacatggggcactgcgcccccaaatgcgcaagtaaaaagaaataattttccgggctctcgtgtccgtaaaatgcattcatatcatgcatcgcataagcatctcttcataacatcataatggacatatcctgcatttgtccgttatcatattccaacctcacattttgcatgagtcatggcatcatcatgcatatgcgttcaacaaactttttgatctgcaaaattgcataccatttgttttcatgtttgctcatc

SEQ ID NO: 17136 - DNA, 253 bp, Glycine max
cacgagagcttccgttgttcattttcgaacgtctctatatgtgatgcgccttaatctaacatccgtgtgaaaagatatgaccatctgaatttctcaagagcttacgtaggtcaattatgagcctctcgacatattatgcgcccgaatcggacatccgtttaataagttgagaccatttgtatgtgtcgaaagctatcttgggtcaattccgagcgtctcgacatattatttgcccgaatctgaccttcgtgtg

SEQ ID NO: 17137 - DNA, 379 bp, Glycine max
agcttgtatgagtactgggaaagattcaagaaattgtgtgcaagttgccctcacttccagatttctgtgcaactccttcttcaatatttctatgaaggacttaacaacatggagaggagtatgattgattttgccagtggtggagctcttggtgatatgacccctaccgaggcttaaaatttgattaagaagatggcttccaactcccaataattcagtgcaaaaaatgatgctattatcctttgaggagtccatgaggtggccacagattcatcttcatctgctgaaaataaaaagcttgagggaaaacttgatgccttggtcaacctagtaacccagcttgccatgaatcagaaatctacacctgttgcaagagtct

SEQ ID NO: 17138 - DNA, 444 bp, Glycine max
  unsure (1)..(444): unsure at all n locations
atgcgagacagagaccaacatgttagctatcatcgccaagtacgaagaagagttaggtctagccacggcccacgagcatagaatcgcggatgagtatgctcaagtatatgcggaaaaagaagctagaggaagggtgatcgactctttacaccaagaggcaaccatgtggatggatcggtttgctcttaccttgaacgggagtcaagaacttccccgattgttagccaaggccaaggcgatggcagacacctactccgcccncaagagattatggctttcggtattgcacatatgaagacttatggccacatataaaatcgtggaactgttggctctaacctgactaatcacttcttttgaataaatgagtgtcatgtttctcaaacttcaataacctctcttatttactctgtgtgctgcttgcgacgagctatcttatgcctg

SEQ ID NO: 17139 - DNA, 341 bp, Glycine max
agctttgagccaaaatcctgactcttcataaaccttgacccagggtgagaatgccaatccttaccctcggaagccaaaaaaaagaagagaaggaaaatttccaatcaaaggaaaaaggagaaggaaaatttccaatcaaaggaaaggaaattcccaatcaaagagtgggagaaagcaaaaagaaaagaaagaaaattcccaatcaaagaatgggagaaagaaaaaaagagaagttaaaaagaagaaagctcctggtcaaagaaaccaaaagaaatgtgccgagaggtccttggactagacgatatctgaacaatacagaattgtcacccaatgaacaaaaa

SEQ ID NO: 17140 - DNA, 362 bp, Glycine max
  unsure (1)..(362): unsure at all n locations
accttctcttccattggtnngttcttcatttttctccatgtatcttctcacatgtcttgtgataaatgtatntaacatggttctttagagtttccaccgattaaacatccgagtaaaaagttattgtcgttntgaattgctcagagcttctattntcaattntgagcttttcgatatattacgggactgaatcagacatccgtgtaaaatgttattgtcgtttcaatttcataggagccttctatttaaatttcgagcgtctcgatatattacagtacttaatcggacaaccaagtataaagttattgtncgtttgaattgatacgagctttcgttttcaatntggagcgtctcgatatatt

SEQ ID NO: 17141 - DNA, 367 bp, Glycine max
agcttagtaaagctaagcactaactttatcgattacacatcaatagatgggactcttcatgtttaaatttgaaaatcaaaatgtttagaaacactggtaatcgattacaagtattgtgtaatcgactacccaagtttgaaatgatttgaaaatgtttcatcacaagttgtgactcttgaaatttgaaatctaatgttttaaaacattggtaattgattacatgcttatggtaatcgattacagctttataaatcagtttgaaaaaaaatgttggctcctggtaatcgattactgccttctggtaatcgattactagagagtaaaactcttggtaaaagatttttctttgaaaattctcttgaacaaa

SEQ ID NO: 17142 - DNA, 373 bp, Glycine max
  unsure (1)..(373): unsure at all n locations
tatatgtatgcgtgtntaggtagtgaataataccttagatatgcatgtatgntaattaggtagcaaacaactacctcacanaatatatatatgtatngttaggtagcaagataccttggatatgcatgtatatagcanaagtacctcacanaaatatacacatgtttaggtagcaaaatacctcatganaaaaaaagaaataaaaacatcaaccaacgagaaagaaatgaacaaatgagaaaaaaaagagaaaaaagaaaaataagttatctagctaaaaaaccaacatgcttttgaaagagaataacttcaacttttctttgaaaaaaaattactgatcataaccaatttttgaaanaatgtgatacacctg

SEQ ID NO: 17143 - DNA, 379 bp, Glycine max
agctttgacaatgtcaagtgtttccttttaaatcaacttgatgcaactttttattatatattaatatggagtacatgtaagagccactaggttgggcacatgctgatcctacatggacttctcaacaaatctaggctctagcttgcaaaaactcaggacatggaggtacttgataatttcatctgttaatgtttaaactcaaacaacaggttcttatcttggattgaaacagaagcttcagaagctagacactgtcaacaggtttattaaaaagatcattataatgaaaactcaaaaaattatatgcagtaccacttttatttgcctttttcctctctttccatggtcttctagatgtccactccttgaacacatccac

SEQ ID NO: 17144 - DNA, 172 bp, Glycine max
  unsure (1)..(172): unsure at all n locations
ctcagctaagccgncactcacttgngcgagctgagctagcctgngcgagctgngcggcaagctcctcctctattntntctataaatggatgttggaggctaaggggaaagggtttaccacccttggtattcagatttcactctataatagtgaggaanagaagaaagaagaa

SEQ ID NO: 17145 - DNA, 374 bp, Glycine max
agcttctaaactttatacaagaatgaagctctgataccacttgttagacaagtggcctcagatatcttaagaagggggggttgaattaagatattccaaactacttacccaattaaaaatctatttcactttttattcaagttataaaatcccttaacaatgaacttcttaaatattaattcaaataaaaaaattttgaatatgaatataaagcaataataaacaaaggagtttaagagaagagaaagtgcaaactcagatttatactggttcggccacacccttaatgaattgagcactcaaataattccttaatgaattgcaattgaattggccaaggaattcttaagaggataaaatgattttgctctttg

SEQ ID NO: 17146 - DNA, 348 bp, Glycine max
  unsure (1)..(348): unsure at all n locations
ctctagttctgacattgtgctatagcattatattanaatgttggtacaaagatgttaaccaatttttctaaccataataataaatgggttcaccaagttaaagtaatttccaccaagatgtcaaataaaaatatattcaattaanacatggaagacaaaagaatcaaccaaatttgaaggagaggaatgaaatggngaaaagaacatgcaattagcagcanatagtggaagatganaagttatctatagaatagttnttaccatatggatgccatcacccttccttcctctatacaaggatcatagtagatatagataacanatctttttcttttttgcaactacttg

SEQ ID NO: 17147 - DNA, 372 bp, Glycine max
  unsure (1)..(372): unsure at all n locations
agctttgaattcattctatgcgcccttaggggttcattcttggtttgtatgtcttcatcttcattcttctaccgccggtattctttttctttgttttaagagagttttgaccgatcgtttaagtcgtaatctcacttaatcaatgctaaatgaatttcaaccgagcgtttgtgttgtaatcttgtttaatcacctttaaaataaaattcaaccgatcgtttatgttgtaaccttggttaatcatcaaaaaggtaagtttcaatcggtcatttactttgaaagttctcttttaatgagttgagaaataaccaagtgaaaccaaagctaaaatcaactcacaaatcaagtttttgtccataanaaaatcatttg

SEQ ID NO: 17148 - DNA, 243 bp, Glycine max
  unsure (1)..(243): unsure at all n locations
gtcttctcttcttagagttgtgattaaagagaatataaagagctgggaagaatgtatgtctcatgttgagnttgcatacaatannggtgtacataacactacataacactctccatttgaagtagtgtatggttttaatcccttgactcctctntatttgttaccattgcctaacatttctaattntaagcataaggatgcacaggctaaagtngagtatgtgaaaaggttgcatgaacaagt

SEQ ID NO: 17149 - DNA, 300 bp, Glycine max
  unsure (1)..(300): unsure at all n locations
aaaacgttgtttttacttcaaaaccccttgaactacttcacattgacttatttggtccctcgaaaactatgggttttggtggtaattactatgtcctagttataatagatgattactcaaggttcacatggactttatttttgaaaaccaaaagtgaagcttttgatgcttttcgcaaacttgccaaggtgattcaaaatgaaaaaggtctcaacattgtttcacttataagtgatcatggaggtgaatntcaaaatgagtatttgaaaacttttgtgaaaaaaatgaaattcaccataa

SEQ ID NO: 17150 - DNA, 400 bp, Glycine max
  unsure (1)..(400): unsure at all n locations
ctcggacactccatngactagtctatcgatgttgggcataaggtatgcatctttggggcacgccctattcagaccagtataattgattcacannttgccattttcattnagccttttgaccatgacgacattggcgagctaggtagaatatctggcttctctgatgaagttggcattgaggagctngtccacctcttctctaaccgatttgtatcattcttctcccatcttcctcttatatggtgataccagtttggcctggggacagatgatgagctngtggcagataatggtggggtggattccctacatgtcagaaggctatcaagcaaacaggtccgtgttcctgtgtaggacatcaactatgtgtctgtgcttatgggtggtgaggtccctactg

SEQ ID NO: 17151 - DNA, 373 bp, Glycine max
agctttagttctgaaatacagaattaagttgtaaactattttatatttctttgactatgctatatattgtgctagagttggatacccatctcctggaaaagaaccagaccagggcaattgtgtgtggaaggttcattccacaggatgttgcaatcaagataaggaaaaaaactaaccgtagagttgagatattagagttacaattttttttattagaaaacaaactaagaaactatagaagaacatagcctacataataataataataataataataataataataataatgaaacaaaaccaaacattatttcttatctatctatctatctatctatctatctggcgcaacatgcctttttgcggacgagcg

SEQ ID NO: 17152 - DNA, 368 bp, Glycine max
  unsure (1)..(368): unsure at all n locations
tgtaccttactcattngcaagctatggcttatattgaccagtcagggttatcaactcttgntacaatgtggtatcctaccacaaataaaggcttagtgaatgcctctngtgagaggtgtcactatgagacatcttccttccacctgcctatcagagagatgatcatcactctggattatgtgtcttgtctattgcacttgcctgtgacaggtagacccattgatcattctcattgacctttgacagagacaangtgaagatcctgataatgactcatcttggcattctgacatanacagagagtgcaggcatgaggttgacgtanctggcatacttgtatcagagatatgttaagtctggctcctatg

SEQ ID NO: 17153 - DNA, 371 bp, Glycine max
agctttgagcatattgattaatttgttgggtgtagttccctttttggcagctaaacaccaatggagctgatcatttttaagtttaattaatcatgccactgaagcaggaatttgcatacaaacattgtattagtgatataatatagaattggatgcggctggagcaaaatagtataattccattttagcatggatgtcattgagaaacttgtggagatgtccaaaactagaataagtaatcctatctcagacagcattccgacatcaagttttgtaatttctttccatatgtgggaagtatttttttcaaccatattatttcttattgagcagtgatacacgtaccccacccaacacctgaaatattaaac

SEQ ID NO: 17154 - DNA, 382 bp, Glycine max
  unsure (1)..(382): unsure at all n locations
gatgtgaatggctcgaanaagacacagtttatgaaccaatcatgtnttacaattggagacgtgaacggttcagattatntctcacctacataatctatatnagaataattcaagtacattaaatcctttgctttgacgtgtgatccgcanaagctacattaattgattgatgcanacgtaaacgctgaagaaatggtcaatgagaaagaaagggaaaagtttataaaagtaaatacaaaaanttgagagcannnatgtacttttaataatatnntatttctctctgctntgaannatangtaatttatacgtctnntttaaaaatatcttggttctagaagccggctaanacgtttactctacggtatcaataattcagtat

SEQ ID NO: 17155 - DNA, 354 bp, Glycine max
agcttccgcatggagctgaatctcttgctcaacaccaaaaagaggagtagataagtaccctttttttaatcagcaagtagactagtacccaagtactagttttgacctacaaatccctagttccctacgcaccaaaaacaacaagacagctatctcccacttggcaagccatatcaaaactcaaactgccaacacacacatatatgcaagaaggaaacgtccaattatgaacaccagcaagaactttgacacagaagaggcaagaaagaatgaaaggcaaacaagtttagactataactcagatgatttggattttaagattgtgggaaatgactaggttctgacatccaaaaa

SEQ ID NO: 17156 - DNA, 311 bp, Glycine max
  unsure (1)..(311): unsure at all n locations
tagactcacactgtgtattctctgtgttatccttagttatgaaccggtacatttcctggcctggtccaacgtctatagtatcgtattcagaacccttggtcggtgagttgcccaatccattatcgatgatagcttggaaggtatcatagatgttgttcctcattccagaattgatagatgaaacctacagcattgaagagtgagaaatttcanaagatgatgatatatctntaacaaagagcctattagtaaaatacatctgttctataaggatatcacataatcaagcagaanagatcatatagatcaac

SEQ ID NO: 17157 - DNA, 323 bp, Glycine max
agcttgaaggcaaactggatgcattggttaacttggtaacccagctggccttgaaccagaaatttgtacctgttgcaagggtctgtggtttgtgctcctctactgaccaccatacagacctttgcccttccatgcagcaacttgaagcaattgagcaacccgaagcttatgctgcaaatatttacaatagacctcctcaacctcagcagaaaaatcaaccacaacagaacaattatgacctctccagcaacagatacaaccctggatggaggaatcaccctaatctcagatggtccagccctcagcaacaacaacaacagcct

SEQ ID NO: 17158 - DNA, 245 bp, Glycine max
  unsure (1)..(245): unsure at all n locations
tatgttctcaaggctagactaataccattgcttcccaagtttcatggtcttgcaggtgaagatcctcataagcatcttaaagagttccatattgtctgttccacaatgaaaccccctaatgtcgaggaagatcatatctttctaaaagcctttcctcattctctggagggagtggtgaaagattggtgtactaccttgctcccaggtccattaacagctnggatgaccttaagagggtgttcttg

SEQ ID NO: 17159 - DNA, 379 bp, Glycine max
agcttgtttcatccattattttgcttcatggatatgcaaaacggaagtgggagctttgaccttccatcatctaccatagtagaaaactcaaactctcaaaaacttttaagaagatgactcctaatgtttcctagaatggcaatctacttccttgcaaaaattgagcttgttttgttcattatagtcttacagggatcacctcggatgaatgtggcaaatataggcttcccacatctacctaactagatagctcaaaatattgaaaacttcttaaggagaggatttctcctagtgttttcgagcatggaagtttgcttccttggaataattgagcttgcttcattcatcatagcccaacatggatctacaaaaaaaaagt

SEQ ID NO: 17160 - DNA, 427 bp, Glycine max
  unsure (1)..(427): unsure at all n locations
gctgcgctgagctgccataactgcctaactccttagactgctggtccctaggctcttgaccttaactngatagaacctctnnttaagcgaaggcattngactngatcccatgttntactaaagtgaacaaaaatcggcgcgaatcanaactccaacatctatcatgggtggaatggatgaatgcattangaaatatgacacanatgcaatttattaacacgggagcccgggaaattgtctccttcttagatacaacatctttgggtagcaaagtgcccgatgtatgtattaaagaaggtgactcggaccgtccgttggttntccaatgtgcgtgatgcatatgcganaggcgcaacacgggaatgtacactatgacaatatttcacaaatacaagccaaagggtacgtgacacttatgcatgggagt

SEQ ID NO: 17161 - DNA, 365 bp, Glycine max
  unsure (1)..(365): unsure at all n locations
agcttgtaatcgattacacatatactgtaatttattaccagaggagtttttcagaaaccattctcaacagtcacatctttctgtgtggttcttgaatggctatcataagcctatatatatgtgacttgagacacgaatttgctaagagtttttcaaaacaaaatggtcttatcctcttaaaaagcaaatcgttttatcctcttacaaattccttggccaaattacttgtgattcaataaagaattatttgagtgctcaaatngttcaatctatctctttcaagagagaattcttcttttcttcttcttcattctgaaaagggattaagagaccgagggtctctttgtgtgaaagaattctaaaca

SEQ ID NO: 17162 - DNA, 183 bp, Glycine max
  unsure (1)..(183): unsure at all n locations
tttattcgttgaccacagagtggtacctggagatatgtcgcggnggtcaggagaaccttgggacgtcanngtgggggctattgcccanaaccaagctttgaccaatcccgacccaacccggcatagtcggtcagtgagaacctgtgatgtacctaaacaggcgagctcctggcagtcaacaga

SEQ ID NO: 17163 - DNA, 383 bp, Glycine max
agcttttcacctagtaaagaatgaaaaactaattgaaatttatgttcttgcacttttttgtggagatgtatgcatctcagtgagaataccaaatacgcttaaactgcggtaaacctccgaagatcaaaatctttttaaaaatatctttagttaattaaaaaggcttacactagcaatccataaaggattgaaccgtaaaaacgagaatagaagaaaagaaataacagtctctactaaaaaacaaaccgtgcttggcaagcaaaggactgaaggagtcaagtcagccaattggttagactctccacaaacatgcagaaaaaaggcattgatgaaatttatccttcaatttgcaaatctcctctcttaactcatgaaactgagta

SEQ ID NO: 17164 - DNA, 316 bp, Glycine max
  unsure (1)..(316): unsure at all n locations
gtatttttattataaatattattttactatcctcaacctgaactaataattntcttattgcaataatattaatggtcttaagttcgaaacataacacgttcaaaatataaaataggtttaaatatattttttntatntacagattagtattttttatttcattnntttcaatttttttgttntagtccttatcaaatgtgtntgttntaatttgtgttcttaaagtgtttgaaataaccaatttttactggttaaaacactctnttattggtaaaaatactatctaaaacatttcaatgataaaaaacanaaacac

SEQ ID NO: 17165 - DNA, 338 bp, Glycine max
tcaagctgaaccatctccggagcgaatttgaactgtcttagcgagtcatccactgactctgacgagatcaacatacgtcggtctcataaatttattatgtaaggaaacaatgaaggcctgatgaatgacatgatttgtaatcccattccattgaccaataacgttatcttgaaatacaatatgatcctttgacgcctatgcgagctgaattacacaatcagaattcaaccctactctagaaagaatatctctacataccccgtttagataatatgagagcctatatctccccgcacattagccccatatttgacggagttgattggggtgtctaatat

SEQ ID NO: 17166 - DNA, 302 bp, Glycine max
  unsure (1)..(302): unsure at all n locations
agctttttaaaaatattatgaaaagttgtaagcacaagagttccattccttataaatatgaaaatttctaaaattcatgctagatgtaagttataaaaaatttcccatctatttataagattccagagctatatcaacatagcttaaagcttgaaccacaacaaatgaatcacattctaagaggtcatgttcggaaggtgtggcgtccctaaattaatgactggtttaatagtaataatttaaataacaaaaaccatggtaanantttttttctttttctttttcatttctttctcttttca

SEQ ID NO: 17167 - DNA, 189 bp, Glycine max
  unsure (1)..(189): unsure at all n locations
cttgtctccaacgcgagctctgaccactgttcttccttcccgcgatgcttcttttcatgtgcgcctgagtgggcttatagcctanaccatacttcccacgatttccttgggtttttatcaggctagttatgccgccattgtctttgcctaaacccatcccgggttcataaccgttccccaacataactc

SEQ ID NO: 17168 - DNA, 372 bp, Glycine max
agcttgaactaccagatttctcttttattcatcccgtgttttattgtttccttctaaaccctttattaagccaccggacacggtgcagattgaggaactgccaccaggggcagttgataatcaaccagtccccatacccttggctattttgggccacaaaactctttcgactgaccatgggccaaagcagctggtcttagtgcaatggcagggacttcatcttgacgaaacgtcgtgggaagactggacaagtcttcaagagcttcatcaccttgaggacaaggtgttgtttgaagcacgcgggaatgttacaagtagcagctctgaaccgcaagcaaccaggcccaacagtgataatagcaaggagttagt

SEQ ID NO: 17169 - DNA, 220 bp, Glycine max
tactgcttggccttctgaagtacatgacccgattgctctgaccttcacatacagagctgagctagtatactgagtaccaccataactaaagctcctcaacacccaacaaaaagagctgtgctcatttatcccatatacagaagccagcgcatcacaatctgacaagcaagcattcccacattctgacacactagaaagatcactatattagctattactg

SEQ ID NO: 17170 - DNA, 276 bp, Glycine max
agcttatgatgtgaatcagatttgttcaggagttttgatgataacaaagatgatgacaaaagaccaagagaatgatttcaagaacaagattcaagaatcaagagaagtttgatttccagattcaagaaaagatgaattccaggttcaagaaaagaaatcaagaagacttcccaagggaagtattgaaaagctttttcaaaaaacaaacctagcacaattttgtttttcaaaagagtttttctcaaaattttcttagttaccagagtttttactctc

SEQ ID NO: 17171 - DNA, 255 bp, Glycine max
  unsure (1)..(255): unsure at all n locations
cactagtaatatatctactatcattgntattatntctttcttcgtcattgagggaaacacttgtgctgctagattcctccacctttgggcgtattctttgaaagatccctgcccnncttttgcacatgttctgtagttgcatcctatccaaagccattatactgacactgcctaacgaaggcaaccattaggtccttccaagaatggactcgggaaggttccaagttagtgtaccangtaacagctacctcaata

SEQ ID NO: 17172 - DNA, 376 bp, Glycine max
agcttaaaaccccttgttcattactataacaagctgataattaatcataatcacaagaaaggtgtcctaacatgtacaagaaaacaaattcaaatgaaatgcaataaaaaaggagaaaagggaaagaagtgatgggttgcctcccagtaagcgctcttttaacgtcattagcttgacgcatcttcaacttatcctgattcgaagcatagaacagtgttcaatctttccatagctccaccatgatattgcttcaacctttgtccgttcactacccatgtcctgtcaggatctttagattgagaatcacaaagctccactgatccatatggtgggactttcttgatggtaattggtctaaaccattttcgattaagct

SEQ ID NO: 17173 - DNA, 263 bp, Glycine max
  unsure (1)..(263): unsure at all n locations
catagcgagcctgctcgctaggccaattctgcagaaaaaaataggattgtgttcactcgctaagtgtgtggtagccacacgcttagcgcataagtcanttttcctaaggcacgttaagcgagtcacttgcgctaagcgcctagtctgattnntcaatttgttntatgatntttaattngaataaattcttgtctaatcttatngtttgattcttttgtattgcagatggcttcccgtatgaagaaagccataactntagtgtc

SEQ ID NO: 17174 - DNA, 376 bp, Glycine max
agcttgaagttgcaatagtgctattgtttctggttttagttactccatattgttgacaattaacttgggtttctacctttgtgatcatttagtttaatgtgctaagttgtttcaagtttggtctttggcaagtgtgtacaaagttagtacctatcactttctatattttttgttgttcagacctcactatgaagactaaaagtttcaagtctttaatatgttagtttttaaatatttttggaggtagatgttgaaggtacttacgtctggccttgtgggagagctcattttcttgaaggctatgtcagtttttagtaaaaggctatgtcagtttttaacagtgttactttattgctatgaaaaatgttgtctttga

SEQ ID NO: 17175 - DNA, 239 bp, Glycine max
  unsure (1)..(239): unsure at all n locations
tgtggacttatcatatgtctaaaagtttaggattccatgcaaccatatacatcttggatacatgtggccatgtgcatttgacatttgcttaaaanaaccttactttctatccagaagctccatatgtgcaatataattgtcccaaagacaaatcatatgtgtggtatattagtttactaaaagacactctcttatatactattatgaataaatctatatggagactattgcgtcatcta

SEQ ID NO: 17176 - DNA, 367 bp, Glycine max
agcttgtaatttattacacaaggcttgtaatcaattatcagaagttttaaacgttttataatagccttcagaaatttgaatttaaattttaaagcctgtaatcgattacaacttgtgtataatcgattaccagaaatgaaaattcaaatttcaattctgaagagtcacaactcttcagaatctaactgtgtaatcgattacaacagttatgtaattgattaccagtaaggaattttcgaaaataactcccaagagtcacaactgttcaacaagtttttgaatgaccatcaaaggcctatagataggtgacttgggttacaaaattccttagagtttttctgaacaaattgtcttatcctctcaatac

SEQ ID NO: 17177 - DNA, 304 bp, Glycine max
  unsure (1)..(304): unsure at all n locations
attatgtcttatgtgaaggtcttatcatcataatatattttaataagntatcatgtgttattaaatctntaaaatatgtntatatagtataaataactcataaagcctaaatttacaattttaacctctattntgatattaaattattacaaaataaacccttaaatagaattgtcggccaaactttcacgtaggttaggccaaatctttntaaaaaagtttttgaaatataaataggtcaaactcatgcactgggtaatactaaggccagattcatgcctagttctattntcacccctatatg

SEQ ID NO: 17178 - DNA, 349 bp, Glycine max
agcttatgctcatattttttcactaacgttcacttgcacaagacatcctatcaactaaaaaaaatgcccccatataccatcaaggtagcttcattacctagattatgtacttccaaagtgtatttgttatttacatcacacacgccttcttggctgaatttacatacatgcatactcaaagcattttggggtaccaaaaactgcacatgcgctcatcttggtatttctaatacccatacatatacaaacttcacgatgaatcttgactacctacacaataaggtgctacctttcatgcttttctttaaatttttgcttcctaaagccacatgcaaattcaagcatattt

SEQ ID NO: 17179 - DNA, 309 bp, Glycine max
  unsure (1)..(309): unsure at all n locations
atgcgagacagagaccaacatgttagccatcgtcagcatgtaccaagaagaaataaatctagccacggcccacaagtacaaagtggtgaacgagtatgcccgagtgtatgcggaanaggaagctagaggaagggtgatcgactcgttacatcaagaggaaacaatgtggatggaccgatttgctcttacttngaacgggagtaaagaacttccccaattgctagccacggctaaagcaatggcggacacctactccgcccccaagcttctcagctcgtgctanggacgtcttcaattcagcacttgtac

SEQ ID NO: 17180 - DNA, 371 bp, Glycine max
agcttaaaaattatatatttgtaacagaaacttaccagtgtgatatagctctcccaaaattttttcacaatcattataaatttttccaaataataataactagtcacaatctactattaaagtctggatatatttgttgcactttttacacttttggggattaaatgttgtattttcatctttcaaggacgcatttgtcaacgaagtgggaagacaaatagttaaaaaaaaatattatgaaaaatatgcccctatgttggcaattagacatgactacattgacaatcattttagtgacaaattcgtccctgtgtgccacccacactattttataaacggtgacgaacgaaaatatatggtcgggtttattt

SEQ ID NO: 17181 - DNA, 368 bp, Glycine max
  unsure (1)..(368): unsure at all n locations
gtgataagaagaattgaatgacatagactaagatgatgatctcagtttcttcgtaaaaaggttcaacatatctctaagaaacatacganatcaaagaaaagagcagaagatncatcctctcttccaaaatgttatgaatgcaatcaaccaagacatctaagagttgattgcccacagtttaagataagaattgagagatcttgaaagaaatctttcaatgataagacagcaatgaagccctacatcacttgggaagacaacgatatggactcatctaatgattcacaaaatgaagttgtgaacctgagtctgatgtgccaaaaatatgaaagcaatgaagaggtaacatctnctgacaaatacttatc

SEQ ID NO: 17182 - DNA, 359 bp, Glycine max
caagcttgattaaagtagtaaacaatttacttattttaaaacgtatgtgatcttaataaaagtaaaacatattcactcacttaaacaaatttagtttagacgaactgattgctggatcaaatgaatattcaaaaagtataatattctttaatgtttctcgttagttattggcatgccaacacttgaattcctactcatgtgacatatttcactcctgtactttttggaaccaaagaacacatcaacttcacccggctgtactttggtgaatcaaagaacacatcaacaacagcttgggccagcatatacacataaacagtagcagttgaaagacaaaaacaatatcattaacttctgaa

SEQ ID NO: 17183 - DNA, 281 bp, Glycine max
tgtgcatatagagctacagatgtcttgcaattgatacatacagacatttgtgggccatttcatacaccttcatggaatggtcaacaatattttatatcattcatagacgattactccagatatacatacttgtttcttatacatgaaaattcacaatctctagatgtgttcaaaacatttaaagttgaagttgaaaatcaactcaacaaaagaatcaagagtgtcaaatctgacagtggtggtgaatactatggtagatacgacggttcaggtgaacaacg

SEQ ID NO: 17184 - DNA, 182 bp, Glycine max
agcttgccattgaacaagttcgagattctattttatcaccgagccgtgcactcgcattggtaccaccttgagaggtttgggtttggtgtgttaaaaggtgacaagagaaatgagtcaaaattctcaagttggattcacctaagggtgtgtcttgaaggtgcttatcatgtcctggatgagtc

SEQ ID NO: 17185 - DNA, 223 bp, Glycine max
  unsure (1)..(223): unsure at all n locations
tatacatgtaactttgtgataagttagtggaaacatggtggattgacaagaactggacgtagccttagtggtagagacgatccaatataaatctctntgtgtcttatgtttatctcttatctatntaactaactaagggttntaatttgattntatttttgaaaaacatttatgaaatctgttaagtatcatctgacttggtatgtttgtgaaaacctttgtt

SEQ ID NO: 17186 - DNA, 386 bp, Glycine max
  unsure (1)..(386): unsure at all n locations
agctttgtggatttagtcttcgccgggaaaatgatcgaaacgggtctgaaaagaggcaaatttgatcaccctactttgataagtgagaaaactagggcaaatgaagagggtgagaatgaaggagaaacccatgttgtgactgtcattcctatacggccaagtttcccaccaacccaacaatgtcattactcaaccaataccaacccttcttcttacccaccacccagttatccacaaaggccatccttatatcaaccacaaaacccacctaccacaaaaaaatgcccaaacaccacccttagcgaaaaccaaaaaggaattntgcagcaaaaagcctgcaggattcaccccaaatttccgatgtcatatgctaacttgatcccata

SEQ ID NO: 17187 - DNA, 371 bp, Glycine max
  unsure (1)..(371): unsure at all n locations
tctgatgtcacgcttaaataggtggctatgttcgtgctcgcgtgcttagcgcaattctaaaccgcttagcgctcattagtgaatatctgcttagcatgtgctcttctcgcttagcggatagattgaagcagatgcacnaactcatccttttgcagattcttcctcgcgcttagccgaggagtgttgcgctcagcagatgactcttttggcttattgagagggtgaanatcaacacttcacatactctcctaattgacctganattgagagagaatgattattaaacacataaaatggacatactatgtatntattacctatctttaacannaaataattacaatactacataacaaccttaaattggagga

SEQ ID NO: 17188 - DNA, 379 bp, Glycine max
agcttgaaccataaccggtgagagtgtgatcttaaattgtgagttaacaactagctttgaataatagtttttacatcaatctctgaaatttataatgaaatgtatgaatgaagacatgatgaaggccatgattgtatatacaagccaattgaccaaaaagcttaccttgaattacaattgtatcctttgcaccctttgtgagctgaattacattttcaaaattgaaccctaaacttgaatgaatatctctagataccttgtttagattctaggagagcagatagttcaaggcaaattaccccaaaatttgagggagttgattgggatgtaaagtagaaaggtaagcatcagcacacataacaaataaattgtgttaaaa

SEQ ID NO: 17189 - DNA, 394 bp, Glycine max
  unsure (1)..(394): unsure at all n locations
tccgtatgagtagaaccctcaccattaacactagatgaagaacgaagactcatgttggttcttaaagtgtggttctttctttgttggggttngaaaacaaaaggtaaaagaaactacggttgaaactagccaaaataaacactaaaagaggtgtgaaagataatgtaaaaactaattggtaaaaagcaagttatctangtggttngacaatggaagataaagganatttaaagcaagctagatagtttcctatgtgaaggcttagatgaacccttggaggtcccaactggctcttcgcttagtctacacnggttacactaagctattacacacaaatagaggtttgggtggtctcttggagactctcaatacacncctgaagaatgtcaaatac

SEQ ID NO: 17190 - DNA, 234 bp, Glycine max
  unsure (1)..(234): unsure at all n locations
agcttgttgtctcgcggagatttacttttacttttgtgctcacaagatttgtcatactgacatttgagtcacgttgacgggcggagataccctagtggttatccgtataaacattcttttttgctgtctgtaaaacgaaaagcctgatagcatgcagagactaacgtcgtcttctgcgcccatcgtcaatcgcggccgacaagcccgntgacacgcagagatttacgttatttt

SEQ ID NO: 17191 - DNA, 311 bp, Glycine max
agctttgcctttagggcttgtaccttatcactttcttccaaagctttaacctcattgtctctcacaatctttaaattcgggagccaatccaatccttgtgtccggactctcaaccacttatgatagcccgcgatgatcccattacttgcttccctaagctctctgtcctttcttcacaccgcatcacatgccttgcgaactccttggagtacctttgcattggggtcactgaaaccccgtggtgaggacaggattataatttatacaaccccttgttcccataagggaacatttggaaatccttcgcatga

SEQ ID NO: 17192 - DNA, 333 bp, Glycine max
  unsure (1)..(333): unsure at all n locations
tggaagctcctaatatctcccacactntgtggggtgngccattcttggatggtcttgattntctcagggtccacttggaccccatttctaccaactaanaatcctagganaactatattatctacacaaaaagttcacttctctatatttgcatagaccaacaacactgggataacacatgggcttaggctctcttagacccagcccttctccaaacaatcttaacctgagtctctatctccttagtctcctgagagggttagtcctataggctatcctattaggaaggcttactcctgggaactaaatctattggtgttctattctccttaa

SEQ ID NO: 17193 - DNA, 176 bp, Glycine max
agcttcttaacctataatatcatttgtgtaatcttcaagagagaaaaccagaccaagcgccaaagaaatgaacgcttgttggcctccttcttgccaacactaataatggtataatgaacctccattcatggtgaactatgttgcttcaaatctatttattttagacaattccatat

SEQ ID NO: 17194 - DNA, 277 bp, Glycine max
  unsure (1)..(277): unsure at all n locations
cccggaattggtttgggcaaagacaacggcggcataactagctggataaatgccaaaggaaatcgtgggaagtatggtttaggctataagcccactcaggcggatatgaagagaagcatcgcgggaaggaaaagcagtggccaaagcttcgcagtgagacaagaaagtgaaggaagcccgccctgccacataagtagaagctntataagcgcgggtctgggagacgaacgtcaagtggtcgcgatatacgaagatgatgttccgagtacattggatt

SEQ ID NO: 17195 - DNA, 380 bp, Glycine max
  unsure (1)..(380): unsure at all n locations
agcttagcaagatgaagtatctttttatcctcttctcttgtccacccaatctatacacaaaaagcatcaaattgaaaaatcactcattagaaaaatatcacaacaattaataacatagttggtacatactccttatcaataacatcttaaaaaaagagaggctcttaaacccaaagaaagacttgttaattcaacgattacttaactcacaggaatagacaggtttcttgggtttaggagcaacaacactngaagactgagcattagatgacccttcactcttcttgctctntggtgtctctgcatcaccaccttgtatattgattctcatatctcatcantttgtaccatattttcaagattaaaatatgttacctttg

SEQ ID NO: 17196 - DNA, 316 bp, Glycine max
  unsure (1)..(316): unsure at all n locations
tgtgtctactatcatcgntattanntttttctccgtcattgaggtgccacttgagctgccaggtctctccacctttgggcgtattctttngaaagattcgtgcccncctttngcacatgttctgtagttgcatcctatctgaagacattatactgacactgcctaacgaaggcaaccactangtccttccaagaatggactcgggaaggttccaagttagtgtaccaggtaacagctaccccagtaagactttcttggaaggaatgtataagcaattcctcatcttttgcgtatgcctccatcttctgataataca

SEQ ID NO: 17197 - DNA, 334 bp, Glycine max
agcttctatataagctgaacctttttatcaataaacacaagttgagttttattcagaaaattagaggctatctcttttatcttagggagagggattctcctaaattcttgagggattcaagaacaccctggctgtatcaaaagactttcacaacctttgtgtgttgcccttgcaagaaagaatgattgtttccttcctttcatcttcacccttgttatttgaaaccacaattccagaaaatccacctctgcccaaaattatctcgtggccataactcctgttttacgcactcaaattaaatgattcttgagcctaaattgaatttcaaaacaag

SEQ ID NO: 17198 - DNA, 332 bp, Glycine max
  unsure (1)..(332): unsure at all n locations
gtaatgacccactaacctagaataagataacttaatgccattaacctanggaattaaaagaacttaatggttgagtgtaactgatattgtggcaaccaaaagtctgatgcctgtgttggccaatgngcccttattacaacttgaactaaacctaactaaagcctttntagttgattaacccaaaacatattcttggtcagccaactttacaaggattaggccattatttagacaaactgaacactctaaaattgagacaaagtggcgccatntagtcctcctccatttgggccatgatacaactcacaaccttggactnttctccttgaaac

SEQ ID NO: 17199 - DNA, 364 bp, Glycine max
agctttatctgcaagagcatcaacacagtgattagcttcgcgatagatatgaaccaaattaaaagtccattgcattgctaaaagatgtctaatagcagaaacgagtctcacccctaagacacacccttgcttaccttcttgaatacttgcaataaccacctatgagtcaacctgcactacaaaaaatttacaaccttttgaaaatgctagcttcaaatcttcataggcactccacaatttcacaataaaagttgaacaactagcaattttcttagcaagtcttcatagaaccccacatcctactcccatctaatccccatgagcagaaccatccaaattgagagtaagccaccttgagatagat

SEQ ID NO: 17200 - DNA, 151 bp, Glycine max
  unsure (1)..(151): unsure at all n locations
actcccaccttatgacgactatcccgggcaagacgatgaggaaggagatacccatcttggcccnctgctccacctcanagatccgtcctcccatgaactaccccaaccaaacatagtccgccatatcccggcttcacccacacccgtaaaa

SEQ ID NO: 17201 - DNA, 51 bp, Glycine max
agcttgttactctctggttatcgattaccaaaagcccaacatttctgaaaa

SEQ ID NO: 17202 - DNA, 314 bp, Glycine max
  unsure (1)..(314): unsure at all n locations
gcttggtcgtgttcttcctttcgggccttcttggtttctcattccaaggcttcatcggtggccatatngacatcccttagttcatcatactctnttcanactntgatggctatggactagaacttctcttcgactacccaagctctgtcaagctctgcctttagggcttgtacctcatcactttcttccgaagctctaacctcatcgtccctcacagtctttagatgtgggagccaatccaatccttgtgttcggactctcagccacttatgaatagccgcgatgatcccattactgctttccctaagctctct

SEQ ID NO: 17203 - DNA, 363 bp, Glycine max
agcttccattattggttttttgctttcccttttgcactttgattcgttccctataggtaagtgcactctcccttaattccttggctctccattgatgtgttttagtgccttagttgttcaatttttgccaatttcatgaggtaatgtatgcttagatttacgcttgtttgtctgaatttgatggttgtgtgggatggcctcacgcctaatgtgggttttgaaatggttgggcacatcacattgcccccaaccccttttcttctcatacctaaggtgcgcccaccaagtgctcggtgaaatgcctcaatggcatttgggcatgagtttatgaactttagtttgtgggactgacttgtgtatatg

SEQ ID NO: 17204 - DNA, 246 bp, Glycine max
  unsure (1)..(246): unsure at all n locations
agcttgatgcaacattggagaggttaatganacaacgagatgatgcgctccatgagaggttggatcanatggagaatagagatcataatgaataagaaaggacgagaagagggaatgatggtggtcctagacataaccgaattgatggtattaaactcaacattcctccattaaatgatagaatgatcctgacgcctacgtggagtgcgagatgaaaatagagcatngtttctcatgctacaacta

SEQ ID NO: 17205 - DNA, 338 bp, Glycine max
  unsure (1)..(338): unsure at all n locations
gatccttaagcacctgagctgcagcttagaataacacgnntttactagtatatattatagtatatattactattttctggtagagaaaatacttgcatttgtttagattatatgtatttggttttgccgaaagtcgtaagtaacataaacttatatatatatatatatatatatatatatatatatatatacggcttactaatatatgcacacacaaaaagtattggacaagcaacccaaaaatttttctattttaataaattcattaagggtgttattgtaatttaatttttattttaataaaaaaaactaatttctctccactctcaccactcatt

SEQ ID NO: 17206 - DNA, 403 bp, Glycine max
  unsure (1)..(403): unsure at all n locations
gcaccaatcaaacctgctccggttaaagccgttgtattgttgctcccaaggagcccagagctgtcacttcatangtcattacactatttaaataaaaaatacggtcattattcgtaaataagaatcattgacattcgcaataataacaagatcaacttaattggacgaaaaatatcaatttgatgcattttttttaaaaaaaatgagaattaaattgaaacttttaaaataatttgaagaccaacttgataattaaacctaaaaaaaactttaggggacctaattaaaatatgttaaatagtctagtgacctatgaagtgatttaaaagtaaattaaaaatcatacaagaatatcactcatttataaatattcataagacctcaatcaattatttgatttctt

SEQ ID NO: 17207 - DNA, 285 bp, Glycine max
  unsure (1)..(285): unsure at all n locations
agcttcttccctattttgctattatatagggtgagaagngaanaaaaaaagggttcagcctcttatgcacttgtctctctctcaaaattgctgaggaaaattatttccgtgaaaaaaatccaagctgatacgcttccgttacgtttccgggagtaattacgcgaagattctcgaccgttcttcaagattcatcattcgctcttcgttttcttcaagctttaacgggtaagtacctcacaccgaacttttcaatatattttatgtacccgtggtggcccacatttt

SEQ ID NO: 17208 - DNA, 400 bp, Glycine max
tctcttgagctcattgtgttcgtgggtgggacttgttgcttccaacaaaaccagtctaccaccgcaccgcgctgccatgtcgcatgtgttctggtctcgcgtcgtttggtctcgcatcgtctgaacagctccaactcgccgtgaatgaagaacagggacaaacaccaaatgaaagaagcaaaatccctaatgcaaagtggagcagtgggcacaaaatgatgtcgtatagtggaaaaaaaatttccaactgaactcgtgtgattcgggctagactcgcgagtttacacgtgtctaccgcgagtccaccgagtctgctttgagtctgcacaaaaacgagtttgcttctgagttaacttgcagggaccaagtcaactcttaaactcataagaatctacgagtt

SEQ ID NO: 17209 - DNA, 364 bp, Glycine max
agcttgcagatcgtcttcacaacatgagaacaatgtacttactatgagcttcttaaatttttttccttttacacccaattattgttggtcttccttattttccctgttttggtcctttaattcagatctgttattctctgaagatgagggaaaaattattttattcttacaggtttctcaatccttcatggtttttggtagtgaattcttactatcttgctatagaagccatctttaaccaacaaattaaatccataccgtgctttttgactttttggctaaacagattataagttttaggtatgttgcatgggtcattttattgggtgacaatctctctttgcagttatgctctgccattgca

SEQ ID NO: 17210 - DNA, 397 bp, Glycine max
ttaactagacccgaataattacttttcaattgaggattcaatggaattatcaaacgctcttagtagaattttaatatcatcgaactgaaagtgctacgcaccaacgagcaatcggtttcaagcgcatattgcttttgcacggtttcagctaacgtgtccacaattagaccaaaaattatgacacgaaggcagttgacaaaatcaaaccgaatattaacacaaacaactaaatagtatttaggcagatcattcataagaaataaagaatctgtgcacgaacaaggcacaataacaattacaaattccagcacaaacaacatagcgtataaaagtttaactaatcaatcaacaacctgatttccagatctaggccttattacgcttacattcagcaaaa

SEQ ID NO: 17211 - DNA, 365 bp, Glycine max
agctttaacttaatcaatgcaatttccttttgtgcttgttcattccacccaaacgcacccttcttcaaacattcggtcataggacttgctatagtgctaaaattctggataaagcgtcgataaaatgatgcaagaccaaggaaagatctcacctccgaaactgttgtagggctcggccaagtcttgatagcatccacttttgtttgatcaacggatactccatctttagacaccacatatccaagaaacaccacactttcaaccaagaaatcacacttttccctcttcccatagagattttgtgctcttagggtctcaaatatttgcttcaaatgagtgaaatgctcctctatagatttgctata

SEQ ID NO: 17212 - DNA, 396 bp, Glycine max
gcttgaaattgagcaacaaaagctctcgagatattttatatggtcataacttttaactcggaggtccgattcaggcgcatcacatatagagacgctcgaaattgaacaacataagctctcgacatattcatatagttataacttttaactcggaggtccgattcaggcacatcatatgtcgagacactcgaaattgaacaatggaagctcttgagcaattcaaatggtcttaacttttcactcagaggtccgattcaggcgtataatatatcgagacgcttggaattgtgcaacggaagctctcgtgaatttcaaatggtcataacttttcacttggaggtccgattcaagcgcatcacatatagagacgctcgaaattgaacaacgtaagctctc

SEQ ID NO: 17213 - DNA, 372 bp, Glycine max
agctttcataggtgaaatcaggtgcaaccatttcccttagagtactctaacggggtggaggttgtgccatgttctcataatgctcaaaatcaggatgtttaaaatcaccaataacagaatgcacaaactcaccagtaatggaatgctcaggatgatcaaaaggtacaaaatgatgcctaaataatctatgaaatgtcctatctatatcaggatcaaagggttgtaagtcagatggattgcctcgagtcatacactacattcagcatgcacaactagttgccttctcatgtaaataaaagtgtacatttgaactacagctaccctcaaatgatatccaaatgacttgaaattttgtgagcaaccttataaaat

SEQ ID NO: 17214 - DNA, 400 bp, Glycine max
tcttatccaaggctcatcttggtggtgaagctctcttctttcatggcttattccctagtggatggtgcctcctctcacctcttttcctttttcttccgctgcatccccatggtggaaaatcaccattaaaggacctcattgaagctcaaagatccagcctccatagaagccccacaagcaagcttccatcagaatgttcgaatgcggcccataataaattgaaacactcaaaattgaacacgaatgctccaagaaaattcaaatggccatgacttctaacttcgtatccgattgcaacccataatatatttagacgctcaaaattgaacatgaaaggttcgagcaaattcaaatgaccataactcttactttcgtatccgattgcagactattaaatatc

SEQ ID NO: 17215 - DNA, 358 bp, Glycine max
agcttgtgagcaattacaagtaaaaataacatttacataacttgtccatatcctgcatttccaaaatctggaatatcggtagtaatctatgaatacaatcaactaatcaaataaagaaaaaattaacaccaggtgctcggtagagaaagccatatttttaggaagattattatttaaagaacttatcgtataaattgaattcgtaaatgtggcaagactcactgtctgattttcttcatcttcattatccttgtcggagtaactgtccccatcttcatttttacctttagaaatggacacatttattgagtgttggccacaagtgagaacaaagaactccttcctcctcttagaacta

SEQ ID NO: 17216 - DNA, 398 bp, Glycine max
tgtcaccgttcgcaacccttttgggtttatgcctttggttatgggaaagagaagcaacggtgttattgttttcgcttctaaaacttgcttaacctaattgaagcgatttatgagagggaggtggttgtgccgcctgagaatttctacgacgacgtcgaagctcgcaagtacacctctttttctcatattgttcaaattcaggtttttccctttttattcttctcattccctattcaattttctttcgttgtgaaattcattcattcattaatttctctatgccaaataagtggcactatcaaagagagctctcgaactacttgctttgcctgatgaccacgttcctaaattactccttgatatcagtaattttaatttaattcaatttaattaatatc

SEQ ID NO: 17217 - DNA, 356 bp, Glycine max
  unsure (1)..(356): unsure at all n locations
agctttcttattaatattaattatatatgaatatttaatataaaaatattaaataaaacgaaaagggttccaaaaaagcaaatatgtaaaaataaattgacatataaattatacaaaaatatttaatattgtatacatttaaagataaatctaatggtttaaaaatagacaaggttttttttattttttttgccaaaggtttttttacaagttaaacaagggtgtttctttacgtaattgtaaagtaattatttattagaaatatcacccaaacaatcttcatgacagtccacttgaattgacaacagacgtttgataaacttggcatgaattaattntaaaatcatgaaaactac

SEQ ID NO: 17218 - DNA, 394 bp, Glycine max
tctagataaagtaactcgtcttctctctattttttgtttgagggcacacgtaacacaagctgaacttcattgtcagttccatgcactgtgggctggggtgattgaggaggttcgagttcaaagggataaatgttttggatttgtcagatacaacactcatgacgaagctgcactggccattcacatggctaatggaagacttgttcgtgggaagaatatgaaggtgagaattctttcacttgatgcttatctggtcaactaattaattgctattctttgttgaggctgatggttgccccatataataatgcctattgcctagtaaggatggtgatctctcttttttttcttcttgccaatggctgatcacgttactcgcatgtagagactcatg

SEQ ID NO: 17219 - DNA, 315 bp, Glycine max
  unsure (1)..(315): unsure at all n locations
agctatatctttcatttggtntttttataacacgcngacaatttgatgctaattatttgtagttattgtcaatgtaatctgagttccatctttatctttggaggcaactctgatgtttacaatactccactgcctcataattgtttccactaagtagtgaattatagatgtagaggcagcttctaatattgttaatttagattcttcacttaaaaataaaatggcttctaaacctgaaattgactggccatcaagttttacttttctaaatatcttttgtattattattttttccttagactggaatctccaaat

SEQ ID NO: 17220 - DNA, 360 bp, Glycine max
agcttgttggcaaaaactttggttacgattgacaagaaattgtaaccgacacgctcgaagaggtaccacaatgcggtggcataaacgagcaccgcaactgctccacgccaattcatccacaacaccacatcagcaattaagcctttgccgagaacacgatgaaaggatgagaaattaaggcaatgccaagattgttagaagaatgaagaatgaaagggttagaatcatcaatggcagtcatggctatgagagaaaaaaaaaaagaaccaaccagacatccaaaaggtccccttaaaaaatgattcatatgggggtggcctactctgttatacaagaagttaatcattaatgacatccatg

SEQ ID NO: 17221 - DNA, 357 bp, Glycine max
agcttctacatctcttgaatgttggggaaggttttgggatgaatgaaacttcactcagcccccctttttatgtttctcatgcagaggtgctcgcccaagcgagctaactctgtactatttttcttttggaaaatctaaataccctattgctgtgcttttcttgattcctaggattgcaaataaactaggcatatccaactatgacttaagaaacatgagtgaataaataacaagcagaaatttaaaaggtgctaagctacctcctactagcgtgtctttaacgtcttgagccgggcgtgggatgataatcttttgatcacgggcctagtgcctactcgtacctttgctttggtgtgg

SEQ ID NO: 17222 - DNA, 398 bp, Glycine max
tattggagtagatacatgggagcgacttattttatttctgagggtcgcatctagtcaaggtctgagagaccgtacgagtcgtctagcgatttctaattatacggaccattgagtatatcctatgctggcactagccgagaagcccatgaatttcttcgggggcagaataagtgtccgccattgccttggtcttggctaacaatcggggaagttcttgactaccgcacaatgtaagagcaaaccggcccatccacatggatgcctattagtgtaaatagtctatcaccgttactatagccacattctccgcgtatacaggggcatactcatccgcgaccctatgctcaggggccgtggctagacttaactctacttggttcttggcgacaatagctagc

SEQ ID NO: 17223 - DNA, 350 bp, Glycine max
  unsure (1)..(350): unsure at all n locations
agctttgttcataatcataagaccaaagcaaaagttttccgcctttgaaattttcatgcccatcttctttatattgagtattgtctctctagttaaacagaataaatgctacacatccccagtttgccagcaacatggcatcataattttcagacatgcacaaaattagtcaaataaatctgaagcagtctagaagagagctacgatctagaagttggtcataacttataatcagcaagtgagtccaagagttttgaactccaaatcccctcattagccaaaaactaaaatgggtttcctcatgataagaaagacatangcagcccttcaaaaccctaagaagagacgga

SEQ ID NO: 17224 - DNA, 397 bp, Glycine max
tagctacacaccccctataatagctaatcttattccctcgacaaaaaacatgaaaatacaaaaaaaagtccttactacaaagactactcaaaatgccccgaaatacaaggctaaaaccctatactactagaatggccaaaatacaaggcccagacgaaggaaatacctattcaaatatttacaaagataagcgggctcatacttagcccatgggctcgaaatctaccctaaggctcatgagaaccctagggccttcccttggatctctagcccaatctacttggagttttctacccaatgcccttgcggggtaggattgcatcacatagcatgcccgttggcgtgcgttccaaacgagtcctcatggacttcctcgatcatgtggtccgctcatgaa

SEQ ID NO: 17225 - DNA, 346 bp, Glycine max
agcttgcttgagaagtctttattgttctggatctttgagcttcaatgaggtccttcaatggtgattttccaccatggagatgtagcggaagataaaagagaagagttgagaggaggcgccatccactagggaataagccatggaagaagaagcttcaccaccaagagagtgtcttggataagaagcttagagaagaagcttcaatggaggaagagaatgagggagagagagagaaattaaaatggtgtgggaatgaaggaaagatagggagagaagttgaattttgaagtgtgtctcacaagactcttatttcatcaaagtaccacaagtgttacacatgcttcta

SEQ ID NO: 17226 - DNA, 359 bp, Glycine max
  unsure (1)..(359): unsure at all n locations
ggacacttaaaactcagcttaaatttctatttctagaccanattctttatttacatctcngccattaatgagttgaccataatttgaccaaagaattttctttgaattgtccttattctttctagatttttaaaaacttaaaagcttaaccatactagggtatcctatggtaataccttattttctaccatttcaatagtctaaaaacactacccattcacaccaaagcattacccctttctccatatgaaaactggtggggataaatatattttgggattaaatcatataggaatggggaattttcctctcttatatcttccttcttatgttaataattggcattttaatatcattta

SEQ ID NO: 17227 - DNA, 362 bp, Glycine max
agcttccattttcaatttggagcctctcgatatattacgggactctattggacatccgagaaaaaagttattgtcgtttgaatttggttcgagcttccgttttcaatttggagcatctcgatatattacgagactcaatcggatatccgagttaaaagttaatctcgtctgaatttgatacgagcttccatttttaatttggagcctcttgatatattacgggactctattggacatccgtgtaaaaagttattgtcgtttgaatctgatacgagctttcgttttcaatttggagcatctcgatatattacgggactcaatcggatatccgagttaaaagtaaaatctcgtctgaatttgat

SEQ ID NO: 17228 - DNA, 396 bp, Glycine max
tctatagaaggttcgttcctaatttctctacaatttcatcacctctcaatgagctggtgaagaagaatgtggcatttacctggggtgaaaaacaagagcaagcctttgctttgctcaaagaaaagcttactaaggcacctgttctagctcttcctgacttttctaaaacttttgagctagaatgtgatgcctctggagtgggagttggagctgtattgttacaaggtgggcaccctattgcttattttagtgaaaaacttcatagtgccaccctcaactaccccacctatgataaagagctttatgccttaataagagccctccaaacttgggaacattaccttgtttccaaggaatttgtcattcatagtgatcatcaatcacttaagtacatta

SEQ ID NO: 17229 - DNA, 358 bp, Glycine max
agcttttgaggaatttttcaacttctttgtccataaattgtgttttgtagtccgagatcaaagtattaggaattccaaattggcataaaatgttcttcaaaatgaactttcgaacattggttgtcgagatggtggcgatgggctcggcttctatccacttggtgaagtgatcaatgcccactaggaggtattttacttgtccctttgctaggggaaaaggtttgagtatgtctactcaccaaatggcaaggggctttggtgttactatgttgtgtagctctttgatagacatggaagagatgttgttgaatttttgggattcttcccatttcttcacattctatataatcttttctca

SEQ ID NO: 17230 - DNA, 423 bp, Glycine max
actcttataatactcacgctctaaccgcctgagatctttgccttaacacattggatggttcatcctttgtggtataagtagagggtacatctacttgggtttgactgagaacaagagagggtacatctcttgtggatcagttctagtggagggtacatccactagggtttcgaagagaacaagggagggtacatcccttgtggatctttgcttgtaaaaggatttttacaaggttgaaagaaatctcaaggaccgcaggtctcttggggattggatgtaagcatgggttgttgccgaaccagtataaaaactcttgtgtgtttgtctccttcttccctactcttttaatttttgctgtgcatttaatttccgcttttactttctgttaagtttctcttatactccttattctcttaacaactt

SEQ ID NO: 17231 - DNA, 365 bp, Glycine max
agcttaataaatctatatatggtttaaaacaaacctttcgtcagtggtaccttaagtttcatgggataatttcttcatttggttttgatgaaaaccccatggatgaatgcatataccacaaggtcagtgggggtaaaatattctttcttgttatatatgtagatgatattttacttgcagccaatgatcggggtttgctacatgaggtgaaacaatttctctctaagaattttgacatgaaagatatgggtaatgcatcttatgtcatcaacattaagattcatagagatagacctcaaggtattttgagtctatcacaggaaacctatattaacaaaattctagagagatttcggatgaaaagt

SEQ ID NO: 17232 - DNA, 397 bp, Glycine max
  unsure (1)..(397): unsure at all n locations
tgtgtgtgatgttgcttaagctaagtgtcttatattgattgggcatatcaataaaagntgggaattaaaaggaaaaggtgatctaaggatgaatgctctcctataacctaagttttgcattctaaaaaaaccatgaattgtttgtagcccaaccccattacaagccaaaaaagtctttagattcaatttgtgtgtgtggaatgacacggaaaagaatcgcaaaagttaaaacttgtgtgatatgtggattaaaaaaattaccttacactcttgcgcttatgagagacacagggctcgagaagataaagtgaggaaaacctttcttgacacgtgtcgtgcttgatatattatatcatttgcgctgcataaagaacgtcataatttttaaatactgccg

SEQ ID NO: 17233 - DNA, 364 bp, Glycine max
  unsure (1)..(364): unsure at all n locations
agcttcagcctctaatggaagaatatttccatcagaacaaaacattttggccctgaaaaacacacctctattgcatgcgggtgtgtaaaaattcctattctcattataacccaacataaattgaatagattttttttttgaaataattcaagaaaaaagaaatgctttgatttataaaacaaattcaattaacaaaattatttgtacaaaaccaaattggttaactaaactagttttcatttgaatattttatttgaaaaaagaaaatttgaaaatcagtttaaaattaatctgatccttataattagtttaaaattaattaaaaatcagtttagaatcaattntttagaactaattcgatact

SEQ ID NO: 17234 - DNA, 443 bp, Glycine max
agtttttgcgtgtcgatcactgactctatagaatactcacgcttgtacttaaaaaaacattgttagttatctaattgtttttataataaccggattaatatctgaaagcaattttaaaataattaaaatttattattatagtaaaattggtatttagatgtatattttataaagacgttattaatgaaatgtaacttgacaagaaatgatactaacatttaaatttaaaagttgaaaaaattaacataacttgtataataagatattattttcaaagaagaaaaaaaacagagaacttctgattctgagttgattaaattagttttcattttattttacttggtatacaaatatatatatatatatacatacaaaaaatatatatatatatatatatatatatatatatatatatatatataatgtactatttataagatgaa

SEQ ID NO: 17235 - DNA, 371 bp, Glycine max
agcttgctaacaaaaattttcatacaagtggaccttcttctagtaattatgacttaccgcagccgcctatccctcttccattcccacctagagcaattccaaacaaaaaaaatggaagaagcggaaaaggagatcttggagaccttcaggaaagtagaggtgaacatacctctgctagatgccattaagcagattccaagatatgtcaagtatgagttgtgcacccacaaaaggaagctcaagggaaatgaaaggattattatgggcagaaatgtgtcagcattgataggtaaatctgttcctcacattcctgggaaatgtaaggacccaggtactttttgtataccttgcattattggaaacagtaaatt

SEQ ID NO: 17236 - DNA, 399 bp, Glycine max
gctattgggattgagaaagctttaatggattgtttatttgatagtgcaccgataccggtaactggttaataggatcttgagaggattgagggcatcaatattgtatttggaaagaccctaaagaaggaaaaaagtaaaacttccatatggaagaagaggtttatattgtttggtcttccatactggtcaaatttagatgtcaaacattgtattgatgttatgcatgttgagaaaaatgtttgtgatagtctcatcgacatgcttcttaacattcaaggcaagagaaatgatggtttgaatactcgccaagatctagttgagatggatatatgagatcagttacatccaaggtctgatggtaacagaatatacttgcctccagcttgtcatgctttgttg

SEQ ID NO: 17237 - DNA, 350 bp, Glycine max
agcttccttaagattattcctttagaagctagagcttagctacacatacctctctaatagctaagctcacctccttgagatgagaagctagaacttagctacacaccccctataataactaagctgacccccatgacaaaaaacatgataatagaaaaaaaaaaagtccttactacaaagactactcaaaatgccccgaaatacaaggctaaaaccctatactactagagtggccaaaacacagggcccaaccgagagaaaaacctattctaatatttacaaagataagcgggcttatacttagcccatgggctagaaatctaccctagggctcaagagaaccctggggc

SEQ ID NO: 17238 - DNA, 396 bp, Glycine max
  unsure (1)..(396): unsure at all n locations
ntagagggtcattcctcataatgtgtgttatgttataaaagtagcggtgcctcttgacatatctcgacggaatgatgttccagcttaaagacacacaaatgatggcaactttatgattaaatcctcttacaaagcaattgtggctcaaaaagatgataatggcctttattacgcactatatgaaagtagcgatggcctgaaagaatgagagaattcattcatggaaagttgatagacaagcaatgctcaccaatgaatcaagatatagaaagggtctaacatatttgaacttgtgtcctctttgtcaggagtcgcaagaatctatcactaatgtccttcgtgattgcattttttcccaacatgtgtagagcaaacttcgaatgaattgacaacatc

SEQ ID NO: 17239 - DNA, 356 bp, Glycine max
agcttttgaaattattctttgctcctggttatcgattataggaaactggttatcgattaccagagagtaaaaactctggtaacttagaaatttttttgaaaactcttttgaaaaacaaaattgtgctatgtttgttttttgaaaaatcttttcaatacttcccttgtgaagtcttcttgatttcttctcttggaacttgaattcatcttttcttgaatcttgaaatcaaacttctcttgattcttgaatttggtcttgatttaatcttgaaatcattctttgggctttttgacaacatctttgtcattatcaaaacttgttgaatcaacttgattcatcatcatgaagcttgcttc

SEQ ID NO: 17240 - DNA, 400 bp, Glycine max
tgcgagctcggccggaatccgaaatggatgatttgtttcttaccttaggtgtggctttgctgtgtgtgaactcaagcccagatgacagaccgaccatgaaagatgtggtagcaatgatgaaggaaattatgcaggagagagaggaatgtgtgaaagttgacatgcttcttaatgcatcttctgcaaatgagcaacaagaaagaaatcatctcactgaagaaccaatgtcaatgataagcaccagcagcacaaatctgcatctgcattactctccccatcgccctcaaacaccaaagtaacttccaaatagttaaatattagcaatgtgtcttggcaactaagatttccttagcaagaatggtttctgtcctgttatcattaattaattcagcttcatatt

SEQ ID NO: 17241 - DNA, 351 bp, Glycine max
  unsure (1)..(351): unsure at all n locations
agcttctacttatgtgtcagggcgggcttccttcactttcttgtctccaacgcgagggttgaccactgctcttccttcccgcgatgcttctgttcatatccgcctgagtgggcttatagcctaaaccatacttcccacgatttcctttgacgttaatcaggctaggtatgccgtcgttgtccttgcctaaacccattccgggttcgtaaccgttccctaacataactcgggccatcattactgctgcatccgacagacaatgctgcccatagaaggagtccacggaggaaatgctgaccacctcaaaagactggaaagcggnttctaacgattcttttgcggcttccacat

SEQ ID NO: 17242 - DNA, 394 bp, Glycine max
tttgtgctttgggaaaaaattgtctttttattatggatttgtattctttatgacaaaatgagttttcactttcatgaagtattttgattcatgttttggaaaataataaatttatggcaaagatcatggttttgtgcaaaagtcatgcattactagcaagatggaaaaattggttaggtacattttatccgggaggattaaagtttgggaatttgtgtgaatcatttgatgaaaatggggacttcactagatgaaagatcacaaaggaaagatcaagatatctgaaagtcgaaggagttatgtgcttggatagtgcttataatatttctttaacaagcaaattttgaggacaaaatgtttcttgttggggagtattgtaacattatgttctttg

SEQ ID NO: 17243 - DNA, 357 bp, Glycine max
agctttggctaagttcaaacactacctattttgccataaattcattattcatactgatcagcaaagcttgaaggaattattatagcaaaggttacaaactcctgagcaacagtagtggttacccaaatttttgggatatgattttgttattcagtacaagccgggtaaggagaatattcctacggatgaattgtccaaaagtttttctatggcatggtctgaagcagtaggagtatggatgactcaagtagcaacattaatgaaggaggatgctattttggctgcactttataaacaatgtatagagggaactgtgtcaggaactaaatatacagtgaatgatggattgttgttttg

SEQ ID NO: 17244 - DNA, 379 bp, Glycine max
  unsure (1)..(379): unsure at all n locations
tagatgttgcttgtggaggaaacctcatgttttagtctcctattgatgccatcaaaatcattgaagatgtgctntaacccctacaacaacttaggagataggaggattatgaagaggggcgtcaatcaaataaggaaagatgaatcccaaaatggattgggaaagtagatgcaagcagtatcattgaagaagacactcatgagagctcaagctcaagtcctcaatactacaccttcattcctaacttgtgataaatgtgggattgtgcatgggccaagagaatgcactattgatgacaagctagttgtagctatggatgagatcaactttattaagggagtaaacaattattataatcaataccctgacaatttcaatc

SEQ ID NO: 17245 - DNA, 361 bp, Glycine max
  unsure (1)..(361): unsure at all n locations
agcttgcttctatatgagaggtgactatcatcttggatgacgtggcatcgttgctacatttgcctatcgtagaagcattccacaactttgagcaacttcatgtcgacaatgctgtcgagatgttggttgaattactcgaggtcagcgctgaagaggcgagagctgagacgtttcagttgatgtgattcttactaggagcggatcgcttgatacaggttacagagtttggatgancgcccttccggtgaaggaagataagtcagtgtagaggccacaaggattaccttgataagtctgatattggttcaacaaggaacccagagagaagctctcaccaaattttatcaaaaatccattactt

SEQ ID NO: 17246 - DNA, 404 bp, Glycine max
tctattctcaaaagggcaaaaatttggtttattttctttagatactgctggtgctattgtccaatcataattagagtttcacataatcatcatctatgttcacatttaacgcaaattttttaatattcagattaacaaggtgaaactccaaattctgaaaggataatagcaccaaaaactcctaaagaactaactgcatgtatggtttgtcctttctcaaaaataattcgaagagaagttcaatacctaatgctgtacaagtgtacaatgcacattcaaactccaaagaactatactcgcaaattcctaacatatatattttaattacacagtccataccaatcaaacaaaagtaaacgacaaaaaccccattcataaacatcaaatttgcatatacataccat

SEQ ID NO: 17247 - DNA, 350 bp, Glycine max
agcttgaataggatgctttaattttggaaaagaaagagagaaggggggagcacgaaattgaaggaataaaagagggagagaagtggaactttgaagtatgtctcacaagactctcattcatcaaagttacaacaagtgttacacatgcttctatttaaagactaggtagcttccttgagaagctttcttgagaaaacttccttgagaagcttctttgagaaaacttccttgagaagctagagcttagctacacacacccctctcataactaagctcacctccttgagaagcttccttaagaagattcctaaagaagctagagcttagctacacatacctctctaatagct

SEQ ID NO: 17248 - DNA, 456 bp, Glycine max
  unsure (1)..(456): unsure at all n locations
ngcgcntattgctgcgtcgatcgacganctangngactctacagacaactgaagctngattggcaagatgatttaaggcttagtttctttatgtggctgcgacaagagattctcggaatcttccagaaaaccatgtgcgagacgatacttagactacataagataggaatattgggaacatataaacagtatgatgactctcatttgattaccgatgtctctgactagaacgactcagntatgatgttgttgtaacagagcataaacgagattacaatgcggatgatcggaagaaagtgagtgtatcactccttaggcgagaaaacagcttatacgatcgcgtctacgcatggtatacacgcaggataagaaaccggaggtgagcgacataactatgactgccgacatagcatgagatgaagtcgaagtctcagatttggatacttacccgaagga

SEQ ID NO: 17249 - DNA, 350 bp, Glycine max
agcttctaaacaatggttttgtttttctccactaccctattcaccattggttaagggtgttccttagtcattctactagtgtatgtagatgacatcatcctgtcaggaccaaattttgcctctatgcaagctattcagacccaattgcaatctatgtttcaattgaagatccttggcactttgaaatattttcttggcttagaaatagctaaatccaacagtggtatctcactctcccagagaaaatacactctatctcttttagaagatgcatgtttcttggcatgcaaacctttcaatgaatcccaacctgaagctcaatcttcatgatagagacttactacctgatc

SEQ ID NO: 17250 - DNA, 387 bp, Glycine max
tgtccttcgtttgattccaaatggtttatttcttaatgttcactgttgtacaagctcaagtgcacacatttttcatcaagcaaggtgccacaatggtacgttccataggaccacatttccaagtcccaccagcatcgctccaaggcctagttggagtcacaatactctttgctgtgccattctatgaccgtgtctttgtgccactagcaaggaaaatcacagggaaacccactgggataacagtgctacaaagaattggggtaggacttttcttgtcaatccttaacatggttgtgtcagcacttgtggaggccaaaagggttggtgttgcaaaagagagtggcctaattgatgacccaaaagcagtgttaccaatcagcatttggt

SEQ ID NO: 17251 - DNA, 362 bp, Glycine max
agctttgagcaaattcaaacgactataactctttactcggatgtctgattgagtcctgtaatatatcgagacgctcgaaatggaataccgaagctcagagcaaatttaaacgacaataacctttttactcggatgtctgattgagtcccgtaatatatcgagatgctcgaaattgaatgttgaagctctgatcaaattgaaacgacaataaatttttactcggatgactgattgagtcccgtaatatatcgagacgctcgaaattgaataccgaagccctgagcaaattcaaacgagaataactttttactcggatgtctgattgagtcccgtaatatatcgagacgctcgaaattgaatac

SEQ ID NO: 17252 - DNA, 402 bp, Glycine max
agcttctacattcaatttcaagcttttcgatatatttctggactcaatcggacatccgagtaaaaagttattgtagtttgaatttgctcagggcttcggtattccatttcgagcgtctcgatatattacgggactcaatcggacatcagagtaaaaagttattgttgtttgaatttgctcagagcttcggtattccatttcgagcatctcgatatattacgggactcaatcagacatccgagtaaaaagttattgtagtttcaatttgctcagggcttcggtattccatttcgagcgtctcgatgtattacgggactcaatcagacatccgagtaaaaagttattgtcgtttgaatttgctcagagcttctacattcaatttcgagcttttcgatatattac

SEQ ID NO: 17253 - DNA, 357 bp, Glycine max
agcttctagccaaatggacttatcttgaattaattcctttgatagcccttttgagccttgtttccctttccttgttttgaagctcactacaagccttaagtgaaaaaaccatgatattaccatatccttaaggaattttggagctttggaattgttttgggaataagtgtggggggtttttgtttcattggacaacttgttttgttggctatgcttcatgatgtattttgggccatacttgatgtacattgtgtattggttaaatgttggacatgctgaatgaaatgttgtttctcaaaggctaaagagtaaaaaaaaaaaaaaaaattcgaaaaaaaaaatcgaaaaaagaaaaag

SEQ ID NO: 17254 - DNA, 355 bp, Glycine max
ggagaggatgcttcattggaggaaaagaaagttgtgtataaagagagaggggggagctcgaaatatttaagaataaaaatggcgctaatttcatctattagatgctgtctacaagactctcattcatcaaaatatcaccgcgtgttactcatgcttgtatatatatactaagaaacttccttgagaagcttttttataaaaactctcttgagaagctccttttagaaaacatccttgtgaaactagagcttatcttcacacacccatctaaaaactaagctcacctccttgtcgaaatacatgataatacaaaaaaaaagaccctactacaaagactactcaaaatgccctgaaa

SEQ ID NO: 17255 - DNA, 362 bp, Glycine max
agcttgtgctaatgcctcccctttacttcaagagatgtgctgctggtgctctgtggggattatcagtctcggaaactaacaggtacttttaagagttcagtttatatcttatcccaatcccaatgatattgctccctgaatcttattcttaagactttttttgaaactcttatcgtatatgatggagtattggggtaggccatttttgtactaaagatgatatttctcttttataactgattgattacattatttcagaattcagagtgtagtattattagtttttggatttagatgagtttattgtattggtcttttgctttcttgcgttccctttcattattttatctcctttttttggt

SEQ ID NO: 17256 - DNA, 391 bp, Glycine max
ttccaggtttggtttatgatgacgggcttcttttttgggtacacgtggcaggatttccgagctggatacagaaaaaggtggaggaggcacagttagtgtacgcggaggttgggaaggaactacggttatgtagcagggattctccgtaccttggaaacacgaatgttgccacgtgtcacgagctgaacacgtatctgcacctcgttgatggcttcgtcagctccacgtgtcccttcagagcctccgcgaagaggttcctccagcgttgacagccaccgtagtgtggtgctctaacccaaaccattaacagaaaagataagttttcatgggaaaatgtaattattagctgtagttgtctaaattgttgcacaaccatcgtcattgtagttag

SEQ ID NO: 17257 - DNA, 362 bp, Glycine max
agcttcctctctaggcttcttattcaggcattctcttggtggtgaagcttctccttccatgacttattctctagtggatggtgcctcctctcacctctaatcctttatcttccactgcaactccatggctgaaaatcaccattgaaggaccttattgaagctcaaagatccaacctccatagaagcttctcaagcaagcttctctcaagtagtattagagcacaagagcttcaagttggtgttccttaaacctccattaattttcagctttaccttctcctccattatcatttcttcatttttctccatgtatctcctcacatgtcttgtgctgaatgattttaacatgttttttagaattt

SEQ ID NO: 17258 - DNA, 395 bp, Glycine max
  unsure (1)..(395): unsure at all n locations
tgaccaggaattatttgtattggttggatgttgaattctggttgttcctggtgcggagatgatggtacagcgggtgaaccaggagcggcagtttcttttggtgaggaagccatggaaaaacagagcgtttggaatgatttcgtaaatctcagaaaactattgggaaatgctggagaaaacacgaatgccaagcagatataaatttgaatgaagaatgtagaggggcgtgtgaagcaacggtcgaatttgctttgtggtgaacgtgctattaatgttaagtgattcgtttgggcacgttcagattgcagtagctgctataattcctctagcagacaaatgcccagcttgcccctcagttnttcaaactgatttgcatccaaagcctttgtgaaaat

SEQ ID NO: 17259 - DNA, 371 bp, Glycine max
agcttgcttctacaccacttattgagaagatgagtcaagaagaagctcgccaccataggaagccatggataagagcttgaaggtaggagaagatgagtggagggagagggagagaagaagcacagaattttgtgcctcaaatgaggtctgaactttgaagtgtaattctcaaatgatcaaagttgaaaaaatgcacacacatggcctctatttatagcctaagtgtcacacaaaattggagggaaatttgaatttcaaatttcacttgaatttgtggagccaaattttggagccaaaatttcactaattatgattagtcaattttatctatggttcagcccactaatccaagatcaactccaagattctcc

SEQ ID NO: 17260 - DNA, 396 bp, Glycine max
tgccacccagctcgcccaggcgagctaggttgttttttttataagcaaccgccttctggaggaacatcctggaaggcccaagtgggcctggttgctatttgaacccctatttttactaaatacaccctctgcctttttttggtgattcttttttcgtaaagttacggaaacttatgaatttcgtaacgatacttgttttctttccgtaatgttgcggaaccatacagattacgtaatcatcccttttttgctttccggaacgttacggaactttacggattgcacactaacacttccttttaatttccggcatgtcacagaacttcacggattgtgctgcagtgccttctttaacttccggcatgttacgaaacttcacgaattgcctaacgatgg

SEQ ID NO: 17261 - DNA, 353 bp, Glycine max
agctttgcagcatattgactattgtttgtgagccttggacctcctatcctacggttaccgacggaggagctggagtggatgatgaagggatgtcctttgttctatctctttttctcaattccatctgtaactaaaaatttcttagaccaaaattgctcaggtttaacaacagaaataaagcctgaaattaacacatggtgcttagcgggatacagctcgctcagcgcatcctcagaaacataacatatcagcttagctggagccaagctcgcttagcccaatagttgttgtgacaaagtgcgctcagcccaggtagactcggcttagcgcgaggctttctacacaaaattttc

SEQ ID NO: 17262 - DNA, 400 bp, Glycine max
tgtgactcttggaaatttctttaaaaactagtttcttaaaaagttgtgacttttgaaataatcttcagaaacaagtcacttgaagaattgtgacttttggaaatgtatttttcgaaatcagtcactggtaatcgattaccattatattaaggtgtaatcgattacacatcaacagatgtaacttttaattttgaattttgaaaattaaaacgtttaaaagctctggtaatcgattacaagtattgtgtaatcgattacacaagtttaaaatgatttaaaactgtttaaacataagttgtaactcttgaaatttgaaatcttaacattttaaaacactggtaatcaattacatgattctggtaatcgattaccagagagtaaaactctttggtaatgattt

SEQ ID NO: 17263 - DNA, 345 bp, Glycine max
  unsure (1)..(345): unsure at all n locations
agcttgaaccaaaaaccggngatagtgtgaccttactctatgagtgaacgactaattgtgaataatgatctttgcataaatatctgaattctagaatgaattttataactcagaacataatgaaggccatgaattgtatagacacaagctcttttgaccaaatagcttaccttgaatgatacttgtatcttttgctcccttgtataaagcttattgatttgtcatgaattgaaccctgaactttaaatgattatctcctaataccttgtttagattctaggagaacatatggttcaaggcaaatttactctaaatttgggggaggaaagtcaattanaatgaaaa

SEQ ID NO: 17264 - DNA, 384 bp, Glycine max
ttttgctaatgatcagaacaaaataacgtgtgttatttttatttgctgctgaatctagaagactcaactctaatttggcacttttttcatctatttgatgctaaataatattttgatggcctaaattagattactgcttctaaataatgattgttgaaaaatatttaaaaaattggttcacttggttatcgctttttctgcttagaacttgaacagttaaattgggagttgattattttttgtttgaattttgaatgagaaaatcctagggtatgtttgagtgtatcccttcaccctcatcttggtttatactgaactagtgtaccattagatcaatatttcaaggcatatatctgattacaccctaccagccttttgtatttt

SEQ ID NO: 17265 - DNA, 358 bp, Glycine max
  unsure (1)..(358): unsure at all n locations
agctaggagagtgttttgtgaattcttggttgggaaaagttaacaaaaccaagtacagtgatgcttacaaaaccactaatggtacattgttgttgttaacaaaattgttagacacaaaggcatccataaactcaccaccttactatataaaacaaggcatccataaactcaccatatttgcaaaaaatatggcagatatgacattgcaataaacttgagagacacaaaggcagatataacattgcaataaacaaggcaaatataacattgtctgatattgtgcagactntaattacaacaactggtaaaaacttaatgagtgcattacaaggcctctgaattaaacatgcagacagaa

SEQ ID NO: 17266 - DNA, 399 bp, Glycine max
ctcagcttgaaaaatccttttacaagcaaagatcttatgggatgtaccctcccttgttctctgtgaaaccctagtggatgtaccctccactaaaactgatccacaagagatgtaccctctcttgttctcagtcaaacccaagtagatgtaccctctacttgtaccacaaaggatgcaccctccaatgtgttaagacaaagatctcaggctgttaaacctttgatactttgtgaatggggatacaaaagaattctcaggcgggtagtcctttgaatacttttgtataaaggaatgggaagaatcaaaagaattctcagactgtgtcgttttgaattctttgacaagggagaagggagacacaaaagaattcaggcggttagtcctttgttcttttggaaa

SEQ ID NO: 17267 - DNA, 361 bp, Glycine max
agcttgtaggattatggggtactcatcacatgtggtactaggtggcggtcgggcgatggtgcacaacaagttttccacatccacaatgcgcgcataaacccaccatcccctgttgcccacctccaactgagctcacgtactcccacgtagcccatatcctcgtttctctcaacaccgggtccccatcaatcctcccaagcttccacaacatccaagcaaaacaacattcaaacagcacaagctatcatagccaagcaaaacagagcaaaggcagaaaattctgctcaacacatcaaccaaaatcacagcttttctcacttaaagaccacagtaacaattccttcgatccaattcgttaacc

SEQ ID NO: 17268 - DNA, 391 bp, Glycine max
tgccacccagctcgcccaggcgagctatgttgttttctccagaagcaactgccttctggaggaatattctggaaggcccaagtggggcctatttgttatttgcacccccatttttactaaatacaccccttgatcttttttggtgattttttttccgtaacgttacgaaactttacgaatttcataacgatgcttgttcgctttccgtaatgttatgaaaccttacggattacgtaatcatcccttttttgccttccggaacgctacaaaactttacggattacgcattaacacttccttttaattttcggcatgtcacagaacttcacggattgtgctacaatgctttcttttgacttccggcatgtcacagaacttcacgaattaccta

SEQ ID NO: 17269 - DNA, 364 bp, Glycine max
agcttgcatcttgcttatggattcccgaaaaggaattcatgtacatctccagaatgttttccaaagttatctatgtgaagaatggaaagagaggcacaacaatgtgagggatgatgtttctcctaaatttttagatcttccattcgtgccacttgagctgcctcagcaacaaaatgcatacgattgtggcatctttttgctccactatgtggaacattttctggaacaagctccaatcaactttaaccgttcaaccaagttcagtgttcctccaccagatgcttctctgaaacgatctcatatacagaaactattaataggtatgaatctgtttacttaccaattaattagttgtgttcatttc

SEQ ID NO: 17270 - DNA, 427 bp, Glycine max
  unsure (1)..(427): unsure at all n locations
ctttcaaccactgtgtcttgtcttcgangtaagctcctttatattgtccttcttggaccctttgtgaaagagccacgtcacagggtggtttngctggctttgtcannaaccctcatacatatcttgaagaaatcaaagaaacttgcgtgcgaaatctcaatggagaagcctannacccttctgtcccttcaaaccctgagaagtatgaaatcttgctgtgcctgtctttcttagttgctttcttcattggtttcttggtgatgccataaagggcaccacctagatcctgattcagtattgcacaatctgcaactgcccaattggctagtgtttctgggattggagcatggtaatgagagggtatgtaggtaagagcaagtggatcatgaagaaaggtgttgttgctggaagaagaattttcaggatg

SEQ ID NO: 17271 - DNA, 346 bp, Glycine max
agcttcttttggaccttgaacaagcaatcaactcctctttcagaaccatgctatgtgctcgcgattggtccctttcttcccttcgcaacttgagttcattattgctaccccatagagctccgcgaaatttgttccggccatactcttccttgcgagccctcttggtctcttgttcaagggctcttgcggtaattgcattctcttcccgtaacccggcacactccttccgaacgtgtgtagcagccaacttgaacttctccttggcgagttttgcctttcctaactcgcttttgagagcttggacttcttcgtcctcttccggtgcttcaaaattctcttcgctgac

SEQ ID NO: 17272 - DNA, 401 bp, Glycine max
  unsure (1)..(401): unsure at all n locations
ttgagccaaaatcctgactcaccataaatcttgtacccaggtgagaatgtcaatccttaccctcggaagcaaaaaaagaatagaggggaaatttccaatcaaagaaaaagagaaggaaaatttccaatgaaagcaaaaaaagaaaagaaggaaaattccccaatcaaagagtgggagaaagcaaaaagaaaagaaaggaaaattcccaatcaaagaatgggagaaagtaaaaaaaggaagaagaagaaggaaagaaagctcctgatcaaggatcgaaagaaaacagaagaaatgtgcagagaggtctttggaccggacaatatctgaacaatacagaattgccaccaaatgaacgaaaaaagaaggaaagggaaccacgacctanaatagtcttctccctt

SEQ ID NO: 17273 - DNA, 355 bp, Glycine max
agctttgggttcgatggcccctttgacatctattccccacatggaaaaaggacaaggggcagacatgacattcaaaggatgtggcggaacattgacattgtccgtgtatgcttgacatttatggcatttccttacatgggcgcagcaatcgctttccatagtgagccagtaataacctgctctaaggatcttcctggccatagcatgcctattggcatgtgtcccaaatgaacccccgtggatttcctcaatcatgtagtttgcctctttggcatctatgcatcgcaggagggtcatgtcgtggtttcgtttgtacaggatggtaccactcacaaagaaaccagtagccaatctc

SEQ ID NO: 17274 - DNA, 396 bp, Glycine max
  unsure (1)..(396): unsure at all n locations
ctaagctttataagcgcgggttcgggagacaaaggtcattcgttcgcgatatgcgaagatgatattccgagtactttggatttggtatgaccatgccctcctgatttccagctgggaaattggcgagtggaagaacgccccggcatttacgcaacaagcataatgtaaacctttacggttttaaaagctctatagttgggcctaggctttagagtttttccttttgttaaggctttgtgtcttttgtttttgaatttataatacaaggatctttcttcatctgttcctggtctctacccattctcattcatttgcatgtttacttctttttctgaaacggcagatccgatgacgagtcccccgaaggtactaatacctgngacccgtctatcgact

SEQ ID NO: 17275 - DNA, 179 bp, Glycine max
agcttttaaattattaatctcgttattatataccttgaagaacactaaagggagcttctttttttaacaaagtcagtagttacagtaagaaacaatatcattttctttcatttttgttatacaggaagaagaaaactctcataggagacaagatttcataaatacacagaattcacaac

SEQ ID NO: 17276 - DNA, 397 bp, Glycine max
ttgagccaaaatcctgactcaccataaacctttactattgtgagaatgtcaatccttaccctcggaagcaaaaaagaaaagaaggaaaatttccaatcaaagagaaagcaaaaagaaaagaaggaaaatttccaatcaaagagaaagcaaaaagaaaagaaagaaaattcccgatcaaagaatgggagaaagtaaaaaaaggaagaagaagaaggaaagaaagctcctgatcaaggatcgaaagaaaacagaagaaatgtgcagaaaggtctttggaccggacaatatctgaacaatacagaattgtcaccaaatgaacgaaaaaaaggaaaggaaaccatgacctaaagtggttttctccctttaattgccaaccaagatattgtgtgctagcgac

SEQ ID NO: 17277 - DNA, 352 bp, Glycine max
agcttttatctaccaccaccattttcaccttcatcttagctttctattatgtttaacattattagtactttgatttttagccgtgtatttggctatattattatgacatttgaacaatttattatttcttttattgtcaaagaattcaaaatgacacagtctgagaatgcttttgattcttccctttcctataaacaaaagatttcaaatgactaactgcctaagaattcttttgtttcccccttcacaaagtttcgaaggactaaccgcctgagaactttgtcttaacacattggagggtacatcctttgtggtaaaagtagagggtacatctacttgggttgtgtgactg

SEQ ID NO: 17278 - DNA, 404 bp, Glycine max
cttgtatagttccccaatttatggttattttggtttatattttgtaaataaatcttgttttatggttaacgatgtctttagaaaatttccattggatttaatgaagaaatctgtgcattttcaggtgaaaaagaggctaagttttgaattgcaaaatgtagcaattgcgctaagctcagcagttgggctaagcgcagcttcagcgcgcttagtgcaaaggagaatctggcagagcatcagaattaaagttgtgcgctaagcacgagatctgtgcgctgagcgcagcaagtgccttcaaccaggctaagctcgagactagcgctaagcccaatttcacttactcacgctaagcacgagggtggtgctaagcgcaacattgcgattttagagcctatttaattcct

SEQ ID NO: 17279 - DNA, 359 bp, Glycine max
agcttgtaggattatggggtacttgtcatatgtggttctaggtggcgatcgggagatggtgcaaatcaactctcccacatccacaaatcacacatgaacccaccatccccagttgcccaccttcaactgagctcgcgtacccccacgtagcccttatcctcgttcctctcagcaccaggtccccatcaacccctccaagctttcacaatatccaaacatcatgaactaccctaaaccaagaaaacagggcagaggcaaaaaaactctatccaaaacacattccaataccacagctttccctgctcaaataccccagtaacattctctttgttcttattcgctaaccgttggatcgactc

SEQ ID NO: 17280 - DNA, 403 bp, Glycine max
gctttagtcaaacagaataatccgaaaatgtcaattatttgtttgttgaaaaagcataacaagactttctgtgattggtttaaagatacaatctttgcagatgagaatgcttcagaaacattaagaaagctagcagatgggcctaagagaaatgctataacttggcaaggatatgacataaacaggtattcattttacacaaaagcacaagatgacaaaagtacaatgcagaacagcggggtcaccctaagggctgaatctcaacactttgcaagtgtcaatgacgccaatccctgtgtagcttccatcccttactttaggttcattgatgaaatttgggaggttaactatgtgaaatttacgatatgtgttttcaaatgtaaatgggttgacagcaacactg

SEQ ID NO: 17281 - DNA, 337 bp, Glycine max
agcttaaacaacaggagctacatcaaaaattccaagaagaccttgaatgaagttacaaaagagctttgccctgtgggttttccttccttctttctttcttttaactaagatcatatttttctttgatttgctttcttattatgatgttatcatgctgcaggttctcagttacacaagatcagtacaacgtactgggatgaacaacacattatcccacaatacaaatgatatatcctttattcaacttccattcattcattcatatatttatttattccatgttgaccaattgcaagcttcaccatgttcagttgttcacatagataggttcatttgt

SEQ ID NO: 17282 - DNA, 397 bp, Glycine max
cttgaacaatatcttgcccttcattaactgttttgtgcttggcggccatgctcaacaaagtactttcgacacctactgtacgttgatttgaccaatgctgatatgggaatgttgcgacaatccttcaaaaccttattgatacattctgagaggttggttgtcatgtggccataacgacatccttctctatcataagccatcgtccatttttcctttgaaatgcgatcaatccatgttgctatggctgactcagttcatgaaatttttctaaattttgatcaaaaatgttcttgcaaggagtgtaggctgcataaaattagttatgaataacaattttaagtatatataaaagttaaataaatgtgatcatcaaatataaaatcttacccaatttctt

SEQ ID NO: 17283 - DNA, 356 bp, Glycine max
agctttaccacagttttctatgttgaagtgctccaacaatgaatatatgagtaaatatataatttggtttctatgttattttccaatctaaattgaagttttaccacaataatctatgatgatccaatgcaaagctttagaatacatattatcaagaaaaaaaactcaaagtctgattaaagagcagtactaaactaagcacatattaggataactgttgcacctcttccaaaagtatgtttagactgacagatataggacatgttttaaaaaccattccattctggaagtacttttaggtgttgaatgtacttttggataaggatattctttatattgtttattttgaatgtact

SEQ ID NO: 17284 - DNA, 401 bp, Glycine max
tagcattctgatcaatcaaatcaatatctcattttacccaaaacaaagacgagcctcaatttttcaaccccatacaacagtgtaaccacttgttcgttctagtggtatgcaccctatcatcctccgatcaaaattgcattgttaagtgaatgcaacctaggtaagagcaatcataagcaaccaggcactaattcaaggcaccctcattaacacaaatgtcgttcataaacattttaaaacaacaacgaaatttaagtctcatggtgagcataccaacaaaacaaccctcccacttctccttttacgttgcagacgcggaatgtagagtagacagcagaaaacctaactgtaccaacttcaagtaagctgaaccctgtttggataaatttctcacttactta

SEQ ID NO: 17285 - DNA, 354 bp, Glycine max
agctttagaaaaagcttactttccccctaagacctcttggaataacaaatctcattcatgacaccagtagctagccaagggccattcaaatttttccctagggtagtcaaataatcctagaaagaagaaccaaggtttgggttatgcaacacgtacactactgaacaatactaactcacattgcacttctttattgcaaaagctatacattggggagttgagtcaaccaaagaaaacgagagatcataccttgaagtcaagatccccataccctcccttgtgacctcgagcttcatacagaaattactcattaaaatagttttcaatcttaataagatgttttttcatctactg

SEQ ID NO: 17286 - DNA, 396 bp, Glycine max
ttgcgaaaagcttgccactagagctgactcatttactgccctaactcctttagactagtggtcccaggctcttgaccttgacttgatagaacctccttttaagtgaaggcatttgacttgatcccatgttttactaaagtgaacaaaaatctgtgcgaattaaaactccgacatctatcatgggtggaatggatgaatgcatgaagaaatgcatatagcacagatgcaatttatgaatacaggaaaccgagaaattttctccttagatacaacgtcttggggtagcaaagtgcctgacgtatgaatttaataaggtggcacggaccctcaaagagaggggatcaaaacagaatccgtgcgtgatgcatatgcgaaaggcgcaacacgggaatgtac

SEQ ID NO: 17287 - DNA, 360 bp, Glycine max
  unsure (1)..(360): unsure at all n locations
agctttgcctttaaatagagtttcaatctgcaaattgtcaggtaaaatagtttattgcaagattataacaccaccacaatatggctagcacttgttttatgtacaaaaaaaccacacaaacctactctgtatcatgaatgtcaaacatatcacatctagtgtggtgactaatctaaacctctacaagtcagaggttgaaagtaaaaactgtggcagatgagactaacaagagaattatgatgctttaattttcataaattagcctctagatatgtgtgggagcacctattagagactntnaatatttactagttggttttctctcacgaatgttataaatagtgaaagtatcaatattat

SEQ ID NO: 17288 - DNA, 392 bp, Glycine max
tattacatctttgggttcttccaagcattaattgtgacggaaaaaaagggacaacactacgcgtttctttggtctttctatttgatctctttaaggtaaatgtttatgacccgttatgctagatgagtatgttatagcactggttagtcatgggctgtgagaaaaagagttaaaaaaaactaagtattagagattattgtgattttctcaaaatcataggtttgctaaaattggggattttgtctaatcccttgttctattatttaaatgcttaggttctgtagaaaatactgtggttgaccttcctaacagcgatagaagtcagtgattgtgttatttaggtgagtagctaatatacttagcgattttattaaagatcaattataaagaag

SEQ ID NO: 17289 - DNA, 360 bp, Glycine max
agcttataaaatactccatagttaaaagacaaaatttctaattatgtagttaaaaaataggaatattaaagccatttatttgatagttgaaagtatgctatcgtcgatttcattgaataccgttcatagacggactcatctcattatataaaggacgaagtgttcttttagttagcaagatatatgagatcaatctgaagcaaatggttataatttcaaattaaatgtgttgtgcacgttaaagtgaatcgttcaagattaatccttaacaacctgaccaccgggttcatcctccttctttttgttgtatttaaatattatcataattttcgattctattcaatgatatttgatattttt

SEQ ID NO: 17290 - DNA, 397 bp, Glycine max
tttaattttgattaaaaagtaatactaaatatttcttttatataacatttaagttttgtattaaaactaatggtagttaattatcttaatatattgagttatattagttttatatatttcatattaatatttaataaaaattattgtctaaaaaattgattcctatttttttatttataagattcaagtttaaaataatgtttgtttttttttttataagattcaatttatgatattatttgttttaattatttttagacttgaaatactctcactaaagaaaaaaagaaaatgtattgatgaactattagaagagaaacaaatattaatgataaggataattttagaaaaaattataaatttaagaaaaaaattttatttttaattaaattaatta

SEQ ID NO: 17291 - DNA, 332 bp, Glycine max
agctttatcttttgaaaatgtttctacttgagatgaggtgagtctaagatgcattcagttcatctagcatgttagtcatatggtactgtttttctgtaaaaagcaaagtactaaatgctactgtcttcagtcttgtttaggttatcatcataatgaatgttgttcaaaaaattacagattaaggaagcaattttcagaactctaattaggaatggcatgtttgacaattcacacatccggctttctctaacacgagggaaaaaaggttttctctctcttatttatcatttcagctaagtaatttcttcaaagctaataattcatcaaattct

SEQ ID NO: 17292 - DNA, 392 bp, Glycine max
tgcaactctttcggcatggcatcataaatctgtcaccacctcctgtgagccgagtcactcgcgaaaacatggcgatcctgcatgtcccagttacaatcataatccctataacacatccacggcttcagacccaggtagtgtacggcgtacacgtcatcagggagctcgtgcatcccatggccactactaggaaaagtcttgagctgattcaccttggccggcaaacggtgccaccacgtgaagatttcgttgagaaagccttggtcgccgccgttgtaagaacgcaccttggaagtcacgttcatcattttccggaacatgcattgcgacggctcgattaccatcaagcccgagttgaacagcgttttctcgttaggtgcggctgataactg

SEQ ID NO: 17293 - DNA, 355 bp, Glycine max
agctttttctccctttcctttgttcttctcctctccttgcgttcttcttcttcacgtttttccttttcttcttcttcaagaagcttcatctgtagacaaaatcatgcaattgggatttagaagtgcattttaaaaatagaaacaagagctttttttcctgtccccaacagcttttttcctaaaagcaaaaaactaagacctgcttttccaacgtaatgatttctttgcatgctacatgcactcgatcctccagcagttttagtgcaagacaaacgaatatgctatgtgcattttggcgtgctgtcccttctctgaaagccttttcaacctgaaaggatagtacacagtcagtggt

SEQ ID NO: 17294 - DNA, 390 bp, Glycine max
tgtttactgcgaattaggatcatggcattgttttttattagaaccgtttgttctgctatgaagactcctcagttctgaaattatccttttaagccacattgaagttattgtgaaagaaattagggccattggtattaatagaaagtcagtaatatcctgatgttgctcaaattttcatggcacttgctatcattgtgaatagtggcacaagtaacattattaccaaatacatgcaatccacaaggtaaagcatgctcttgtttgatctttgaatcacttatgagattgataaatagctacttactattttttctatagcttgcttaaaccaaatatttcttacaaaacaaatcttttgatcgtagtatcttataccatcaattctacatg

SEQ ID NO: 17295 - DNA, 363 bp, Glycine max
agcttttgaagatacttctcggtctctttaagtagttgctttacacgatctgattttgcatcctaatgtaccattgaaaattgcattaagcatgcaatacatcatatccctgtatctatttatatcaaataagaaaataaacctacctgcaccattcgaagatagccctccacatcatttattttcagtaaattaatcttttcccgctggattctatcaatcttctcacgatgaatacgttcttttctcttatggaactccttcacatatctattgaaacccttccaccgttccctcttgattttgaatacatcatcaagtttttccctagatttcaaggaatagtgcacatgtttgaggaaa

SEQ ID NO: 17296 - DNA, 392 bp, Glycine max
tgtcccccatcaaagataagacaaagtataattacatgttcaatcccttctgctcggctgctagctatcatgtccacagaaatccatatactagtatgtcaatagagattgtaaagtaatcatcacaatatcacatgctatttgctacggcctacgggaaagctcgggcgagcaaacttgcttggtgagtaatgctgactcgcataagtagtccattacttcacttgacaaggagtttcggatcaatgtcttttgttttgcgtgataacacgaatgcagatcaacttgcacactacttcaaaacgtgaatgataataacccaataaatcagtggatgaacttactttaacttcctgagccatgagggcttatatatacagtaatacagggta

SEQ ID NO: 17297 - DNA, 364 bp, Glycine max
agcttctagcagaaggctatcattataagttatttcaattatttagtaagcttaacaatcaagcttatgaataagctcttactttttttatcaacaaaaatatagtagtattatatataatatgaagatcagtacaagtggtattgttatatatacaacccagcacaatactttgcaaagctatggtgacctaatactagcaatacatcaagaattaggtgaccataggtttgatcgcaagctaggcacccaaacacagaaaggctatatgctaatccccccctaaacacaaaacctttccctaatattgctagaccagaagtggaatggagtatgaaatcctttttccaaattcttaaaccat

SEQ ID NO: 17298 - DNA, 391 bp, Glycine max
tgcattaaatattttttttaattcggattattattataaaatttaatgcatatttaattcacgttataaaacaaataatatttatttaatatatattaaattttgtaatacaaataaaatgttgtcataaaaaatattttttattttaaaaaaaatatacagattacataagtaaatatttattattcaaatttacatgcgcattaaatatgcattacaaatgttagtgataattatgtatagtaataatttatgtatactaatattatttattttataatgtaattgattcattagcttagttggttagagcattgtcataataatcctagaatcttgggttcgagtcttggcccattaatttttttcaaaatattttacaataaaaacc

SEQ ID NO: 17299 - DNA, 367 bp, Glycine max
  unsure (1)..(367): unsure at all n locations
agcttgttgaaccttagagttgtgccaaaggacatttttcatcatcaatttatacaacaagctttggaattgttgtaagagggtttgtgacgctctttacccctcacacatatgtactaataataaaagaaataagaaatcataattaatttaaagttcttaaagcacatttaaataaaatcctttcaaaatggtaaaagactcacattcacttcattattaccagataaacttgtcagaaacattttttgttcaaaacatcatgtaattaagcaaaactcatgccttaatgtcacatcttatcagagcattgtatcccgacgtttttcagcacaaggttccttanagcaattcacctagtcatctg

SEQ ID NO: 17300 - DNA, 398 bp, Glycine max
tgtgttgacaaggcccagttgatagaatttttttctccctgaagttggcatattactggtatggaacctgacacctgagtgttcatgttttcattgttgaactgctgtatgtttctgtgttttgtgtttacagcaccataacttaacaaatcaccaatctgcaattacctggttgtgataatgacagggttgttgtttgaagctcaatctttgcataaggaggcctttgtttccttctcagtctcgttgtcaatagaaccggattacattcccagtattatttcaacagcaaaattgttacttaaacttggaatgcaatcacttccaatagcaagaagctttttaatgaatgctttgagattagaccccacaaaccatgatgcatggtttaaccttgg

SEQ ID NO: 17301 - DNA, 365 bp, Glycine max
agctttacagcagattttagtattgacccactaacctagaattaaaataacttaatgccattaacctagggaattaaaacaaactaaatggctgagtgtaactgaaattgttggcaaccaaaagtcacccccaacagccaacaagtcagccaccatttggtctcccaaaaggctgatgcctaggttgccaattgggcccttattacaacttgaactaaagcccttttagttgattaacccaaaacatatttttggtcagccaactttacaaggattgggccattatttagacaaactaaacactctaaaattgaaataaagtggtgtcatttagtcctccatttgggccatgatacaaatcacaa

SEQ ID NO: 17302 - DNA, 398 bp, Glycine max
tgtccacaaaaatcagtccggtccagtttactacttatgcgggctattgttttctgtgcaatccctgaataattttttgatgatgacgactaggaactgttcggttggcttcatccggtgatgctttttggtatacctcgactggtaatctttcttggccgatgtcgcatcggattattttcgatcaatgtttgtaatggagtcttttctctgttgaggtcggttacatttttgtttgcctattcaattaccgcagtccaatgtcacccgaaaagaaagtcagttgagtgtgcacgaaataccataggcgaccttgacggaaaactttttgagcgacaatgaataagaaaacatcctcgatggtacgaaaaatattattggccggcgctgatggaaaa

SEQ ID NO: 17303 - DNA, 357 bp, Glycine max
agcttggcttagcgtgtgaagactaagcgcttagcggatagacaattgcaaaaaaatttctaagtctttttctgtctatctctcctctctccacacaagcttaaaaccccttgttcattactaagcaagctgaaattaatcacaatcacaagtaagatatcctaactacatgcaagagataagaatgaaaaatagaaaagggaaagaaaagctgggttgcctcccagtaagcgctattttaacgtcactagcttgacacatcatcctgttatctaggattcaagcgtagaacaatgttcaatctttccatagctccaccatgatattgcttcaacctttgtcctttcactacccatg

SEQ ID NO: 17304 - DNA, 404 bp, Glycine max
  unsure (1)..(404): unsure at all n locations
ntgcgaaaagcttgccactggagctgacccatcatttgccctagctcttttaggctggtgattcctaggctcttgaccttgacttgatggaacctctttttaagtgaaggcttttgacttgatcccatgttttactaaagtgaaacaaaacccagcccgaatcaaaactccgacatctatcatgggtggaatgaatgagtgcatgaagaaatgcatatgatatagatgcaatttatgaacacgggagcccgggaaattgtctccttcttagatacaacgtcttggggtaacacagtgcccaacgtatgtatttaagaaggtgacacagaccttccgttggtttgccaaagagaggggattaagacgggacccacgcatgatgcatatgcgaaaggtacaacacg

SEQ ID NO: 17305 - DNA, 336 bp, Glycine max
gttagttactttaatgataattagcaaccactcaaactaaagttgtttaactattttgggatttttttttaaggatactattatgagatttcatcttatggaaaccataaatgctatgaattttatcgaactatttactactgtctaagaaaacgaagtccttattacgagttagatttttatgtatttcatatttcgctgattcttctttcattgaaaaccatgactttttataacatattgttaattgttatcttttatcttgaatattatatatatatatatatatatatatatatatatatatatatatatatatatatatatatatatata

SEQ ID NO: 17306 - DNA, 398 bp, Glycine max
tcagttatgaacagtacccccaaaagagaaggctatttatatttcattttaaaatttcaatttgtttcatgaacacatagacttcaagaatttcctgtaccaaaaaaaatacttcaatagtttcagtattaattgtatattctcatccgattatatatctgtacacttaatttctgtattgattttttgtctttattagtttccataccttcgcatagcgaagagcctccggacaatggggtacgaagttttttttattagtttcaacggtatgaattctatatactattatttgtgtaatagctcgctaagaatggaggagcatttgggaaatcaacttcaagaaaaggaaaccgccaaaaactctctcctgtttggtcttcaaattggctcatgtg

SEQ ID NO: 17307 - DNA, 349 bp, Glycine max
  unsure (1)..(349): unsure at all n locations
agcttgtgcctctttacgtctgttatattaatgnancatccaaagacccttatgtgctttgctgatggcttcttcccgttccaagcttcaattggagtcttgtcttttacagacttaattggacatctgttgattatgtaaacagcagcgtagactgcttcagcccataatgtgttaggtagacccttctccttgagcattgatctaaccatttccataactgtgcgattctttctctcgaacactccattttgttgaggagaatatgcgactgtaagttgtcactcaatgcctttatcctcacaaaaactttcaaactcgcgagaagtgtactctttgccgcgatcac

SEQ ID NO: 17308 - DNA, 396 bp, Glycine max
tgtggtgtaataatacataagcttttcatccatcattttattacgtaacaaggaatttttttataattaaagtaaaacatataatgctaaattattttttagttaagatatccaaatatacaaaaaatatattagttattcaaaagtaagtatgatatgattgtcatattttgtctttttattagtttatttttctcatctaaacacaacattagttttttttttttaaaagcccgttagttctatttaggatgcaaataacaagatcagacaaataaagtaagttgaaggaagatatagagaggatgggattggaatagtagagaaattttgaaaggttgcaagattaatattatatatttaaaatagatggacagatatcactttttaattcag

SEQ ID NO: 17309 - DNA, 360 bp, Glycine max
agcttttagggtaatttattttctaagtaacaagtcagaatttttactaatagcagtaaaaccgtattcttaaatcccccaaacgctgataattcaaatggtaagcttagtccaaccgaaaagaaaaatcgtacggtatcgttggtttatatggattatggagtaccaaaaaaaattgaaaaatcaaatccaccgttttagagattaaaagttaccacagatagaaatcacaggaatgcagagaaatagagactcagtgacctgacatcggggttgatgcagatattgcgaaccaactgcaaaccacatattccaagagctgcaaacagtgggtatacctacaaatacaatgcatccatg

SEQ ID NO: 17310 - DNA, 394 bp, Glycine max
ttgaggtagtttggttcctttaaatatttgcatctatgattgtttgctattgtttatatcttgaattgtaggtattgatttaaacatctttaatttctgtgcagtatggttgttactgaacttcctccaaatgatgctaagagagctcttgaggcattatgcataccagtcataactcctttacaggttagtgtccaatctgcagagatatttttagttatacattttcttttgatgtttttgctttctataatttgcttcatcaggaagctatcaatcaaggtccagaaagcttgagtaaaagaccttctcgtcagttaacagttcatattgatcgatttgcctacatctttaggtgtgttccataattaatattgtcatgtctatgcaccct

SEQ ID NO: 17311 - DNA, 360 bp, Glycine max
agcttgaagaatgtatatacaattggcagtggggatgattctgcaccaaagttacctgatcgagagccccaaaaggcacctaatgggcatgctgttatgcatgttaaggatatactgcctcgaggccttatcaactctgggaatctatgttttcttaatgcaaccatgcaggctctcttgtcatgctcacccttcgttcatcttttacagcaattaagaacttgcaaccttcctaaggttagtttttctgctgctgcatttcaactattaactaatactgccatctactggttttagcttaacttatatatggcttaataacattaaaggaataaagacctaatagctgtattatgcatt

SEQ ID NO: 17312 - DNA, 394 bp, Glycine max
tagcattagcatgtgttgacactggatcactttttttgggtacgtgtttgttactttagtggatcctatcaaagaacctccgcttataactacaaacatagttctgtctgtttttgttgtgtattgtcatgtggacaaagttccatgccatgtttgagacatctaagattggcgtcttgcctttgcccagtattattttttgcaacatcttcctttcttaaccttgtcattacctcgaaattttaatatggcaacttactcttgtggaaaataatttttaagaattaatataacactttaaaattaaatttagaatattaaaaaaatataaaacatagatataattctttaggtgttattgatacttttctcctgttagaattaaaatcgtact

SEQ ID NO: 17313 - DNA, 349 bp, Glycine max
agcttttaactgaaaataatatttaagttgaataaagagcttaaaagttaaattttaaaaatttcaaagatcaaaatgtaatgaaattatttttaaaggaaaaaaatctatgagtcaatatttggaacaacaaaatcatatctaaactttttttttatcacattcttttgtacattactacttttatttcagttaaatgaaataagtgtattttcataaaaaaaaaaacataataacacattaattttatgcaacacaaacacatattttgtatatttgaaagaacttgtttataaattatttaaattagttgttataatcacttctatatataattggatcatctttt

SEQ ID NO: 17314 - DNA, 395 bp, Glycine max
tgttgattaatatatatgtatatatgataatttaacaaagtttctataacaagacagaaccatcgaccaaactactcaatcttcagcactgaagtcctaaactgtcaattatcagacacagatttaccaattccgttgacatgaatgattacagatatactcttagtactccataaattagcatatagctcctctataacaatatgcagaaaaatatatatagattaattttcaaactggtttcaatcaaaccataatcatccattactaaaagggaaattccctaagtagttatatccttccactaatactagaaaattaatataacatacacaaaaagataaatagaatatgatttcgataaataataaaaacataaatatgacatataaaat

SEQ ID NO: 17315 - DNA, 357 bp, Glycine max
agcttttgtcaaaggaagaagattaagaagttcaagaagatgttcaaagagattcaaaggttgtaaaagaatatatatgaaaaagttgtaataattgttatatttttaaatgcaagtcaaggtcttgcttttatagactcttcatgtctggtcaagaaaatcatttgaagagttataacctttagaaaaacctgaaaaccattggaagagttatatctcttgatttttattcaaaacttgtcactggtaaccgattaccaaaaccatgtaatcgattactcaaagctttttatgaaaggatatggctcttcacaattgagtttgaatttcaacattcagatacactggtaatcgatt

SEQ ID NO: 17316 - DNA, 380 bp, Glycine max
tccttttagtgcgtcacgtttaaaaccgtgcttgatggtagtgcgagcctttgatggtactcggcgggaagtgatgggggaaatcgacattcccattcagataggcccccacacttgcaacgtggtgttttaagtaatggatataaatcccgcctatagctgcctcttgggaagaccttggattcatgcactgggagtggtcccttcaacgcttcaccagaaattgaagttcgcagtaggtggacttttagtgatagtgtcgggtgaagaggatatgttagtgagctgcccttcctccgccccatacgtagaagcggcggaagaatcattggaaacggctttccaatcctttgaggtggtgagttgcgcctctgtggagc

SEQ ID NO: 17317 - DNA, 364 bp, Glycine max
agcttatgattgaccttaaccaacaccagttaatgcaaaataaaaataatttatcacatttttaaagcttacaattgtgcttatactatcggccaactctaagctctcatattggtcttggttcaatctattttatcttgttattatattttctaaatacttctaaaataaaaccagccaatttcaaagctaaagtgaatatcatacataagcaacaagaaagaataattaattagtaccttaacaccatgacgatgagagatcatattgatttgtgtaatatattatattatattccaattttcaaataaaacataatttatttacaaaatatgtcagaccatattgattcatgtaatacatt

SEQ ID NO: 17318 - DNA, 397 bp, Glycine max
tgaacagatgtaaaaaatatcaatgaaaactttcagtcttttagtgagattatacaaacttctaaagtctctctcatcttgaagcttcaacaactttaacacgtacctgctagctgtatttgcctgtagtgtttgaatacaggttttaatacatggtttagacatatacatgtatatataaaaagtagtaacaatgtgctttacctgtacttgatataatgaaacagcttccacaagaacaccaatggacaaaccaacttcaactacaacaaagtaattcaccttcacctggagttcatataatgagtaatggcattagaagaagtcaaagccaaaccaacttcaagtacaacaaactaattcagctttttctcaaccaaactatgtcaaactattt

SEQ ID NO: 17319 - DNA, 354 bp, Glycine max
  unsure (1)..(354): unsure at all n locations
agcttatcctccaagccagaaagttccaaaacctcccaccaggtccaccctctctcgccataatcggcaacctccactgcgccccctccatcgcaccttcaaagccctctccaacaagtacggccacgtcatctccctatggttcagctcccgcctcgtcgtcgtcatctcctcccaaaccctattccaagaatgcttcaccaaaaatgacgtcgtcctcgccaaccgccctcgcttcctctccggaaaacacatcttctacaactacacaaccttagggtcctccccctatggcaagcactagcgcgtgagggggaggaggacngagggtggcgaaggaggagggaaaagggg

SEQ ID NO: 17320 - DNA, 398 bp, Glycine max
tatggtaaaatctgggacctagccatgatagatttttctacataggccattgcctccctcgctcaatattatgatcagccgttgaggtgcttcacctttggggacttccagctatcacccatggtggaagaatttgaagagatcctaggatgccctctaggggggaggaaaccatacctattcacagggttctatccctcattagctagaatttcaaagatagtccaaatctcggcgcaggaattagaccacaggaagcaagtcaaaaatggggtggtcggaataccgagaaaatatttagaggtaaaagcaagaatattggcagataaaggcgagtaggtcccgttcatagatattctcgcactgttgattttcgggggagtcctttttccgaacgt

SEQ ID NO: 17321 - DNA, 364 bp, Glycine max
  unsure (1)..(364): unsure at all n locations
agcttggatgtgcttggttcaatttctanagctagcaacaatgcgggatttcgagagcgtaagatagagaaaatggaacaggatgcaggcatgaaccaagctctagatttgttactgccttactggtacagtggtactgctctcttcacaaaaaattcacccactgtgttcaacaacgatggaaccagcaaggcataaccaagctctgtagcctgtactccctttggctcttgttgtttttgttgtatttaggtgaaggaagggataaataatacatttacaatataataaagaaagaaaagttcacgttccatcggatacactccgattctggtacgcagtaagaaaaaaaatacttaaaatg

SEQ ID NO: 17322 - DNA, 399 bp, Glycine max
tccaaccacagaaatttcacccaaattagagttacttttattctaaaaagaactacagagattatatactaatactaaacccacaaatcaaactaatgttttgcaggattacaacgcaaaaatttcagattttggcttggcgaaattagggccttcgggtggagattcacacgtgagtacgaggatcatgggaacatatggctatgctgctccagaatacgttgcaacaggtgatcatctcatcttatctaaacacataaatagagagatggtttgtgaatatgctagttgaagttgaaactaattgttttatgattcaacaggacacctttacgtgaagagtgatgtttatggttttggtgtggtgctgcttgaaatgctgacagggatgagggcaat

SEQ ID NO: 17323 - DNA, 367 bp, Glycine max
agcttggttcgaggtacttacccgttgaagatcgaagaacgatgaagaacgaatgaagaacgtcgaagaacggttgaaacctttgcgagattcctcacggaaaacgttacggaaacgtttcggaagcgcctcggcttagattttcttcacggaaacaatttttccaagcaaattcgaaagagagagaagtgcctaaggggctgggatccttttcttcttcacttcctcccctatttatagcaaaataggggaggtggttgccgcccagctcgcccaggcgagcagggttgcttcctccagaagcaaccgccttctggaggaatcttctggagggcccaagtgggcctgggtgctatttgcaccccca

SEQ ID NO: 17324 - DNA, 399 bp, Glycine max
ctaactgtaattataactagtattttaggtttatcttatgttttaaaaattggactgacaattgaatcgggagaaaatatttgatcaaggtttattgattcaaccgcagttaaattgtgattgaactagtaattgaatctgtacttttaatttatttaataatttaagtaataaagtataaatttatgagaaattgggatataaaaattataaattaatataaatgtttatgtattttataagataaatattaataattgacaatgatttatatttatgagaaattcttaaacgtttatattatctttaaaacttttagattaagttaaaaatgaaaggaaatgtttttttttataaaaaaatacacgtatttcaatttctttttttgcatcggttttg

SEQ ID NO: 17325 - DNA, 373 bp, Glycine max
  unsure (1)..(373): unsure at all n locations
agcttgcatcatgttgctggactatcatgcatgtcaagtttatgtaacccttttgtttttgctttggctttgctggtttgcagtaagaaggcgaccaaatgagtctggtgtctgctcaagctactcaagaacaagaggtaggcaatagcaaggcaactgagaaagaacttgcttgagctaatacaaagtggccatgaagaaactgcatttaaccaggtttgttagttaatgctacatactcatttgttaaccactgcttgcataagtatattccttcatttgtcttcatttttttttgtttcttctcaatcttttttcccctgggagaaaattaaggattgtgttgtttataacataaccnactgatctcttg

SEQ ID NO: 17326 - DNA, 404 bp, Glycine max
tctatataagctaaaccattttatcaataaattctttttgagttttattcagaaaattagagtttatctcttttatcttagtgagagtgattctcctagattcttgagtgattcaagaacaccctggctatatcaaaggactttcacaacctttgtgtgttgccctcgccggaaagagtgattctttccttcctttcatcttcaaccttgttctttcaaaccacaattccagaaaattcacttctgcccagaattatctcgtggccataactcccattttacgcactcaaattaagtgattctttagcctaaattgaatttcaaaacaagacctttcacctcattttggaatcacctcatttggagccctgtagcttgagttattgccatttctatatttctgt

SEQ ID NO: 17327 - DNA, 358 bp, Glycine max
agcttggagaggatgcttcaatggaggaaaagaaagagggagagaaagagggaggggggagcacgaaattgaaggaagaaaaagggagagaagttgaactttgagttgtgtctcacaagactctcattcatcaaagttacaacaagtgttacacatgcttctatttatagactaggtagcttccttgagaagctttcttgagaaaacttccttgagaagcttctttgagaaaacttccttgagaagctagagcttagctacacacacccctctcataactaagctcacctccttgagaggcttccttaagaagattcctaaagaagctagagcttagctacacacacatctctaatag

SEQ ID NO: 17328 - DNA, 398 bp, Glycine max
ttagctttaaacatatccttacactcactttttacactagttcaccttcactcttattcgagcttatactcgactttacttttactacactagctctttttcttgggtaactcactccactttccttactcgaacttatctcttaaatactacccttgctttagtctatgattgaaaacaatacaaacattctaacctatggtcacatagtgtcattctagatagaccttcatgcctttaaaaagtcacttctcatccattccaagtcatcacaatagtttcccatcccaatatatatcataactaaggagggaaccatccacccattacacaagtacaacctaaggcattcatggcatccacatcatccatcacacaagtcagactaactcacaata

SEQ ID NO: 17329 - DNA, 357 bp, Glycine max
agcttgaaatcacatttattagggagtttggcatttttcttgaataagcctctgcatgcacgagagtttggccttagcttgaagcttttgcttgtttaggaagttctagagagagaaaggtccaggttccaaagagttctgagagattttgttgtgttaagatctgcagagatgagagctcgaagcggaagccattctgagaacttgagatgagtttgtgagtgattgtgagatcctagaggtgaaggagacatcctcaccacttgtatttttgcaatctttcatcttgttcttctctgtattgtaaaggaggtttccggaccatggaaagctaaatcctctggtggatcttccctg

SEQ ID NO: 17330 - DNA, 393 bp, Glycine max
tgctctaaatttacattgatgtttgtattgattggttgaggttacatgccatttttgctttaagagtaacgtcccactggtaaaactaactttccaaatgtttgccttcgcaggaatggccccgaggaagcttgcctcaaagaggtccaggaaggacaaggcggccgaaggaactagttccgccccggagtacgacagtcaccgctttaggagcgttgtacaccagcagcgcttcgaagccatcaagggatggtcgtttctccgggagcgacgcgtccagctcagggacgacgagtatactgattttcaggaggaaatagggcgccggcggtgggcaccactggttactcctatggccaagtttgatccagaaatagtccttgaattttatgc

SEQ ID NO: 17331 - DNA, 359 bp, Glycine max
  unsure (1)..(359): unsure at all n locations
agctttgagccaaaatcctgactcaccataaaccttgacccagggtgagaatgtcaattcttaccctcggaagcaaaaaaaaaggggagagggaaaatttccaatcaaagaggaagcaaaaaaggagagaaggaaaatttccaatcaaaggaaaaaaagagaggaaagggaattcccaatcaaagagtgggagaaagcaaaaagaaaagaaagaaaattcccaatcaaagaatgggagaaagaaaaaagagaagaagaaagggaagaaagttcccgatcaaaaaaaaataatatgcagaaaggtctttggaccggacaatatctgaacaatacagaatngtcaccaaatgaataaaaag

SEQ ID NO: 17332 - DNA, 384 bp, Glycine max
tgtcgaaattgccatgtttgggtgagtttatttacccattctgttttagggtttttgtgatgatgtttgtgatgtttatatgctgaaattgctgatggaaatctgttagagacgaagggtagaactaacccaaggttagaaagtgagaatgtgatgttatgagtgaaaaaaaaagagtgagactttgagagttggaaggctaagtctgaattctgtggtaaatggaggttagagtgagttaatactagcttgaaatgtcatttagaacatgtgagaaaggttaggctgagctagagagaaaaacaaatgaccaaagtgaacaaagagccattgctagggcaaatttgggtgttgaagagtcaaattttgatttggtggaatttt

SEQ ID NO: 17333 - DNA, 356 bp, Glycine max
agcttccatcacaaacactttatggttagaaggttggtagaaataatatcccattgtttcttcaggataaccaatgaatctacacttatcagaccttgcctcaagtttatctgtttgcaatcttttaacataatcagggcaaccccataccttgatgtgtttaagacttggtttctttcctttccatatctcatatggagttgtagagactgcctttgtaggaactttatttagcaagttggttgttgcttctaaagcatatccccataagtttaatggaagatcggtgaaccccatcatggatcttaccatatctagtaaggttcgatttcttctttcagatacaccattgtgtt

SEQ ID NO: 17334 - DNA, 401 bp, Glycine max
  unsure (1)..(401): unsure at all n locations
ctcagcttanggcttanggttaagggttagggtttatgtttatgtttagggtttatggnttacttttaaagtttaaggtttaagggtaggggttaaggtttaaggtttatggtttttaaatgacgaattcattgaaccccacaaattcaatacattgaagagaacttaaacaaatacaagtcactcgactaacgtacataaatcaattgttttaacaactcccacgctcagattgcattggacagcgacgtctgttatgcccttcggctccacatctactacatttttgtcggtgctcagatgattcgacccaatccatctcattccttatccttgttgattgtggctgacctttcgcacgaattgtagttgggtcagggataagtgtccatgcatcatta

SEQ ID NO: 17335 - DNA, 367 bp, Glycine max
agctttgacgacatcacattcaacgacgttcgaaaaacgtcgttgtatcccctatttgaccgtcgtagaattgcttttttccagtagtgataatttgaattagtctatttttcttatagtaaaagcaaggtaaatgagtataccaaaaaaaaaagataagaaacatgataatagcacaaaacaattttttaatttggaaaaaaatagaaaatatattggaatatggacaaaatttaaatacaataaaagtattattttgtgatcagaattagagttttacttcactaatctaatcggtgtgttgacatttattacgaacctatattacccaaattatccaggtaaaactgtaatttagattaaaaaa

SEQ ID NO: 17336 - DNA, 402 bp, Glycine max
tgaatgaccaacgcagagtcacactcaatccttatgttcaaccaccctttgtctttggccacttccaaagcaagaataacaacaaaaatctcagcaaaaagagagtcttaaatacgtatgcaagcggagaaacaaccaagcatacctccctgatgctcaccaaattaaaaataccactgaaaccagcatgaccaggagaaccatgagcagatccatctgtattacacttaatggtgccagccgaggagccctccaaagcacttccttgatatacttagccttacgaggatgaatatcaatagaaaaagctttaataatagaaaattcatgcatagaaaaatcatcaaatttcataataattatatatgatatatatatatatatatatatatatatatatat

SEQ ID NO: 17337 - DNA, 352 bp, Glycine max
  unsure (1)..(352): unsure at all n locations
agctttgggtcgcggaagaagaataagaaatcgaaggagganganaaagctttggctcgcggaagaaattttgaaacagaaaggctttttcatttaaaaattttaatttattaattttattataagggccaattgtgtaacttcacataattgttgggtgcacctagcaacagccattactaaatgagcatataacattggtttttttaattttgaaaccgatgttagttcttttttaaacacttcaatagtcatagcccatcttagagaggcccaaagtggtgagtgtaggaaaaggagaataataataacaagatttatgtgcagcttcatgctgcttccgatgctccta

SEQ ID NO: 17338 - DNA, 395 bp, Glycine max
tctggtaagggctgcaaagggtccatatgttttatgtcaaaaactttcaaaagatataattaaaatagtgagaggcaataaaaaatgctaaatgatctgataagcacatgcataagactaataagtttgctgaagttcaaggctgaaaaacatggaccacaataagtgaataaaccaattggaaacataagaggagagcacctgctattgggatcataatagaatccactgatagagccatcgctgcaagagaaacaaatgtagtaaaatccggctatggttaatccacagtcggttccaacattcacaaagtactgctccttccacctctgcaacaaagaaataagtgcgatttgtaaaggttctcatttcagataaatactttttttttcaac

SEQ ID NO: 17339 - DNA, 358 bp, Glycine max
agctttgctgcaagttttttactatcaaatcagatgatttttttttttttgtaatctcaaatcgattcagatggaaacgcaaacgctcctacttaaaagtcacaaatgtccaatgaggacaatattgttcgagtcaaaagtacatgattgcctatggaaaatggttttacttcagtgtatcttttaaatcgtaacaatccaacaatgtttaatttttaagtgattgctagttgtactaaaagaaaaattctctttactcagatagaaagtcaatataatacagatttcacggatgcacacacacacaaaataatgaaaatatcatggagagcctaactctttaaacaacacactactt

SEQ ID NO: 17340 - DNA, 389 bp, Glycine max
tatccaaacatgaccaaatgtattatgtcacttctgccacttttttattttattggccaacgttagttgctagtttgttagtttttgtcattgatgccacttatataacttactcatctgcatatcaggtttcttacctcattgaagagtatagtagtggccgaacccctaaccctgatgttctgtgcaatacaagaattaagtttggtatgcatctagtcccgtgcaatcaatccaatctgacctcattgtagtttgttttctgctttcttcccatttcattaatcaaatgtttatgttaggtgcattcttggatgcgattggtggcatgggttttgactatgttgcctctgggcattatgcaaatgttatccacccatgttctgatc

SEQ ID NO: 17341 - DNA, 351 bp, Glycine max
  unsure (1)..(351): unsure at all n locations
agcttagactgagttcagcctactcatcctcagactgatggccaanctgnncgaaccattcagtcattggaggaccttttaagagcatgtgtcttacagcagaagggaagcttggagagttttcttccattgatagagttcacttataataacagttttcactctaccattggcatgactccctatgaagctttgtatggtagaaggtgtaggacacccctatgttggttagagcccggagaaggcctcaccttatgaccagaagtggtacagcaaaccactaagaaagttaagttaatttaggaaaggatgagaactgctcagagtaggcaganaagttttcatgataag

SEQ ID NO: 17342 - DNA, 398 bp, Glycine max
gcttctcaaggaagcttcttaaagaagcttttcaatgattcttctcaagaaagcttctcaaagaagctacctatgctataaatagaagcatgtgtaacacttgttggaaatttgatgaatgacagtcttgtgagacaaacttcaaagttcaacttctctccctcttttcttccttcaatttcatgctcccccctctctctttctctctctctttcatttcctccatagaagcatcctctccaagcttcttatctagggcactctcttattggcgaagctccttctttcatggcttattccctagtggatggatcctactccctcatcttgtcctatgtcttccactgcatctaaatggcggataatcaccgttgtatgaccttattgaagctgaaaga

SEQ ID NO: 17343 - DNA, 357 bp, Glycine max
agcttgtgtcgcactttcaactgctgaagctaaatatatagttgcagtaagttgttgtgctcaaagtctctggatgaagcaataacttgaagactttggagtacatcttgatcacattcctatacaatgtgacaacacaagtgttatcaacctaataaaaaactatgtcaagcattctaggactaaacacatagaaataaggcatcattttcttagagatcatgtgcctaaaggtgactactacattgagttcattgatagtgagcatcaactagcagaaattttcactaaacctcttgatagagataggttctttttcataaaaaatgaactaggcatattgaattcatctagcat

SEQ ID NO: 17344 - DNA, 393 bp, Glycine max
tatagtggctactcgatcttctgagattccaaagctttatgatattttaaattgtgggattcaaaatggggttgatggtttgaagattgtggatggtgttgaggccatgaaaatggagcctgaattgcaatgcgtgaaagctatactatcacctctcactgggattgttgattcccattctttaatgctttctttagtggtatgcatttctagcttctggtacaatgttttaaagatggattaacacatccagattcattttgaatctatctattctgcaatcagtttttggtaattatgcatttcctttattttgagctagcatgatatattgacaggaatataaaccctcatgttggtccagggggaagctgaaaatcaaggaacaacctt

SEQ ID NO: 17345 - DNA, 350 bp, Glycine max
  unsure (1)..(350): unsure at all n locations
agcttccgagctgatgctctcttataaaaattnttcttatnngntttcattcttatgtgaccaaagcacagcttcaaatttgggcactttagatgtgtcacacaatcaaataaaggggcaactgccagattgttggaaatcagtaaagcaattactgttccttgatttaagcatcaatatattgtcagggaagattcctatgtccatgggcgcccttgttaatatggaagccttggttttacgaaacaatggtttaatgggtgagttgccttcttctttgaagaattgcagcagtttatttatgctggacctgagtgaaaatatgttgtcgggtccaataccttcatgga

SEQ ID NO: 17346 - DNA, 402 bp, Glycine max
cgcaacatctagatctgagtggaaattctcttctttgatataatcccttctgaagtagggaagcttacagccttacgatatctagatctaagttataatgtggctattcatggagagatcccttatcactttaaaaacctctcacaactgcaatatctttgtcttggagaacataatctttccggaccaatacctttccgggttgggaatcttcctatctttcatactcttagacttgaaggcaattttgatcttaaaattaacgatgcaaagtggctatcttctctctcttttttaacaactcttgacctgacatcattgcataatcttggctcctctcgttactggcaacaagtgatcggtgagcttataacaaacttgagagagttgagtctagttgat

SEQ ID NO: 17347 - DNA, 366 bp, Glycine max
  unsure (1)..(366): unsure at all n locations
agcttatataactcaagcaccctacgtatgtgtgaatattagattcaagtttctcttctgagaaattgttgagtgctggaaagtttatttcttttgacagcattttaagattttctgtttttgttaatctcctctggcaataggaacctaacttaaattaactcctactttcttcctctaagattatcatagctccttctttcgttgttcttgaattttcccttcacttccttattctaactagttccttgcttcttttcttcctctttccttgtcactctactgttttncattttattcaccaaaagcttcccctctaaactaagattaattgcaaaattaaaactgcagatgataccaaaatca

SEQ ID NO: 17348 - DNA, 405 bp, Glycine max
tcatgatgatgaatcaagttgattcaagtagtttttatgatgacaaagatgatgacaaaaaacccaaagaatgatttcaagattgagtcaacaagttcaagatcaagattaatttcaagcttcatgagaagaaatcaagaagattcaagaatcaagagaagtttgatttcaagagtcaagagaagatgaattcaagattcaagagaagaaatcaagaagacttcacaagggaagtattgaaaatatttttcaaaaaacaaacagtacaattttgtttttcaaaagagtttttctcaaaattttctaagttaccagagtttttactcactcgtaatcgattaccagtggcaaagtttgatttcaaaagcttttaactgaatttgcaacattctaattgttttttaa

SEQ ID NO: 17349 - DNA, 373 bp, Glycine max
agcttttggtacaaagaagaatattatgatctaagagattcaaggcttgtaaaggattgtaatgaaatgattggaaaagtattcaagatttttgaaatgtaaaacaaagccttgcttttatagactctccatgtctggtcaagaagaccattcagaagagttataacttttagaaaaacttaaaacctatttgaaaaagtcaaaacctttttgaagagttacatcttttgatttttcagaaacagtcactggtaatcgattaccaaataagtgtaatcgattacacaaagcttttgagtgaaaggatgtgactcttcacatttaaatttgagtttcaacgttcaagggcactggtaatcgattaccaaaacat

SEQ ID NO: 17350 - DNA, 328 bp, Glycine max
  unsure (1)..(328): unsure at all n locations
ccagtccttgtgttcggactctcagccacgcatgatagccgccgatgatcccattactgcttccgctaagctctctgtccttccttcacgccgcatgccatgccttgcgaactgcttgtagtaccctgagagatgtgactctgaaaccgtctgcgatgaaaggcgcgatgctttcgtgtgatggcactactctcatgggacatccttcgcaagaacagagaatcctgattctttcttccttctagcgagggaaccatttaacagacgcccctccatgctagccaagagttggtgcacaacanacaattcttgcgccgctcttttgaca

SEQ ID NO: 17351 - DNA, 359 bp, Glycine max
  unsure (1)..(359): unsure at all n locations
agcttgaaagagccctggtagtctaagagaagttcaagtccatagccatcaaagtctgaagagagtatgatgaaataagggacgtcaatatggccaccgatgaagccttggaatgagaaaccaagaaggcccgaaaggaagaacacgaccaaaacaagttttgaggggctttatagggcagcaatagtgagctcaagctccgaagaggtgaaaggaatcatcacgggtcaaaggcatgatttggaaggacgagctaaaggcttgccttangtcgaaaagaaatttgtcccaacagttaaagcgagacttaagggaatatgtgggccatcatcgatgagtgcaaagagatgctaaatcta

SEQ ID NO: 17352 - DNA, 398 bp, Glycine max
taatacccaaaatcacatctacaggaccaaggtttcttcatatcaaaatttctagacaagaaagacttcacatcatttatgaattgcatattactaccaaatatcaatatgtcatccacatacaaacataaaatgacacatccattatcatcaaattgtttcacatacacacatttatcagtattattgatttgaaaaccatacgaaagaacaacttgatcaaatttttcatgccattgttttggagcttgtttcaaaccatataaagatttaacaagtttgcaaactttcttttccttcccctgttctacaaagccttcaagttggctcatataaatttcttcttctaattcaccatttaaaaaggcagtttttacattcatttgatgaatttctaa

SEQ ID NO: 17353 - DNA, 354 bp, Glycine max
agcttttactctttcaaaaaatgagttttggttcaacttggtgcacatagttggatattgtgttcagtgcgtctacatgttatcatttgtcaaactgattgaaccaacaacttacccacagttgatcacaagtatgaaagcgttctccaaataaaattcttggttaactagatgaggaggtgtacttgaatagactcgcgcctgaaatgttcaacttatgctacagccgaacacaactcattttttcttttttttttcctttctcttaaataacccatgttgtattattgctgtgtgagaagttattgaagtattatgttgcctgattaaatattgatttttttgtttgataaa

SEQ ID NO: 17354 - DNA, 392 bp, Glycine max
taatgatgccatatgatccatgttgttgtagtcattgtttacaaaggaaggaaactttgacatagacaatgggaagatatgtagctacacttttttgttaagatcacaaaccatctttttgcaaattgtgataatctacaaatatgttatgcatgaatgggaagtgatcaatatctctttacaaatacattttgtctaatgtaaaatcattttttaaaaataaatttacattaatctatctaggccataacctatcttgaattcttatgaatttcccatatccccgtatccatattgtattgtacttgtgttgtattaaatatgtaggcttcatagatcaattgttacctaatcatctactttactcaggcacgtatactgctcttcatcac

SEQ ID NO: 17355 - DNA, 364 bp, Glycine max
agcttgcatcaagctgctctcatgaaagaaccaagcttgtcagcatctacacaggtaatgtacaactttgtaaattatgagaatgtggtaacattttaagttttaacaattgagtatagttttaagctttttgcaggtaacgaaagggcaatagtcttgtttctgctctttgagtctgctctcttgttggtactaatagggcttgtaagattctgctgtacattctgggcaaaagagaagcttaaagatcaaggccttggaagcttccttgacaagagagttagtacaaaattgtgttgtttgttcttgttcttctttcccttattctctcttcttatttattactcattggttttaaaatcgg

SEQ ID NO: 17356 - DNA, 398 bp, Glycine max
ttgcgtattcaactcaagccgagctgattactatgtaagtttgacttgatttaactcatgtccaccccgtgtgtataaataattacatgaatatcgagataaaacactgttgagatcttattacttaagcattgaagtaccttttataggtacctcatccttggctggccaagtatcatttggagaagagaaaagatcattcagagaacataagaaaggaaaaaagttacttatttaccctcgtacaaatacaaatgctactttgatcttaaatataaaagaaaattactggcctcaaatataaaaaaaaaaaactaattttacatcatttaatttcaaatataaaataatttcaactaattttacctcatttaatgctactatctataaaccaacct

SEQ ID NO: 17357 - DNA, 361 bp, Glycine max
agcttagacttcaaccaaaagataatggattaaggatggtggcaaatctggaaggttcttcaagaataccactgctacatagtatgggagttcgaaattgcaaaacaaaggggaaggtaaaaaaacatcccaagtttaaacattatctgtctgtcaattctgttctccgtgatgcccatactattctaaaaggaattcagttcaaggagcccaacaagttaggttcttcagtgtttgactacaatgatgtttacaaaaaattgtgcccatttttggtcagccagaagaagcgatcagcatctatgcctagtctattcattgttaagtgtgatgtgttgaaagcatttgattcaattaatca

SEQ ID NO: 17358 - DNA, 396 bp, Glycine max
  unsure (1)..(396): unsure at all n locations
ntgacatgcttatatctgcatctactactattttcacaggatccttttttataatagctgcaaatctgttctccacataagaaacaaaaggaaagtaaacaaaaagatccatttgggggggtaaacgtagtacatgaaaaccagaattagagttacaacgtacatcatcctttttctcatgagcaaaatcacattgatcccccttcaaacatgctccacgggcatagaacttgcaaaccctaagacaattcattaatttcaaataaattataaattaataaattaatcaagaaaaagtctacaaaaaaaccaataaataagtagacccctaaattaattgataaataaatcaagaaagagtccacaaaaactcaatagaaaaattaacaacatcca

SEQ ID NO: 17359 - DNA, 358 bp, Glycine max
  unsure (1)..(358): unsure at all n locations
agctttacagcagattttantaatgacccactaacctataattaaaataacttaatgccattaacctaaggaattaaaacaaacttaatggctgagtgtaactgaaattgtggcaaccaaaagtcacccccaacagccaacaagtcagccaccatttggtctcccaaaaggctgatgcctatgttgccaattgggcccttattacaacttgaactaaagcccttttagttgattaacccaaaacatatttttggccagccaactttacaaggattgggccattatttagacaaactaaacactctaaaatcgaaataaagtggtgtcatttagtcctcctccatttgggccatgatac

SEQ ID NO: 17360 - DNA, 399 bp, Glycine max
tcaccttctggtcctcctcatagttgtggcatgagaaaacatgctctattttcatctcccactccaagtaggcctccggatcattctttcctttaaatggaggaatgttgagtttaataccatcaattcggttttgtctaggaacaccatcattccctcttctcctcctttcttcttcattatgatctctattctccatttgatccaacctctcatggagcgcatcatctcgttgtttcattaacctctccatatgttgcatcaaagcttgcatttggaattgcgaaagccccactccatcattaggattagtacctgacatctcaaacaaacaaatcaaacgtaacaagacaattatagttgctgtttgaatacctcacccactcaagtgtatcacac

SEQ ID NO: 17361 - DNA, 353 bp, Glycine max
  unsure (1)..(353): unsure at all n locations
agcttcaatggcttantaaggatggagaggtgcaagtaaggaagcaaatggagttggatatttccattggaaattacaatgataaggtgctttgtgatgttgttcctatagaggccagccacttactcttggggagaccatggcaatttgataagagggctaatcatgatggtttcaccaacaagatctctttcacgcatcaaggcaaaaaagatagtgctcaaaccattgagtccacaagaagtgtgtgaggatcaaagaaaaatgagagagaaaattcttcaagaaaagagagaaaaagaaaaagagagccaaacacttgagagttcaaaaagtgaggacaaaaagaggga

SEQ ID NO: 17362 - DNA, 390 bp, Glycine max
tagcgccaatcgtgtactgagcctggctgaagacacctgttgtgcttagcacactaatctggcacttagcgtgctgccttgatgttgatgctctgccagattctccaccagattctcctttgcgctaagtgcactgaagctgcgcttagcggtggatgcgcgcttagcctaattactgagctaagctcaactgtcactttttgcacttcatgacttagcctctttttcacctgaaaatgcattgatttcatcattaaatccaatggacatattctaaagacatctttaaccataaaacaaaatttatttacaagattactccaaaacaaccataaattggggaactatacaagttttggaaaataatttctatgcaaaagttagttgtat

SEQ ID NO: 17363 - DNA, 359 bp, Glycine max
agcttattctataactaccaatttccacaggtaatcgattacaacctattgtaatcgattacaatggccttgttctacggtaatccattatagtgagtggtaatcgattaccagaccctaaaatatgagtttcaagtctaaaaatcaggacaaatatgtgattataagcaatcaatatacaattaaacaatcaaaaacatttatgagtatgaaaaattacaaaaaacaaccatcaaatgcaattattataaacattcaaagtaatcaatcatcataaacaagcaaaataaccattaaaaacagtcattataaacaatcaaaacattataagcaaacaaagtggctaggaatctaagtta

SEQ ID NO: 17364 - DNA, 397 bp, Glycine max
tactttaaagagaggctgaaaaaattatattttctagtgaatagtctgatttctcttaaaatggaactccatcctcctatttctctttctagcttatatatattgaaacgaagtgtagtggttcaattgcaattccccaaaagaagcaaaactcgaacaagataaagattagcattaagactctcaagaggactcactttgtcgtccaagtgagccctcaggacatggtaattcttcatattaaatcattttcttttacttattttttttgctttttatttttctcggttgttgttgtttttctatttttattttaagatacctatagttacatttgtgtcaaattttattcaatatttcaatttacatttttttgatttttttggaccattaattt

SEQ ID NO: 17365 - DNA, 215 bp, Glycine max
  unsure (1)..(215): unsure at all n locations
agctttcattaaccaatcatgaataggctttatcaaccattggntgacgtagttgccaatgtcaaatatcctacgtttaccagcacctgaatcgatggactgggctagtctctcgggaaaaccaaaacttagggtttttgattaccttttttttttcaacctggaatggccaattagggtaaaaatccttcttggccaaagaaaaaaaactttta

SEQ ID NO: 17366 - DNA, 396 bp, Glycine max
  unsure (1)..(396): unsure at all n locations
tatgataataattgatgaaccattatattntctgattatgcatgcaaattaaaaaccgagcaaatcgattctaaccaacttcttgagacatcactggtaaagagaggaatagaagtgccgtaaataaacagcaaatcaaaaccaaggtagcaagcttctccattttaatatatttcgggttccaattaatttgctagatgtttggtggtactggctactctgatacctatatttataagcgttcacagctggtaggttagccaaatatgaaacagagaattggatgtgcgccaaatggtttgaaattgggaaagctatcatttaatttgaccacattgacaacaagactttctctctaaattttccatttcacgcaaccatatgtatcatttaccg

SEQ ID NO: 17367 - DNA, 349 bp, Glycine max
agcttgtcgggttcagtttcaattaagcgtttggggcatcctatggactgagcaaaaaggctcaggtcatcaaatactgctcatcttttaaagcacaaagcgaggatcggaacctcaatcctacgttcttttcaaaagactgcgatgagaaaattacagaggacatgaatccttgggggaaaccaagaagaacacacaaaaataaaaacatgcagcgacttcctcaattgccccagatcttaagcatagtattgcttgacaacgtcgaagttcacgggtgaaggtagctcctcgtcatccatgttggcgagcaccagggctcctccggagaaagacctatttacaatga

SEQ ID NO: 17368 - DNA, 411 bp, Glycine max
ttaaatctcagcttcaaatgatgaatcaagttgattcaagtcattctgttaatgagaacgatgatgacaaaaagcccaaggaatgatttcacgattgagtcaacacgttccagatcaagtttaatttcgagtttcatgagaagaaatcaagaggattcaagaatcaagagaagtttgatttcaagattcacgagaagatgaattcaagattcaagagaatatatcaagaagacttcacaaggtaagtattgaaaagatttttcaaaaaacaaacatagcacaattttgtttttcaaaagaatttttctccaaattttctaagttaccagagtttttactctctggtaatcaattaccagtttcctgtaatcgattactagtggcaaagtttgatttcaaaagctttcaact

SEQ ID NO: 17369 - DNA, 341 bp, Glycine max
  unsure (1)..(341): unsure at all n locations
cgattcttaaaagattttttaaaagtcgccaaaccacttagcaatctgttgaataaagatgttgcttttgtgtttaatgaagagtgtatggacgcatttaatgatttgaaaaccagattagtgtctgctccagtaattacaacaccagattggggacaagaatttgagttgatgtgtgatgcaagtgattacgtcgtaggtgcagtgcttggacaaaggaaaggaaatatttttcatgctatatactatgccagcaaagttctaaatgatgcataggtgaactatgctaccacagaaaaagaaatgttggcaattgtttatgcacttgaaaagttcagatn

SEQ ID NO: 17370 - DNA, 401 bp, Glycine max
tgagatgaggaagtgtagaagggtgaaactttctgcttttattcgttgaccacagagtggtacctggagatatgtcgcgggggtcaggagaccttggggatgtcaggtggggtgctattgcccaaaaccaagcttgaccaatcccgacccaacccgggcatagtcagtcagtgagaacctgtgatgtacctaaacaggcgagctcctggcagtcaacagataaaaggaacaaagaccacaaagcaaggaggcttgtggtggctggccagctgtgaatcttgtgtgatatatgggttgtggcctctggtaatcgattaccaagggtgggtaatcgattacaaggcttaaaaatgaagacaggaggctaagatggtctctggtaatcgattaccatggggtgt

SEQ ID NO: 17371 - DNA, 358 bp, Glycine max
agcttgctctaaatttacattgatgtttgtatttatgggaggaggttatatgccatttttgctttaagagtaatgtcccactggtaaaactaactttccaaatgtttgccttcgcaggaatggccccgaggaagcttgcctcaaagaggtccaggaaggacaaggcggccgaaggaactagttccgccccggagtacgacagtcaccgctttaggagcgttgtacaccagcagcgcttcgaagccatcaagggatggtcgtttctccgggagcgacgcgtccagctcagggacgacgagtatactgatttccaggaggaaatagggcgccggcggtgggcaccactggttactcccat

SEQ ID NO: 17372 - DNA, 423 bp, Glycine max
gagagcttcgcggcgctatttacgagtgcctgtatagtggtgcgcctgaatccgacatcccagtgtaaagttatgaccatgtgaatctctcgagaggtgcctatgtttaattttgagcgagaggatatattatacgcctgaatcggacctcagtgttaaaagctatgaccatttgaatttcttgagagcatccgacgatcattttcgagcggcgctatatgtgatgaaccttaatcggacctccgtgtgaaaagttatgaccatttgaatttctcgagagcttccgtcgttcaatttcgagcgtctcgacatattatgcgcccgaatcggacatccatgggaaaagctatgaccatttgaatttctcgagagcttccagcgttcaatttcgagcgtctctacatatgatgcgcccgaatcgga

SEQ ID NO: 17373 - DNA, 357 bp, Glycine max
agcttgatgtcaatgtatgggcttacttgctaggtacaatgttgaccaaggaagtgcttcccttgtatggtaaggaaatggagaacttgttgtgtgatgtggaaaaggatgctgaggattttatggttcgggggaagatgggaattgtgaagaatgaggaagcaataagtggagtgccagtgcctggaaggcctgtcgtggagattggaaccattttgtttgctgaggttttaggtaggactcttagtggccggccattgctttccacaagaaggctctttcgccggattgcctggcatcgagtgaggcaggtttttctctttcttttgttcctcttttccacaccagtatgtttag

SEQ ID NO: 17374 - DNA, 367 bp, Glycine max
tgcatctccatccgaatcaaagaaagtttaattattatttggcagtggagccacactgtatcttgtgctgattactatacctggggatgatagctgattactttcaccatgcatccagaattcaccaacagtttgattggcatcctctggatttggcagcaattggtaactttgacattcaatattgctgctgacaagggcatttgtatatgcatgtgaatctgtttcatgaataattggccccaagtcacgaagaaacatctgtgcatcttggaacaaatcaagttcacttaacccatcttcaaaatgctggtactccacagaattttcaacatttgacaatgtaggttcagtatcaatgagatca

SEQ ID NO: 17375 - DNA, 358 bp, Glycine max
agcttcgggctgctcaattgcttttgttgctgcatggaagggcaaaggtctgtatgatggtcagcataggagcacaaaccacagacccttgcaacaggtacagatttctggtttaaggctagctgggttaccaagttaaccaatgcatccagtttgccttcaagcttcttagtttcagatgatgcagctgagtttgtagctacctcatgcactcctctaatgactataacatcatttctggcgctaaactgctgggagttggaagccatcttctcaattaaatttctggcttcagcaggagtcatgtctccaagggctccaccactggcagcatctatcatacttctctccatattac

SEQ ID NO: 17376 - DNA, 395 bp, Glycine max
ttgaatgctctattcaatggagttgacaagattatcttcagacttatcaacacatgcacagtggccaaggatgcatgggagatcctgaaaaccactcatgaaggaacctccaaagtgaagatgtccagattgcaactattggctacaaaattcgaaaatctgaagatgaaggaggaagagtgtattcatgacttccacatgaacattcttgaaattgccaatgcttgcactgccttgggagaaaggatgacaaacgaaaagctggtaagaaagatcctcagatctttgcctaagagatttgacatgaaagtcactgcaatagaggaggcccaagacatttgcaacatgagagtagatgaactcattggttcccttcaaacctttgagctaggact

SEQ ID NO: 17377 - DNA, 349 bp, Glycine max
agcttgtacggacagccactcttacatcttattcatgaaaggagagggaagaggatccatccttgttaccttgttaagatttttataataaaatgctgcattctccaatcggttattgttgatgagcgaaacaaatgatttttctcattcttaacaatagtcatgccacccttgttcacaaccacttgcactctactgacccatgcactattcaaaattgagtatgctattctaccttcgataagaataagatgctatctacttacccgttcctgtatcacaagactcaatctcctttacgattgaaccactagtttaaagtcttgattcatcataatttacgcatgca

SEQ ID NO: 17378 - DNA, 353 bp, Glycine max
tgccgcccaactccaccagcgagctaggttgcttaacgggcctatgtgctataagcaccccatgtatactaaattcacccctggccttgacttgttgatactggttctgtaacattatggaaacttacaaattacttaacgatacttgttttcttaccgtaatggtacgaaaccttatggatcacataatcatccccttttacggcttccatgatgttacacgaactttaccgattgcgcactaacacttacttttgacttctggcatgtcacggaacttcacggattgtgcaacaatgctttattttgactaacggcgcgtcacgaaacttcactaatcgcctaactatggg

SEQ ID NO: 17379 - DNA, 363 bp, Glycine max
agcttttataaatatttttatatgcgcaaaagtttttcacgtggggcgactagctattcttttatttatttatttattttttccttttcctggtcaatgacagttaatttgtttaccaaatttgttttcgatcgataaatacgttactcgtgaaaagtattaaataataaactaattaatgttacccaattagcaagaatgtcaatttgataccgctcggaatatctattatccataattttataagtcttatataatttcatatgaataggggtgggtatatgaattcatttgatcccgttaagatccgacctgtgaaactcgtattttatacgaatcagatatgatatgtgaaattaatga

SEQ ID NO: 17380 - DNA, 399 bp, Glycine max
tgcgttatcttgagtatatgttccaagtcctattcagttgcagcaaatatggctcatctatgatctctgttaatagatgttggagccatggggtaatttattcatttattccgctctttcaagtctcattagctgcctcttctattcttcttatgttgaaatggaaaaatgttctatcttatctttttttaagctttttttttttcttggaatttaacatcgtctgtcaccataagcagttgggtgtcgattgtgattagtcagagttaatgttctaaaatatcattttctagaaaattttgtttgaagatcttatgaccttctcgtgctattaactaggtaggataagaagaccatttaggaaaacaagcaaaattagtgaatccagcataaataatg

SEQ ID NO: 17381 - DNA, 366 bp, Glycine max
agcttgatttgcacataattgataggggcaaagagaactattcactactcagaggcctgaagagtgtgaatttcaaagagcgtagagtagagcaaggggccaagttttcatcttttagggagattagtgagtttttgagtgattgtgagattcctagaggtggaggagacatccccactctttttaagcaagcaatttctcttgattcctcttcttcagagtaaaaagaacttccttgccatgaaaggctaaaaccctcagttgggggattcttattgagtagttgatgtgaactctttttcatatctaattaaggttgttttatgtgttcattgcttctatctatgcttattgtatgcatgcttg

SEQ ID NO: 17382 - DNA, 395 bp, Glycine max
  unsure (1)..(395): unsure at all n locations
tgtaatatggaattaataatatgtngagaaacatgtctcaaggcgatgctcgggaaagagctaatgctgcctcctcacatgtctcacatcctagccaactcaattgctagcaaaacatctcttaaagccaacctgtagttgaagctttaaagctacttaatgatgagaatgagattttagattctactaatcaagttgatgtgtctctagatttaggccgaaccttgagcatggtttgatagttcacccgcactatgtccatgtttgaaaagggtccaaaaaaattccaactctgaaaatggggccaaaaaatttcagctttgatatttttaaagaaatatctacatgtgtcaccttttgtgtctccaacttatgctattcaactcccaattaat

SEQ ID NO: 17383 - DNA, 357 bp, Glycine max
agcttgtgtcgcactttcaactgctgaagctgaatatatagttgcaggaagttgatgtgctcaaagtctttggatgaagcaacaactagaagactttggagtatctcttgatcacattcttctaaaatgtgacaacacaagtgctattaatctaaccaagaaccctaccatgcattctagaactaagcacatagaaataagacatcattttatgagagatcaagtgtctaaaggtgacaacttcattgagttcatagatagtaagcatcaaatagtagacattttcactaaacctcttgctagagataggttctttttcattagaaatgaactaggcatattggatgcatctagcat

SEQ ID NO: 17384 - DNA, 416 bp, Glycine max
tgaactatgaaactcaacttggccaaatcctgactcaccatttcttttacccaggtgagaatgtcaatccttaccctcggaagcaaaaaaaggaagagaaggaaaatttccaagcaaaaaaaaggagagaaggaaaatttccaatcaaaggaaaaaaagaggaaagaaaatttccaatcaaaggaaaaaagagaggaaaggaaattcccaatcaaagaatgggagaaagaaaaaaaaaagagagaaggagaagaaggaaagaaagctcctgatcaaggatcgaaagaaaacagaagaaatgtgcaaaagaacaatacggaattgtcaccaaatgaacaaaagaaagaaaaggaaatcataacctaaaagtggtcttctccctgtgattaccaatcaaaatcctgtgcgtcggtgac

SEQ ID NO: 17385 - DNA, 353 bp, Glycine max
agcttcgaagggaagagagagaccaatcatgagcacatagcatggtcttgaaagaggagttagctccttgctcaaggtccaaaagaactttgtctcaacgtttatgcgagataaagaccaacatgttagccatcgtcagcaagcaccaagaagaactaaatctagccacgactcacgagcataaagtggcggacgagtatgcccaagtgtacacgaaaaaggaggctagaggaaggatgatcgactcattacatcaagaggcaacaatgtggatggactgatttgctcttaccttgaatgggagtcaagaacttccccgattgctagccaaggccaaagcaatggcggacacc

SEQ ID NO: 17386 - DNA, 391 bp, Glycine max
taagctgttatgatgtatcaatgttgtttgtctctctcaagtctcaatacagctgttcacaccagagcctttgggcttaaagtgaggacaatgcacacagactcactttatctgtgcttaaatttaatatatttacaaagaatggggagacaaggattgaactcttgactacttggacataaaagctctagtatcatgctgaacaccgaaaaccttaatttgtttagtggggcttcaagaatggtttttaacttaatcacgtgtttcatttttattctcttaatcaaaagttctaggtgaaattgttataaaataaaaaatgtaaaaccattcttgagactccatttatgatttaactcattaactgcttaagcttctcggagggttcgac

SEQ ID NO: 17387 - DNA, 356 bp, Glycine max
agcttgggcttgccttctatcatgagcatggatgagtttgagactcaggtggcttggctaggagtccaaccttctccttctagagggggtgggacctccgcaacctaagagcctgaggctgcagaggagcagataccagtagaggaggatgagcctactcctccagggccctttgaatttgtttatgactcaatggtggctcaggaggaagtaccatcaccagagcctattcttgagccatctcctacacctgttcctgaggacaccatactagttgaggatacccaaccatctgcaccagcattggagcatgagcagcctacttcacaggattcatcagccgctccagtactgga

SEQ ID NO: 17388 - DNA, 398 bp, Glycine max
tcaaagttctcctcattgataactttcaatttttagagccaatctaatcctcgcatgtgaactcttagccatccatgataaccaccgatgacgccattttggatgcctctaagctccttgtctttcctcaacggacttctccacgccttgtggactctttgtatcaccttgagactttgcgcgcctagatccctcacaaggaaaggcgagagactttcttttgttggcgctcccctcatggggtaccctagctgtcttatggcgagtgcgggattataattaatacaacccgtagtccctatcaatggaacagtagggtagtccccacacgagaaaagaactccttgtatagaagttttaaaaacattctatacacatttcccttttaaaaacattct

SEQ ID NO: 17389 - DNA, 593 bp, Glycine max
  unsure (1)..(593): unsure at all n locations
agctgttaaaccttagagtttatcttaattagaagattntttccttttggttcaaaacactctaaatataagtccaattaatcaacatgatgaagcacagtttcttcacaaataatccaaagctcttcatgaaataaaaaaaaaattacagctagaaataaactattgaaattgctttgcaccttgatccagacaacaaggccattggattcactgccaataaatttcagtccatagaatgctttctgactgcactgcttcctaagctctcaagccaccaacaccgtttcagacccaccttgagctcctgtgagagctatgtaattattgtttaaaatgaatataactcaacatgtattttattattggtcaaaatgaatataacttcataaacgatatgcacatcaatctagcatatgtttccaaaagagacaacatttaaaggcaaacagaaatcacactcaccgagtcctatgttcaaattatccgaacactacttaattaaacttcaattaatccttcactgcaagagatcaaatcaactacgaacaaattcttcagtaaaactttcattagcaaacgacattatattt

SEQ ID NO: 17390 - DNA, 315 bp, Glycine max
tcgaagtgtgagattaagtgtctaagtgtgtactttttttgtgagaagaaaaactgttatctgcacagttgaatcacaaacccattttctataaagtccagtagtatctggaagaagataaatctagtggtgtagttggtctagcacaggctatgtttgaagtccaatgaggaactaatagggtattgaaatccattaatttgctagtctagttgagaattgggtgtgttagtgaaatctcatcttttagggtgaagactaggcctagcccaagattggggtgaatcaatataaaaatcctttgtgcactctttc

SEQ ID NO: 17391 - DNA, 593 bp, Glycine max
agctttacgtgaacttaccgaagcacgaaaggtgtcatatattctatagagacaatcaacaagaaacaccagccaaaagaggaggcaaccatagcgaaggtgaaaaagagagacaaagataaaggaaatgagttagcagaacagtgctagtgattacaggagtgcagcagcaccatcccaatcaagcatgggtgatgtgttgggggattctgctacactcatgggatgaggaaaacatcacaaagattgtgaatggtattggtgaggtggtggatgtggatgacgacatagaagacctatagagactgaatagggtacgagtccttataagaacaccatggcttcctatgatcaaccacacaataacaacattcattaatggagttgcttatgtggtaaagattgtagaggagggtatgttatggttatcataatcaaaactatcaaaatcgtgttacttagtgtattttaggaaaagtgatattttatccttggatgcatgtatattctttatcacagctatatattgctattaatactaggattatgtatttagaataaattcataattatgggatttgtctccctagaat

SEQ ID NO: 17392 - DNA, 426 bp, Glycine max
  unsure (1)..(426): unsure at all n locations
tttcttccatcataactcttgatcaatgtacatgcatacactatcaaatctcaaagatatttcattattctcagaaaaagcaacatcacttgtaactttcctcacactatttgtttcttatatcatgtctttgagtgagaaaaatgataaaaagaaatttcttcaaatgcccatccaaatcgattgagtaacacaattattaaaatagaagaaaatttaaaataattttgttcactcttaatttatataatctgcactaataaaaatagaattatataatatgcatgtaatcctaaagaaacgggactattaaaagaatatttaaaaaaaaaacatntaaaatcatgataagaatgtattagtaatattatttaagaaaatattaagtactttggaaaaaatgtaaaataattatatctttatgaa

SEQ ID NO: 17393 - DNA, 789 bp, Glycine max
  unsure (1)..(789): unsure at all n locations
gttaggaatctaaccattatttgccttcctgggaattaaacctcttgaacattggaagggaccaaaaaaggtttcatgttttatttggaagccttgtcatgaatacattatgactaatgtgttgccgatgagaatgagtttcacaaataaaaatttatgtcctgcttatgactcccatgaagagactcttattcatctttttcaaaattgccaccctgctagtttggtgtgtcaattttttattaaaaggaatgatggcgttgaattttattccataattgattcgaacatatggctgccaacttatttgtctagaaaccacctattccatgatgtaaaatgatcattgtttgtttgaaaggatgctatattttacgcgggtgaggaggaggaaggtcatttttcttaccaatattgtactgtccaggaattatttaaaaagcttgttgttggccctaacaaaccggggatgctttgtttttgttttgtgtggcctgagcccaaaccccctttttttttatttccttccacctattctcttgaccgacaggcctctaagaaacccactggggcccttggaatattccctcttcttttattatcccgtaatttgggcgcccttcttttttttttctttgcccattcttttgggccgccttcctaatttctttcttatcccactaagtgggggctccctccctttatttctttttgttcgccacactcttttgggcggcctctcataattctcttctttccgcgcgcaatttagagaacccttctcttttn

SEQ ID NO: 17394 - DNA, 187 bp, Glycine max
  unsure (1)..(187): unsure at all n locations
gaaaaaaagaaaggaagggaaattccaatcaaagagtgggagaaagcaaaaagaaagaaagaaattcccaatcaagaatgggagaaagaaaaagagaagaagaagggaagaaagtcccgatcanaaaaaatatatgcagaaggtctttggaccgacaatatctgacaatacagaattgtcccaaatg

SEQ ID NO: 17395 - DNA, 200 bp, Glycine max
tgaaatgtatgtcaaatacgcaatgatggtcacaggcaaaaaagttgatggtggttgactcgttgattttcaaatctttcctgaagttttcgagtccatctaccacatacactttctctttgtgtcgtttgacccgtatatcgtagatggctccattgtatctcagatgaacaacctcggatactgtgttgccattatgt

SEQ ID NO: 17396 - DNA, 616 bp, Glycine max
  unsure (1)..(616): unsure at all n locations
atcctctaagcacctgcggctgcagcttcattttaattacaagcgtctagatatatttttggacacaatcggacatccgagtaaatagttattgtcatttgaatttactacgagcttctgttttcaataacgagcgtctcgatatactacaagacacaatcggacatccaagtaaaaagttattcctgtttgaatttgctacaagcttccattttcaatttcaagcgtctagatatattacgggacacaatcggacatccgagtaaaaagttattgtcgtttgaatttgctcagatcatctgttttcaatttcgagcgtctcgatatataacgggagtcgatccgacatccgagataaaagttattgtcgttggaatttgcccagagcttcaattttcaatttcgagcgtctcaaaatattagagcactcaatcggacatcttagttaaaagttattgtcgtttgaatntgctacgagcttctattttcaagtacgagcatctcgatatactacgggtcccaatctgacatccgagtaaaaagttattgtcgnntaaaatntctaagagcttatgttntcaatttcgagcgtcacgatatattacgggacttaatc

SEQ ID NO: 17397 - DNA, 582 bp, Glycine max
  unsure (1)..(582): unsure at all n locations
tgtagcaaattcaaacaggaataactttttacttggatgtccttttgtgtcttgtagtatatcgagacgctcgttattgaaaacagaagctcgtagtaaattcaaatgacaataactatttactcggatgtccgattgtgtcccgtaatatatctagacgcttgtaattgaaaatggaagcttgtagcaaattcaaacaggaataactttttactcggatgtccgattgtgtctcgtagtatatcgagacgctcgttattgaaaacagatgctcatagcaaattcaaacgacaataaatttttactcaaatgttcgaatgtgtcccgtaatatatcgagacgctcaaaattgaaaacgaaagctcgtagcaaatgcaaaccacaataacttttaactcggatttccgattaagtccagtaatatatcgtgacgctcgaaattgaaaacataagctcttagaaaattttaacgacaataactntttactcggatgtccgattggaacccgtaatatatcgagactctccaaatngaaaacagaagctcctangaaattcaactacaataactttttactcgat

SEQ ID NO: 17398 - DNA, 928 bp, Glycine max
  unsure (1)..(928): unsure at all n locations
ccccggcttgatgactacgttgatcnancnancncnnnnagnganncgccgcatgcaagctangcggaaaacttcgttatccgcggacattttataattcatatgaacgggaccgtcacacgccatacccttctgtgttgtgacggcaacatgccttctgtctttatattctcacctcaccaagacaagctatgtcctaacagtgctagtgatgacttggagccacggaacgaacaagacaaccatgagtgatgaggagggggatgctgctacactcgttgggatgcagacaacatcacgcggatactgaatggaccttgcgtagaagtggaaggccactgacacttattaagatcaaatgttaatgacctagctacaggtccttatcaaaaatacatgaatgcctaaacactgcctcccactggcaacataaatgcgtgaagtggttactgagcgccaacatgacaaggagggtctgccaagtgtctaatgaatacagccgatcatagttgggtaccaaacgcgtntctgcggacaaattataattgatgctagcatgattaccaaaattaacccacgccctcttgaacctgaatattcactgattgtgtattaaaagtacacagcatgatcctagcaaccggcaattctttaggctatctgtacagcttttcctcaagaccaccacaagacttaaatacactgctgccccattgccaccaaattccttgangagaatattaaaaacaacccccatcttatttatatatacgaaccgttaaaatagcgcgatccggaccacttattcttgaaaaattaaatcacggaacgacaaccttattgtacctcctgaaaaaatcattatagttgtgggaaaaaaaacaccaaacaggaaattcggggtggaaccaaataaaacatagcttcg

SEQ ID NO: 17399 - DNA, 337 bp, Glycine max
tcttaaaactcactaaagaagtcttgatgttcctaccaaaatgctattgctaaaatatgaggaaatttttttgaaatattattctatgattccaaaaaggtacaagttctaacaagaatatattggttaatcataataactttaagaataaaggagatatgtagatttgtgctaactatagtggtataaaactctcaggtaacaccatgaaattatggaaaaaggtgattgagcataaattaatagaagggatgaggattatcgggaattaatttggttttataccaggaaaaggtttgcaacagtagcttacatacagtattattgacttggaaaa

SEQ ID NO: 17400 - DNA, 455 bp, Glycine max
  unsure (1)..(455): unsure at all n locations
cacctgangcatcaagcttctatagaaggtttgttcctaatcgctctacgattgcttcattctctctatgaggacgagaaaaagaatgcggcatttacctgaggtgaaaaactagaacaagcgtttgctatgctcaaagaaaagcgtactaaggcacctgaactagctcttgctgactttagtaaaacttctgagctacaatgtgacgcctgtggagtgggagtgatagctgtattgttacgaggtaagcaccctatttctcatattagtgatgaccttcgtagtgccgcccttaactaccccacctatgataaacagctctatgccttaatgagagcactccttacttgagaacattaccttgctatcaacgaattcgccattcatacagatcatcaagcacttacttacattggagggcaaagcaaggaagacatgatgcgtgcataatgggt

SEQ ID NO: 17401 - DNA, 468 bp, Glycine max
  unsure (1)..(468): unsure at all n locations
aattgatnttgttcgagcagtctctgatcatgttttattctgatgtgtttggtttagaagatacaaataaaagagaaatttttgaattaaaatacagtgtaaaaaggtgtgggagcggcataatattttctctatttctcttctccttaattaaaagtctaaggattcttttggtagaggtggaagatggtagaaaaggaatgaaataaacaggaagacttacacttttattttttcctttaatttaaaattttcatcttatttcttttcactctccaaaacatataccaaaagttgattttgaaatagatactcaatttcaagctttcctaattacaatcattggcctgatcttatttttggcgaatgtcattgacttaatatatgcttataacaaatatcataatcattgtctttctcatttattatctctagaccaaaacccgttcaaaagattccaaaataatc

SEQ ID NO: 17402 - DNA, 821 bp, Glycine max
  unsure (1)..(821): unsure at all n locations
cggtcgcatgnnnattgattcctttgaaccccggatcctcttagtcgacctgagccatgcaagcttgcatttggaattgcgaaagccccacttcatcttttggattagcaccggacatctcaaacacacatataacatctaacaagacaattttgggtggtggttgagatcctcccccacctcagtgtatcacacttatttggctttttttctatggaaccattcttgcttttaacaattttattccccctggagttttgaggtaatcaaaaaatttgtgcccccaacaaaaaccattcccccattttgtggagggcccctaaaaaaacaaggaagtggtaccaaaaaaaaggctaacttttttttcgggccaagagagggaaataaaatccagaatttaggaattcaagtaacattctttcgtgccacaattttttaccagaagagatttttttttagggttcgtaaagcaggaacctcacccccttttttttttttttttaaattacgaaaaaaagtttgtttttttttttttaaaaaaaaaagaaaagggtttttctggggggcggccccccaaaaaaatttttttataagaaggggtttcccggggaaaaaaaaagggcgggtcttcctttttccggggggaggggtgtccccaacaccgtctaaaaaaaaaaaaaaacagggggcgggggtttttaggttattaaacctcgggaggagggtttttatagaagaaccagccgggggggctttctccgagtaagggcgtgtcctaaaagaggggggggggaacccgttgggggggggaaaaaaaaaag

SEQ ID NO: 17403 - DNA, 582 bp, Glycine max
cacttgtggggcttctatggaggctggatcttgagcttattgtatgtcctttaatggtgattttccaccatggagatacagcggaagacaaatgagaagaggcgagaggaggcgccatccactaaggaataagccatggaagaaagagcttcaccaccaagatgagccttggataagaagcttggagaggatgcttcaatggaggaaaagaaagagggagagaaagagagaggggggagcacgaaattgaaggaagaaaaagggagagaagttgaactttgagttgtgtcttccaagactctcattcatcaaagttacaacaagtgttacacatgcttctatttatagactaggtagcttccttgagaagctttcttgagaaaacttccttgagaagcttctttgagaaaacttccttgagaagctagagcttaactacacacacccctctcataactaatctcacctccttgagaagcttccttaagaagaattctatagaagctagagcttaactacacataccctttctatagctaagctcacctccttgagatgagaagctagaagctactacacacc

SEQ ID NO: 17404 - DNA, 233 bp, Glycine max
cagaattgcattcgggctctcattttatatccttcatgttgaccctatatatatacaacagtccgccagtcccgagcttacttaaccatgctcatatgtcattgaggcattccaccgaacacttggagggcgcatgtttatgcatgaatatcaagagaagaggggggatgttgcctgccccattgctgtaggaggcatcctaagcctagggccatccgatacaacccctcaat

SEQ ID NO: 17405 - DNA, 465 bp, Glycine max
  unsure (1)..(465): unsure at all n locations
tgaaatcaggtgcagccatttcccttagagtcctctcacgaggtggaggttgtgccatgttctcagaatgtgcaaaatcagaatgctcacaatcagaatgctcaaaattataatgctcaagatcaggatgttcaaaatcaccaataacagaatgcacagattcaccagttatggaatgctcaaaatgatcaaaaggtataaaatgatgcctaactaatctatgaaatgtcctatctatctcangatcaaagggttgtaagtcagatggattgcctctagtcatacactacattcagcatgcacacaactagttgccttgtcatgtaaataaaggtgtacgtttgaactacagctaccctcagatgatatccacatgacttgaaattntgtgagcaaccttattaaatgatgagaagatagcacaaaaaatttcagacaaaaattcaaagtctaactatgaaagct

SEQ ID NO: 17406 - DNA, 472 bp, Glycine max
  unsure (1)..(472): unsure at all n locations
agctttgagggtgcgcaacccaccatttttttagtttagtatcgataatgtgtctaccatcacgattatcgtctccctttccatcattgggggtaccacctgggccgccagatccctccaccttttgtgcgtgttctttgaaagatccgtccccctttttgcacatgttctgtagttgcatcctatccagaaccatatcaaaattgtactgatactgcctaacaaaggcaaccattangtccttccaagaatggactcgggaaggttccaagttagtgtaccacgtaacagctaccccagtaagactttcatggaaggaatgtatcagcaattcctcatcttttgcgtattcccccatcttctgacaatacatctttagatggttcttgggacaagtagtccccttgtacttgtcaaagttcagcaccttgaacttgggaggggtgatgatattgtgtactangaacaactc

SEQ ID NO: 17407 - DNA, 494 bp, Glycine max
tcgtggggggatcctgaggctagatgggaggtactgtctgctcttaatagtgctggagggttactatgtatatggaatgaggagacattcagactagaaaacaagttgattagagatgatttcatttacctggaagggacacggcatgcggatggtggcagagtcattatagagaatatatactcaccatgtgatgcagttttgaaaagaaatttgtgggaacagatcagacagataaggcatgcaaatatggggggcttatggtgtataataggagattttaattgtattagaagaccctgagaaagaataggcacttgtcaaatgatgcaggatgagggtattatgaaagaaattaatgaatggattgcagatttagaggttgacgatgtaccttctgtgggacgaagattcacttggtacagaccaaatgggacagccaaaagcagattggacaaagttcttgtatccactagctccacttctatttaata

SEQ ID NO: 17408 - DNA, 427 bp, Glycine max
  unsure (1)..(427): unsure at all n locations
agctttgcagatttggtcttcgccagtgaaaggatctttgtatgtccgaaaagaggcaaatttgatcatcctactaggacgactgagaaaactggggcaaatgaagagggtgagaaagagggagaaacccatgctgtgactgccattcctatacggccaagtttcccaccaaacccaacaatgtcattactcagtcaataacaaacattctccttatacaccacccagttatccacaaaggccatccctaaatcaaccacaaagcctgtctaccgcacttccaatgacgaagaccacctttagcacaaaccaaaaaacaccaacaaaaaggaattttgcagcaaaaagcatgtanggttcaccccaaattccgttgtcatatgctaaacttgatcccatatccactcgataattcaatggtagccat

SEQ ID NO: 17409 - DNA, 479 bp, Glycine max
  unsure (1)..(479): unsure at all n locations
aaggggctatccagtcgggttcgtggatgattgtgtgttgtttcaatgctcttttgaggcaatcaaaagcctctttgcatttatcattaaagtcaaactccacctccttttgcaaaaagttggaaaatggaagggctactttgctaaaatctcttataaagcgcctatagaatcctgcatgaccaagaaaagatcgcacctctcgcatgcaagatgggtaaggcaattgtgaaataacataaatttttgcaggatctacttcaatgcccttattggaaataatgtggcctaaaattataccttgctcaaccataaaatgacatttttcaaaatttataacaaggttagtttcagtgcatctattcaaaaccttntccagactatccaaaaaaatatcaaaagaggatccatatacagtgaaatcatccataaacacctctattcaatnntctaanaaatcactaaaaatactgatcatg

SEQ ID NO: 17410 - DNA, 601 bp, Glycine max
  unsure (1)..(601): unsure at all n locations
gcttnctcggggccatttcctacgaaagcatttatttggaaagttagttttaccaagaaatgctactcttaaaacaaaaatggcatataacctcctccaataatcacaaacatcaatgtaaatttagagcaaactcatgcacatacttgcttatgaacattcactcgcacaagatattcttctacctaagaaaaatgcacccatgcacaatcaaggcaccttcattacctagattatttatatgtacttccaaggtgtatttgctacctacatcacatgcacttccttggctaaatttacatacatgcatactcaaagcattttggctaccaaaaattgcacacgtgcacattntggtatttctaatacctatgcatatacaaactgtgtgatgaatcttggctatctacacaataaggtgctacatttcatgctttattcaagtgtttttgctctctaaagccgcatgcannatcaagtatattttcttttgctgactaaaattgcattcaaaataaaaggtatctttgtaaggtattttcttttcataacatgcaacatatatatattttttgtgagacattttgactaccaaaaatta

SEQ ID NO: 17411 - DNA, 703 bp, Glycine max
  unsure (1)..(703): unsure at all n locations
aaagacaatacttcattcataacatcaaataaactagatagtcatccacaatattcaaataaaacatatatgaataattaaaaaaaataaaacacaataccaaatgtaagtacataccactagtcatatatcattaaagtaattaagtttaagacacataatcataaacaaccaagagcaagtcaatataatcataatgttcagtcatactaagcaagtattaaaagaaatactaagtattcaaatgtcataaaaacatagtcaaatacaaggcttaaaaacaaaatataattataatctaaatatattatcagagaatcaaaacttaattctaagtaacaaaaattagttatgaacacatacatggtaactcattacttatctcgattaattaaccactagattttaagtatcaaataacaatcatcaacacatatcatagtaattatttacttaattcaattattctaacatgtcaaaacattntttattttttaacagaatctaataatcttagaaacaaaacataagcaattcaagcattaatcagatcagacaaaattcaattaatcatacatatttcaaattaaaactaaatatnagtatttaaacatttgtaacacaatcaaacaattttcaacaattattttctattagccacaaaaacaacttaactaagaatactaatcattccttaattcat

SEQ ID NO: 17412 - DNA, 534 bp, Glycine max
agcttagaagtacttgatcctttagcatcatcaagacatcaaaacatcttgtttaaatccatcagctgaaaaatccttcaactatttctcgtccttggaaaattctttttgcaagaatcaactgcttctttcattcttcctcactacgaggtcgtgaaaacaagacaacacttggtacctctaagccgtacactggggcgatgaggggcaccgtgcatgagcctcaagtgaacctaggggcagattagaagttctcacccaataggttccctcctacaaggtcatgccgaaagacaacgattggtacctcaaagccttacactggggcaatgaggggcatcgtgcatgagcctcaagtgaacataggggcagatcaaaagttctcacctgtcgatgtttttaaacaagaaaaagaaaagggaggacaaaccctatgttttcaatggattgatcaaacatcaaacgaccccattcccgtcactccaaaacggtcaagtgactaaatcaaaaagaacatacactttgagggagttc

SEQ ID NO: 17413 - DNA, 328 bp, Glycine max
  unsure (1)..(328): unsure at all n locations
atgtttgtatgggaggaggttacatttttttttttgctttagagtaatgtcccactaaaactaactttccaaatgtttgccttcgcaagaatggcaccgaggaagcttgcctcaaaaaggtccaagaaagacaaagcggccgaaggaactagttccgccccggagtacgacagtcaccgctttaagagcgttgtacaccagcagcgtttcgaagccatcaagggatggtcgtttctccgagagcgacgcgtncagctcacggaggacgagtatactgatttccaggaggaaataaggcgcccgcagtgggcaccactggttacttcca

SEQ ID NO: 17414 - DNA, 447 bp, Glycine max
agcttaacgagattgattctgtgatattcttcttgcttcaaaaagataagaattctgttagcagaggatagtataaataagtatgtaaataaaatcagaatcataaatgagaatatatttccttgccttattccttctccccttccttctatggaggccctggtcctcgaaaccagctaattagatctccccccctaacagtcaatgtgtttgattgcgagaaggacatcaacgtgccacttaccgttgttttcgtggttgaaaatccagcccgaggagccagagtggatcgttttcttcatcttgtcacagagtgtgacgacagatgtatacaaatccgtgagggtggctgcgatcaaatccaactttgatgagtgggtgtccaatttcgtggtctgtgctgccatggtggtcgcgtgagactgaagcgtggacttattggcctca

SEQ ID NO: 17415 - DNA, 171 bp, Glycine max
tttcgagcgtctcaatagattacgggacggtttctttatccgagccaaacgttattgtcgtttggattattttagagcttcagaattcaatttcgatcgtctcgatatattacgggacttcatcagacatctgaggaaaaaagttattgtcgtttgaatttgctgagagct

SEQ ID NO: 17416 - DNA, 511 bp, Glycine max
ggtcattggtatcagctgctaactagtttacatggttctctcgggctaattcgttttaagaagctgaacaatgattcggacaaaatagtccctcagtctaaatgtatccatctggatatatataaataataaaccaaagcctgagatgtatcaaagtgtgcccttctgattcgtgccataaaaatacttcgatttggacttttgttaactagaaactgaagtctatgatgaatattaattctgcaccaatccattattattccatcttaatattgcgggaacaatggtagtcatggtcaacaaaggttaatctagtaggtaaaaatcaaactggtatctcacgaggatgcgggtttgaatgccgctactaatgtgaggaccttgttggggggatgacgagtacgtatttctattagcacttattgagctctgactaatgtgatgaatcctgaaatttaattcacttaaactcttactataaaaaaaaatgacaggcatgaaatcccaaaat

SEQ ID NO: 17417 - DNA, 897 bp, Glycine max
  unsure (1)..(897): unsure at all n locations
gacagccacgcgtcacgcatctccccnaacaaccaacaccccacacgcacgtctcgcataccagtccacacnnnnnnnaagnnncagagcggatgaaacctgagacaccgcaacnccggcaccnnagnanacaccggcaggcgggcagcccgnaccaaccaaaaacaaagcaagagggcattatggacaccacaccgggcccacccacagggccgccaaaccacggggcgggcacggcaacagacccaaccaaagagaaccgcgggggcaaaaaacccaccaaggacggccncggcngaggcccagaaagacgaaaggacccgacagccagcaaacaggacgagaaccaacgcacacaaaagggcgcgaccagccacaccgcaagaacaccccgccccggggcgacccaaaagggcggcgagagcaaacccccaccagaacaaggcccaggccaacaaacggacaacccgcccgaagcgccgaaggaaaaagccagcacagacccgggaaacaaagagagaacgcacaccccgggaaccagacaaacacgacccccccccaaaacaagccagcccgacccaagcacgaccgacgaggaaacacaacccggcgaaccaacccgacagaccccccgcgacccgaggagaccagaaaagggcccaccggcacccaanaagccccaaacacggcacccccaccgaagccggagggcaaccgaacccacacgggaagcaagccacccgggcaaaaccgcaccggcccaccggaaaccggggcccgaacaaaaaacgcgaaaaccacaaagggagcccggcaacaccgggcaccaacaacccaaccaaaccgcgaagggccagaagacaccccaagccaaagcccaccgaggcacaccccccn

SEQ ID NO: 17418 - DNA, 704 bp, Glycine max
  unsure (1)..(704): unsure at all n locations
gcaggcnttgttgactcttgaggaccaccattggaaactaccccgcgctgacctagcctacctgagggcggactgaatcctgtttacgcgcggagccaaggaaccttcttgtaatcatttccgcacgttgaatggttatcaaaaggccaagaccaattttggattctcgcaaccgaatattggttgggaggaggaactaacaattttaaggcggggaaaatggatgggatcatgggcaccaacctgtggcctgtcttgaactgacacaaaacagtacttgttgaggtaaaaaagctttttacaaacctgtaccccatcaataaaatgcgtagtcctaagccctgaaaggaacggaagaatctgtctatttttaaaataaattgttagcgaggatgcttcaaatgatatcactttgttagacaacatccaaacaggagctgtaaggacacttacaaactcgcctcgccatatgctatgacaaacttatccttttagaatctatgtagggtaaacaaggcttttccaatataccgagtgcactgcaacatttttaaaaagaaaacctgaaacattgccataggacatatactggcggctactattattcccattggctatttcaattatggcgagaatatgggaccttttggagcgtccaaatttgtttgctgcccccaaaaaactcttttcaagccccaaaccac

SEQ ID NO: 17419 - DNA, 543 bp, Glycine max
acctgcagcatgcaccctcgtacacataactctggtgttttggtattaatttttacacttgcctatataactcaaacaacaaaggcactaaaagtagagcattacatacccctccccccccaactttatgacttgtcccactagaattccatattctcatggttttatctgcagaactgctacatattgtttccccttaaggtaaaaagcaaaaagaaattgaagaatgtaaatacatgacataaatagtaacaactacaaaaaaatacatcaatgtgaaagagaatatactaccatcaagagtaaaatcaccataagtcacactgccatgatgactaacgaagcaagtaggggggtaattcaatcagttgtcttccacatccaaacattgaaatccccaaaaccagctaagagtgtgtgttgttgataacaaatatcaaattgttaaaaacaaattattagggaattctgagcacaggttaacctatgtcgacttaaaatatgatcaatatggttctaattcattcacttataaacaaaaac

SEQ ID NO: 17420 - DNA, 440 bp, Glycine max
gattcaagtatgaatcattaagtgtggatgatgacaaattgtccaaaagaatgatttcaagattgagtcaacaagttcaagatcaagattaatttcaagattcaagagaagttgatttcaagattcaagagaagaaatcaagaagacctcacaagggaagtattgaaaaggatttttcaaaaaccaaacatagcacagttttgttttacaaaagagttttctcaaatttttctaagttaccagagtatttactctctggtaatcgattaccagtttactataatcgattaccagtgataaaattcgatttccaaaagtttttaactgaatttgcaacgtttcaaatgatttttaaatggtgtaatcgattacaatatattggtaatctattaccagtgtatctgaacgttgaaattcacattcaattgtgaagagtcaca

SEQ ID NO: 17421 - DNA, 382 bp, Glycine max
agcttgagatgaggaagtgttgaagggtgaaacttcctgcttttattgttgaccacagagtggtacctggagatatgtcgcgggggtcacgagaccttggggacgtcaggtggggtgctattgcccaaaaccaagcttgaccaatgccgacccaacccgggcatagtcggtcagtgagaacctgtgatgtacctaaacaagcgagctcctggctgtccacagataaaaggaaaacgcgaccacaaagcattgacgcttgtggtggctggccagctgtgaatattgtgtaatatgtggattgtggcctctggtaatcgattaccaagggtgggtgatcgattacaaggcttaaaaatgaagacaggaggctcagatggtctct

SEQ ID NO: 17422 - DNA, 449 bp, Glycine max
  unsure (1)..(449): unsure at all n locations
tggagaagatgcttcaatggaggaaaagaaagagggtgatattttattagaggggggagcacgaaattgaaggaataaaagaggtatagaagtggaactttgaagtatgtctcacaagactctcattcatcaaagttacaacaagtgttacacatgcttctatttatagactaggtagcttccttgagaagctttcttgagaaagcttctttgagaaaacttccttgagaagctagagcttagctacacacacccctctcataactaagctcacctccttgagaagcttccttaagaagattcctaaagaagctagagcttagctacacatacctctctaatagctaagctcacctccttgagatgagaagctagagcttagctacacaccccctataatagctaagctcacccncatgacaaaaaacatgaaaataataaaaaaaaag

SEQ ID NO: 17423 - DNA, 129 bp, Glycine max
gagcttagagctaattcaacgacaataactgggtactcttgtatgctgattgagccccggaatacatcgagacgctcaaaatttaatggtgaagctctcagcaaattcaaacgacagtaactttttact

SEQ ID NO: 17424 - DNA, 468 bp, Glycine max
  unsure (1)..(468): unsure at all n locations
agcccacatgtttttgttttttccttggaggtggttgttgatgtcggaaagaaacctaatcctaggaggcaattaacttcatcattccctttttgtatattgaccatacagcattggtctcatcctattaattaacatactaacataaacttttcgtcctggccagtaacttaattatagctattcaatttcttcaacctctttggtaaatatctttcatgcatgtgcaaggaaaaatgtccattcggccgaaacaaaaaaacgaagcattgttcaaagctccatattatttcaggtaatcactgtcactgaggtgcgctggtcaaaatgaagttctgtcattccaatatgttgttaattagtccaatccacgataattgggtgtaatctattcagatgccgatcgaatgcaatatantcgatgcgtgaaagggaaactgccatacgtactataaggtgcacattcta

SEQ ID NO: 17425 - DNA, 516 bp, Glycine max
  unsure (1)..(516): unsure at all n locations
agcttttatctagccaaaatcatacaaaagtgtacttctgaacctaacggtttctaattatatgggccatcaaatctatcatgtgttgacagtaattgattagcccatgaatttcctctggggctgaacacacttcagggatggccttggctttggctagtagtcgcgggaggtcttgacttccatttaaggtcaaggcgaacctatccatccacatggttgcttcttgatgcaatgcatcaatcactctccctcttgcttccttttcggcgtacgcttgtgcgaaatcctctacaagtttttgttcatgggtcaaagactggtttaactcttccttgtactgccctatgatagctagcatgcttcgctctgtgggttctaagtgttgagccaaactcctcttggatcttgagtaagcatctaactcttcctttaagatcatgccatgtactcgntctaggtctctttcctctctccggacccacaaagctcctcggaatntatctcgaccatact

SEQ ID NO: 17426 - DNA, 913 bp, Glycine max
  unsure (1)..(913): unsure at all n locations
aatggatgacgnanttgaaaancccttctngtgtaccnntgctngagtaanctcgtcngagctcncatctctgacgatcgcactcgcgcagngtcagttgcgacgcccttgtgactattcaactactcttcgacgacagtatgtctccatcatgattgatcaaggactgggactcactccgattntgctcgtgccaagttctattggctcttgcagggtgaatcatcctcatactaatgttaccgagttgcatattttctggtccaccatgaaaccccctggtgtccagaaagatcatatatttctaagggcttttcctcattctctagacggagtggagatagaatggctgtactaccttgctcctacgtccattactggctgggatgaccttaagagggtgttcgtgaacaaattcttccctgcntctaggaccactgtcgtctgaataaacattccaggcgtcatgcaccttattggacagagctctgatgagtaccgggaaagatgcaagatattgtgtgcgcgctcgtctcaccaccagaattctgagccactccttcagtaatatttgtatgacggactcancgacatggagatgactttgattgtgctgccaatgatgagctcttgcgatatgactctgctgcgctagaatctcttgagaaatgggttcactccaacatttatgcagcaatgatgtattgtcttacagagttctgatgggcactgttcttttatttggggaattatagctggaggaaacttgtgcctggctcctggacctggttgccttaaataaattgccccctgcacaaaggtgttttggttttttcaaaacccacaatggttttctttttctgcgcttgggtcaagagcaccttacggttctgggactttttttaacaccccc

SEQ ID NO: 17427 - DNA, 830 bp, Glycine max
  unsure (1)..(830): unsure at all n locations
cgccttatgtatcatctttagcgacctttattactaacctcctccaagggcatgggattttccagttgccggaaaatttccttttttttttcccaagaaaggccttcaccttttttggaaggaccaccaaaaattggaacttcctaaccttcattaataccttaataactccaactcctctcttcatttccattttttccaattttttaatttccttttcctttttcaacctcttttacttttcctgggcattaaatcctttttttggcccaaattttgttctccttatctttgatgctttcaccttcaatactttctcttgtcatcaaacctttctttcaacagctttcttcttatgcacaacacttttctcattctcagcctcataaaacttttactccttgtcatcacagctttgcattcctcctttgggattcttattctgtatatgcacaaaaactgttgaatgacttgttagctatcttgctttatgatttgacattgttacttgcataaactgagtcaaaggctccttcagccttagtagtcctttgaaagatgttangccctttgttgattgtcctgttcgaagggtcacattggcttttgttaacctgataccacggtgccgacttcaatgttcttgttgattttaaagacccttgtgagaaccctgaaaatcctctttgatataccctggtcctattgatttcccagattatgaatttcttgtatgttttctttaccgggattcattggcctgttcattagccctacccacaatggttaaccagaaactgcacacagaaaatgtgaagttgcccataacg

SEQ ID NO: 17428 - DNA, 333 bp, Glycine max
  unsure (1)..(333): unsure at all n locations
cctgccgcatgcaagcttgtggggcgaaatcacaagntattgtcangttgtcttgantncgcgacggattcgaacataagagttggaatttgtttttccaaacgcttattggaggaaggagtggaattaggcgacaaaaacgggtggtgtgaattgtcgcgacaacgcttaggtggctaggaaaaagttcgactattgaaggagtcgaggtaaggatttggtgtatataatgtagaaaaagattgtaagccttgatgaatctaacgatttaaaaaaatcatctttcagtggaacagcttttacttttactctgggacaatgttatccagcatg

SEQ ID NO: 17429 - DNA, 577 bp, Glycine max
cttgttgttgtcccaacactgcaacctgtgattatccttcatcagctgcatagaaacaaattgtaaaagtcaaatccttttaaagcatagagaaactaattgtatccgcattcaataattcttgtttcacatcacatagtatctcacatatgcatgggagtgtagagagttctagcaggaccaactgcaatcagatggtaaaaactgtgcacatgtgaggtaacacgtgtgtaatgcacaggtattattaacattagcacaagaaaatacttatataggcaagagaaaacttaggcgcagtacctggatattgttttactatcaaaattaaaatttcactccgatagcccatgcaataaaagttgacagtaaaggttgatgctagttaccatggtgcaactcatattgattatagaataatataagagacacttagagcatctccaatggtgcaaccatggtggagtagctaaactcacttttgatgagccctataatccctcatgagatttgagacccttcaacaagtttctctataatggtgcaatccttaaaaacttaaaagggtccaaaatgt

SEQ ID NO: 17430 - DNA, 426 bp, Glycine max
  unsure (1)..(426): unsure at all n locations
agcttttagtttgaatataagttttaacacatcggttttttttatttaaaaaaaccgatgttaacatagaatcgttaacatcggttgttaaaaaaaccgatgttaacatagaatcgttaacatcgattttaacaaaaccgatgttaacatagaatcgttaacatcaattttaacaaaaccgatgttacatacgtcatgttaacatcggttttcacaaaaccaatgttaacgattctatgttaacatcagttttttaaaaaaccaatgttaataaactggttttatttacaagtatgccactgtgtttgtgttaacatcggttttgtagaaaactgatgttaacctagtgatgttaaatgtatattntttagtagtctatatttgaaaacaaaaacacaaaaatggttaattaaattaaaatttttt

SEQ ID NO: 17431 - DNA, 485 bp, Glycine max
  unsure (1)..(485): unsure at all n locations
cttgaatgctctattcaatggagttgacaagaatatctttttattggtcaacacatgcacagtggccaaggatgcatgggagatcctgaaaaccactcatgaaggaacctccaaagtgaagatgtccagattgcaactattggccacaaaattcgaaaatttgaagatggaggaggaagagtgtattcatgacttccacatgaacattcttgaaattgccaatgcttgcactgccttgggagaaagaatgacagatgaaaagctggtgagaaagatcctcagatccttgcctaagagatttgacatgaaagtcactgcaatagaggaggcccaagacatttgcaacatgagagtagatgaactcattggttcccttcaaacctttgagctangactctcggataggactgaaaggaagagcaagaatctggcgttcgtgttccatgatgaaggagaagaagatgagtatgacctggatacagatg

SEQ ID NO: 17432 - DNA, 469 bp, Glycine max
  unsure (1)..(469): unsure at all n locations
agcttattgtgataaaatgaaaacaagtgagttctattctactgacataatgagaaaaaaaaactaacttataatttatagattataatttattatataaatacgagttaacacaagtgattaagaatttggaatgaactaatgggtcaaatcctcctgatataataaaaaaattataattttttattttttattatacttatccataatattttaattaaatttcactctcctttttctttcttttacactaaggttaaatatcttttcaccttcaattcttactcaaaaagactcttgacattgtttgtatcttgtatccaaagcatagtgaatgacattggtgtgactccgntgaagtcttctttaattatggnatgcattctctccttggttggccatttctctacttctgattaacacgggtttaacgactaccttttattctatattttgaaaacatcgaact

SEQ ID NO: 17433 - DNA, 830 bp, Glycine max
  unsure (1)..(830): unsure at all n locations
ggcttgntttgaacccttgtattagcgacctattagactccgctcaatagtagattagaaaagtttgaagttataaaattttgtttgtttgatccaatatttataaccaatattgtatgtcactccattaagtgggattatattaggtggcagtggttatatgatggattactacctctggtttgttaaatgattcaccctctgaaaaaattgacgaattacgctgccccgttattaatgtatcctatgggatgttctcttgaccttaggtttggggaataggcacaggatgtgttcctttagacttgtgacattgttattatagtaacacgtaattccttcctattaaagtatgtctaactttctgcctgttttatttacagcatcatgctaagaataagaagtgttttgtctgcaaccagccaacacttggaaattttattgttgctcatgagatacgcaggacgatggccgaagataaataatatctctaggatccatgaatctctttgctgtaaggaagttatcttttctcccccattcttgcctgtttaaagaagtatgctacgtaaatttcattttaattgatattctttgacatgtatagatcccagaatatttaacagtgagaaacatttacccattngtatatagcacattcattgtgcataccaagatccttttggcaatttgtactaaataaatttcagagaacgatctttacttcaccattggtgtttgttgactataatgtgtcagcactaaatcaaattggggctcgtggcgtattgtgaaattgtggacctggctttgatctaccgttctgtctg

SEQ ID NO: 17434 - DNA, 432 bp, Glycine max
agcttccacatcaagcaagttcatctcaaagctcttatacaaacaatagaattcaaaagttggagaatttgcttggaaaccttgtagctgtgcttaaagtacgatttgcagaagatccacaaattaatcaagtcttagaagctatagatcaagaggtatgaatttataattctacttattcaacgatttaactatgatatgatactttacaaagaaaaaacattcttttaatttaggtacctacaaatgattctaccagtaaagatcatcaaactacaaacaatcttagctagaggtgagttgaaatatagtactatattttaactatatatatatagatatatagaatatatcatcattatgttattctaatagcagttgaatgttataatttatgcttcaatcttgttccttttacttgaatgacgattt

SEQ ID NO: 17435 - DNA, 361 bp, Glycine max
attcacaaaaacatggtttcatgcattgtaccatattttttttgattaatcacaaaatttaagaattatcatatctgtaaaacacaattcggcaaaattcatcattggtgaaaaggggaaattgttacgaacatcataacaaaaaatttgtcccttcaaaataaaattaaacttatttggaatttttcaacccgttcaaatcaaggaaaaattatacaatagaaggaagagagagagctcactccccttcactcgaaaatatgattcccaaaggcaagacactgttgaagttgctacaaatttctagaatattcttaaatataatatgtatgaatatggtagaacaatctacaactatagt

SEQ ID NO: 17436 - DNA, 513 bp, Glycine max
  unsure (1)..(513): unsure at all n locations
gcttatatgcaatgtgatatcatgttagtgtaaaattacatcagatgcttatgagtacataacaagacacgccacacaatgggtatgtcaaatcacttttactaagtaaaatcataaggtgaccagtcatgatcactctgttttgcaagaatgcaccaaccatatgggatcaacatagacttaaaagagcactcaaatcaagtgtgtttactctcaaggcttaaactctgaagaatacgttagggccttacctttctggttcaggtccaacccttaaaacaacttttgcacgccgatattgctcatgaattatacaatatccacaacttcacacatattttcatacacatttaacacaatgcactataatttaacacctcanggtcctaacttagaatcctacacttttctttaacatctcacgcattgcgctacaaattaacacctcaagttcctaactcgaacctacacttttcttttacacttatgcataacatgtttctcaaggaaaca

SEQ ID NO: 17437 - DNA, 327 bp, Glycine max
  unsure (1)..(327): unsure at all n locations
tactaaattttcgntagactaggacataatttaagaaattcatcaaattcaggaccaatataacgtgtgcaggtaataggttctgtcacatgtgcattcctctggcagcgaattccacgtgtatgagatacgtaagataaagtgagtgtcccctttcttttcttgtgtgcgttaatttggactagagtcacaagaccattgaggaagaagcctctccggcgatctgaggtttccgatggcggagcaactccgcaagacgacgctggattccgggtgggtcgcggcgaggtccacaaaggtccaattcaccggaacccagctcaccac

SEQ ID NO: 17438 - DNA, 581 bp, Glycine max
acctgccgcatgcaagcttcatcctcctctttgtgacaatcacttgctttttctcatcattgttttcagcatcatttcccaaagggtactcttcatgagtgacacgacttgtagtactagactttgttgtttgtttttcgaataaattctcggattgaggcacaatattgatattgttctttggtgcaacacttgttgtgccaatggacttgtttctcacacttgtcatgcttctcaaccttcctttccctaagtgatgctcgcaaagagagtaacccaccaaggtttgttggcaacacctccatcctctcccatttacacgactgcaccttgaaccttccattagtgcaccaccccttaccctcttcttaccaacgttttcttgttcgggttttgttgctcttgttgccacctcttcctcgatctctcttacctcttcttcctcttctttttctttgctgtcgtcttgcctcgaacatttctgcgttatctttgccttcattctcttccgctttgtttcaaatctttgttgcgctgtcatcattgtcataataattgtatcatcttccggtgcattctcg

SEQ ID NO: 17439 - DNA, 814 bp, Glycine max
  unsure (1)..(814): unsure at all n locations
ggggattgacgtatcatcatgcgacactacgaatactttgctaatttttacattatctctatanaaatacctttggatattaatattagtattttattaaataatttaagaaaaaatcattaagaatattggattgtaatttagttatgaaaagttacaaaagatatttaatttttaccgcacatataagtttaatacggatattacccacaaatagaagtgggtactcaactacgatccaatggaattttagggcagtctgtcatacccttatttttgtccgggaccatcattttgttgccatgcgaactctgcttgaccacctaaaatggttacacccatggtgtgtaatctgtaagtctcgcaacattttgaagtaaaacaagcattgttgcacattctgtaaagtccgcaacattctgaagtcaaaaaagcattgttgcataatccgtaaagtcccgaacattacggaggccaaaaagagtatctttgtgtaatctgtaaagttctgtgatgttttagaaagaaatcgatctataaacacaaaatgggggtgtattagtaaaatgagtgttgaaatagcaatacccaatcgggcccttctagaatattctggcacttacttgttaaaggtggagcaacctaactcgcttggcgaagctggcagcaaccacttccccgatttgcaaaaattgttttcggactccgtatgctttcgaaattcctgaaacttggataaactattcacttggtttgtgaaaggaaaagaaaaaagaaatgaatctatttgttcgtactttgcgaataacaaaan

SEQ ID NO: 17440 - DNA, 894 bp, Glycine max
  unsure (1)..(894): unsure at all n locations
gcacgcatcctcgntacactttctacgtatacccatcacgcactcacactaaacctgtcccccnccaccnaccgagttgaactggtcgtcggacncggaccctaaaggaccgcggctgcaacttcaatgggccaagtgcagaaaatctaaattttgtatgacgaaggaaaaacagaccttctgaggcccgaaatgctaccacaggatcaacgaacaaccgaagggggggacggagaagatcaaacatatgaggattagcagaagaaccattacgccccaaggaggaagcccatgagagcttcatggaagacaacacgggatattgaaggttcattccgaaaccggaggccgaagagactatcaggcgaagaaactgacacacaaatacctaaggtcctataaaacttgaggacattggagacagaacctgattaaagaggcgtacctgcgccgctactcggatacgagcctgagcaccaagcgtcacagcagagacaaacaccccgagtcccactataactctgcaacggaccccgacacgggaaaggtaacccccccataatgcaagtctcaaagaaactatccaaaaacgaaccctacaagcacagaaatctaatgtaaagagacaggagacccaaagggcgtccccctgaaactcaagcttgagggcaaatccccctccagcgacaaaaacactggccgcgggccaataccaatgggcggtgcgagaccgggcggaataaaagagggggtctcaacgattctttcataaaaaacgaaatagggacgaaacatacttaacagcccggtacccggaatccaccagaagacgaccggtatccgtaccgtcaaaatacatgaccgaagaacccgtattctcgacccccgactccc

SEQ ID NO: 17441 - DNA, 561 bp, Glycine max
  unsure (1)..(561): unsure at all n locations
tttagctagacaactntntattactatgttttattttctatatttttcttccatcttattcttttcttgctcgctctctttttgctcctttttttccatgagatattttgctacctaaacatacgtatatttttgtgaggtattttgctatatacatgcgtgtccaaggtatcttgctacctaaacatacatatatatgttttgtgagatatttttgctatatacatgcatatccaaggtatcttgctacctaaacatacatatatatattttgtgaagtatttttcctacatacatgcatatccaaggtatctttctacctaaacatacatatatattttgtgaggtatgactaccttccgagcttgtgcttgttttatttaaattcctaggatcatgagcaactaggtgtgtcctgctatgacttgagaaacaaaggtgatcaaataacaagcagagatttaaaaggtactaggttgcctcctagtagcgcttctttaacgtcttgagctggacgcctgatggcttgtcggtcacgaacctagcactttgcatactttt

SEQ ID NO: 17442 - DNA, 542 bp, Glycine max
tttggaattgcgaaagccccactccatcattatgattatttcctgacatctcaaacaaacaaatcaaatgtaacaagacaattatagttgctgtttgaatacctcacccgctcaagtgtatcacacaatgatggcttttctctaatgaaacaatcttgccttttaccactctaattccccttgagttcttagacaattcaagagattatggccacaacaaagaacaattcaccaatatgcgtaaggtaaggctagagagacaaggaaaaggttaaccaagaaaaaggctaacaatgtttttaggcgcaaatgaaggaaataaaattcagaatttatgaattcaagtaacaatccttcatgcaaccaatatattaccttaaagagattttttttaaaagttcttcaagcatgaaccattcagcccaattttttttttttttaattttgcttatacgaaattctgcttcttttggttttatatcaaagagatcaaaaggcttaacttttgcaatggttcagcctaaaaaaaaatatatgaataa

SEQ ID NO: 17443 - DNA, 497 bp, Glycine max
agctctgacgatttggtctttgccagtgaaaggatcgatgtgggtcttatatattgcaaatttgatcatcctactaggacgactgagaaaactggggcaaataaagagggtgaagatgagggagaaacccatgctgtgactgccattcctgtacggccaagtttcccaccaacccaacaatatctttactcagccaataacaaactttctccttacccaccacccagttatccacaaaggccatccctaaatctaccacaaagtctgtctaccgcacttccaatgacgaacaccacctttagcacaaaccaaaaacaccaaccaagaagtgaattttgcagcgagaaagcctgtagaattcaccccaattccagtgtcctatgctgacttgctcccatatctacttgataattcaatggtagccataaccctagccaaggttcatcaacctccatttatccgagaatacgactcgaacgcaacgtgtgcttgtcacg

SEQ ID NO: 17444 - DNA, 106 bp, Glycine max
agcttgtacataagagggcaaagaaagcagtcgttttttattgatactacccaaacccacaaattgacttggaaactgacggacgtcgattacaagtcgatgttca

SEQ ID NO: 17445 - DNA, 163 bp, Glycine max
acggggcctatgcaaaggccacgccttatgcgaaacaagccggcctatttattttcgccaagagttgccaaaattacctgcgtttgctgtcttagacagaaagttcaaacgtgtgtaatgttgtcagatattagtctatgacactaaagaaaatcggactgag

SEQ ID NO: 17446 - DNA, 429 bp, Glycine max
agcttcagttctttgagcaattgtttgagccaaaaaatttcactattgactgaagtcgtggctcaatactctgcttctgcactgtgtattgtgccacattatgtttcttaattctccaggaaatctagttactcacaaataagaatgctctacccaaaagtggatcccctatcaggggaagaacctgcccaatctgaatccgaatatctcacaactcgagtatggcctttatcttcttacctattgcgtcacctctatccctatgaagtaacagatcttttgttcgacaatggtgacataggtgctgctttatctgggtgatgccatggtgatcactacctgttataacaatgttggcaacataaacaactaagtttttgttacatagtctcaacagatgttacctttcttaagcctatttcctttttt

SEQ ID NO: 17447 - DNA, 512 bp, Glycine max
  unsure (1)..(512): unsure at all n locations
ccaccaccaccaccttcttagtgtttagtttattattctcttttcttataagccgngtatttggctataatctttcggctatcattttctgcactttagttatcttttggcatttggactttagtcttttatgattagattctatgtggttttgaattatgactgtttggattatattttggttatgacttatttataatttgcttatgtttggttacgacttatgattgattttgtccacttaattatattatcttgtattgattaccacgcactttggctttttgatgttgccaaagggggagagaaatggggtggtataaaagcttacaaatcaagtgatcatcaattcccaaacatagggggagtataaaatgagtgaacgccatatatcatgaatatacattacttgttttctggattcacgaattaaattgtcatcatcaaaaagggggagattatagaaagcaagactttgtctttgatgtttgatgataatcctgatgatttga

SEQ ID NO: 17448 - DNA, 565 bp, Glycine max
agctttagtgtgttcttcgggcttctatgcgaaacaaagtaggagaaggatcaggaatacccaaacaattcaccaaaaaaattaagctttgaaagaactacaaagaaatcgcacgtgttgtgataaaaatcactgctgttttttagataaaaatcaaagctttaatgtgttttcttggggcttctatgcgaaacaaagtaggagatgaatcaggaacacccaaacaattaaccaaaaaaattaagctttgaaagaactacaaagaatatgcacctgttgtgataaaaatcactgtttttttagataaaaatcaaagttctagtgtgttgttcgaccttatctatgaaacaaagaacatgcaagataagtttaagcaaagtagcatcataaagctttgaagaagcatcaatataaatgcacccgtacttataaaaatcaaaaaattgaagttttagtgtgttcttcgagcttctctgcgaaaccaaaagcatgcaagaaaactttaagcatataaaactacaacagatcggaatgggaaaaaatgccccgtactcatcaaaatcgt

SEQ ID NO: 17449 - DNA, 545 bp, Glycine max
tgaagacgtgtaacccaccatcttctcatagtaggacaccggttatgtgtctactatcattgttatcaactccctctccattattgggggcattacttgagcttccatatcctttcacctttgggcatacgctttgaaagattcgtgctcccttttgcacaagttctatagctgcatcctatttggagccatatcagaattgtactgatactgcttaatgaagacaaccattaggtctttccaagaagggactcgagaaggtttcagattagtgtaccaggtgacagctaccctagtaagactttcctggaagaaatgcatcaatgacttttcatcttttgtgtatgccctcattttcttgcagtacaccttcatgtggttcttggggcaagtagtccccttgtacttattgaagtcgagcaccttgaactttggagggatggcgatgttaggcactaagcacaattctgccatgctagaaaaagcataacttccacccccttcaacggctccaagcctttcctctatatgatccaacttccctt

SEQ ID NO: 17450 - DNA, 90 bp, Glycine max
gatgacgaccaccacctgttggttcggaacaacatcaaagcatctcatgtctagccgcataatctttactatcccatggtgatgccatta

SEQ ID NO: 17451 - DNA, 361 bp, Glycine max
tagagcttagctacacatacctctctaatagctaagctcacctccttgagatgagaagctagagcttagctacacaccccctataatagctaagctcacccccatgacaaaaaacatgaaaataataaaaaaaaagtccttattacaaagacaactcaaaatgccccgaaatacaaggctaaaaccctatactactagaatggccaaaatacaaggcctagacgaaggaaaaacctattctaatatttacaaagataagcgggctcatacttagcccatgggctcgaaatctaccctaaggctcatgagaaccctagggcctttccttggatctctagcccaatctacttggagtcttcta

SEQ ID NO: 17452 - DNA, 530 bp, Glycine max
ctgcagctgctctcatctatcttcccatttacctttttttttgcgctctataactccatgctcctatcaatgctcctctacggcatgttcctgaacgcccccattgggaaaagaggttctagtgctgggggcctagggttagggtttgtgagagatgttggatgctccatgcattgatgagtcttatcgcatgctgttggaagccattcgagcacagtgacgacgtcgttaatgccgccgctggaagagaatgcaaggatgacctcctttggttccgtgacatcggaaagtttgccatcagcgatttctccatggccgtcatccaagccaaccaagtcgtcgatgaccatttttgatgctaagccctttccaatgacaagctgaaaagaatggatcactccattttttacctttaccttcttgtttcatctttttttattttccctttggttctgaatgttgtctatgccagtaaaaaggtaggccggttattttgcttggtaattagtatctggtttgtatattggtat

SEQ ID NO: 17453 - DNA, 504 bp, Glycine max
  unsure (1)..(504): unsure at all n locations
tttattgaaaccccgtatatcaatcttgattaccctttggccatggaattaatggaagtctatgagtccatgggcgacacattagcctttcaatatgggggttctgcagcacacaataaggtaatctctctaccttctggagtttggactttatggattatgaaatgtaatttgggatcagaatttctgcacataattattttatttaggatttgcatgagtttatcttaagcttaacattgaatacagaatgacataagttaatctaattctgaaagcttattgcttttattaggatgtctcgaaatccaataaaaatatgccttttatttgattcccaatcttctacggtagggtttaatttgttgtaagtttggttaattctatggatgcagttattacatcacatgattcttgtttaactaggtccctatacttttaaaattcataactgagattangatatgcctttcaagtttagcatgtgtaatttcttttcttctt

SEQ ID NO: 17454 - DNA, 548 bp, Glycine max
  unsure (1)..(548): unsure at all n locations
agcttagggttcgagtcaatcaataaaaaacaagctcaacatgggtgcaagggattcaacattcataaacagtgtaagctcttttggctaagtgactatttcaatcaatcatggcctacatcatttccaaaattcatgcattcattcagtattcagagatttatgcaaaaatcaatacccaatgctagtcattctctcacaattaaggatcacacaactcaccggattgtggctaatgattaccttcacaatttacctgtcaaaccaactaacatttttagtcatgctcctaattcatgttctttatcttctaattaccgcatactcattcaaagcatatgatctaatcattgcaattcactcaattcatgtaattgatcaatccaatttcattcacaaacacacaatttccaaatcaaacaaaccactgcataaatcagactgtanagtgttcaacaagcttcaaaattgctaactaaataactgatataanaatgaaataaaagcataaataatcataaaatgtattaaatcacgaaagtgcataa

SEQ ID NO: 17455 - DNA, 408 bp, Glycine max
  unsure (1)..(408): unsure at all n locations
ctgaatttacaacgntccaattgattgcaaaatatctcttatcgattacaatgttttggtaatcgattatcagtgtgcttgaacgttgaaattcaaattcaaatgtgaagagtcacattctttcacaaaaaagctttgtgtaatcgattaccagggattgtttctgaataaatcaaaagatgtaactcttcaaatggtttttgaatttttcaaattgggtttaagtttttctaaaagacataactcttctaaatggttcttttgaccagacatgaagagtctattaaagaaaggctgtgttttgcattttcaatcaatccaatctatcaatctatacatttgtcttttccaattcattctttacacaagcatgtgttccacattgatttctgagtctctttgaacttc

SEQ ID NO: 17456 - DNA, 519 bp, Glycine max
agcttccacacatcatttttctggttttgcttctgaatagccatttagcacctactgctttctttccttgaggttctagagttgtaaactctataggccttagatattttaaagtatccaagtattattccattatcacacttagagtcaaactttcccaagttgtctttaatatttagaatgaaacattgacatctgaaaggatggaaatatgaaatgttgggctttcatcctttccacagttgatgtggagtccttctcaaaataggccttatataaattatgttttgtaaataacatggagtattcacggctttagcttgtaagtgtaaggtcattaagcatggttctggccatttcttgcaatgatatattctttctctcaatcacaccattttgttgaggtgttctatgattagagacaatatgaagaattccattttctttacagaatagatgaaagtattcattctcaaactctcgatcatgatcacttctaggtgaagtaatgcatactat

SEQ ID NO: 17457 - DNA, 538 bp, Glycine max
  unsure (1)..(538): unsure at all n locations
tgggaacatggggttttagggagaacatttaggaactaatttttttaatttgacccaaacattaaatcaatttttaattgatttaaattaaaattaaaattaaaaatttccctattgtcaatgaataaaaaactaaaattaaaaataaaaacccatttgttaagtatgactctgtcacatcatcaaaatgtatagatggcaagaaaaacattggcatgagctaggcacgtgatcagacaagtagaaacttaacgttgcaagtgatagtaaggatgaaaacaatggacggaatacaagtttggggatgttgatgagtctccaaaaagtttaaggaccaaaaccaaaaatgttgaaaagatagaggactaaaaaaataattattcctaaaaataaaacaaaagtcttgatcctttcacaaaanaatattttaccttaaacatactttttcacctgatttccaatatatgcattagatcaaacacacatatcaataaaccaaatggatatgcagctacaaactcaagttgcaaccttatat

SEQ ID NO: 17458 - DNA, 334 bp, Glycine max
  unsure (1)..(334): unsure at all n locations
gacctgcngcatgcaagctttctaaacttcggtttcagaactgtatttttctttctgtggaaattcnacagaaaacaaagatgtactattttttgttccttctccttcttgccaaaagaaatcaaaggactaactgcctgacaacacttttgactcttccctctccctttttccaaatgaaaacataggactaacagcctgagaaatctcttgattctttctcctccctctggacaaaacatttcacaggactgaccacctaagatatcttttgattccacttagcaagactcaatggactatcagcctagcaacttatttgtcgtaacacatt

SEQ ID NO: 17459 - DNA, 666 bp, Glycine max
ggccatgatcatcatggacaccccaattttagctcaccccattttttttcagggtaaaaatgagcctttcttaattttattaaaacccagcctattggtcatggaagatgggatgcgattgaatgctcttcaaagcacttgttaaatcagggttaacactgctttaaatcaaggttgccaaattctggatcttttgctcaacttgtaaacccatagtgactaattcccatgctgagactcttttggaaattttagtgtaataaagctttgtatgcattgttaactgctttgatccctggggaccagatttaaggtgtggccctgtgtgccaccatcattccagatctcctcccctcctgtccggttgtttcgggcctggcccacaaaatcaggcccaatttgttttccccaggtttggtagaaaacttttctttgtctgtttttaaatcacctttgccccacatataaaattccagttttacctttccataaaaaccgccacaatggttcccattcgccttgtttttccccattatgtccgccggttctttttcttttttttaaacagcccttcgccctaaccctcccttgtgcccttttatgttttcttcactttctaagcactatgtttttttttttttataaaaaacttctttttttgtatct

SEQ ID NO: 17460 - DNA, 497 bp, Glycine max
  unsure (1)..(497): unsure at all n locations
agcttcaatggatcttacatcatgtggtatcagagcttctattaaataaaattaaattgaatttctagaagcccaatccaattaaattttagagggggaggtgagcatttggttactacacctcattgccacattatatggtcacacgttgtgcatgtccttcatgctttacatgcctcatgccacctaagcacacttagtggagaatcttggaattgatcttggattagtgggctgaaccataactaaaattcactaatcataattagtgaaattttgtctccaaagtttgggtccacaaattcaatttcaaattcaagtgaaatttgaattgaaattcaaatttccctccaattttgtgtgacacttaggctataaatagaggtcatgtgtgtgcattttttcaactttgatcatttgaaaaataaactntagaattcaaagctctcttagagcacaaaatttcgggctcttctctccctctcccttcattcata

SEQ ID NO: 17461 - DNA, 335 bp, Glycine max
gcgagattatgccaccatatgatatgaattgcttatttacattatgaattaatagttcgactctttaaagcaaacagtacggaacctctatcttaagatagcgcactcaacacatttaatggatttgcagtcacactatgtagcacctacttttgattgaaaataatgtcgttcaacacactatatacgtgttgagtgtcatgtaaatactaagacgatgtgaagtgtatatgatacatgacgcgtgataacatgatgctctgggattataacattatgagtgagattgactgtgccacactaattgaactttcatgaaatgtctgatacatgtg

SEQ ID NO: 17462 - DNA, 489 bp, Glycine max
  unsure (1)..(489): unsure at all n locations
agcttagtgctcctcataaaaatcaaaantagntatttgaaattacttctattttaataacaatattggtaaatatatagggtaatatgtgatcaaatatttggcgagacatgaaatttataatacatcaataattttgaaataaaaaaggattaaaacattaataatttcgaagaggaatgagtacttagattagaaaaagggacattatttaagtttaaaaataattcttatattttgtcaaaaataaagttctattacgtatacatgaatggagacattttaatttgtaaatgactaattattgccccgattctttcgcttggatttcatcatcctttggtctaattaacttataaaactaagcagttgcaatcatatcctataattacgccagcctgatgatcataccattattgtttcttaggtactaggtaccaaaaaaaatatattgacagttttgagttctactcaaatataattctacta

SEQ ID NO: 17463 - DNA, 443 bp, Glycine max
tcctttctcatgcacctatccactccaatcctgctcatttatgaaaccaagagtatcacaccaataacagtcttatagattttatcgttctatgaatttcactgttgtaagaaacgatcttgtcatttcttctaataatgatgataatgattagatggttgtgcaaaagaaactagatattgagttcttttgtgatatcatcaattaaataagttaagaacatagaatatcaataacaatggtttaattaaccatgcaagtccaacacaggatcatatataagatcaacttaatttcccaaatgaatgaatcaagagaagtttgttgatggggaaggagtaagtaaagattacatatcaagagggtttaatttcagtttgctaatgaggaacggagtcacccaattggcttagcaagagggccaagtccatgcctcttatcat

SEQ ID NO: 17464 - DNA, 825 bp, Glycine max
  unsure (1)..(825): unsure at all n locations
ccacaccgacaaccccgaccgaaccccccaacccccaaacgggcccncccgnaagggtgaactgacccgacccggcccagaaacgcggcgccaccnaaccagggagcaaggtggacttgaagacacaccgggacagccagacccaagaagacccagacaacaggcccccccccaccaaaggaacgaaaacgcaaaaccgcggcaaaaaccagggcaaacccaaaaaacgggcgcacgcgggacacaacgccaaaaggcaaacaccggagagaccaaaaacccaccgcgccggggccaaaaaaaaacggagccgcaactaaagcgcccacaaagaaggccccgcaccgccaaaaccaaaaaaggcaaacggccacaacccgccagaggacaacacaaaaaaggaaccccgcccaaagcggacccaaccaaaaacccacaaaaaacacccaacaaaggcggccaggagagaccccccaaaaccccccccccaaacgaggcagcccaacaaacccgcgacgacaaaaaacaatccaccgacccgagaaacaccagagggcaggcccccgacaccacaaccagagacacccacccaaccggggagggacgcaccaagcggcgggcaccaagaccaaaaacaaaccgcaacccgcaccccccccacaccgaccacaaccgcgaaccgagcctccgaacagcgggcacgacaccacaaccccaccaacacagccgcgcagcccgcacaagacccaaaaccacacgcgacaaccaaccgacacagcgccggcccaaccaacccaaaccacggtaccacaccacccagacgcg

SEQ ID NO: 17465 - DNA, 507 bp, Glycine max
  unsure (1)..(507): unsure at all n locations
cccatgttgaatttgcttacaatagagctgttcatagcacttcttattgntctccttttgaagttgtttatggttttaacccactaactcctcttgatcttttgcctatgcctaatgtttctgtttttaagcataaagaaggtcaagcaaaggcggactatgtgaagaagcttcatgagagagtcaaagatcaaattgagaggaaaaataaaagctatgctaaacaagccaacaaagggagaaagaaggttgtcttcgaacccggagattgggtttgggtgcacatgagaaaagaaaggtttccgaaacaaaggaaatcaaagcttcaaccaaggggagatggaccatttcaagtgcttgaaagaatcaatgacaatgcttacaaagttgagctgcccaatgagtataatgttagttccaccttcaatgtctctaatttatctctttttgatgcaaatggagaaatcgatttgaggacaaatccttctcaagaaggagagaatgatg

SEQ ID NO: 17466 - DNA, 413 bp, Glycine max
ctgattagtataaccctttacttgtttgtaaaggagaattggacgtagctctttttgagtgaatcagtagaaacctaagtgtttctacttctttcataagctattttattggtattctcttgtgctagttttgatacacatcatcacacaaaattgcacttgaaaaatctttgtgaaaactttgttttatcaggcattggttgtttttcactcactgaatgatactttcaataacttggttttatcatatctttatgtgaaaactttctttttgcgaaaaaacattatatttatgtaattcactattgaacccctccatctagtgtgatatttgttatttcagtaagcattagagtttggcctcactggttgagtatttaataatacagaggaaaatatccaatcaaagaaag

SEQ ID NO: 17467 - DNA, 383 bp, Glycine max
agcttgtcaaggattaataaacaacctttattattcatatctatgtaaatgaaagactagaaagtcatttggttgtcaatgccattattatattatctttaaaatgagaataacaaattgcaaaagaaaacattatcaaaagaataaaataaatgatattatgatattttatttaaaacgaggaaaaatataattatcttctcagtagctatgaaaaaggaaataaaatatttcatcagaattaagaaaaatataaatagcactgaaatattatttattatctctaaaaatcaaaccttatcaataaaataaaagcaattactatagtattataaaatataattttatactaaaaaaatatttgaaaaaaccaggggtaacct

SEQ ID NO: 17468 - DNA, 491 bp, Glycine max
  unsure (1)..(491): unsure at all n locations
atgttagactattgacaagtgtattaatatcgttacttttacagattttaagaagagatagtctccagagagacttgagttattcaattcctctagataaaaataatcagtttaatagttatgtacaaatttaatgaaatatcatggatttgtctaactaacgaaagaaaactaaagcaacggaataacaaaaatgacgaaatttagtgtgtcagaaatacgtaaaattaagaaaacaataataacaaatttaattaattcaagaaaaaattaggattggatttcatcgttcataccctcaatatcctaataatattaacatatatgaatcattttctaacattattgatgcacacattaaattaccctgaatcgacccctcgcactcgagaatcctaagaatatntaccgaatatcgatccctcatatatgaaataaatatctcaacattacaatcataatctcgtgctacttgcaatcaaaatgttatg

SEQ ID NO: 17469 - DNA, 541 bp, Glycine max
aggctgcagcttacaatctgttttagccagcccataaattttatatttctatataagataagataagataaaatctagatgaaataatatctatatgaaataaaatgtatgtgaggcagaataaaattgtctgctctcttccagtccaagcccaatttcggagtcaagcccaattacttataattctcctgacaataaattcacaacacaaaattaatccagtaggcccaaatgattaaattgcataattcatttgacaattaaggctaatcagttattaaaatggtgacaaacagggttaagaaatgtgagaaaatgatgacacatcagatcccctcacacttagccttttgtactcctgcgaaaaattcaaaaacaaagcgatggacaaatctagagacattgtagagaaacaaacagacacaactacgattacatatttctcaatgaatctcaaggaatgaaaagaatgggtaacatgcaacacgtacagagttaaagagcaagggcgtcatgaaaatcatccaagcatctcaaacat

SEQ ID NO: 17470 - DNA, 376 bp, Glycine max
cccggagtacgacagtcaccgctttaggagcgttttacaccagcagcgcttcgaagccatcaagagatggtcgtttctccgggagcgacgcgtccagctcagggacgacgagtatactgattttcaggaggaaataaggcgccggcggtgggcaccactggttactcctatggccaagtttgatccaaaaatagtccttgaattttatgccaatgcttggccaacagaggagggcgtgcgtgacatgagatcctgggttaggggtcagtggatcccgttcgatgccgacgctatcagccagctcctgggatatccgatggtgttggaagagggccaggaatgcgagtatggccagaggaggaacccgtctgatgga

SEQ ID NO: 17471 - DNA, 491 bp, Glycine max
  unsure (1)..(491): unsure at all n locations
agcttaagctccttcaactgcacaaggctcttaatatttgaagagtatccttgtggaaccttcacccgacgaagacactgacaaaaacttatcttctccttcttggacaaagtatggcaggctgggggcaagtaaattttcttcccatcagaccttggatgcaactgtgatcttatacccatatcagctagatcttgacgggtattcaagccatccttcgtcttgccttgaatgttaaggagcgtcccaatcacactgtcacaaacatttttctccacatgcataacatcaatacaatgtctaacgtcaagatcactctattacggaagatcaaagaanagtggacctcttcttccatatgcaactctgactattatccttcttttgggtcttccaaatacagtgttcaggtgttgaacctgctgatatacctgctcaccagagaatggtatccgcacaatatcatgctcttgacttcattaaaagctttc

SEQ ID NO: 17472 - DNA, 573 bp, Glycine max
  unsure (1)..(573): unsure at all n locations
cattctaaatacagagcatccttgccttatataagtagaggacttaacaaaaaaaataacagaataaacttccatatggatttcagtcacaactcaacactaacaatgaacatagaaaataaggtaaaattgtacaagttgacattattttttattttcactgttaacaaaattaactaaatattgagatacattcataaactgcgcaacacctgngtaaacatctagttattaactaaatatagagatacacttgattgtaaatggaatcgctactagaaaatagtcttttaaaatcggttaattattaatgacttttaaaatcgatgttgttttctgctcaacaacatttgtttctagaagaacggatgttgtcatgcattcacaacattgatttttctaaaaaccaatggttgttttttggaatttattttaatatcttgtctgttttttttttttaaattacctcanacttacaaattgaaaaacataactagtccacatagttttcaggcaattcaaattttgcccaaaataattgaataattagtatcaaataaaagaaatgtttaa

SEQ ID NO: 17473 - DNA, 421 bp, Glycine max
agcttgaacgaatataagacacatcttcttcaaccttggtgattcttgactccatctcattgaagcgcatgtccacttgtaattccaaactgtcaaacctttctccaacaacggtttgaagaccatcaaacctgtccaaaatctatggaaaaaaagatgaatcttctccatgatgtccttcttcaccaacatgtcgagcacctttcttcacccaagagccatcatgctctttttgataaccaaaggatgcaatgactgaagtgcctattatgaaggatctcttgattagaacataaggttcaaaatcaatagggatgttaaatgtgtgaaggaagacagtgactatatgtgaaaatggcaatggagcattcaatcgctatgccttatgcatgcaatatctaacaagatgtgcccaatcaat

SEQ ID NO: 17474 - DNA, 418 bp, Glycine max
ttcgagcgtctcgatatgttaccgggacgcaatgattacatcccagtaaaaagttattgtcggttgaattggctgagatcttcaacaattaatttccagcgtctcgatatgttacggtactcaatcagacatccgagtaaaaagttattgtcgtttgaattaactcaaagcttcaacattcaatttcgagcgtctcgatatattacgagcctcaatcagacatccgagtaaaaagttattgtcgtttgaactagctcagagattcaacattgaatttcgagcctctcgatatattacgagactcaatcagacatcccagtaaaaagttattggcgtttgattggctgagatcctcaacaataaatttccagcgtctcgatatgttacgggactcaatcagacatccgagtaaaaaagt

SEQ ID NO: 17475 - DNA, 559 bp, Glycine max
  unsure (1)..(559): unsure at all n locations
agcttctgcatgtctatagagttctagagagagaaagtgtcttagttccagagagtttgagagattttgttgtgtgaagatctgcagagaccagagcttgaagaagaagccgtcctgagagcttgagatgagtttgtgagtgattgtgaggtcctagaggtggaggagacatccccactacttgtatttctgcaatttctcatcttctcttctatttgttttaaaggatgcttcccaattatggaaagttaaatcctctgttggatcttccttgtaggtacttgatgtaaatatcttttttatttatttaatgatgttttgtgtgttcactgtgctatcagaacttcattctaccatgcttttgccttgatcacgtagatgcatgtgtttttaggatcattcaacagttgaaactggtctgattcttagaacttgataggacgtagctagtntgtcgtattgtcacgagggatcggngtacggtaacctagctggtgtttgtttgtcttaatggtggcctggccaagtttagtccaacaagaggaatccgtggatgatg

SEQ ID NO: 17476 - DNA, 505 bp, Glycine max
cctatggagactggatctttgagcttcaatgaggcccttattggtgattttccatcatggagatgcagtggaagataaaggataagaggtgagatgaggcaccatccactagggaataagccatggaagaagaagcttcaccaccaagaaagtaccttggataagaagcttagagaggaagcttcaatggagaaaaagaaatagaaaaagaggcagaaggaggggagcatgaaattgaaggaagaaaagagggagagaagttgaactttgaagtgtgtcacacaaaactctcattcatcaaagttacaacaagtgttacacatgcttctatttatagcctaggtagcttccttgagaagatttcttgagaaactatcttgagaagcttcttcgagaagcttccttgagaagcttctttgagaagcttccgtgagaaggtagagcttaactacacacacccctctaataactaagctcacctgctttagaagctttcttgagaaga

SEQ ID NO: 17477 - DNA, 512 bp, Glycine max
agcttatcactccaagggtcagctatgatgtttcattggatggagaaaaaaaaccttctatgagcacaatcaccaaaactcactctcccaatgaataatgtccttcgagaagaagaggaaaagataagcaaaggtttttggagaaagtgaaatctggaatatcttagggtttagagtagtttatgacacttgaaagtctccctctcacacctaggcttctactatacacacaacaacccttcctctcataacccaaaagtcaatccatttaagctcaaacacactaaaactcactaactcacataaaacacatataatcaagtcaacaagcacattaattaattaattttaaacacttaattaaatttaatttatcttgttattaaattaaatcacttatacaacaattaataattaatctcgacattacatttggattcctctcattcgagtctgtatttgatttattcatatatccctcatgttggaaacatgtgaagagtcatgttagt

SEQ ID NO: 17478 - DNA, 526 bp, Glycine max
  unsure (1)..(526): unsure at all n locations
tgcttgtgaagcttctatggaggctggatctttgagctttattgaggtgcttcaatggtgattttacaccatgaagatgcaatggaagatacaggagaagaggtgagaggaggcgccatccactatggaataagccatggaagaaggagcttcgtcaccaagaatgtgccttggataagaagcttggagaggatgcttcaatggaggaaaagaaagagagaggggggagcacgaaattgaaggaggaaaagggggagagaagttgaactttgagtggtgtctcataagactctcattcatcaaagttacagcaagtgttacacatgcttctatttatagactaggtagcttccttgagaaactntcttgagagaacttccttgagaagcttctttgagaaaacttccttgagaagctagagcttagctacacacacgcctctaataactaagctcacctncttgagaagcttccttgagaagattcctaaagaagctagagcttaactacacacacctctctaata

SEQ ID NO: 17479 - DNA, 696 bp, Glycine max
  unsure (1)..(696): unsure at all n locations
gatgcttgggcgatgacgtcgtganaaacacannganggatggaagcttgcaacttggccaacggggagagaggtggttttttttgtccgaggacccccgggcggtccggagctcttagttggtgcagacacttcactcatgcaacaagcacttaaatcctgcgggtctgtggaggcccagtcatattataaggcgatcttcttgcataatgttagacttttcaacacaaaaactttttccggtttgatatgaacgatgcttactgaaagctaccacgagggcatcagtttaccacccgtcacttacaatgttttcgatggcgaggggaccgaactattggaaccggatggacttcatcttcagcctatgcacgaattatcttgggcggcgtatgggcccttattacggcccctaaaggaaggtgcgtccctctaggtaagaatctttatcagggggcctggatccggcagtatcgttcccaaataaagtagagattgtccgctcaaaaggcggtcatcgacggtggagcccagtaaggaacccataacttgtcgtctgccgtccccccatcctgtctggagctaatggctgcccaaatcatccccaaggtcctgctgcccctataggcgaacgaaccagtctccacctgtaccagcatttaactgtaggtttgtgtgcccccaacagcgccctcc

SEQ ID NO: 17480 - DNA, 212 bp, Glycine max
ttggtggaacgactaacatatttcataaacctttaaggaataagcaggtatcccgtacaacccatcttccaattatttgagaaacgccgaaatatggtgatttactcaaaacaaaaaacattatttttccttgaaaagtgtcacgggtgacccaacaaaattcgatacgggtttttgaccccgaattggtgacttcttaccgccccagttct

SEQ ID NO: 17481 - DNA, 519 bp, Glycine max
  unsure (1)..(519): unsure at all n locations
agcttctcaaggaagtttctcaaggaagtttcttatggttcttgtgagacacacttcaaaggtcaacttctctccctttttttctccttcaatttcgtgccccccctttctctctctcattctcttcctccattgaagcttcctctctaagtttcttatccaagacactctattggcgtgaaactcctccttccatggcttattctctagtggatggtgcctcctctctcctcttcttctttatcttcctcggtaactccatggctgaaaatcaccattgaaggacctcattgaagcttaaagatccagtctccatagaagcttcacaagcaagcttccatcacaaggtatgcgatcctaatttaatcctccattgtttgattntagcaagacaagcatccataagcaaggagatagtgaaaggatggccaaattcgagaaatacatggagatgatgcaagagaaaaaggaggaaccacctattgaaaatctcacatgggatgtgctacatcaagtaag

SEQ ID NO: 17482 - DNA, 476 bp, Glycine max
gctacctgagctaagcgcattctggtgcggcaaataccatacttattatattttttgaagggtatggggccgttaagcgcgaaccttgagaagcttagcacaaatccttgcagcaatggttaggattagcgggcgcttgccagctaagctgattatgcaaaagctaaatttctacaacttccgctaagcggcctcacatgtcactaagcggtagtgtgtttttttgtgaaggccagctaagcgatttgtgtctcgctaaacgcataatgactttttcaatttactttttcagtctttgaacttgaataaatatggtctaagaagttttgagttctttttagttgtagatggcatcaagaaagagggctagaaccgatggcatcccttcatcatccattccagctcctcagtcagtagccataggaccagatgttcaacactcgcaaaccttagtcgctatgcttcaaagcttattt

SEQ ID NO: 17483 - DNA, 430 bp, Glycine max
agctttaggtccatttacagaaaaaattatttgctatttgtttttattaagcaaagaggcctcatatgtgttggcaacaaattcatgtatgctggcaaaagaacttactatataattatcacatttaaaataaaatgtttgtcttaatttttgctttacgtcttactttatgttggatcggccctgaattcatcattaaactgtagttcacagaaagaaatgataacatgcatccatattggtttaatctgtgttcaagaaaatctaaccaacagaccaatcatggctaacgttgcactcatgctaaatagttgttctctctcacactagtgcctacaaaacctgcattttttatggacaatgcaactagaagccttccaaaaatatcatgggaagttcattcagcggcaacaacagcacacaagtcggc

SEQ ID NO: 17484 - DNA, 557 bp, Glycine max
gcttgtattaagaaaatataatacaaatactaaataactgggtaatttctgttatgacattgaaataaaacaataaattttgatgatgaagatatgaggattttgtaaagaaggttgatggttatttatgtaaaatcttgaaaattagagttggtttggtagtgaatataaaattattgtagatttaattataatcctttaagcaaatgtataaacaaagtaacaactctttaaagaatacacatatatcacagataattacaaattattaatgctaagtaaataggtttaaattaaatcttgaatttatttgtttcattaagcacataaactcatgtgttaaattaaaataatttatgaatagctgatctcttttatactgctacgtactactcataacaaaaaatactgctacgtactacagccattcatatttacactttatattctttacttttttttagcttgaattaatttattatgaataaatatactggtaagttaatatttgtgagaatattctgtgtaaaaaaaatatcgaaaagtaagttttgatt

SEQ ID NO: 17485 - DNA, 819 bp, Glycine max
  unsure (1)..(819): unsure at all n locations
ggatggattgtncatgagaacttgggacnccccancntctgaggcacccgccgcttgcagctctccgccagaagcgcagaagtttttgcttttttcgaggagacaacgggacgcatatgggatcactcattctgtaatcggcacttttaatgcatgcacattctgtccgggggtgggctccctggggggctgctgctcaaaatggagttgcacacaagctgtctcggaagcgagtaagcactctcaacacgcgggggaaccatagaaatggcctgtactcactctgaacattagggttcgtatctacacagcccaaactatgccacgagaggaagatgaccggtaatgatatatctgttcatgtgactgccaatgcgcagatgaacactatccaccctccctcaaagccgtctcttttcaaaacatccaaaaaactctgtttatctgaacatgaggagctctaccatgctatgtagagccggccccacttttcaagcggctgacatgatttagcctaccgatcggtaaaaaagatgggtttttgggcctaatccgcagggggtactccgactgcaatgtaccttcccagttctctacaagagaaagtgcgcgatacaggcgtgtggcatgaggaacccctaaatttgacagagcactcgccatactaaaatttaccccctatttgcgccgcctcctaccgtatccccctcctgggagttaagcctacgatggcgttcgtgaatatcggggggttctttggtaaggtggaaccatgcctcctcgcggaggaagacgcggcccagggttctatttgcgccc

SEQ ID NO: 17486 - DNA, 522 bp, Glycine max
agcgacctttaatctcagctttgtagatttgggatctcgagtttcagcattagccctgatgtttaataagaggactggtgttggaacctgaccagcaaagccagcatgtgagaatatcacggaagttaactcgtttcacttgctaaatccagatggaatgacagaactgaagtttttatcagccaaattcagtctctggagatgttggagactgaaaagaacactcagaatggagaaatctgccggagattgattctccatcaaggtcaaggccactaacatgtccctcattgtcacaagacacccctatccaccctcaacaatcatgactcggttctattttgtgagataaaagtgacagtgttcatgagttggagcagccaaaacctctgatcatcaagactgatgccagaaaccacatggatgtgactaccgaggcacaaccaatataatggaatcaccacaagtgctgagaactagataattgtcatcgctgatgataattattgagtgaatcctact

SEQ ID NO: 17487 - DNA, 474 bp, Glycine max
agcttctagccaaatggacttaccttgaattaatttctttgatagttcttttgagccttgtttccctttccttgttttgaagctcactacaagccttaagtgaaaaaccatgatatcaccatatccttaaggaattttggagctttggaattgttttgggaataagtgtggggggtttttgtttcattggacaatttgttttggtggctatgcttcatgatgtattttgggccatacttgatgtacattgtatattggataaatgttggacatgctgaatgaaatgttgtttctcaaaggctatagagtaaaaaaaaaaaatcgaaaaaaaaaaaagaaaagcaataaagttgagtgaataagatcttaaatggcacaagaatgatgaaactcttgggtctactcttcatgtttaaaatttatctttacttctttttattttcttatttttgcttaaaatgcacttattcccca

SEQ ID NO: 17488 - DNA, 489 bp, Glycine max
gctcgcccggtccttgcattgtgctgagtgggtaacatccctatgtgctttccctttgaaaacctgtcgacgacgacgaagatacacgtgttgcctttgtaagaaagtaatcccacgataaagtccatggataaatctttccatggctgtaccggtatcggtagaggactcaacaacccaactggttttctgttatcgtatttggtacactggcacgttaagcatcctgctatgaaggcacgagtatcatctctaatggaatcccatgtaaagttttcttgtaagcgatgaagtgttttttgaatccccatgtgaccacctgtcggagattggtggaattcttctagtaacaacttagtgaaggaggaattcgagggaatccaaattcgacctctgtgtaagatgaaatcattagttaacgtgtactctgggtgtgcttcggggtcatctttaatcttacgatataactccatgaaagctgggtgagat

SEQ ID NO: 17489 - DNA, 141 bp, Glycine max
ttggttattcacttccaaccgacgaaaactttttatgtttgatcatggaaaacgggggagcacggtggaacctaatccatattaccacctaccgctctttattggcattcggaataccgaagagccttctctaggcgggcg

SEQ ID NO: 17490 - DNA, 536 bp, Glycine max
agcttttggcacaaaaaagaagaagaagttcaaagagtattctatgtcttgtttaggatcgcgccagattgattggaaaagtatattgaaaagtaaaccaaagccttgcttttatagactcttcatgtctggccaagaggaccatttagaagagttataacttttagaaaaacttaaaaccaatttgaaaaagtcaaaaaaccatttgaagagttacatcttttgtgtgattcagaaacaataactaataatcgattaccaaatcagtgtaatcgattacacaaagcttttatgtgaaaggatgtgactcttcacatttgaatttgaatttcaacgttcaaaggcactggtaatcgagtaccaaaacattgtaatcgattacagctgtttgaaatcaattgaaacgttgtcaattcatttgaaaactttgtcaaatccattttgctattggtaatcgattacaacaatctggtaatcgattaccagagagtaataactctttggtaaacatgttttgagaaaaatccatgtgctac

SEQ ID NO: 17491 - DNA, 507 bp, Glycine max
ccgccctcaaaagaaaacaaagcaaaaggagaaaattcccgatctatttataggaagaaagaaaaaggagaaaattcccaattaaagagtgggagaaagcaaaaaagaaagaaaattcccgatcaaggatcggaagaaaacaaaagaaatatgcagaaaattctctggaccagacaatatctgaacaatacagaattgtcaccaagtaaacaagaaaagaaaggaaaccacgaactaaagtggtcctctccctttgattgccaaccaaaatcctgtgcgtcagtgacttgttcgcctcacactaaacaaaaacagaaaaggaaaaggccaaaaacactcaaagccaaatttcccaacaaaaaaaacccattccgaagaagaagtcctattgatccatgatcacgcatgtaatctttgatttgataggagatgatttgcaaaatcaagtcatgacatatctatggttcggaattaggacgaaacactacttcgagtgatttatttcta

SEQ ID NO: 17492 - DNA, 555 bp, Glycine max
  unsure (1)..(555): unsure at all n locations
agcttgcctcaaagaggtccaggaaggacaaggcatcttaaggaactagttccgctccggagtatgatagtcaccgctttaggagcgcggtacaccagcagcgcttcgaagccgtcaaggggtggtcgtttctccgggagcgacgcgtccagctcagggacgacgagtatactgatttccaggaggaaatagggcgccggcggtgggcaccactggttactcccatggccaagtttgatccagaaatagtccttgagttttatgccaatgcttggccaacagaggagggcgtgcgtgacatgagatcctgtgttaggggtcagtggatcccgttcgatgccgacgctatcggccagctcctgggatatccgttggtgttagaagagggccaggagtgcgagtatggccagaggagggaaccgtctgattgggtcgatgaggaggccatcgcccagttgctatgtataccggngcatgattttgcccggactgctgtcggagactggtgcggatcatgcgcaccaacatgaccaccctgactcagatatggatgac

SEQ ID NO: 17493 - DNA, 470 bp, Glycine max
  unsure (1)..(470): unsure at all n locations
ntagctgtgaccccaaggcttcatgtagactggtccattttctctaagtgaacctcggatccctgtcagatacaatactagaaggaattccatgcaaccttattacttccttgatgtacaactccactagcttctccattctatacttcatattcactgggataaaatgagcagatttggtgagtcgatctactataacccacacagcatcatgtccacgactagtcttgggtaaactagatacaaaatccatagatatgctctcccatttccattctggaatttccaatggcttcaattctcttgatggtcgctggtgctcaaccttagccttttgacatgtcaaacatcttgctacatattcagctacatctttcttcatgccatgccacccaaaaactttcttcaaatttggtacatcttaatcattcctggatggaaactaagacgaactttatgcgcatcagata

SEQ ID NO: 17494 - DNA, 386 bp, Glycine max
agcttctgtttctcatgtggagacatgtgtttaaaattagaaagattctgtcaggagacaatgaaaagaaaactggaattcatactttcctttatatcactcttttaatttcatgacaattatgttcaactttgtgctaactgcaagtctgcagcataacactgacatgttaaaagcatgtctgggagttcattatgttatctccacatcgtagggaaacaattcaaatgtctaatttcaaatctgtagaatattgtttagatttatatcatatcatcctattttacgagatcatatagacagttatagcttatagctacactctctgctcgtacaatgccgcacctgattctgaaatacaccctatcataaaacttgtcagcata

SEQ ID NO: 17495 - DNA, 431 bp, Glycine max
  unsure (1)..(431): unsure at all n locations
atgtgaggccagagaagagagtttatttaccgggagtcttgacgactctgtgctggttggatatggtggcatagctgtagcgcttgcagtaagtgagacgttgcaccatcttctccgataagcttcttccaaaccctagagtttcactcttccacggcaaacaaagaaaaaggttttcgtggacgcgctggggtatatataatgagagtgtttctgcagcaccctaaatctaagtaataatatttgagtgatactattaaggtatttaaatttaagctcttataattcattttatggccgggagagggaaaaaaataattatatgagttaaacgatactaatntcatttaaatatcatcttctctcctgaacttttnntataaataatgataaaaattagtcataaatgacaaanataaaaatttaaaagt

SEQ ID NO: 17496 - DNA, 490 bp, Glycine max
agctttaacaagagtcttcacaaataattatcatgtttcataaaactaacagaactacccatcatatctcccaaaatcccatacccacgaaatttaagagagaaagaagtccacccaaacctgaaatttcgaagtcccactcgtagacacgcacttcacgactccgaaaatgctctcctttcacgatttggggcagaaatgatggccaaaggttgaagctttgtttggagcttcaatggagaatgaaggagaagagaatggcaacgtgagggagagagagagctgtctgaaaagtgtgggggctgagtgaagagagagaaaagctttttggttttaaataaaaagggttttctctttttttctattattttatttaatcaatgccacatgtctccatttgagtggagcaaaaagggcccactttcccttttgactgtgacccatactcagccacaaaagtggggaaaatctgacctttgaacgctaaaat

SEQ ID NO: 17497 - DNA, 467 bp, Glycine max
gactctatttaatactcaagccttgatgcaacatttggagaggttaatgaaacaacgatattattttctccatgagaggttggatcaaatggagaatagagatcataatgaagaacaaaggaggagaagagggaatgatggtgttcctagacaaaaccgaattgatggtattaaactcaacattcctccatttaaaggaaagaatgatccggaggcctacttggagtgggagatgaaaatagagcatgttttctcatgcaacaactatgaggaggaccagaaggtgaagcttgccgccacggagttttccgactatgctcttgtgtggtggaacaagctacaaaaggagagagcaagaaatgaagagccaatggttgatacatggacggagatgaaaaagatcatgaggaagcggtatgtgccggctagttactcaagggacttgaaattcaagcttccaaaactaa

SEQ ID NO: 17498 - DNA, 479 bp, Glycine max
  unsure (1)..(479): unsure at all n locations
agcttctatcacaacctttctctttgcttcctgttctactccgattttccatgttgcttcacacttggcccggtcagcttgttgcaatccatgaaggtgttgaacttgggcttttagtttctccatactcatattcctattgtggaagacaggatgacagaagataatggacaactttctcaaacgctccaggatgtcatcctcatgattgttcgcaaagcaagcatttgcataatcaaagttgtatactttggttggatgcaaaatttgaatggaatccctttgatttgaaggaggcacttgtttagagtttaaggagattgcaccatttgtgtcatatcacacagtntgattccacaagatcctagaattatgaacatcaagctccctaatgagcttttgccctagtgcagagtcttccagattacatgtatggttgactagttatgttttctaacctctacttggcatttcttcgc

SEQ ID NO: 17499 - DNA, 344 bp, Glycine max
  unsure (1)..(344): unsure at all n locations
atttgggggtgaagactttttttattggntttggggtaacctctaatgtgggtttgaattggcctatggaaatttccaataaagcattcttgattgatctgatttgttttcctttgagccaaattgatgttattctaagtatggactaattatcttccaaccatgtcttgttaaactattttgatataactgtggtgtttgatggttcttgagtaagtaaagatatgatgtttatctttgccaaccaagttatgacatctttaaaagaagatgctcaagtgcacattatcttgtctaacctggaaatagagagacaggtttccatgtgtgacctccctgttgtc

SEQ ID NO: 17500 - DNA, 487 bp, Glycine max
  unsure (1)..(487): unsure at all n locations
agcttccatcaaatgtttgtcttttatgtttattatttcaccctcatggggattcaatgctttttgtggctttgcgggtttgtgtttacagtgaccctggacctcaacagcactgtgcctttgtgggtttgtgtttacagtgaccctggagctcacctgttagtgaagtttccatcaaaggtaagtacgacagagtccctgaaacatttattttcattccatgatagaaaaatggttgaacccagcatttactaattcatatggtaccgttgttgaccctggacctcagttgcactgtgcctttgtgggtttgtgattacagtgaccctggagctcacctatcagtgaagtttccatcaaaggtaagtaccacactgtccctgaaactggaattctagagctctgttttaggtacacaaaatgggggtacatgggatgctgagctnttgctaacacaaattgggatcttagcagattattgggcatg

SEQ ID NO: 17501 - DNA, 566 bp, Glycine max
  unsure (1)..(566): unsure at all n locations
tctttgagaaaacttccttgagaagctagagcatattttctctcacctctctcataactaagctcacctccttgagaagcttccttaagaagattcctaaagaagctagagcttagctacacatacctctctaatagctaagctcacctccttgagatgagaaggtagaacttagctacacaccccctataattgctaagctcacccccatgacaaaaaacatgaaaatacaaaaaaaagttcttactacaaagactactcaaaatgccccaaaatacaaggcgaaaaccctatactactagaatggccaaaatacaaggcgaaaacgaaggaaaaacctattctaatatttacaaagataagcgggcttatacttagcccatgggctcgaaatctaccctaaggctcatgagaaccctanggccttcccttggatctctagcccaatctacttggagtcttctacccaatgcccttgcgggataggattgcatcanactttacatgactggatcatgtagcagtcagggcaatccatacaaatattaaataatcaaattttatga

SEQ ID NO: 17502 - DNA, 526 bp, Glycine max
  unsure (1)..(526): unsure at all n locations
agctntttgaagttttctggttttctaaaccttgattacttgtgctatttatcttttcattctcttctccctttgccaaaaagaattcgccaaggactaaccgcttgaattctttttgtatctctcttctcccttttccaaaaaaacgaaggactaaccgcctgaattcttttgtgtctcccttttcccttgtcaaagaattcaaaacgacacagtctgagaattcttttgattctttcctttccctaatacaaaagtgttcaaaggactaaccgcctgagaattcttttgtatccccattcacaaagtatcgaaggtttaacagcctgagatctttgtcttaacacattggagggtacatcctttgtggtacaagtagagggtacatctacttgggttgttgaatgagaacaagagagggtacatcacttgtggatcagttctagtggagggtacatccgctaggttcaaagagaacaagggagggtacatcccttgtggatctttgctcgtaaatggattttta

SEQ ID NO: 17503 - DNA, 211 bp, Glycine max
ggatgaggggaagtgtgattttcgaaatctgcacttatgcagaattttgctgtcaaaataggtgcaacagaattttagcttggcgcagaaaatgcttgtgtgtggttggctgtggaaagagtaatcagaatgagttctggatgtttgctattcgatccccacggacacaatgttggcttatgcactatagacttccagtaaaagtttggag

SEQ ID NO: 17504 - DNA, 515 bp, Glycine max
  unsure (1)..(515): unsure at all n locations
agcttcttagtttcagatgatgcagatgggtttgtttcnacctcatgcactcctctaatgactatggcatcatttctggcgctaaactgctgggagttggaggccatcttctcaattaaatttctggcttcagcaggggtcatgtctccaagggctcaaccactggcagcatctatcatacttctctccatattactgagtccttcataaaaatattggagaagaagctgttctgaaatctgatggtgggggcaactggcacatagtttcttaaatctctcccagtactcatacaggctctctccactgagttgtctaatacctgagatatccttcctaatggctgtggtcctggaagcagggaaaaatttttctaagaatactctcttaaggtcatcccagctcatgatggaccttggagcanggtaatacagccagtcctttgccactccctctaatgaatgaggaaaagccttcagaaatatgtgatcctcttggacatctgggggtttcat

SEQ ID NO: 17505 - DNA, 505 bp, Glycine max
gcttcgccttctaattcacaaaaacatggtttcatgcattgtaccaatatttctgagattaatcacaaaatttaagaattatcatatctgtaaaacacaattcggcaaaattcatcattggtgaaaaggggaaattgttacgaacatcataacaaaaaatttgtcccttcaaaataaaattaaacttatttggaatttttcaacccgttcaaatcaaggaaaaattatacaatagaaggaagagagagagctcactccccttcactcgaaaatatgattcccaaaggcaagacactgttgaagttgctacaaatttctagaatattcttaaatataatatgtatgaatatggtagaacaatctacaactatagtgtatatgaatatggtagaacaatctagaactataatgtgtatgaatatggtagaacaatctagaatcataagtgtatgtataagatagaagagtctagaattatcatgatactaatctatcatgaaaactc

SEQ ID NO: 17506 - DNA, 314 bp, Glycine max
agctttgagcaaatttaaacgacaataactttttactctgatgtccgattgagtcccgtaatatatcgagacgctcgtaattgaaaacagaagctctgagcaaattcaaacgacaataacttttgactccgatgtccggttgtgtcccgtagtacatcgagacgctcgtaatagaaaagggaagctctaagaaaattacaacaccattacttataactatgatggcgggtagagccccgtaaaagattgagacgctcataattgaaaacagaagcgtttaggaaataccaacgaccataagctttgactccgat

SEQ ID NO: 17507 - DNA, 144 bp, Glycine max
tttttggtccggggtggccgaaaaaattaccatggaaggccgcttaggtttttccgtccaaccccaccggaggtggggtttgaaccacccccggctggtttcctttactccggcagggaaaccttaacccaacttggaaaaaaa

SEQ ID NO: 17508 - DNA, 874 bp, Glycine max
  unsure (1)..(874): unsure at all n locations
tgcgaggaaaccctgattnactntgagacnncgngancaaccagaaagaanccgcgcgcaagcaagaacattcgaagcgacacccaaaatgtctggccnaattatggncacaggnggcnccagagcggagaggggatccgcaaacaanaccacacaacatacgagcacggagcaaaaagccgaaaagcgggggggccccaagagagagcgaacaacaccagcgccgagcgcacccggccgcaaaacaaacagaaacccgcccggcaaccggagaaaggaagaagacaacgcgaacgcggtgcacacgaccggcccgagcacaaaaggggatgagggaaaccccagaccaacacacaccacggcaccgcctaaaacagccaaaaacgccgacaaggcaaagctaagagcaaacaaaccgcccgaaacaacccggaacaaccgccagaaacggacaccgcgaaacaccccaagacgcagagccaaggcacacccccccacaaaggaaacccaccccccggaaaaggcacggcaacaaaacacacagaacacaagccgaccacgacaaacacgcggagaaacaaagccccgcttcgggaccacaagagcaaactgccgaacacacccaacgaaaggcggcacacccccccgaaccaagccgaaaacacgagagacaaaccgcgcaccacgacgaccagaaaggcccaaaaaccaagcgaagccccgacgacacaagcgcacaatcgagggccaacacacgaaaacacccacgcatacacacacgggacaagggcccgaagccgcacaaggcgcgaacgccccgaaggccacgacaacacgaacgcctngcgaccaatacgaccacagaaacctcgcg

SEQ ID NO: 17509 - DNA, 327 bp, Glycine max
  unsure (1)..(327): unsure at all n locations
cgcactctttctcatagttatcatttaagggtatttacatggcctcacatgcaagcccttaccgtcacaagcacaaaacacattactccattaatgcatcacatggtactctanttgaaaatggatcttttactctgtgcctgcanggactgctgacccttccacctgatagttcatcgaatcanatagacaaaatatatcataagatataagtctcaaagttcataaatggagagagccacacggtanaaataagcanactaaccatgaatgcagaaacaaatattggaataaataataccactattatgtgtagtggagctttcc

SEQ ID NO: 17510 - DNA, 461 bp, Glycine max
  unsure (1)..(461): unsure at all n locations
tgcttaaccaactacctgcttaagggtttatatgataggatcagtccaaataagctccgtaaaagttctttcaaatgctagctaagtaactacttcttgacatattgtactcttagcaagggatggaacttggacatgaagcaatctttaggtaaatgttttttacttttactttggtacaatgttatcaagcatgaatataattagcttttcttgaagcaatctttaggtaaatgttttttacttttactttggtacaatgttatcaagcatgaatataattagctttttttccaacaacctttgaaggattacaaccaagaatctttgccttttatgagtntcttattgatgattaactgtgtattttatcacataataatgatgcctacaagtaagtgttagtgaagagcttcagaaattgcttcattaacatagtttgactttttgctcctctttga

SEQ ID NO: 17511 - DNA, 500 bp, Glycine max
tccaagttcattaatcatacctttaagccagattgtttctttcactccttcagctagggccatgtactctgcttcagttgttgaaagagcaacaactgattgttgatttgctttccaactgattgttgtaccaaacaaagtaaacacatatcctgttaaagatttccttgtgtctacatttcctgcaaaatctgcatctacataacctgtgattgctgcctcatatgctgtcttcttgtaccttaatccaactttcgaagatccatttagataccttagtgtccacttcacaacttcccaatgtgcactgccaggatctcccatgaatctgcttataatacttacagcatgagctaagtcaggtctgctacaaaccattccatacattatgcttccaacaccactggcatagggtgtttgatccattttagacctttcttcagttatttccagtgtttgaataacagataactttgtatgatggccaagtggtgtgtaac

SEQ ID NO: 17512 - DNA, 542 bp, Glycine max
  unsure (1)..(542): unsure at all n locations
agctntgatggtgtcgagaagaaatcacatgtttgttattttatttaaggggtagaatgtgaatgtatgtatacatgattttgttagtgcttagctttactgagctttaaaagattggctaaaattttgttaaaacataagcacttagacaatgaaggaaagctggagttgctgcacatgatgtccaacgttatgtcaaggaatcagatcgggctgcacaatgcacaaagcaagatataatgtcaaatgaagaattgaagctgcacgatccacgatgtcggatacaatgtccaggacatcctgcccgaaaatactggacacataaatctgttatatctttaacagattaatgtgcacttagcaacagatttaagcgatctatctttatgaacgaattaaaagataattaaagttcgaattacaaacttgaatagttcgttcagggattagagattaaagataaaaactgaaagatcaaacttgatcttttatatctttaagtgcagattttcaggagaatgatagatctcatccagcgcaag

SEQ ID NO: 17513 - DNA, 464 bp, Glycine max
  unsure (1)..(464): unsure at all n locations
tgtttgaacagtgaactgattgaaaatgatatgtagtggattgttttgtatgaaatgagtgtttgcaaatgatttgaatgagcaactctatgatttgagtggattggaatgattagataattgttttgatcaagcttgcagccattagaagagaatgagcatgtgattggaagtatgactgaaaatgttagtcagtttgtcaaattgattgtgaaggaatgcattgatcgtatcctggtgagtgtgtaatctttaaattttgagagaaacaactatcatttagtattgatttttgcatgaatctctgaagtatggactgaatgcatganattaatgatgatgaaggccatgtttgattgtgatagccacttatccaaaaagctgaccacgtgcttaaatgaattatcccttgcacccagtttgagctgaatgaattattgactgattgaaccctaagcctatac

SEQ ID NO: 17514 - DNA, 636 bp, Glycine max
agcttccacatcaagcaagttcatctcaaagctcttatacaaattatttaattcaaaagttggagaatttgcttggaaaccttgtagctgtgcttaaagtacgatttgcagaagatccacaaattaatcaagtcttataagctatagatcaagaggtatgaatttataattctacttattcaacgatttaactatgatatgatactttacaaagaaaaaacattcttttaatttaggtacctacaaatgattctaccagtaaagatcatcaaactacaaacaatcttagctagaggtgagttgaaatatagtactatattttaactatatatatatagatatatagaatatatcatcattatgttattttaatagcagttgaatgttataatttatgcttcaatcttgttccttttacttgaatgacgatttggaaagccctcgcgcaattggacccttctttatgctctcacggtcaaggaaaagatgatggcagcatcaaccacatggttattcagtttgtgtccccactatcaaataaataatgggtcatctaattgatcttttctggatgggatcacctaaatgaattattgattaactggaccagcttgtgataatatattgttaaattta

SEQ ID NO: 17515 - DNA, 421 bp, Glycine max
cttctacaatctccccttttttgatgaggacaaccctgatatttagaaacacatacacattctttttcctagtcgatcactcacttaattctccatattttccccctttttttgagtttaagcttcacttgaaattaagttatttaattatatgagttcttgatttaatccctattttctctccccatttggcatcaacaaaaagccaaagtgcgtaagaaatataaaacatacataaatgactaatcatagccaaatacacgacttgaaatcaaagtactaatattaatactaaaaattaataaaaactaaaatgatggtggtggtggtggtggtagatcaaagcatgtgcggatgaaagtgacatcttcatcaaccttggtgatccttgagtccattccgtcgaaacgcatgtccactt

SEQ ID NO: 17516 - DNA, 339 bp, Glycine max
agcttgcttgtggggcttctatggaggttggatcttttatcttcaatgaggtcctttaatggtgattttccaccatggagatgcagcggaagacaaaggagaataggtgagaggaggcgccatccactaaggaataagccatggaagaaggagcttcaccaccaagatgagccttggataagaagcttggaaagatgcttcaatggagcaaaagaaagagggagagaacgagagaagggggagcacgaaattgaaggaataaaagagggagagaagttgaactttgagttgtgtctcacaagactctcattcatcaaaggtgcaacaagtggtacacat

SEQ ID NO: 17517 - DNA, 384 bp, Glycine max
  unsure (1)..(384): unsure at all n locations
taaggggggcccgcttcataatccacgagtcaaaaattaatggttgaatttatattttattatttccttaaggctaaaatatgttgataatcactaataaaaatttaaattttaggttggttatccaaccaaatttttcttcattttttgtttttaataaaacaaaaattatntttgtgtttgatacttatttttagtccctaataactaatatttttgattgttcttttaatttttttatgtcattagtcactttgaaaatgactaataacaaaaaagaaaaatgattagagagcaacaccanattttttaatatatcagaaactaaagaaaagtgtcaaataaatatttttattagtaactcaatgaaatgaataatttatg

SEQ ID NO: 17518 - DNA, 305 bp, Glycine max
tagagaggttgttactgatattaataatttatgtaaatcatattgtcacagcgttactagccgattccaaaaattattaagcgtgggagcctgagaatatgacggactaacatgatgagcatgtctcgcgctgaccttattaatatcattaagactgtcatgacacgtgtgatgtgatgttatcagatgctaaaccgtgaacatgatattcgattgtgaataatttgatgtgtttaacactagatgttacattaattatatcgtgagctatgaattatacaataacccgatcagcgcttatgcgt

SEQ ID NO: 17519 - DNA, 312 bp, Glycine max
cctgcacgccaataagcttgttctgagaaaccggcgcttagagtccttgcaaacggtttcttcaagccagcctttaagattgcctaagattagctgaaacagcctttcccggaacatgcatagatttttaaaccccggaagccacctcgcctctccctgtcgattcccgagatggaccccaaacgtacttgttattgttacatattcaaccaagggtgaggtacatttagcctacaataaatctcttccctggggacccataattatctgaatgaataatcactcactatttggacatttatacattgccct

SEQ ID NO: 17520 - DNA, 330 bp, Glycine max
acattccctggagacagagcttgattttttccgggtagtcaaagagaagttcaagtgcgtatccattaaagtctgaagagagtatgatgaactaagggacgtcaatatggccaccgctgaagccttggaacgagaaaccaagaaaggaagaacacgaccaaaagaaagttttgaggggctgtatagggcagcaatattgagctcaagctccgaagaggtgaaaggaatcatcacgggtcaaaggcatgatcttgaaggacgagctaaaggcttgccttatgtcgaaaagaaatttgttccaatagttaagcgagactaaagggaatatgt

SEQ ID NO: 17521 - DNA, 441 bp, Glycine max
agcttatctgcagggatgtctgacggcaacctattttcttagatcttacacaaagccacatcagtggggtttgtgttcactgcggagttcctagtggcggcgagctatgtcaccatcatgcggacgttgatgtgcttgctgggcttgtagagggcaagaagcgtaccatcgaggatgataaaggcctcctcgaggtcaccgaagatggagaatagcaagtggaggccatcaatggtggtgtgctatccaacgccgccgatgaaaagcttgcgctgagagatgtcgtggtccacgatggtgcacacaacaacaacgacgtctaggtggcgcaccaccgcgtcctaaaggatgccaaggagctggtcgagggtgaagcgctcaatgaacttgcagggggtcaaaacatccattgttgttgaaaacgagaaagctctttaacag

SEQ ID NO: 17522 - DNA, 413 bp, Glycine max
agatgcctgagtcattcatccctatgagatgttgttttattattggcgaacaaaaatgccattccttggattatagggttgaaccaagctcatgcttttacaaaaaagctcatcaagtcaagttgaaatatggaagtgaccgtcttgtaaaattggggcaaaaaatgaatcgagtcacatcactgcttcgtgtactaccaaacatatttaggattattgatgtccttgttacttccagtttcaccttgacaaagatgtcatggaccatgttgaacatctatattgattctaccgcatattctgcgtaaaaatgcgcaatactttaactgtgcatcattcgcatacatccatgctcttcattggttgcattgctcattgcattctttcctttaaaaataagataaataaaataa

SEQ ID NO: 17523 - DNA, 411 bp, Glycine max
  unsure (1)..(411): unsure at all n locations
agcttggggaatgctgannngatttttttcatttatgtttgttttagagcgataaagatgaaattatatagagagaaaaataacaattaggattctcgctgaagcacctacgctatgtttagaaaactagaaggatagtttggaagataaaaataatgtaagtcactataaataaaggacaaaaaacaacttggatttagtttgaatacaaatgatcatataaatgattcttatactttcattcaaatataaactagttccccttcttttaaattcatattttataatttataaaaataattttttatattatttgaattattaatgtactattaattatttagtttaaaatttaataaatatatattaataaatatgtcaatacatatttaaatgtattttatacacatg

SEQ ID NO: 17524 - DNA, 498 bp, Glycine max
  unsure (1)..(498): unsure at all n locations
attttggcgatatcagggtacatatgcttgatgactttagtgagaacaccaaccttccacgccttctttaagtcatgtggtttcttgtaaggtggagggccttgatctttaggtagaccaatttgaggccaccattcttcattcccagttggccaccatggtggaggaacacccttctctagtgggaacctcctctgaggaggatcacagtgctgcataagtgctgacaagagagaacccaaggttgtgtcctgtaactcttgcaaggtgtgtggtgtaggaccaatggaattgcatccatcattctttccaggaattgcattatcggcttgatacttggctatggcagcaggaccatttcgatcaaacctgaccttatccttccaccattcgcgaagattatctgatgctccggtcactggctttcccttcttaagatttatcctatanacaaacccttgtgccttgcanacctncattatcttcagcatgtacttc

SEQ ID NO: 17525 - DNA, 628 bp, Glycine max
agcttattacttaacttcatattttcttccctcaatcgtttaacccttctctaacgcccaaacatatcaaaacaactataggcttaaggtaaagctctaagatcaaatacatccaacacaatacaaaaatatcgaggctttcatgtataagaaaattattagattaaaaccttttaatcattctttatgtctaaggtattaccatttttttaattacttttggtatgcctatattgaggaaaaagaacaagcaaacattcacataaacacaatataaaattaaaaaagaaaaaaaaatcaatttcacctccactgaattcaagaccatatgcttcagctttgtcatcaacttcttctccaataccatatcttggagcctcttatgttcccctcattctctatcccaatatataagattgaattccttgattaatgttgctcaatgccatcttgagcttctctaggttccttctcaaggcaatgttaacggtttgacaagtgcaccaaatgtccaagtagtaaaacttggaagttcgagtgtcgattttcacatggattctgttttgtacttttattggataatttcaacttgtaagagaagagataaagagaggtgaatgatagataa

SEQ ID NO: 17526 - DNA, 803 bp, Glycine max
  unsure (1)..(803): unsure at all n locations
cgcgcttaatgcattcctggacaaccacgaaattttgagctggncgccgagggtattcgctacctagaaagacgagcgaaatgtttttttgttctacgacatgaacatgcctgtcactggctatattccttggatgcgaaacttgcttgtcaacatcctacgattttggccaatggctattaatggccttgctctttcacaatctatgggtggcccaaccttgcatgatgtaggaaccaatatgaaccttgcatatatggctatgatctgacacccgctctacaaacatgatgttccaccactagcaacactattagcgtaaaaattaccgtagatgactctgtgatgcgatcagagggctcaaagtcatccaaaggcggatgagtggatattcgtaaaccttactcatgaaagatttacactccaatggctttactaatgtggttacactctttggagagctatatatctatccaaagtttataccgcaattataagctctcttgtaagcctaaaagtcgggataaagtaaaaactcactttagtcttaaaattgttcctatatacgcgcgcgtcttgtgattcacaactatccgctgtcttgagaataattttacccaaataaacctgctccatgaaagacaaacaggttgttatcccctgtttttttatcaacctatgtgtttcccccctttatttcttctccgaatactcattattaacttttaacacccgctttttttaccttacttcacagagacaatagccccacctttctaagcaatcccaaggttttccttaac

SEQ ID NO: 17527 - DNA, 500 bp, Glycine max
  unsure (1)..(500): unsure at all n locations
agcttgcttcaaccctgaataggccttcccagttgttttctttctttctcgctcagggatttttccttgcttcacctcggactcgccatactaagttgccaggttgaaaggctcgaggttgaacctttgtattatatctccttgatgctcggagcttgttggcttcttccttgattttggacatcttttggacttcgtcttttgtctctagttccaccagcatgttttcttcgttttgttgttcctagaacaacggtctccttgtcgacggttccctaattttaatggggatcatggcgcttgtgtcttatgtgagttggaaaggatttttgntggtatttatttgggggtgaatagtgataagcccacagtatacttgggagttcctccttccatagacctttggacttgttgtgcgcttatcaattttttgacatttattgtttaatcgattaccccatgatatagtctagtaacatttattgcgtctatggttttat

SEQ ID NO: 17528 - DNA, 413 bp, Glycine max
agaagaaatcaaaaagcaacaagtcaaaacttcatatatgatatttatttaaagattttttcaaaaaccaaatagcaccattttgttttacaaaagaattttctcaaattttctaaagttaccagagtgattactctttggtaatcgattaccagttggcagtaatcgattaccagtgaccagattggtttttaaaatgttttcaaatgatttgtaacgttccaaaattattttcaaatagtataatcgattacactatattagtaatcgattacaagtgaatctaaatgttggaattcaaatccaattgtgaagtcacaacttgtcataaaatacattatgtaatcgattacaccattggggtaatcgattaccagtgaatagttttgaagaaaagttaagagttataactc

SEQ ID NO: 17529 - DNA, 523 bp, Glycine max
  unsure (1)..(523): unsure at all n locations
gcaagcttgtaggaattatggggtggcccgtcacatggtggttcttatgtggcttatcgtggcgatggnngcaagttgactctcnncacatccacaaatcacaacaataaatccacccatccccagttgggcccacacttcaactggagctnctacgtactccnncacgtagcccttaatcctcatatcctctcagcacccgggtccccnatcagagcccctccaagcttgctcaatatccaagcaattcaatatccaaacatcatgaactaccctaaaccaagaaaacagggtagaggcagaaaactctgcccaaaaacacattccaataccacagctttccttactcaaataccccagtaacattctctttgttccgattcgttaaccggtggatcgactngaaaattttactggagggccctagtatataagtctacattttgaccggttgatctgctaaaaaatgtncacgacccaatatgtactacccttttcacaaccagcaatacacaaacatttt

SEQ ID NO: 17530 - DNA, 444 bp, Glycine max
agatgacaatatctttatgctctggacacagcttacaaattctctacagggaattataagtcaagaattaagatattaaccctgaataaaataaaatagtaggggctatgacctacaaggaatggactacttactcccaagggtcgtcaccaacaaaagaattgtcgttttccatcaaaacactcccacttttcctttccattccccctaattattgcactgctaatagttatgattaacttcttcagtcatttaaaatttacagtattcaatatgtgatggaccagttttcttcttgacacgtgcaagagttataattaacttctccacacatcagatattgtctgtgagacgcgctaaattgtctgtttgggctgcactctatatcatgtatacatgcttctacttctatgagagaaaaaattgtaaagttgacactgaaat

SEQ ID NO: 17531 - DNA, 933 bp, Glycine max
  unsure (1)..(933): unsure at all n locations
cgaacggatgcnaaactgatcgcgttcgnagnancgccancanntgagnnaannggcggcnggcaagcctcaacacncgaagagagcgggatatnantgtttttgaaggacaaccacaccaacacaccagggcgcgagtttgaagaatagcaagcacaagaccacgcaccaagcaacgaacacagaacgcagaaaagtggcaacgaacccacccacagagaggaaaacaaccacaccccgcgcccgaatcaataatgccgccggaaagctcaaagaaaaaagctaggtcgcgacncacgagtgacgcgaaacaccaccaaagaagactaagagacaccgggaggctgacgcgtgtccttaagccacaaatagacactgccaaacccaaacacgagaggcgcccccagcaagcggaggcgaccccccccaccactgcgacaggccaagggagaaccgcgggcgcaacatagtcgcaccataaaaaaaaataacgccagaaccgggacgcaaatccgacgatagaaaacaagagcactaaacaccctcctgtatacttcgaacgaccaggacacgcccgagcaacgatagacaagccaaggagaaagtatatcctacccagacacctgataacaacaacaaattcgtgtgggaaaacacagaccaaaggcagcggatacaccaccgggagaaggcaagaatcagcgcacacgacacaaaaagcggcgtccgctctagcgagggaaaacccaggagaaatacaccaagggcgaacaacaaaacgggaaatgccgagaccccctatcggcggcccactggggcggcgccaccccgccactcactgaggaaagaccctcaagcgacaaagaagacggcctaccgcgaccaacacaagccagaacacccaacagggggaaacggcccccctctcggacg

SEQ ID NO: 17532 - DNA, 826 bp, Glycine max
  unsure (1)..(826): unsure at all n locations
ccggttgatgaatcgatgaacgaccnatagaatctgaagactaggctctaggagagcattcatccatagatcaacctttttctttttattccagctctattattggcctttttgcacttagtttttctttttcttaaatagtagcacacacttttattttatacttacagttacatatatatatatatatatatatatatatatatatatatatatatatatatatatatatatatatatatatatatatatatatacgcgctgcttattagatgcgtgtgtgtgtggctcttttcttaccattacaagctttcaccccataattcccccaaatttgggcaaatgtgctgtgaaccaaaatttccttatatgaaagacgctctcctacaacctaagataaggtggagggagataaactatacaggctcaaggtgcaatcaaacaattatactttcagctcaaaagggtgcgggggataaatcaatcatgcgcgaggtgagctttttagctaagtggctatcttcaatccacacatagcgcttcattatcttttatttcacgcattcattccatactcacagatgtatgcaaaatcatcactcggtgtgggcggtctctcacaaaaaaaaacacactctcccgggtgacgggtatgcggtttttaaaaaaaactgaaaaacaaatacagtttatttaggagcctattcgtggttttttttttaaagatgggggctcttcaagcgcagaaataccctttcaattactcaatccgcnagttgtcatttaaccatcccaaccctatttcgaaaacagtttaacccgtggg

SEQ ID NO: 17533 - DNA, 846 bp, Glycine max
  unsure (1)..(846): unsure at all n locations
aggttgaaaccgtagaccgctgatactcgagtcacctgangcatgcagcgttggtgatgttgcgcgaactgatgggacccattaggngtcngttggtggctgacccatgcgggtgccgaagagacggcatgggcatctactgtcttactttctgaccctgcggccccaattgtatcgctgtcgtgctaagggaggagtacgaagagaggtttgctgcttcatgccccgacgagatttatcgcctgctggtcgacacaatctgaacgcatggatgcatgtaacccactatcttctgatagaagaacactggcggagagataccatcatcgtgatcatctctctctcagccatgggaggagctacttgtgccggcgaatccctccatcgctgcgcatattctttagaggtttgaccctgtatcttgaacatattctgcagnagagtactgtgcggatccataccagagctgtactgataatgtcttatgatatgccctttgatctgaatggtgctatgccaggaaaaagtacgccggtagtctgctagaaagcattccggcgttctatactgaacaagaggatcacagcttttcatcgtagagaggcgctctctacggcatacatatgagatgttcttggacaagtcttcctctatacttgcgaaaaccgatattttacctcgtggagcacaccccggctctaaaaaagaggcgcctgtctcccttgagagacacagaccttcaggatcttatctttctctggaaacgagcgactcttttttttcgccggggggcctcccaaaaaaaatctggcatactaaattaggggaactgcccacaaacccccg

SEQ ID NO: 17534 - DNA, 492 bp, Glycine max
  unsure (1)..(492): unsure at all n locations
cctactggacttataacaacaaaggagttatgtgatttatactgcacaaatacaaattttcatctcacatagggtttctacttagaaagatataatctctcacttctatcttagatctattacatattacaagcttaatacaaaagtgggtcactctcaaaagagactgttcgattaagctgagaatctagaaggggggttgaatagattctttgaaaatctttacctattcgttcttaacaccgattaaaaacatccccttaaatcaatcaaagtttcttcaaaaattctttagaaataagaaactattatttgggcccttaagatcaattccacaaccaatatgattacaaaactcagagtaatagagaatatgagaaatacataagactntatactggttcagtccaatctggatctacatctagttgttctaaatccttntagaacttncactatacagaaaacataagtacaaacatttttcacaca

SEQ ID NO: 17535 - DNA, 584 bp, Glycine max
agctttgaactggtaggtattcagtgttctcatgatttatttatgttaacaagatcatgtgctggttgaagacatgaaaaataggatttgaaattgaacttatggtattgtactagccaaactcagcatagtgcacagaatggttatatataatataagccagttcacaaaaccgcattcaacatcaaatcctatttcttatgaagtcagttcacaacccaaagcacttttaatctttaaattatttatatttatcattttctaacaataggaaaattttgcaggaagaaaagaaaaacctttgaatgaactgccaagtcgctcactgctaatataggatatccatttgaatcacatgcaaagtcaaccatagaccctgatggataaccatcaaacttctgcatgttaaaaattaatataagaccagatgacaagagggtacttaagttggccgccaataaacacaaacaaaattccatgcaaaatatatgaacacgacaagcagccagggttcaattttattgctctgccagacttggattttgctattgttgttgttacttgagtgggaagggtgtttgcac

SEQ ID NO: 17536 - DNA, 511 bp, Glycine max
  unsure (1)..(511): unsure at all n locations
tcattgttccccttgactactaaaaagattaacacaatattcaatcttttagccagatatccaagatgcggaaaatagatcttgcactgttactataattgggactatagaaattgtatggaagatgaaaagagattctccattagagctaatatttatattaagatatacacacagccagctagagtctatgtcaaaaatacaaaatagactggtagaagtttggtagagccccatataatacaagcaaaatggataagtgccagcaatgtgccatatcacgtggatcaatgtcagcacttaatcatgaaagattaagattacaaatgcaaaaataaaacatgttatcctctctcttaaaaggtctaaatataaatttagttgtatttacacacgagtataaatcatctagttgcccctanagtgcattattcaataagagtattaatttttgcattaacaatcttcactatttagtgtacctgtcttggtgtctagcttctttcacatc

SEQ ID NO: 17537 - DNA, 548 bp, Glycine max
agcttatccttatgtcctgcctctggacttcaccccccgtgccatcctttatagatttaagccaagcccctacttttgaggggcaactcccaccttatgaagactatcccgggcaagacgatggggaaggagataccaattttggccccctgctccacctcaaagagccatccccgcatgaactaccccagccgaacatagttcgccatatctcggcctcacccacacccgtaaaagaatctgttcccttcgcggaagataagggaaagattgaggcgcttgaagagaggttaagagcagtcgagggccttggcaattacccattctcggatttagcggatttatgtctcgtgcccaacatcgtcatccctcccaagatcaaagtaccggactttgataagtacaaaggaacgacatgttcgaaggggcatcttcagatgtattgccgaaagatgggggcgtattctgcggacgagaaattgttggtccatttctttcaagacagcttgggcggcgcagctgtagcatggtataccaatctggaagct

SEQ ID NO: 17538 - DNA, 388 bp, Glycine max
  unsure (1)..(388): unsure at all n locations
cattcctgatgcagttaaacatggcgatttttttttttacagatcccaaaagttacaggtacatgattgcttctccagattcaccacatatttgtcttgtgtaacagaatgtgtcacttcagaaattggcccaccaagccaagttgcataccagcttgaactaaactcaatttctctagatagcccgttcataggtttacacatcacatccccgctttgtttttggtcgtttctctctgcagtaaatctcttaaataatataagtccttatccactcaaacatggtcaatataggtttatctctagtagctaacaaggtagaattgaacgaatctattatgttaatgagaacatgacgctntgcaccaancaattatatgcatcattg

SEQ ID NO: 17539 - DNA, 666 bp, Glycine max
  unsure (1)..(666): unsure at all n locations
agcttcaaagacaagaatagtgtgcatatataacgattatacagggcgccacaacacactcattaacgcgtgtgtaaaatcttacaaaaacatactttaattaagacagaatcaaaccattcacttatcaaaaataaaaacaaggtttaatcaagaagcatcataaaaatatgcatggaatttatatttttttgtcgaaaatgatactctatccctcattaaaacttgctaagggtctcaatcttatttaaccacaatagcagtagtgtgtgatcgtgacaacttccaagattaagtgaggaccacccaaacaaatgcttaaataactgtcattccaaaatacaaatttaatcaacttataaatatagatggctaacccagtattaaagtacaaatcanaatatagacagaacatagtcacatcacatatttctaggcttcagggtttggccatgccaagaaatccaatacgcaacaagtgttttgttgtcagtgacatangaaataggtttacaaaacacttgatcagaacatcatttcaaaaataaaaaacttcatcacgtttaacaagtaatgttttctgtgaacaatgaaagcaagtttgatgagtacctgtagaatattatgtaaaaactcaatattaactaaatccacgttccattaaaa

SEQ ID NO: 17540 - DNA, 579 bp, Glycine max
  unsure (1)..(579): unsure at all n locations
tgagtaatttgttcttatttcttaccacatagatattggtatgggtggagtatggaataggagtgtcaaactaatgaattggataatttttttgaattgaaatggatagccaatccatttatgatccattaataatgtattgcaaaaatctaatttatccataacttatttcatagaaaaaggtccatccattatattttatttttttcaaaacaatatttttctaaaacaaagtttaatatttgtacacattcttacactgaaataccatagaatccaatatttgtctcataaagacctatgtccaagtaatgaacttggaactacttgattcactggattgcaaaatatgttggatggttcattatctatccaataccaaatggtaatccaattcaaataatgtattaagttttatttttataattgaatagattgattggttgatttatacttgatggattggactgttagtggataaaaagattgaattgccacatatngtaatgaatactaatttgccataggttatggaaaacatanactgtaattgtttttgtactttaggtaaaactatat

SEQ ID NO: 17541 - DNA, 437 bp, Glycine max
cacctgaggcatgcaagctttctttttctctctacattgtttcttctaaaggttgtttctttttctaaagccaatggaaccaattcacctgcagaagatctacgcatgcaaacactaacaagaacatcaattaaccaattcgagaagagagttaattctgaactaaacaagtattatccaacacggaccttcataaatcacagagtcatgaattaatgccttaacattgaactgaactttccaaatggataaagttccctgtgaacggcgccaaaacttacttgatctacgaccacaatacgtgttggctccctcttccgaaggggcattacttattattatatgggagtggtgttaccggcgagcgcaccgtgtcgtcaagtagacataattaatatggagtgaggcgagtatcagacatcgggaacttgttcatt

SEQ ID NO: 17542 - DNA, 409 bp, Glycine max
gatatgcctttccttgatgtatagattgtttagtatggtgaatggtgcttagctcctatgttccctattttaaaaaaatgttattatgaatctgtcgctgtagttcagttttagttactttatacccaggattttgctctacgcaatgcaatgaaaagaaaaaaatgtgactttgctggtctccttgtgcttgaacagttgagaatttattggctatttttcttttcttaccatgatattggatatttcaattgtgtctgtttatttgaatatcattactcgggccaagtttttttattgttcagagatagacgccccaatcaaagtacgcaatttctggttgtttcaaaataactaggggaaaagggaaatgatgcacaatatatgggtcggtctgcagtaaacaatg

SEQ ID NO: 17543 - DNA, 574 bp, Glycine max
  unsure (1)..(574): unsure at all n locations
agcttgtcactattgaatgggattttgtgtgtcattttattaaagaaagaggtctcgggcttaggtctattgttcttatcaataatgcggcctcccttaaactttgctaaaattttgtccatgcagatgaggaatggacgcattttctgcaggccaattttctcaaaaacacaaaccatctatccttttacaagaaatcctcgctttggccttccctcaataggcactttgaggaggtttgttccaatattggttgggtccttagtgcaggagctttaactaacttttggaacaattattggtgctcgctctctcctttgtttgcagctctttaacctcccccccctcggtcagcaagttgttatcctcctcgatacaggattttagattagaaagaagttggaatatcccgcctattattttagccaagcttcctgccattcaggaggccatcaataatgtggctttctctcttcacaatcataagggcatccctatttagagccttacaaccatctttcatttcttgaccaccctctgcatanngaaaagtgatctggtcccctaccatccc

SEQ ID NO: 17544 - DNA, 631 bp, Glycine max
  unsure (1)..(631): unsure at all n locations
tcctcggggccattcctgcgaaggcaaacatttggttaagttatttcacaagaaatataacaatcattacaaacaagggccaaacaacacttctcatggcacgagtgtcaacatgcactttataaaataatcatattggggtcatgctattttatgacacatacgtatttgcacacataaaaattttgtatgaagcattttacgacacctatccatgtacatattttttttgacaaaccttttcatgctacatcctatatatatacacacattttttggaaggcttcttttgttacctactcacaaatacacctattttgaaaaacacttttacgctacccatccaacactttgtaaggcacttcatgctatatatattcatattatgcaaggcattttcatgctatatatatccatattatgcaaggcattttatgtaactctcttgcacgcattttattcaacattttgcaaggcatttccatgctatatatatttacatatatacataccgttgaaagtatttttcatgctacctangtgcaaggtattcctcatggggcagccaaatttaaattctaataacacctctcaacatgtncaatattcatgccttttttcattcaaacca

SEQ ID NO: 17545 - DNA, 597 bp, Glycine max
agcttggcaatagagaaaataagacaagaaatttggttcttcatgcatgaaggatacagaagggaaatttctggtcacaaatacaatatcaaaagagtgatggaggaattacttttataagctttttaatgatgtacagagataggatactaatatagaaggaatagaaattcaaaagaacgaacaaattttgggttattaccgtagaattcggatagaaaaggtaaaagagacccttaaaaaaacgaatgaagtaaaattattggttcagtagttacaaacctatgtatagtcccaagggtgtgcaaatgcaccctaacttggcttcatttcttgctaatttgtcaaataggttttatgacaaacaaaatttgcatttgcattagatttgatttacattgcatttgcttttgaatttttatttacatgatatacaaaatggtgaacttttgtatactcgaggatgtgcaaatgcacccttctatgtaattcttttattagataaattaaaaatttatgattctcggcttattttcatttatatcataacaagtatttgtttagtcctcaatccgtcttttggtctatatcttatat

SEQ ID NO: 17546 - DNA, 552 bp, Glycine max
  unsure (1)..(552): unsure at all n locations
tgattcttatctccaaacttcatgaacacaagttcgttttcttgttttctctgtcaacgcttaaatttttttgtgttcccgagccttttccgacgttgctttctcttggttttcttgcattttgggttcagatatgtagcattgggtatttttgtgaccgacagcaacaacgaagacaacaaatagtgtccgacatgaaaagaacacgtttgtgatgtatttcatttctccttttgattcctgggttctgtcggtacaaaagattgaatttttttgtgttctttagtcttatttgaccgcggttgagtattcttcttcttttgcaagacaaaagccacagatcatagtatgttggataaattacaggttcgttttccctccccgtctccttctgcgttttcattgtacctctnttgtgcattgtatgcgtttttttatttcagctctttgttttttcactgcatgttcattgttaggttcgttttcccttcccgtctccttctgcgttttcattttaccctcttttgcatatgtatgcgtcttttttatttc

SEQ ID NO: 17547 - DNA, 448 bp, Glycine max
  unsure (1)..(448): unsure at all n locations
agcttgtgactcttggcaatttcttttaaattagtctcttaaaaagttgtgacttttgaaagaatcttcagaaacaagttacttgaagaattgtgacttttggaaatgtatttttcgaaatcagtcactggtaattgattaccattaaggtgtaatcgattacacatcaacagatgtgactcttcattttgaatttgaaaattaaaacgtgttagaaacactggtaatcgataacaagtattgtgtgatcgattacacaaattaaaaatgtttaaacacaagttgtaactcttgaaatttgaaatcttaaagttttaaaacactggtaattgattactaccttctggtaatccattaccagagagtaaaactctttggtaatgattttgtgagaacttcttgtgctactcaatgttntggaatactttntttgtacttatcttgattg

SEQ ID NO: 17548 - DNA, 543 bp, Glycine max
tcatacaacttgttgtaattgattacaatgaggctataattttattaaatagaaagtttttgcctttgaagaaaattctctaactaagaaacttttcttcacacaaaccatgataatgcatgatgtaatacaaatatcaaatgtactaagatgtaacaaccaagataacaaccaatacaaatgccactcaatggagttggggatgtaaaaaccaaaacttcttcaagctttagcccttaggttgttcagaagctagctagttagttaagttgaacatcctttagattgctagctggttgaaatcaagcttaacgaggtggatatagataaataataggaggaaaaaagttttaaaatataaaattctattaaaacttttaaattataaaaagaatatttaaaagttaataaaattacaaagaatagcaactatttaatgtattagttgcacatacttgtttaaacaaatgtgtgatttgtcttgcaaaaaaatgcgtgagttgaccttatataagtatttcattccatatatggctatatgct

SEQ ID NO: 17549 - DNA, 492 bp, Glycine max
  unsure (1)..(492): unsure at all n locations
agctcttgttcctttntataaaagagaagttctaatactcatcacgttgtctaaaaaagccttaaggcggatccaagtgctctgatcattcattagcatattcatgttttggtggcatagtcaccactgtttgtttctttagggaactcaccataactaaaaaagcgcaaaggcacccctataacactcgatccaaaaagaagatggataacgaagagggagtgcaagaacagatgaaggccgacctatcggcctttaaagatcaaatggcttatatcacggaggccatgcttaagcttcaaaaactatagaagataatgctacggtagccgcttcaaatacacctagggaagcggaaccggtgctacaacccgcaataaacttgggccgagacagatacacgacaggtttcaatcggaggcatagttctcaagcctacccttatgacttgcctccggacttcactccccgtactgctacagacgatttgag

SEQ ID NO: 17550 - DNA, 421 bp, Glycine max
tgacactccagaatactttagctttgtatcccagggaggggattcaagcttaatgctgatgggcatcctttgatgattctgaggaagaacatgactactttagctcagacatggagcattttttccttttctaacctcattcccgcctcccacacatctgatgtgaccttggacatagccaaattgatttatgggattattatgaagatggacatgaacctggggtaccttatatcccaccagatctctctggttgcacagcatgacacatgcagacttggattccctaccttgatcatagctttatgcaatgccagaggagttcattcagactctatatccctatagagcttgagccctgccattaacttggcatatattaagaataactgttggaatcgtgatgatccaacagtgacat

SEQ ID NO: 17551 - DNA, 587 bp, Glycine max
agctttagatgcctttaaagtttttaatgctgaagtttagaaacaatgcggaaaacaaattaagatcgtgagatcagatagaggtggggagtactatggtagatacacagaggatggaccagcaccaagttcatttgtgaaatttcttcaagaacatgagattgttgcccaatacactatgcctggttcttcggatcagaatggtgtggcagaacgaagaaatcgaaccttattagacatggtgagaagcataaagagtaatgtaaagcttcctcaatttttgtggattgatgctcttaagacggctgcgtatatattaaactgagttccaaccaaggctgtctcaaagacaccttttgagttattcaagggttggaaaccaagtttgcgacatatacgcgtttggggatgcccgtctgaagtaagaatttataatccacaagagaagacactagaccctaagactattattgggtatttcattggatatgctcgaaggtctaaagggtataagttctattgtccatcccaccacactatgattgtggaatcaacgaatgcaatatttcttgaaaatgacttgatca

SEQ ID NO: 17552 - DNA, 480 bp, Glycine max
tttctccctctctctctctcacgttgccattcccttcttcttcctcaccattgaagctccatcaaagctccaacctttgcacaccatttctgctccaaatcgcgaaaggaagccattttcggagttgtgaagcgcacctctacgttgtgggacttcaaatttcaggcttaggtagacttcttctcacataaatttcgtgggtatggggtgtttgggagatatgatgggtagttttactaagtttatgctttatgatagttatttgtgaagaaatttgttgaaagaatgctaaacttgtcatgttgggtgtgagtcaagcttacccattctgttttaggggtttatgatgatgcttgtgtgctgaaattgctgatggaaaaactgatagagatgaagggtagagttaacctaaggttgaaaagtgagaatgtagtgatatgagtggaaaagtgtgatgctttgagggtttgaaaagctaaa

SEQ ID NO: 17553 - DNA, 572 bp, Glycine max
tgcagcttgacactattggttattcaattaggtaactgttttcctgtatactaagaataagtgttatttccttttaatcatttgaggttatatatcttcagcagcaaaaaaaagttacagcagcaaaaaaatttgagggtatatatattaatctatgctttatagtaagagagttgctagggtatctttagaaatcctagtgttatggtactgggccaatacgcacaccaagacaaagaaaaagaaggataagtatggaggaagaaagaaattttcagtaacgataccacaatccttaaattttggagggtaccatataaatgaactttctctagatcttaattatcataattaataaggttcgtctgagattttaaatctaattgaataacacatagtcgccaataatatatacaccacaaaatataatgtgaaccttctcctcatccaacttaataacggtgccactcataaaattattagctaggtaaagtataactacagaattatcatttatcttgcaatgatctaacaagaaccttatcttcattaatcttcacatcttggtcctt

SEQ ID NO: 17554 - DNA, 396 bp, Glycine max
ttagaatgaaaaataaccgaaacaaaggatgctgttcttattcttaatctttagcacttgacactacgaaaacaaattaagcagcacaaatacataactgaaaccaaatatttcaaacacccacatattcctcttaaacaaaatcacttgacactactacaaaagcagcattctacgtcggggattcaacgatggttgcaaacaattgtcttaaaatgtgagacagtgacatgttcgtaatcaagagcatgagaacgatgtcgtttgtcactaataaccatcgtagacatgcaattcgtgtggcaatttgtatttacatgactaacttacaaagacggtattgtggtgaaaaccgtctttgtatcgttaatggttacacgtgacaaacacatgagt

SEQ ID NO: 17555 - DNA, 1066 bp, Glycine max
  unsure (1)..(1066): unsure at all n locations
cgaacagagaccgngtcctattatccctactctaattatgaacgtcgtccccgctcgattacatactcancaacgccncncagcagaatggcctgaaaccctcgaacaccgcganctctanagccgactgcaagcttgcaagcttgtttgcccaacacagggtcacagaagtgagcggttttttactcaacaaacacgnctcgaacacaatcctgtgagatagggctcaccggcgacgagagccatccttaatgagacaccacatgcgcgtgatagtagacacgcaggcatgttacacgtcactctgaactcgcgaagtgctcctgcggcacaccagcaaagaagacaagcnacggggagacatcatcgcactgtgtcggcggcgcgcggcgcactcctccacaaccgcatagagagacaatccagaaaacacccatgtgcctcagtgagagacagaatctcggggactctctagcaatagacaccaagcgaacgtggtcacctcgcgcgtcctcccataaacatctttaacactgagatgaaagacaaaaggacgcacgncgcgaacgcagtcgaaaacacggtcctcttactgccggtcataatggcgagagcgggcacaaccgggcaacaaatgtcgaaggagaattctccggagaacataactcgagagaaaaaaatactcttatatgcgccccaaagccaaatcccaccggaaatagacgcccaaaccaaaccccatatatcacacgaaggggagaaacgagaacaaaacaagagcgcccgcaccccacggctgaccccaaaaaggcacagactggcgagcgccagcaaagaaaaaccatcccccacaagggagctcccatctctccaagcccccaatacacaggcgggaagagacccctttagacccaggaaaaaaatacaacccgtccgcgacacactaccaaaccggccacctacatgagggggcaaaagggccactaaccccctacaacgaagaacgataacggaacacaaacccacacaacggacacattcaaccacacacacgcgaaaaaaaacg

SEQ ID NO: 17556 - DNA, 391 bp, Glycine max
gcttgagccaacaacctctctaacactgagagacttttcaatattttctcacaaggagagggatgcagccggctttaccaaccattttcttcatgtctgtggaactgcaagcgcagcatatcgcagccgcaactgcttgctgagcacctaatgatccggactataacacatgagtcagactggggatcaaaccgagggaaaccaaggattcctaagggactaatacaaccagtttctcaatgctccaaccacagattcctgaggaagtggaccatcaagataagccagaagactcctaacaccaccttgtgatatgacacatattcttacatactcattgcttgcagcgaggttctgcaagcactctgcagcatgctctttggaacctaac

SEQ ID NO: 17557 - DNA, 314 bp, Glycine max
tggactagccagtgatggaatgaatccaaaggcgttttaatttctctacacagttcatggccaggtctagaaatttatagtttgcttccttggctgaaaatacatgatgttgtctatgatgatataaggcccaagacagccaggaaatgacattgatgtttatctaagtccgctgattgaagaccctaacaaagttgtgggacaagggggttttagtgtttgatgggttttgaaataagacttttcaaatgcgtgcaatgcttttttgtaccattaatgactttccagcatatgggaatttgagcggttaccgt

SEQ ID NO: 17558 - DNA, 542 bp, Glycine max
agctttttggctaagtagctattcataatcaaacatggcctttatcatcctcaaattcatgcatccagtccatacttcagagattcacgcaaaaaatcagtactaaatgatagtcggttctctcaaaatttaacgatcacactctcaccgggatacggttaatgcattccttcacaatcaatctgacaaacaactaacatttttagacatacttccaatcacatgctcattctcttctaatgaatgcaaacttgatcaaaacaatcatccaatcatcccaatccattcaattcatacatttgctcaatcaactcattttcaaacactcacttcataccaaacaagccactgcatacaaagttcaaccaattcattgttcaatcaagctttttgacaagcaaacaaacaactacactactgaaattcagatgctgacaattaaaaaatggaaacataaaagctgaaatttaaatgacataatcataatagaactaacaataactaaagtgttcagaatgcaaaatatttaaacatcatgctcc

SEQ ID NO: 17559 - DNA, 545 bp, Glycine max
  unsure (1)..(545): unsure at all n locations
ngcatgatttacatctccctctttctcaagcaaattcttcttgatatcatcaaaatcttcatgatttacaagtataagccttgtgtatggaatcaatgtcaatttctcttcaattttaggaaaaaaggaattattttgaagaagtgctaaagttgatgtctcgctaagcgagctcaatgcgcttagcgagtgtcatttgctaagcgaggcatcaacacgcttagcggataggaggaatctggaagggaatctgtcacgcaggcacgcgcttagtgtgtcatcagctcactcagcgagtcatgtgtcacctttagggcttagcgcgagtttggcgctgtgcaaaagttcacttactcgcgctaagcgcaagaatggcgctaagcgcgacgtccaggtcagtgagccctctttaagcctggaatggcagaagagaaagggaggctgaaatacagagcgttcaatagtcgtcagagcttgaggagtgaaatacacagaggctaagaacccaggtttgatctttatgaagattgtgagtttttgagtga

SEQ ID NO: 17560 - DNA, 479 bp, Glycine max
agcttcttatccaaggctgatcttggaggtgaaacttcttcttctatgtgtttattccctaatggatggcgcctcctctcacctcttctactttgtcttccgctgcatctccatggtggaaaatcaccattaaaggacctcattgaagctcaaagatccagcctccatagaagccccaacagcaagcttccatcaagttgtaatcagagcacaagagcttcaagtaagtgctccttaaacctccattaatttttttgctttaccttctcttccattgttgcttcttcattggtttctgcatctatctcctcacatgtcttgtgataaatgttttaaacatgattgtttagagtttccaccgattaaacttgttatagaagctagatttgattttctatggtacaaacttcttgtgcttgctcttgaaccatgaattgtgttgagtataagatcctatgagatatgtcttgatatttttt

SEQ ID NO: 17561 - DNA, 443 bp, Glycine max
  unsure (1)..(443): unsure at all n locations
tatgctgcatgaattaggccaaataaatcttcataaatgatagatagtgtgatcattctaccagtgcattaaaggcccatcccaatttatcactctgcactacttgttacatgtgttaagttttcgtttaatgagcgtactataggcaaaggtgctgaaaggcgtgcctaagccactgaggcatggtgcatgaagctttttttttcttttttttaatcattttatgcctgctatcttttcaatgagttgtgtctatcaagttaatagtgtgttgaacttatttatttatgcttggtattgtcgngcattacagccttcggacattattttcttactttcaggttttgtctgtgacattggatgaatggtcaagtgatggaatagatgcaatgatttgaaatggacgaaattcttctgctaattcaatatatgacgcttatttt

SEQ ID NO: 17562 - DNA, 544 bp, Glycine max
  unsure (1)..(544): unsure at all n locations
agctttttggcaaaatcacctaaccatctccccatgtgatctctaacaataccaccacaacctgtcatttgatgggatccctacatggaaccatctgaattgagacaaaaggctcctattgaaggaggatgtcatcttaccttaatccgagttctctgcttattggttagagttgatagtctcataggattgtccacataatccttccattgctgaatcaagaaatatcatggtttaggaaggcgtacaaaattctagtcatgaacatgcttgtttctccatagccgtaaaaaatagcaagtagttgttcataattctgcccaaggattcaaatcatccctacttgcttcagtataaaggttcagctgcaaccaatcttgaaaattcattccaaagaaattactcatgtgatntatatgaactaaatgcatccaagtccaaatcgccaaggaatagtctctcaacacatgaagccatatctcctncatagtatgacaatgatgacaaaaacgatagtccgagcccccacttgcttgtcctacta

SEQ ID NO: 17563 - DNA, 493 bp, Glycine max
tctctgccaaattctgagaaccacgtattagatccacatatttctggtgttgttctgcctactaacatcttttcttttccagcctccaggacataatcataaatggtttagactctggtgcttcttgtcatatatacaattttcactcccatacacctttccaaaacatatgtatcactctaccaaatggttttaaaaatcctatttctgccattggtttttcatatcaacttaatatcatttactgctttgtggatacattatccttacactataacattttacaagatcactgggacatcattggtacgtccacttaaagggaggaagctgatttgcaggttacagaagcccaactatggtcttagacaagcttagagacaatggtttcacaagttctccatacctggctcaacaatggtttcacctaattctgaaagtgactacttcctattcactattggttctggtctactagtggtttcctagctta

SEQ ID NO: 17564 - DNA, 342 bp, Glycine max
ctgcttcatgacaagtactttagtgatgagcctctttctggtctggtttctgagctgcgaggttctcttaccagaaaagagcaagatggggattcccctggcggggggggtgatatcaacgatatggattccgattccgattcccagtttgatgagtttggccctctgaatatcacaaagactggtgctgggtcctccatacagtttccttgaagaattcaaggtacattgtgttcttggaactgcctttttgccttttctgtcgtgtcgctcaactgttactatttgctggaaattcattcgtgagaatattgataagaaaaatcccttttttttttttga

SEQ ID NO: 17565 - DNA, 572 bp, Glycine max
  unsure (1)..(572): unsure at all n locations
tctagctttttaattagtttataagtttcagttaatccatgattttttaatttcaataatacttcacttaatttttttataaaaaaataaattttagtgtattttatactaatttgtttcttatagataggaatgaaagaagtattaattacccattttaatttacatttctctcacttttcattccatctatcttagtttgtttaaaagttgtacgaaagtattaaataaacagagtttttcttaaatttacaaacatagctgaatgaaaatttccatacgttataatagacaaaggaccatagtcctccctgggaattaatgagaaatttgccctacggcagtaatctagctagaatgctacatggtccagatcgctattctggagtgcaagtatacgcatgcatggtgcacatatatatgctcaaaaatatggaccatgtgttttcaatatgtatatntactacctttaatatttgtggtccaaaaagatntattgtaataataacccgataatggggtattctatatctttctgcaggaccatatntgccattagtttaattagatga

SEQ ID NO: 17566 - DNA, 627 bp, Glycine max
  unsure (1)..(627): unsure at all n locations
agcttttgaaatttaaattcaaatttctaaaagctgttacaaacaatttaaacttctggtaatcgattacatactgtgcataacgattacagccttttgaaatcaaattcgaaacttgtaaaacagttttggaaatcaattttgccactggtaatcgattaccagagagaaaatatcatatttttgaaatctcaaaaagcttttgtaaaatatcctttagccaaacctgtgcagcatcgattaaggaattctttctaagatcctaggaactaagtacattgttcttcttgaatttttggattcttgacttgaattgcactcatctttggcatcatcaaaacttcacatcatatatgcttctacaatctcccattttttgatgatgacaataatctgaaatcaagataaacaatatacaatttgataatgcgtgctcacaacccttactcccccttaagattggaatntatgcctaagttcatgataaattctacccttgttctctccccctttggcaacatcaaaaagccaaaaacgcctggagaaaggaanctaggcaacatcaagatcatagcacaattcatccataaactgattcaatccatagaataaaccaagcaagtctta

SEQ ID NO: 17567 - DNA, 420 bp, Glycine max
  unsure (1)..(420): unsure at all n locations
tcatcctcagatccctcttgttggactaggcttaatttatacaaccctcttaggtttagactaccttaaactaagcttcgtcctcatatccctcatgtaagactagactcagctcaagtagcttacgaaagtttagcataatgtagcctaagcttcgtccgcagatccctcatgtaagactaggcctaaactaaacaatattattgtaacaacataattaaaaccaaaacttaacccacagatacctcatgtaaggttaagtttcgatcctgcttcaatcaagttctaaggcaacagtacatttcccaatgctaaagtcacctaactgtgcacacaaatgggtgatcagaccaaaagcatacaaacatcaagcattgaacacagaanacacaatcaattagatattatgtatttacatca

SEQ ID NO: 17568 - DNA, 367 bp, Glycine max
agctttgagccaaaatcctgactcaccataaacctttactccaggtgagaatgccaatccttaccctcggaagcaaaaaaaaaggagaagagaaggaaaatttccaatcaaagaggaagcataaaaaggaaagaaaggaaattcccaatcaaagagtgggagaaagccaaaaggaaagaaagaaaattcccaatctaagaatgggagaaagaaaaaaagagaaaagaaggaaagaaagcttctggtcaaggatcgaaagaaaacaaaagaaatatgcagagaggtctttggaccggacaatatctgaacaatacagaattgtcaccaaatgaacaaaaaaaaaggaaaggaaaccacgacctaaaat

SEQ ID NO: 17569 - DNA, 405 bp, Glycine max
  unsure (1)..(405): unsure at all n locations
catttaccacagaattcaaacttaaccttccaactctcaaagcctcactctttttccactcataacaccacattctcactttccaatcctaggttaactctacatttcatctctaacaagtttccatgggcaaatctcagcatacaaacatcacaaacatcatcacaaaaccctaaaacagaatgggtatgtctaactcatccaaacatggtaatttcaacaagctttcagcaaatgtcttcacaaataatcatcacacagcagaaacctatcaagactacccatcatatctcccaaaaccccatacccacgaaatntaagagagaaagaagtccacccanacctaaattttcgaagtcccactcgtagccacgcacttcacgaccccgaaaatgccctcctttc

SEQ ID NO: 17570 - DNA, 583 bp, Glycine max
agcttgccgcccagctcacccatgtatgcaggttgcttcctccagaagcaacagccttctggaggaatattctggagggcccaagtgggcctggttgctatttgcacccccctgtttactaaatgcacccccctttctattttttttgtaattcttttttttgtaacgctactaaactatatgaatttcgtaacgatacttattttccttccgcaaggttacgaatccttacagattatgtatttactctttttagccttcgaagaagttacggaaactcacggattgcgcaaaaacacctcttttcgatttccgccacattacggaatttcacgaatcacgcaagcttgctccctttcgatttctgagacgtctcgggacttcatttattgcatgtcatcaagtaataatccccggacgatattagggtatgacacctatgaacatcttttttcatatagggccaaaagaaatttttctgaggaagacaagagtcttatcaattccaaaatgccccattagcccacactcatggctctttttgaccaccacttctaatggatcctaggctatacaaagcctt

SEQ ID NO: 17571 - DNA, 807 bp, Glycine max
  unsure (1)..(807): unsure at all n locations
aaacatcttcagccaattgcaaaatattagagtctcaanttagtggcttcaaccctctgcaaagtgcttttcgggggtccctgtaccataagcacttagaatgctttgtacctgagagacttaatcaccttcgtcaagtcaatatacgacatagtatccacatcccaaccccattcttcttcaacgatctcaccattgacatacacagtagatggcttataaataaacatccctccatggtgaatctttaacctcattgtttgttcttcggttggcctgaaaaaatacgaacgacaacaaagcccaaaaaattaataaaaacaacacccaccaccaaaggttttcaaaacaaaacaaaaacaaaagccaaaattgggaccaccacaaaaaaaaaatagcattcacgtttccaggtgaacacataaggaccaccacaaaaaaataataataaatatatatatatatatatatatatatatatatatatatatatatatatatatatatatatatcagcccgcaccccatcaaagacaaaatcgggaccacatcaacaaacaaaccccacaaataaccctatggacgccagaacctcacacaaatggacaaaactatctgtcattattatataaacnaaactttcacatacacaatacttctatactctgggggaccacatnaacaaacaaaccccacaaataacctatcttatctgtaagaaaagggctttcatntttctacgaaattaacaacgatttttttgccatgaccccaccaacaaaccgaacgggaaccttacattgacaa

SEQ ID NO: 17572 - DNA, 357 bp, Glycine max
agcttcttttggaccttgaacaattattaactcctctttcagaaccatgctatgtgctcgcgactggtctctttcttcccttcgcaacttgagttcactattgctaccccatagagctccgcgaaatttgttccggccatactcttccttgcgagccctcttggtctcttgttcaagggctcttgcagtaattgcattctcttcccgtaacccggcacactccttccgaacgtgtgtagcggccaacttgaacttctccttggcaagttttgcctttcctaactcgcttttgagagtttggacttcttcgtcctcttccggtgccttaaaactctcttcgctgaccacttttaactt

SEQ ID NO: 17573 - DNA, 225 bp, Glycine max
aaagagagatgcaatatcacgttggataatatttaaaacgagcaaatcaatggttacataaaggaagggagccctatataatcaaacttggaactaatctataatgaactaaactaagtttggaactaactaaattaaattgtaataagataaactaataactaacttggaatcaactaaattattctttaactaactagcgaaggattggctttattttacaaa

SEQ ID NO: 17574 - DNA, 365 bp, Glycine max
agcttataaatcattaaaattgatttgttttgttatctttaaaaaaatttgatttcacgtgcatcaaaactttgttttgttttaaaaaattatccattaggaaacaattgtgtgtaatatcgcattatttctacaatatgtcgtttcaaatgatttctttataattataaagctgaagttttccgacccaagaattaaaggtctccctagtgaaatatcattttaacttacgaaataatttgggtcagtttatttgttaaaaagtagagaccattgttatctataaaagatgaattgatgtaaataaaaagactaaattgatcgatttttttattgtttaacaacaaaattggtaattttcattt

SEQ ID NO: 17575 - DNA, 230 bp, Glycine max
ttttttaagcgaaggcatttgactggagcccaagtcgcacaaagaagaacaaaaatccgcgtcaatcccaactccaacacctatcaatgggcggaatgggagaaaaaataaaaaaatgtcttccacacaaacagccgctatgaataagggagcccaggaaaagggcccccctcttagagacaacgacgagggttagcagagcgccccacagttgattttaccaaaacggg

SEQ ID NO: 17576 - DNA, 362 bp, Glycine max
gcatgcaagcttcaacatcagaccacttcctgtgtgctggaactttttcacatggacttgatggggcctatgcaagccgaaagccttggaggaaagaggtatgcctatgttgctgtggatgatttctccagattcacctgggtcaactttatcagagaaaaatcagacgcctttgaagtattcaaggagttgagtctaatacttcaaagagaaaaagactgtgtgatcaagagaatcaggagtgaccatggcagagagtttgaaaacagcaagcttactgaatactgcacatctgagggcatcactcatgagttctctgcagccattacaccacagcgaaatggcatatttgaaaggaaaaa

SEQ ID NO: 17577 - DNA, 316 bp, Glycine max
  unsure (1)..(316): unsure at all n locations
tcattcaagacctttaccagcaaagccttatgaggcttatagctcatgagttcttccaaaaaagataccctgcccggngtctgttgagctggtcaatgaccttgaactcgctctgctgaataatgcggagaaactcgcttgcttgctctagcgacacttgcttcatgccacaaccatcccttttctctggaagacccttcactggaatatcctcgttcggagagagggccgccttgtcattttgatcttccaccatctaggcctttcctttaacgttagcaggttgtgacggcaggttggagggtgaaaacacgcg

SEQ ID NO: 17578 - DNA, 358 bp, Glycine max
agcttgttgagttagtgtggacttatagaccacaaagttatagatagacaagtaagaacaaggagtgaaagagttggcagtggtgaaggtagcagtagcagtagaagcgagtttgtaatgagcttaacgatcaatggagtttaatcgcagaaccatcctcctgtactcttgttcgcaacaatagcaatcgaaacagaatcagaagaaagcagcatcatatcccgattccagcaataccttcaaatcgacaccgcccaacccactccgcgctaccattaatccgcctcatttctcacatcccaagccaaatccctctccctcgaatcccaaaccatcgagttcgttccagggaagccac

SEQ ID NO: 17579 - DNA, 316 bp, Glycine max
  unsure (1)..(316): unsure at all n locations
tgctctaaatttacattgatgttcgtatttatgggaggaggttgtatgtcatttttgttttaagagtagtgtcccgcngtaaaactaactttccaaatgtttgccttcgcaggaaatggccccgaggaagcttgcctcaaagaggtccaggaaggacaaggcagccgaaggaactagttccgctccggagtatgatagtcaccgctttaggagtgctgtacaccagcagcgcttcgaggccatcaagggatggtcggttctccgggagcgacgcgtccagctcagggacgacgagtatactgatttccaggaggaa

SEQ ID NO: 17580 - DNA, 364 bp, Glycine max
agcttcctactctttttataggtttaaggtagcttatttttttcacgctaactgtgcactaagcatgcactcctgggcttagcaagaatagtggtttaatcacgcgcttaacacggtgttcacgttaagcacgaccttggactttctcgtgagtcttcttcgtgctaagtgagtgttgatcgctaagcgagcacgtgtgctgggcctgtcttgtgtgttgggcagttatcaacaagtgtaacacaagtttatatataggagtttaagatgacaattaataaaaaattaaacatggcatatccacaggcaaaattgatatttaatttattaggaactcgttaaggatataaaaagaatcataatc

SEQ ID NO: 17581 - DNA, 319 bp, Glycine max
tcctcattaaaattacttgcccacatttttcaattcctacaaaggttagtcagattctttgtgatatggaaatactatcataatttgcaattgttgttaacattggtttggaaagaataccgtggttttcaatctgtcggttgtcttttctttggaattattttacatacacggcagctttgcttctaatgtttgatctaaccacagcttagccatgtcataacttctgttttcaaatattattcctcattgtggatttgcataattatatagtgactatggaaagtcttcaattatatagtaactattttctgaatct

SEQ ID NO: 17582 - DNA, 297 bp, Glycine max
gaatgcaccatgcaagtggttgtacaaaattcacgtgttgaaacacacatgtgagcattagctcatttttgaataccacaacccctcgactagatgtttttgaaagatctttgaataacagcttcttgcccagatggtaagatctccttaatggaaaaacaataaaacaaaccattaatcctttgtaaacgaaacttgttacaacttgcaacacaaagccaatggtttataatgtcaccttataaactgagccaaagcctgcttgacctaactagttgtctggagaaaaatcattgg

SEQ ID NO: 17583 - DNA, 228 bp, Glycine max
tgatagaatggattacactttatatgggatatcactcgcacatttatttacattctccctcttcttgcccaaaatatatactaatatgcactccaatggtgtgaaaatatcttctcttttttcagcaaaacaccgcatgatcaattatgcttttaagtcgaggccctgctttttgtgctagtgatgatattatttggggcccactctagtttattttacctaaactgg

SEQ ID NO: 17584 - DNA, 353 bp, Glycine max
agcttttggcttagaagaagattaatgatgagtagcatgggtttcaagatttctcaaaagttgttctaaaaagttgtaaaagttattgaaatgcaagtcaaggtcttgcttttatagactcttcatgtctagtcaagaaaaccattggaagagttataaccttgagaaaaatcctgaaaaccattggaagagttacatctcttgactttttattcaaaacttgtcactggtaatcgattaccaaaaccatgtaatcgattacacaaagcattttatgaaaggatgtgactcttcacaattgaacttgaatttcaatgttcatatacactggtaattgattaccaatatattgg

SEQ ID NO: 17585 - DNA, 312 bp, Glycine max
tgtcactggagctgacccatcaactgttctaactcttttagactggtgatacctaggctctggaccctgactgatagaacctttttttaagcgaaggcatttgacttgatcccatgttttactaaagtgaacaaaaattggtgcgaatcaaaactccaacatttatcatgggtggaatggatgaatgcatgaagaaatgcatatgacacagatgcaatttatgaatatgggagcccgggaaattgtctccttcttagatacaacgtcttgggttagcaaagtgcccaacgtatgtatttaagaaagtgacac

SEQ ID NO: 17586 - DNA, 335 bp, Glycine max
accgtatattgttttctttaatttgcacgccatgtgttcctttccttcaactgagaaccccattggttggtccatataaacattctcatctaaatctccattaagaaagatagttttcacatacatctgatgtagctccaagtcataatgggctactaatgctatgataatcttgaaaaaatcctttcatgagaccggtgaaaatgtctctttataatcaatgtcatctttctgagtaaatcccttagcaacaagtctagtcttgtaacgttcaaggttaccatgagagtcacgtttagtcttaaagacccatttacaaccaactctcttacaaa

SEQ ID NO: 17587 - DNA, 310 bp, Glycine max
tgaaccattttttgcaaatttcgagtttataattcactaccatctctgcaaagaatcaaatttatagggggaaataaatggcactagaaccacaagttcaactggattttagtcaaaataagtgcaaatggtgggaggcaacaacgtaacctgttaggagaaggtttgggaggctatacaaatcatcctgttggatatgtaattaatcttagtttagtccaagttcacatttaatcttagtgaggttcaggtgggatcagtatcctctcgtattcgggggtaacatgtacaatatataactaatataaag

SEQ ID NO: 17588 - DNA, 344 bp, Glycine max
  unsure (1)..(344): unsure at all n locations
agctatactttagattttantaattacccactaacctataattaaaataacttaatgccattaacctagggaattaaaacaaactaaatggctgagtgtaactgaaattgttggcaaccaaaagtcacccccaacagccaacaagtcagccaccatttggtctcccaaaaggctgatgcctaagttgccaattgggcccttattacaacttgaactaaagcccttttagttgattaacccaaaacatatttttggtcatccaactttacaaggattgggccattatttaaacaaactaaacactcttaaattgaaataaagtggtgtcatttactcctccattt

SEQ ID NO: 17589 - DNA, 354 bp, Glycine max
  unsure (1)..(354): unsure at all n locations
agctttgctttctatttacactattcttgtcattggtgcaaagtgcaaattgactaatgatgaagtttattgggtggccagccataataatcccacttaattagctcagttgcacactcttgcttgaagtgcagaataaagttcatcacaagtaaaaagctaattcttcggaatttgggtttgagtttaataaatcaattataaaaactgatttataaagtgtaaatactctcttatttttatataatattttggtcatattattaattaatgtgtgatttctaatatatttttcttacgttgaacatgagatattttaagcgtgaggtttantaatatttgatcgattggcat

SEQ ID NO: 17590 - DNA, 305 bp, Glycine max
  unsure (1)..(305): unsure at all n locations
tgctctgtaagtctcctatttctattttataagctagatagggatagaatctttttggaaatgaaattnnaatttcagatccacgaggtttaagttggtctctctcttgctgagtttctaatattgtatacagagcttgaaggtcctgcaatggccgattctaatccaccacctctggctcctccttacttttctccttctgatttcgctaaatctagtataaaagctgagatttagactctctctctctgtgtctaataatgtagattatcttgaagataagcctccttgtttccttatgatct

SEQ ID NO: 17591 - DNA, 338 bp, Glycine max
agcttatgctaagttaggctaatctttcgtaagctgcttgagctgagtcaagtcttacaagagggatctgcggacaaaactcagtttaagttagtctaaacctaagagggccgtctaaattgggcctagtccaacaagagggatctaaggacgaagcttagatagattcggtctgacgagggatcgaagtttattaatttaggctacaacatacaacacaagagcatgattgattagagaaatatatttatattcataagcttgtttgttagaaagacccaatatttctacctactgctgtcacttttacgtaccttgcattttatagtttttagcat

SEQ ID NO: 17592 - DNA, 225 bp, Glycine max
atatattaagcataattgagaggcatccgtctgctattaagttgagatggaaaaaaatggagttatataactcttgattcctataaaataggtgtttttttagttctttaaagattttggttttgttttagttcctacaaattttaaaaaaaatggattggccctgctatttattgagcaaagttggcaatccattgactatcatgtcatcaacaaggagtctca

SEQ ID NO: 17593 - DNA, 334 bp, Glycine max
agcttgcttgtggggcttctatttaggttggatctttgagcttcaatgaggtcctttaatggtgattttccaccatggaaatgcagcggaagacaaaggaaaataggtgagaagaagccccatccactagggaataaaccatggaagaaagagcttcaccaccaagatgagccttggataagaagcttggaaagatgcttcaatggagcaaaagaaagagggagagaacgagagaagggggagcacgaaattgaacgaataaaagagggagagaagttgaactttgagttgtgtctcacaagactctcattcatcaaagttgcaacaagtgtta

SEQ ID NO: 17594 - DNA, 140 bp, Glycine max
ctgaaaacacccattagaaactgaaacgtataacttgcttacgggacaacatggggctttcgtgtaacctttcatagtcgcccgatatatctacaagtctgacattatattgatgagacggatatggagaaacagatact

SEQ ID NO: 17595 - DNA, 363 bp, Glycine max
agcttagatggttcattgctgatttattacaaatgagatagatgagtaacctataaatgcttaaaaagattaataaactatattgtagcacatatagtagagaaaaaggctagagatagtgtagagaccacttgttttagattcaactctagttatctcttccaagatttggtcttgtataagaaaagaaccaatagtaaaggtgtgccaacattgtctatgagattcgttaagataacacatctgaggtattgtttgatttgatgcatgattgctctgtcatggtttttttcattaaaaggtgcctcaatgcattaagggagaagggtgtttataaaatattgtcggtctcaaatcctaagc

SEQ ID NO: 17596 - DNA, 361 bp, Glycine max
agcttgcttatgtagagagatgtttgtggaaattattttgtgagtgaaaatgttagcttgcatgacagggaaatagtgaaggtgaaactaattattgtaacccggtgagttgtgtgaaccttaactgtgaaagaacgactagcatcaagtactgatttttgcatgaatctttgattactgaatgtatgcatgatgtggaaatgatgaaggccatgttgaatttatttcagccacttagccaaacaactaccctatattaatgaatgattgaatcccttgcaccccttttgagcctaaatgttaatgaatgagtcattgaaatgagctaaatgcaaatgctatctttgtacaccctatctta

SEQ ID NO: 17597 - DNA, 254 bp, Glycine max
actcaaactagaatgtgaccataatatagagaccacctttgcccttttccttcgttgagggtcctttttaaaaaattaattatacctctacattaagctcacaagcgctcaagtaactgaaaatgtcaaattcgattttgataaaagagtttttccccataacctcggaggcggcggtgcattatcactgtataatcgctcccccatggtgatataacacgattactattacgacttagaaattattgatgtgg

SEQ ID NO: 17598 - DNA, 350 bp, Glycine max
agcttgagatgagtaagtatagattggtgaaacttcctgcttttattcgttgaccacagagtggtacctggagatatgtcgcgggggtcaggagaccttggggacgtcaggtggggtgctattgcccaaaaccaagcttgaccaatcccgacccaacccgggcatagtcggtcagtgagaacctgtgatgtacctaagcaggcgagctcctggcagtcaacagataaaaggaacaaagaccacaaagcaaggaggcttgtgtggtggctggccagctgtgaatcttgtgtgatatatggattgtggcctctggtaatcgattaccaagggtgggtaagggtaatcgatta

SEQ ID NO: 17599 - DNA, 320 bp, Glycine max
  unsure (1)..(320): unsure at all n locations
taacaagcttttttttatagtttggctttggcctttttatctaaaaaagcttttcaaaaagcttgagcttagcctttatnaaaacaagccaagccgagccgagccttaaataggccgagccattggccctagacaagcggctcggctcattttcatccctagccctgacaaccaggctcaccagggccaatgagtatcctgagttagaactgtcggggtttgggcaacccaagcacagtttcaacacttccttgtctgagcatatcgggtaaacatcttttttccctatggaactttggttcattcaaattgcattgaga

SEQ ID NO: 17600 - DNA, 353 bp, Glycine max
agctttgaatgctctattcaatgtgttttgacaagaatatcttcagactgatcaacacttgcacagtggccaaggatgcgtgggagatcctgaaaaccactcatgaaggaacctccaaggtaaagatgtccagactgcaactattggctacaaaattcgaaaatctgaagatgaaggaggaagaatgtattcatgacttccacatgaacattcttgaaattgccaatgcttgcactgccttgggagagaagatgacagatgaaaagctggtgagaaagatcctcagatccttgcctaagagatttgacatgaaagtcactgcaatagaggaggcccaagacatttgcaacatg

SEQ ID NO: 17601 - DNA, 285 bp, Glycine max
  unsure (1)..(285): unsure at all n locations
tcaacatcagaccacttcagggggcttttactacttctcatggacttgatggggcctatgcaagtagaaagccttggnngaaagaggtatgcctatgttgttgtggatgatttctccagatttacctgggtcaactttttcagagagaaatcagacacctttgaagtattcaaagagttgagtctaagacttcaaagagaaaaaaactgtgtcatcaagagaattaggagtgaccatggcagagagtttgaaaacggcaagtttactgaattctgcccatctgaa

SEQ ID NO: 17602 - DNA, 368 bp, Glycine max
agcttgcatttggaattgcgaaatccccactccatcattaggattagtacctgacatctcaaacaaacaaatcaaatgtaacaagacaattatagttgctgtttgaatacctcacccgctcaagtgtatcacacaatgatggcttttctctaatgaaacaatcttgccttttaccactctaattccccttgagttcttagacaattcaagagattatggccacaacaaagaacaattcaccaatatgcgtaaggtaaggctagagagacaaggaaaaggttaaccaagaaaaaggctaacaatgtttttaggcgcaaatgaaggaaataaaattcagaatttaggaattcaagtaacaatccttcatg

SEQ ID NO: 17603 - DNA, 171 bp, Glycine max
  unsure (1)..(171): unsure at all n locations
ttgaggatttggtctttgccagtgaattgatcgatgtgggtctgaaaaaaggcaaatttgatcatcctactangacgacgagaaaactggggcaaataaagagggtgaggatgagggaaaaacccatgctgtgactgccattcctgtacggccaagtttcccaccaaccca

SEQ ID NO: 17604 - DNA, 409 bp, Glycine max
  unsure (1)..(409): unsure at all n locations
gctctgnannaatgaacctgangtgacgcttgatgcaccggatcttaagcacctgctgctgcagcttaattttattattcatatgaaaaaaaaatcatgtattttaattttaattttaatatttttttgctatgcaattttaattttaattttaatatctcatcaacttaaattaaatatttgaataatattatgtaaataaaacttataatattttttatttctcataatcacattcactattttattttatatatatatatatatatatatatatatatatatatatatatatatatatatatatatatatatacttctcttatttatgaaaaaattatacaaatgatgtgatggatataatttctttttaagtaatgatatgtgaacatgtatacactttacactt

SEQ ID NO: 17605 - DNA, 285 bp, Glycine max
aggacacccaactgggattgtacacactggcataaaaagaaggggggccccaacagggaaaataaaaaggcaacctgaatttaattgaggggccccaagaatgggggaaattggcctccccaaaaaaagggagggaaaaaaaaccccagaagaaaactggtccactggatagggtggacacccaaggaccacataaataagagacaaaatggtttcaaagacactattaaccacaaaatagggggagtgccccacacaaaggggccccgagaaagaaagaaaaaa

SEQ ID NO: 17606 - DNA, 341 bp, Glycine max
agcttaacttcaaagaaagtgtttggcttgtgtaaggatgaaatttcaacgcgtattcataaattaaagagaaacattatctcccttacacgacggcttttgccgactaagctcagtcaacagaccctatactctctttctctttctctctctctctctctctcttctctgagggccaagagtctgccattgacggtgtggaaggaagaatttttcattttttcccccttcgacggattacttttttttttcttagaaaaaaattacttatataataaaaaataataaaatatttaatatgtgtatataagttcatgaactggttaagattttatttactc

SEQ ID NO: 17607 - DNA, 233 bp, Glycine max
atcccctacttttgatgattgtcaagaattactaatcgtgctttgaatagatctacacttccatcaattttatgctttattttgtacacccacttgaagccaagtgctttctttcttagaggcaattgtgtgactgttcaagttccattggtttcaggggcatgtatctaactttacactgtatctctccatcggctatctttcaccgcgtcagtataagtgacaaacttttt

SEQ ID NO: 17608 - DNA, 345 bp, Glycine max
agcttgtgtttcttcacgtctagtttatgaatgtagcatatagatccaaagacccttaggtgctttgctgatggcttcttcctgttccaagcttcaattggagtcttgtcttttacagacttagttggacatctgttgagtatgtaaacagcagtgtagactgcttcagcccagaatgtgttaggtagtcccttttccttgagcatcgatctagccatctccataactgtgtgattctttctctcgggcactccattttgttgaggagaatatgcaattgtaagttgtctctcaatgccttcatcctcacaaaatctttcaaactcgcgagaggtgtactctttg

SEQ ID NO: 17609 - DNA, 261 bp, Glycine max
  unsure (1)..(261): unsure at all n locations
ctcagctactcagcttacccccaaaggggggcctttcaccactttatctggacaagagggggcttatgcacgttcacagcctttgtngaatatgttttcggatccccccgaggacgatctgtcaaagcttacctgactttaaaatatgcacccgaccattgggatcccttagttgggtaccctgcctccaaaagaggattgaaaatccagataccctacttcctcaataaaagactgcccgaccaggtctcattgtttcac

SEQ ID NO: 17610 - DNA, 345 bp, Glycine max
agctttactaggcttgagctcggtttgagttgaatatgcaaggcttgagcttgactcattacctatcataggcttttttaaaggctcgacttggcttacataaaagcctggcttggcctacgagcctatttaaaagcttgcttaaagatgtttttgatcaattaattattttaaacctagtgaaatactaactaaaaaaacttataaaatttcatataagtaatgtacaaatccaaaaataattgataaataaaatcatattgaattcaagtcgttaaaatacaaagtatatcaaaagaaaatgaaaaaacagagcataatattaaaaaatgtatggattataga

SEQ ID NO: 17611 - DNA, 310 bp, Glycine max
tctaaacaaggtatctctattattcattacgatttttaaccagctgggctataataataaatttttttgggttgcaaatagttaaacttattggtaatgcctgttactgaactaaatagaaacaaaattttttaagctgagatctgcaggagcaatagtggccttagattttgaatctgtgaaagatggtgatttaactgtaatgtcaaatggagctcctaagaggactttcaagtttgatgttgtctttggtccccaagctgagcaaggtattgatgctttcatgccatgaattctttaaaaaatcccc

SEQ ID NO: 17612 - DNA, 354 bp, Glycine max
agcttggattcttttgagttgactataatattcattatgaagcttaagtttaatcacacttaaaatttctaggtacttcctaatgtatctatatgtacatttattaatataaattttatatataaaagaaaagttaccataataaataattgtttttattaaatcaaataagagaccaataaaaaatttatccgaaaacacattaaagattaaattatttgggtgaataattttttttatttcattgctataataatataaatatatttttatgataatttttatataaataaaattaatgtttaaaataaatttgtttagacaagttattatttatttttttatttatcatct

SEQ ID NO: 17613 - DNA, 316 bp, Glycine max
gctttgtgactggaccatggctttttttggttttaaaacttcaaaaagaaggtctatcctttttgaacccattcttttaaagtctatgaatttaagcaccgagttagatgggaacattaatcattcttcaagtccaaaaggctcttaagtgaggagatgtcttggagatttttattgatatctgactacacctaagagttaatcctgatggtggctaactttttccataattgaaaatttgatcaccacgacttttgaacttgggaaggtcaatgtatctgacgaatatttttagtccagagcatctgcaagtgct

SEQ ID NO: 17614 - DNA, 150 bp, Glycine max
  unsure (1)..(150): unsure at all n locations
agcttccttctaagttgtctatgtgtcaacctacacactcttctgttttgcaagttacattgttgaccatctgtggtgaggctcatgaaatangccaatgtatttccactgaagaaaacactcaagaaattcattatatgggaaatcaac

SEQ ID NO: 17615 - DNA, 308 bp, Glycine max
tcttgaggaaacctcttattgaagctttttgaagaagctacatgagctggctcggaaaaaacgcttcccgcctttgttaaccgttggagcttctcgaaatttggtctgcagcttcacaagacacttgtccacgatctgaccgttgggatctttgagaagatgtctggagtgtgcgcaacgtttccgtgtccgagaccattcctcacttgagcattttcagcctttgctttcgtgtagcttaagaaaaacaccatttcttctcctttctttcttccaaagccattttaacgtcccaagaactttctcca

SEQ ID NO: 17616 - DNA, 336 bp, Glycine max
agcttcctcgaggccatttcctgctaaggcaaacatttggaaagttagttttaccaaggaatgctactcttaaaacaaaaatgtcatacaacctcctccaataaatacaaacatcaatgtaaatttagagcaagcttatgcgcatacttctttacgaacgttcacttgcacaagacattcttataactaagaaaaatgcacccctgtacaatcaaggcaccttcgttacctagattatttatatgtacttccaaggtgtatttgttacctacatctcatgcacttccttggctaaatttacatacatgcgtactcaaagcatttggggtaccaaaa

SEQ ID NO: 17617 - DNA, 307 bp, Glycine max
  unsure (1)..(307): unsure at all n locations
tgtaagattatggggtacccatcacatgtggtactaagtggcggtcgggcgatggtgcacaacaagnnnccacatccacaatgcgctcataaacccaccatcccctgttgcccacctccatctgagctcacgtactcccacgtagcccatattctcgtttctctcaacaccgggtccccatcaatcctcccaagcttccacaacatccaagcaaaacaacattcaaacagcacaagctatcacagccaagcaaaacagggcaaaggcagaaaactctgctcaacacaccaaccaaaatcatagcttt

SEQ ID NO: 17618 - DNA, 307 bp, Glycine max
gcttaaagtatgcccgagtcatttattcctatgagatgttgttgaagtattgtcgatcagaattgccattccttggattatagggttgaaccaagctcatgcttttacaaaaaggttcatcaagtcaagttgaaatatggaagtaaccgtcttgcaaaattggggcaaaagatgaatcgagtcacatcactgcttcgtctactgccgaacatatttaggattgttgatgtccttgtgacttgcaaggacaccttgacaaagatgtcatggaccatgttgaaaatctaaattgattcaaccccatatc

SEQ ID NO: 17619 - DNA, 319 bp, Glycine max
  unsure (1)..(319): unsure at all n locations
tgtgcaaatcataatcactcctacatgttttctctattttgcattgtatctttacccactcctcacgtttggttttttnnggaaaaacaccataactaaacgcgccacaaggcatccctatcgcaccagatccaaatctagaacgatgggtgatcaagaggagacacaggaatagatgaaagccgacatgtcggctctgaaagaacaaatggcctccatgatggaggccatgttaagtatgaagcagctcatagagaagaacgcggccaccgctgccgctgtcagttcggctgccgaagcagacccgactctcttggca

SEQ ID NO: 17620 - DNA, 360 bp, Glycine max
  unsure (1)..(360): unsure at all n locations
catgcaagctaatataactctttagacttttttggaaggtttattgacgaagtttaaataaaantaggctcactagagggatcttgatttgagtagtttcttagcataagaacactatgataacgttgaatagagaaaaatagatattaaacatcaagagaaattcagtagaacgacccaacgctttttacttgatagttttcatcctcataatttagatatttagtttatgtgcaaatagattttagtccagaatctaaattgatatttactctgcttttaatccatacaaatgtttgcacactaaatgtacaatggttttactctgcttttaattctgtgagaatatgaaactcaatc

SEQ ID NO: 17621 - DNA, 321 bp, Glycine max
  unsure (1)..(321): unsure at all n locations
actaagcttctcgcctgattctangcgtccaccaattgttctgtttcttgaacagaccacgaaacctgtacgcattatgtgccccctcctgacagccctgttatagtagtcggctttgcacccatcttcaaaagataattgggggaaagagaaacatgattggcagaatacactttatatgttaaatggagccactaatagaaagtgaatgtgcatgtgtacaccaatagagggtgtctactattatgtattaaagtaaaataaacatatacagcatcatcaaaaccaagacctccaaccattgaaatagctataaagcat

SEQ ID NO: 17622 - DNA, 323 bp, Glycine max
agcttttaatggaggctcacaattttattcatgaacatttttaggcatatccttttttgggaactgatattgcgactttatcatgttagctaactcgcattcataattttaattatctctcatacatttaatcatgtgaaacgcaatgattatattaatttctctcttgatttattccatttccacacattggttacattatataatcaccaagttctaagtcgcaccatccaaagtgcatctcatgatgaaacctgaatggctaatgttgataccaacggaaaattttgataataatagcctctgatctattggctcaagct

SEQ ID NO: 17623 - DNA, 316 bp, Glycine max
  unsure (1)..(316): unsure at all n locations
ttgatcaaaactttaacaagctagaggtgttcttttctttattcttctcacaatgagagcagatgggtaccaaaagcnagctgaaaaggcataaccatcttccttgatagggactaaaggtggctcccccaataatacaaggcagcccaaccacatgatcaaagaatcaacccaaattgatgaacaagcaataatcatgatggaagatgcaacaacatctacaattgagcttccccacattgaccatgctccttttgagagacctaatgcatgcaatagttattcttctacaaatattcaccagcatgaattcaac

SEQ ID NO: 17624 - DNA, 427 bp, Glycine max
  unsure (1)..(427): unsure at all n locations
ttgacccttgaagttgagccttganacccncgggagcangaanagccgacctgcgagcatgcaacttttattttgtggaccgtttgcatttcttacatcatgggaggcgcccgatcattgaacacgagactttgcttcccacgatgcttcgttaccatgctcgtctgagtgggctctctaaacaaaaacatgcagcacccaactgtcagggcaaattagcgagccatgcatgccggccgctgtttgtgcctaaacccatcccggggtcataatcgtccccgagtgtaactaggcccataattatcagctgcaactgcaccggacaaacgcttgcccgatagagggtactccaccagaagaacatgacagaccctcctgccttagacctgaaaaacagtgttgtgaacgaacatgtcagccctccaac

SEQ ID NO: 17625 - DNA, 315 bp, Glycine max
tagaacataaaacatgcaatcctactcttcttaaacctagatacccatattaccgacttcttatgggtcaaatgtttcttttggacttggaatattcaaagtccccttttttctttttgccaaacggcgccacttaatttgttgttaattgataaggcatcatttcctttcttttccccctgtttttcctaccaaatgctatgggttgcccttttgattatttttgtttggtatgaccccttttgattattttaatttgctttgccttgagatagttcaaccgtacaagtacttggagctgccaaatttttatgc

SEQ ID NO: 17626 - DNA, 358 bp, Glycine max
agctttaagtgaggaagtgtggattggtgagacttcctacttttattcgttgaccacagaatggtacctagagatatgtcgcgggggtcaggagaccttggggatgtcaggtggggtgctattgcccaaaaccaagcttgaccaatcccgacccaacccgggcatagtcagtcagtgagaacctgtgacgtacctaaacaggcgagctcctggcagtcaaccgataaaagaacaaacaccacaaagcaaggaggcttgtgtggtggctggccaactatggatcttgagtaatatttggagtatggcctctggtaatcgattaccaagggtgggtaatccattacaaggcttaaaaatg

SEQ ID NO: 17627 - DNA, 320 bp, Glycine max
tttctggttccatttagtgagtttagcttcaaatttgctgatcaaaggctcccatacgacctgatttgaggatctgacccaatggggatgcccaagtagtggaagggaatccccatctgcctacagtccagaaagtgagcagcttcttgagaccagttaacataatctccaaaaattccgaattgactcttagcatagttgattttcaaaccagaggccatctcaaagcctctaagcattgccttcaaaacaataacattttccaaggaagcttgaccaatgaaaacaatatcatcagcgtattggagaatattaatagg

SEQ ID NO: 17628 - DNA, 350 bp, Glycine max
agctttgtttatatgtgtgcgattgtatcatctctggctaatccaagcaggactcgacatgctagagcacgaagacagtccagagcagcaggaggtgagtatatgcgcggttggaggagatgcagaagaacctttataccattattagagcggacaacctctcttgcctgacgatatccttgttccaattgtgcagcaaggccagcacaacctgctcctgcacccaaagatattcttcggtcgccaaccaatcctgaagctgcagaagcaacaggagtttgtggaagactattaacaggctgtgtacttaatcctgaagcactgcctcgatctacagcattggactcccc

SEQ ID NO: 17629 - DNA, 307 bp, Glycine max
agtaaatgaaacactatatatcctaggttcttttttcattttgtattaacaaagggaagaaggccgtgacctgcatctgtttgatatctaagatacatgtttacaatgtcaaatcttgttaacgtcctactagaaagacattttatgttttcaaccgttcattcaagtgcatcacaaaaagctgtagtgacatttttcaacaaaaggggaaggaagaggtttgtacaattgtacgaaaagatgaaaatatcttttttcgcttttggatcttcgatggaaaaggttacgaaaaggactaagttcgcga

SEQ ID NO: 17630 - DNA, 338 bp, Glycine max
agcttaagttttcatatcggcagttatttttcatatctccctaaggcagaccatcaaccatctagcaattcttcattccaggtcagcttcctttctccctttctttcttatacgtagtctctgaggtaagagggctttgtgatgaccctctttgattttgcttgtatttgcaccccttttctttgcgcaatgatatagcttgctgcatttcttggaaactcgattagggttggtagttctgttgtgtttgttacctcaatctgaatgcgcaatacattgtggaattgctgccatgtgctgactttgacacacgtgacctgtaaacagtctcacaattc

SEQ ID NO: 17631 - DNA, 309 bp, Glycine max
  unsure (1)..(309): unsure at all n locations
tctatgccacacgcagccttattgggtctcaacaaccaaagaagcccttcagaagcttaaagaacacaccnagcagctcctgttttggccttacccaacttcaaaagtccatttgttgccgagacatacgtgtcggggtcaggcatgggagcagttcttatgcaagaaggtcacccatctccttcttcagtaagcaattctgcccgaaactgatgaatgcgtcaacatatgtccgtgagctcgcagctataacctctgccgtcaagaagtggaggcaagacatgttaggtcacatgttcattatcgtaa

SEQ ID NO: 17632 - DNA, 340 bp, Glycine max
agcttctacttatgtggcagggctgtcttccttcactttcttgtctccaacgcgagctttgaccactgttcttccttcccacgatgcttcttttcatgtccgcctgagtgggcttatagcctaaaccatacttcccacgatttccttgggtatttatcaggctagttatgccgccgttgtctttgcctaaacccatcccgggttcataaccgttccccaacataactcgggccatcattaccgctgcatcggacagacaaggctgcccaaagagggagtccacagaggaaatgctgaccacctcaaaagactggaaagcagtttctaacgattcttctgc

SEQ ID NO: 17633 - DNA, 310 bp, Glycine max
tgtaccggttgacaatggtttcagagttagatggtgtgggattgaacaagcaacaattcaccacaagaatccaatgtctttggcttcaacaccggttttctccaagagctcgtcgacggccccgaagagcaccgtgtccgtctccttccttgcctcctccaacgttagtctgggagggatctccaggagaccctccgggacatacgtccacggtcccaacccggaccggtcaagaatcttgttcacaagcttgtagttctcgtcggagaggaaaccgacgcgtttcgcccggtcgagcaacatttccttg

SEQ ID NO: 17634 - DNA, 346 bp, Glycine max
agcttgcaaacccatggaagctcttaatatctcccacactttttggggtgggccattcttggatggccttgattttctcaaggtccacttggaccccatttctaccaactataaaccctaacaaaactatattatctatacaaaaggtacacttctctatatttgcatagagggtgtttttcctaaggactgaaagaacttgcctgagatgtcctaagtgatcatctacgctcctactgtacactaaaatatcattaaaataaacaactacaaatatacctatgaaatcccttaagacatgatgcataagcctcataaaggtgtttggtgcattagtgagcccaaa

SEQ ID NO: 17635 - DNA, 310 bp, Glycine max
  unsure (1)..(310): unsure at all n locations
tgaatgatttacatctccctatttctcattctaattcttcttgatatcatcaaaatcttcatgaatnacatctccccctttttgatgatgacaaccacctgtaggttaggagcaacaacaaagaaaatatctatttgcatatagtttactcccccttggttttacaatgattgcttatatgagacaattgaagatttcatatttttcatatataaaaagttgtctcataaaacaatagacaatttttcttactattttatcttttatctttctctccccctttgtcaacataaaaaacaaatcatgaata

SEQ ID NO: 17636 - DNA, 334 bp, Glycine max
  unsure (1)..(334): unsure at all n locations
agctnggatatacatgacttcctattaaggaatagactacttagctgtgggaaaaataaacttatatctcaatttcaggtattcataataaattaaaaatatcatttatatatccaaaaatatttatttattataaattctaactaatggttntgattaggattaaccaatcaatcctatatttgtattcgtactaaacagttttattatttaaaaaatatataatattttttaaaaaaaataccttttaatatcactaaaataagccaaaccaagacataaaaaaatagaactctccagttttatttgtttcatgggtgggctaaaaaaaccc

SEQ ID NO: 17637 - DNA, 305 bp, Glycine max
tgcgccagctatttaaacttcaccaaattaacaaaaacacacacactgtaagcctcaccaaacaaacatgctccactatttcaccaccacaaacagtacaatcaacaacaacaacaacatgtactgaatattaatttaaccctaattctatcaataaattcataactgaaccctaatttaactgaatgaacacccagttgaatcgcgaatggagtgaatgagaattacgaaaattaccttctagggatcaccgcccttgtcggggtgattcttaatggcagatttcttgtaagccttcttcaaat

SEQ ID NO: 17638 - DNA, 334 bp, Glycine max
agcttcgtggaatgctttttagataaaataactcgctctaaaataatctactattggtagatttaatctattataagtacataccctatttttctctattctactgacttatttaatatatattgcgataacatataaatgtataaaaaaatattcttggatgccttaattgctttaatttatgtcatacaaataaataaatttcttcaattacttaaatataattataaatttggtttttcgatgaaatgtgaatattctcacaaacgtttggcccatatcacttatcgggttaatttatgatctgtgtcatacttaaagttttttacctctt

SEQ ID NO: 17639 - DNA, 193 bp, Glycine max
agccacccagctcgcctatgcgagtattgtcgcgacactagagagctggaggccatctgagaggacgtgtcaggagggcacagtgagggactgggcgctatttgcaccgcgcatttagcaccaaacaacaccccctgacctgttgggactaaagtggtgtggaaaaagggagggaggcctacgaatatcgaaa

SEQ ID NO: 17640 - DNA, 333 bp, Glycine max
tttcatgcaagcttttatttatttatttatcttctatggcatcctaaacgcatataataatttatgcaatacctgcgatattatgatctatgactaaagaataacaattgcctctttaagatttaaactttaatcatgctcctaaaagcataacttgcctagtgatgagaatgacctcacactacatgattttgcttgcccaaagtgtgtatcacgcttatcacgccaataatgctttggtcttattcacgttaaggatgaaatttttctttatatagaaaagaggaagatgacagataacaaagctagaatatatggaatgatgttactata

SEQ ID NO: 17641 - DNA, 304 bp, Glycine max
  unsure (1)..(304): unsure at all n locations
ttgaaggttctgaggattatgaatgctgttaatacacttccaaggcatgcaacacctactgtgagcnnatggaataattcatgaggtaacgacaccttatacaacacaacataatggcttggcagaacgaagaaatagaactatccttggcatggcaatgagcatgttgaagtagaagaagctacctcattcattctggggaaaagttgtgagcacaacaacttatctggtgaatagatgtcctactaagagattgaaagagaaagtcccaaaaaaggtttggtctggaagaaagccattggtt

SEQ ID NO: 17642 - DNA, 355 bp, Glycine max
agcttatagccccgagagcatttgtgttagccaacaatttagccgctaattgttcttgaatccatatttctttcatgcggcctataaggttatgcctcagtcggacaaccccaaatatgcaagtgtttaatgctgggctttttgtcagtccaaagttcataaggggttttgttaactgctttacttggcaccctattaaggatgtaagttgtggtctttaaggctcctctccaaagcgactctggcaaagaagaatgactaaccatacttctcaccatatccttaagagtttggtttcatcgttctgctacaccattcatgctaagtattcctgacatactgtattgtggaacaa

SEQ ID NO: 17643 - DNA, 316 bp, Glycine max
  unsure (1)..(316): unsure at all n locations
tcaagaaaaggccaaactcctctcagatgtctgattttagccttaaataggtggctttgttcatgctcgtgcgcttanccaattctgaatcgcttagcgtgcattagtgaatttcgacttagcgcggcttttctcgctcaacagatggactgaagcggtgtgcttagcgggatggcccttcgcttagcgaacaagcacagctcatccttcttccagattcttccttacgcttagccgaggaatgttgcgcttagcggatggctcgctaagccagcagattggcttagtgagaaggtaaaaatcaacacttcaaaac

SEQ ID NO: 17644 - DNA, 361 bp, Glycine max
agcttcatgatgaatcaagattgtttcaaggagttttgttaataacaaagatgatgacataaagctcaaaagtcaagatcactttatactaacaaagatgatgacattcaagaatgagtttaagattgagtcaataacacttcaaagatcaagagtaaatttgatttcaagaatcaagattcaagattcaagaataatcaagatcaagattcaagaatcaagagaatacttaatcaagataagtattaaaaattttttcaaaacattgagtagcacatgaagttttcacaaaatcattaccaaagagttttactctcaggtaatcgattaccagattatagtaatcgattaccagtggttt

SEQ ID NO: 17645 - DNA, 317 bp, Glycine max
  unsure (1)..(317): unsure at all n locations
taagctccttcaactgcacaaagctctttatgtttttagagtatccttgtggaaccttcacccgacgaagactctgncaaaacttatcttctcctttttggacaaggtatggcaagctaggggcaagtaaattttcttcccattagaccttggatgcaactgtgatcgtatgcccatatcagctagatcttgacaggtattgaagccatccttcatcttgccttgaatgttaaggagagtcccaatcacactatcacaaacatttttctccacatgcataacatcaatacaatgtctaacatcaagatcagatcagt

SEQ ID NO: 17646 - DNA, 359 bp, Glycine max
agcttgtcactatgatacaacacttttaacaactagctttggatctggatggatattaattgttgcaagactgcagtgctgattatattagtactttatatggatctctcagtgtgacactggtgtggtgtgagaagggctatatataaagtgtgatctgagaagttgatctaacgatctctcgagtgtgaaatgaatctaatagagcacattgatagttcatagatgtggctttctaccacctctactaagatcaaagccaccgccgaatgaaaaaaagaaagtacctaaattaattgctcctggttgtctgtttaagcacatgtgtgactttttcctcagattacaaaacatatcct

SEQ ID NO: 17647 - DNA, 304 bp, Glycine max
tctacttttatggagaagagaacaccatttaagctttgtcaaagattacctaatctcaggacatcaacaatgcacaccagtaggaatctaattaagtcaactctacacaaaaatggctaaacaattatataaatacacagaatctatgtcatcatagttgaaatagcgtatttttatcttactaatatagatatgttgcaaagtttaaccatcataaattgcaaaagcagtgattgcagctggtagagctctgactgctaattcaacgtcagcagagatagttgaagaactgaacgaggaaact

SEQ ID NO: 17648 - DNA, 361 bp, Glycine max
agcttctcaaggaggtgagcttattttttagatgggtgtttgtagctaagctctagcttctcaaggaagttttctcaaagaagcttctcaaggaagttttcttaagaaagcttctcaaggaagctacctagtctataaatagaagcatgtgtaacacttgttgcaactttgatgaaggagagtcttgtgagacataactcaaagttcaacttctctccctttttcttccttcaatttcgtgctcccccctctctctttctctccctctttcttttcctccattgaagcctcctctccaagcttcttatccaaggctcatcttggtggtgaatctccttcttccatggcttattccctagtg

SEQ ID NO: 17649 - DNA, 314 bp, Glycine max
  unsure (1)..(314): unsure at all n locations
tatgcgcctatttccttacaaacgttctcttgcactttacatttaaccgaaaaaatgcacccttatacaatcaaggcntttcgttccctaaataattaacccttccctccaaggggatttggtaacttacataaaacacatttccttggctaaattaacatacatgcttactcaaagcatttgggggcaccaaaaatggcacatgtccacatcttggcatttctaatacctatacacacaaactttatgatgaaacttgactatctacacaataaagggctacatttcatgctcttttttcaagagtttgctac

SEQ ID NO: 17650 - DNA, 368 bp, Glycine max
agctttgagcaaattcaaacgagattaaattttgactcggatgtccgattgagccctgtaatatatcgagacgctcgtaattgaaaactgaagctttgagcaaattcaaacgagaataaattttgactcggatgtccgattgagccgtaatatatcgaaacgctcgtaatagaaaacgaaagcacgtagcaaattcaaaccacaataaattttaactcggatgttcgattgagttctataatatatcgagacacttgaaattgaaaacagaagctctgagcaaattcaaacgacaataactttttactcggaggtccgaatgaatcccgtaatatatctagaatctcgtaattgaaaaaggaagctct

SEQ ID NO: 17651 - DNA, 319 bp, Glycine max
ttatgttcttagattgttatatcttgctcaactgattaaggcttctaatttgataaattcagtcttgaggatggagcaaatgttgagagtttgtctttcatgggcacacacacagactgcatgcgcaataatttggaagaaccaaaacaagataactctttcatggtaatggctggaggtataatttgatttttgtttttgcgtttttgcttaatgccctgtgtttcattttgtagtttgtaacatcacaggttaaaattttagtctaacatttggtatcaaagcattaattgcctctgccttgttcatttttggtttt

SEQ ID NO: 17652 - DNA, 348 bp, Glycine max
agctattttttttaaagcatagtttagacatccattatgagcatggtctaaactaatcaaaacacttcctatgttctattcttcacatatctttcattgtatcatttctagatcttgcatagctttcctgcatatttgatgtgatccttactaggaccgacttgcttgatacagggcacaaagtttggatgatgccactttcagagagggaagataagccagggtagatgccacaaggattaccttgataaatccgagattggttcagcgaggaacccaaagagaagttctcacaaaattttatcaaatgccaaaagttccctttattgaaaacgagttcaatacata

SEQ ID NO: 17653 - DNA, 310 bp, Glycine max
tttcacaaagcttacagttatttctggttcctagccatggtagaagtctccacacaggccattgcctgcctacccagtattatgattagccgttgaggtgcttcactttttgggactttcagctatcacccatggtggaagaatttgaagagatcctaggatgtcctctagggggaaggaaaccatacctcttctcagggttctatccctcattagccagaatttctaaaatagtccaaatctcggcgcaggaattagaccgcccaaagcaagtcaaaaatggggtggttggaataccgagaaaatgttt

SEQ ID NO: 17654 - DNA, 349 bp, Glycine max
agcttgatcaaaacaattatctattcattccaatccactcaaatcatacaattgcttattcaaatcattctcaaacattcatttcatgcaaaacaatccactgcatatcattttcaatcaattcactattcaaacacgctttaggtacaagcaaacaactcaaagtgctgaaatttaaataactgaaattaaaataactgaaatatgacaacgaaatcagctggaaatataaggtgtttaaccttcaccaaaacatcttcaatgactccatatggccttgtgatggagcggtcaactaactggagggtcatgcgtgtgggcattatctctatctctccaagtcgctggc

SEQ ID NO: 17655 - DNA, 310 bp, Glycine max
tcaatggagcttacaccatgtggtatttttagcatcttcatctaagtgatgttcttttgcttcctctatcttttgttcggtgaattctctttaattccttgttcttcatcttattctccatgtatatcctccattttcttgtggtttggtgctgtttagagtagattcaaaaaaaaaataaaccgattaaatcttagatctatacttgttcttgcatttctatggttcaaattttgtagatctactcttgaatcatgtttttgtgttgattttagttctatcatttttcattcataatattcttgtgctg

SEQ ID NO: 17656 - DNA, 346 bp, Glycine max
agcttcctcgtggccatttccttttatgcaaacatttggaaagttagttttaccagtgggatactattcttaaaacaaaaatgacatacaacctcctcccataaatacaaacatcaatgtaaatttagagcaagcttatgcgcatatttccttacaaacgttctcttgcacaagacattctattaaccgaaaaaaaatgcacccatatacaatcaaggcagcttcgttacctagattatttacacgtacttccaaggtgtatttgttacttacatcacacacctccttggctaaattcacatacatgcatactcaaagcattttggggtaccaaaaattgcacacg

SEQ ID NO: 17657 - DNA, 302 bp, Glycine max
  unsure (1)..(302): unsure at all n locations
tcatgatgaatcaagattgtttcaaatttttttgangacaacaaagatgatgacctatagctcataaggcnaagcacttcatgataaaaaagatgatgatctcaagaatcaaaaaatgagttcaagattgaatcaagaacacttcaagggtcaaaagggaatttgatttccagagacaagaaattaagtttcagatacacaggccccaaatcactctctaaattctcgaatctcgagaaaactctttcccaatataggttttaaacgtttttttcaaaaactgagtcccatgtaattttttc

SEQ ID NO: 17658 - DNA, 346 bp, Glycine max
agcttgtagtttattttttccttttatttatatccttactattttaatatacttttaccctctgctcttcaaattgttcatatgtaactattttttaattacttttttctttttattaatttttgggttatttatttcataatattataatatttactttaacaacactatttaattagtttttaattaaatatgtttttgtctacaaaacaagaatagaattcacataaaacagttatacaatatgtttattattttatatttaccaactatttcaataattttacaaaacgcttttaatttaataagcaagcttataaacttttagcttttagctggtagctta

SEQ ID NO: 17659 - DNA, 309 bp, Glycine max
tcaatggctcaatgagcattgggaaatttttgtcaatcaacaagtaaagatacccttttctataagagactctgtgatgaagttttatgtgatataatccctatggaagtagagcacattttgttgggtagaccgtggcaatttgacaagaaagcaatccacaatggtctcaccaatgaaataaccctcacccatggaagcaaaaagtttaaacttgtttccttgacaccttcacaagtggttgtggatcaagtacgaataaaaatcaaatgggatgaggaaaagaatagaaaaataaaagaagaacat

SEQ ID NO: 17660 - DNA, 358 bp, Glycine max
  unsure (1)..(358): unsure at all n locations
agcttcccaccaacccaacaatgttattactcagccaataaacaaacctcctccttacccaccacccagttatccacaaaggccatccctaaatcaaccacaaagtctgtctaccgcacttccaatgacgaagaccacctttagcacaaacccnnnaaaaaaaaaaaaaaaaaaaaaaaaaaaacccccaccaaaaaggaattttgcagcaaaaagcctgtagggttcaccccaaattccgttgtcatatgctaaacttgatcccatatctacttgataattcaaatggtagccataaccctagccaaggttcatcaacctccatttctccgagaatacgactcgaacgcaacgtgtg

SEQ ID NO: 17661 - DNA, 312 bp, Glycine max
ttcgagtaatacaaatggttataacttttcacactgagctccgattcaggcttacaatatattgagacgctcaaattaaacatcggaagctctcgagaaattcaaatggtcataacatttcacccggatgtcctatccaggcgcatcacatatagagacgtacaaaattatacaacggaagctttcaagaaattcaattggtcataacttttcaaactgaggtccgattcaggcttataatatatctgggcgctcgaaattcaacagcgaaagctcttgagaaattcaaatggtcataacttttaactcaga

SEQ ID NO: 17662 - DNA, 331 bp, Glycine max
  unsure (1)..(331): unsure at all n locations
agcttttcaccagcagtggcagatccttcaagatcctcagaggagagggtatatgaggtggtgttgaaacaagccgcactggtcaaggagaagaataagggcaccaagaaagcactgaatttacacaaaccaacaggtgaaggtgatttaacccatggggatctgttgagtgctgcttatgatangtgtggtgaagtctgtgctgaatatgccaagacattntatcttggtactctctctctgtcctgttttaggccttattgtttttcttaatcattttcccttgatccaatgagtttttgcgcattcttttaaagctcattataatatc

SEQ ID NO: 17663 - DNA, 309 bp, Glycine max
  unsure (1)..(309): unsure at all n locations
tcattgctagccagaggttggaggattatgctggatggngaagttgatttgtggagtgcatanttatnaattggctaagccattagttggacatccatatgtggggcgattgactaaagccaaaaaaacacttattgctgatatgacgaagtccatggtgaagccaagaaacattatgctaactctgaagcaacacaatgccaatagttgttcgaccattaaacatatatacaatacaaggagtgcatttcgttcttccataagaggaagcaatcttgaaatgcaacatctgatgaagctttttgaatg

SEQ ID NO: 17664 - DNA, 335 bp, Glycine max
agctttatcttctcaaggaagttttctcaaagaagcttctcaaggaagttttctcaagaaagcttctcaaggaagctacctagtctataaatagaagcatgtgtaacacttgttgtaactttgatgaatgagagtcttgtgagacatacttcaaagttccacttctctccctcttttattccttcaatttcgtgctcccccctctctctttctatccctctttcttttcctccattgaagcatccttccaagcttcttatccaagactcatcttggtggtgaagctccttcttccatggcttattccctagtggatggcgcctcctctcacctct

SEQ ID NO: 17665 - DNA, 273 bp, Glycine max
  unsure (1)..(273): unsure at all n locations
tcaagaattatggccttttcaaacttcttgtttcccgagggaaattctataaatagacctcccatctntatggagtgggttatcactactggaaaacccgcatgcaaatctttatagaggcaatagatttaaatatttgggaagccataaaacaaggaccttatgttccctctataatagccggaagtgccacaatagaaaaacctaaagcagattggactgaggaagaaagaagattagtacaatataatttaaaagccaaaaatattatta

SEQ ID NO: 17666 - DNA, 354 bp, Glycine max
  unsure (1)..(354): unsure at all n locations
gcatgcaagcttgttcgcacatcgntcgcgtttatgatatacactttacaaggtttgaagtttaagagaccttcaatcctattacgcaacgtgacggacaaaagtggacagttaacttgaatgatcattattgtcaatgcagaaagtattttgcgcttcactatccatgttcacacattattgcagcttgtggttacatgagcatgaactactaccaatatatagatgttgtttacacaaatgagcttaaaagcttactccgcacaatggtggcctcttgggaatgaagcgactattcctccttctaatgacgcatggacacttatccctgacccaactacaattcgagcgaaa

SEQ ID NO: 17667 - DNA, 356 bp, Glycine max
agctttatgcacctttgagcggttttcctctactcagttgtatccagtgtttcttctaatgctcattaagaaacgaaatgcaaaatgtcttaatctcattattggttaagagaaattctatctttgtgctttcattcctcattcttcccattatttttttggaaaaaatgtgtgttgttctgatcggtttggggctttgtttctttaccatgcgtgcttgcattttagtgaaagttttcagaaacttcaaggtcttcagtcttttacattcacaagaattcaatgtcttctgccttttacatttcaaatacttaaatgtcttttatcttatacatttacaagacttcaatgtcttt

SEQ ID NO: 17668 - DNA, 314 bp, Glycine max
  unsure (1)..(314): unsure at all n locations
tgctagtggagcttctatggaggctggttctttgatctncaatgaagtcctttaatggagattttccaccatggtgatcagcggaagacaaaggacaagaggtgagaggaggcgccatccactagggaataagccatggaagaaggagcttcaccaccaagatgagccttggataagaagcttggaaggatgcttcaatggaggaaaagaaagagggagagaaaaagagaggcgggagcatgaaattgaaggaataaaagagggagagaagtggaactttgaagtatgtctcacaagactctcattcatcaaag

SEQ ID NO: 17669 - DNA, 360 bp, Glycine max
agcttcatttgaggtgaagagattatatatgccagaattttctctgatactgcttttagtgataaaaactgaagagcgctttcacatatacataacaaaaaagataaattaacctaatgtataatttctaaaggacacgtacaaattacaaaccttgacattcaccaatgtcttttccagaaagacccctaatagagttacagaaaaccatatacgtgtacgtaggagatgaacagttgatgatacctagttatttttttctttttattcggaacattaataagcaccttcaaaaaaaggtgcgggaagtgaatgaccttatatatgtatataagtactgctcaatgaacagctttagct

SEQ ID NO: 17670 - DNA, 315 bp, Glycine max
  unsure (1)..(315): unsure at all n locations
tgtgcgaaatcccagataacatctcctttttatcatcattgcaatacttaggactctattatagagccatcataagcnacccgaaagcatgaagtatctgccaagactcaaacttcttgatgttggtgaatgcaaaatgcttcaacgtatacctgcacttccacgatccactcagtgcttgcatgtctggaactgccaatctcttcggacagtgttaagttcaacgattgaaccatccaaaagacctaagtgtacttttctgctccctaactgtataaaattggatgaagattcatatgaagcaattttgaaaga

SEQ ID NO: 17671 - DNA, 358 bp, Glycine max
agcttttggggaggaatttagggtttcaaatcctacattagagactgacacggttatggaagttatttgctggttttgaaatgcttgatatctataatgggtattttatgattaaatttgatatgtaggaagacggaacaaaagtgatgaaggagggcctctggatggtctttgatcactatctcacggtcaaaacatggaatccagactttagctccccggcggaaaaaactaacaaaaccctggtatggatacgttatcatgaaccttgtttattatgacgaaagtattcttttggcattggcatcagcagtaggacaccctatcaaagttgataacaatatgaaagattttcgga

SEQ ID NO: 17672 - DNA, 317 bp, Glycine max
ttaacttgagtcatcaaatgattataatttcgtgaccatggcacgaatttcaaagactgatttccttttatgcataacaatttccttcgtctttctaaaagtttttttttcaatactttctctttcaagaaaagtttattgaccaaaaacttgtgctattctttttcttcattccttctctcttgtcaaaagattcaaaggactaaccgcctaagaattcttttgtttcttcccttctccctctagacaaaagatttcaaaggactaatcgcctgagatatcttctgtttcttacaaaagatttcaaaggactaacc

SEQ ID NO: 17673 - DNA, 361 bp, Glycine max
agctttgttgcccatggacatcgttatgtattgactattgccattgggcaaccaaagcaccctggtcgtgtccatgctgttggagctggtgtcacgattaaaaactactttggaccggcttcaaggggctcctggacctcttcatccatggcttctgaagacctacaacacttgacacaaaagatcaaagactagttgaaggagttgatcacacaaaaagtgactcaacaattaatgatgtccttcagctagatgtactcacgaatgcaatcacaaggactcgcactgtctcctaaggctaaggttggtcctttttctactcgtctaaacaaaaaggaaaggtgtgtcgatcccttagggc

SEQ ID NO: 17674 - DNA, 320 bp, Glycine max
ttgcagatttggtcttcgccagtgaatgtatcaatgtgggtccgaaaagaggcaaatttgatcatcctactaggacgacgagaaaactggggcaaataaagagggtgaggatgagggagaaacccatgctgtgactgccattcctatacggccaagtttcccaccaacccaacaatgtcattactcagccaataacaaacctcctccttaccccaccacccagttatccacaaaggccatccctaaatcaaccacaaagtctgtctaccgcacttccaatgacgaagaccacctttagcacaaaccaaaaaaaaacacca

SEQ ID NO: 17675 - DNA, 342 bp, Glycine max
agcttatgttcatatttccttattaacgttcacttgcacaagacatttaaccaaaaaaatgcacccagatacaatcaaggcagcttcgttacctagattatttacatgcacccccaaggtgtatttgttacttacatcacacacatctccttggctgaatttacatacatgcatactcaaagcatttcggggtaccaaaaattgcacatgcgctcatcttggtatttgtaatacctatacatatacaaacttcatgatgaatcttgactacctacacaataaggtgctacatttcaagctctttttttcaagtttttactacctaaagccgcatgcaaattc

SEQ ID NO: 17676 - DNA, 310 bp, Glycine max
tcctttcccgagagcatcttctatttttgcattgcaacctttgctttcgtgtagcttaggaaaaacatcattcttcttctttctttcttccaaagtcatttctaaatttccaagcactttctccatcacccacagccaccattagccaccacaaaccatcgttgttctccacaccgagaggaacccttcaaccgaagcggaatcttccaacttggcttgcggtttcggtagagaacgaaaccctaatctgacctttcattttctttcgaggtaagcatggttctacgcttgtttcttgctagtttcatct

SEQ ID NO: 17677 - DNA, 343 bp, Glycine max
agcttcaacttacagagagtagtttatgcttagcgcaacaggcgcactaagcgcacttcaataattcaaaaacagtaagaaattggcgcttagcgcttcctgccctattaagcccagcttgaaagtttaaattccagaatggatctggggcttagcttacgatagcacgcttagcgctgctacaataaaaattttccagagaagaagtggcgcttagcgcatcatccacgccaagcccactgattaaggttcaattgtagtgaagatgttgggcttagtgcaatgatgtgcgcttagctgaattattcagccaaccaatcagggtccatgcgcatagcgcgag

SEQ ID NO: 17678 - DNA, 245 bp, Glycine max
  unsure (1)..(245): unsure at all n locations
tgctagagaagcttctatttatgctgtatctttgagcttcaataaggtccttcaatggtgcttttcngcccggagtagcagcggaagataaaggagaaaaggtgcgatgagacgccatccattagagaataagccatgaaatgagaagtttcaccaccaggagagtgtcttggataagaagcttggagaggaagcttcaatggaggaagagaatgaaagagagaggaggggggggggggtccccg

SEQ ID NO: 17679 - DNA, 333 bp, Glycine max
agcttcttgtatatattatgcgcctgaatcggacttccgtgtgaaaagttatgaccattgtaatttctcgagagctgtcgatgtttagtttcgagcatctggatatattatgtgcctgaatcggacatccgtttgacaagttatgaccatttgaatttatcgacaccatacgttgttcaatttcgagcgtctcgatatattatgcgcctgaatcggacttccgtgtgaaatgttatgaccattttagtttctcgtcagcttccgttgttcaatttcaagcttctcgatatattatgtggctgaatcggacttccgtttgaaatgttatgacca

SEQ ID NO: 17680 - DNA, 312 bp, Glycine max
  unsure (1)..(312): unsure at all n locations
gtcagcttctagatatattatgcgccttttcattcttccgtttcaaaagttatggccatatgaatttctcgagagcntcgttgctcaatttcgagcgtctcgatatagtctgcgcgttaatcggacttccgtgtgacaagttatgaccatttgaatttctcgagggcttccgtttttcaatttcaagcttctcgatatattatgcgcctgaatcagactttcggttacaaaagttttgaccatatgaatttctagagagcctgccttgttcaatttcaagcgtcctgatatatcatgcgcctgaatcggact

SEQ ID NO: 17681 - DNA, 356 bp, Glycine max
agcttggcatgctcctacctttttctctcagaagcaacttattatagcaactccatgaagcctgtttcacagcaagaaagatatttgttcttagcttttagttttactagatatggcatacttcaaagggctacatgacaactgtaattaagatgaccctaaagccaaattgattgtgttttctgttgaaagttcaaaaagattactttatctagcatacttctgcacaactaattaattacatcaacttataattaattagaaattgttgaagggttacattttatgaagttgatatgcagatgagaataattaaaacctaggaaggacatggaatggtcaaacaaaatgagtat

SEQ ID NO: 17682 - DNA, 312 bp, Glycine max
tctggtgggacatcttgacttgctttcctatctgacattcaccacagattctgccttcttctattttcagatgggaatgcctctaacagcacctttgtcaatgattttcttcatgcctcttaagtgcagatgtccaaatctttgatgccatattttgacttcatcttctttggagaatagacatgtggaggagtaactggtttcttgaggtgtccataggtaacagatgtcctttgatctgctgcccttcattaggacttcactcttctcatttgtcaccaagcattctgactttgtgaagtttacattgaa

SEQ ID NO: 17683 - DNA, 327 bp, Glycine max
agcttattccacacaaatatttttttctaccaagtcacttctttctctaaacaaatcaaataaatttgtttgaaaaatgtgcacacaaacaaattatatcgtcatacaaatagatttaacaggtaagcacactatctttttatctcaggatatacaaggtaatgagagcttttataacttaagaaatacaagaatgagagcttgaaggttagagagaatatgcaattcaaaattggatcttcaactcttcaggtatatataagcttctttaacaattaatcgttgtaacaaacggtcttaatttgcatctagtgtagtgtctagaaa

SEQ ID NO: 17684 - DNA, 309 bp, Glycine max
ttgctgacttagttctttcttacgaattgatccaagtgggtctgacaatacgcaaatttaatcgtcccgcttacacaaatgagaaaactggggcaaatgaagaatgtgaggatgaaagagaaacccatgttgtgactgccattcctatacggccaagtttcccaccaatccaacaatgtcattactcaaccaataacaacccttctccttacctgccacccatttatccacaaaggccatccctaaatcaacaacaaaacccacctaccacacaaccaatgttaaataccacctttagcacaaaccaaa

SEQ ID NO: 17685 - DNA, 328 bp, Glycine max
agcttcataattcaatttcgcgcgtctcaatagattacgggactcaatcagacatccaagcaaaacattattgtcgtttgaattagctcagagcttcagaattcaatttcgatggtctcgatatattacgggtctcaatcagacatctgagtaaaaaagttattatcgtttgaatttgctgagagcttcaacattcaatttcgagcgtctcgatgtattacgggacttaatcagacatccgagtaaaaagttatcgtcgtttgaatttggtcagagcttcaacattcagtttagagcgtctcgatatattacgggactcaatcagaca

SEQ ID NO: 17686 - DNA, 304 bp, Glycine max
ttgagcaaattcgaactacaattacttttaacttggatgtctgattgagtcccgtaatatatcgagacttcgaaattgaatgttgatggtcgttgcaaattgaaacgacaataactttttactctgatgtctgattgagtcccgtaatatatcgagacgctcgaaattgaatcttgatgctctgagcaaattcaaacgacaataactttttactcggatgtctgattgagtcctgtaatatatcgagacgctcgaaatttaatacgaaagctatgagcaaattcaaacgacaataattttttac

SEQ ID NO: 17687 - DNA, 359 bp, Glycine max
agcttctccctcttttccctatatttagggggaggaggtgaagaacaaaaacgttcaaccctcctggtatctgagtttcacttgaaattagtgaaaaaaatcatttccatgaagaaaatccaagccgaggtgcttccgtaactcgtccgagacgtttccgtaagcaaatccgtgaagattttccgccgtctttcgttcgttcttcggtcttcaaccggtaagttcccgaaatcgaacttttcacttcattctatgtacccttggtggtccccatttgtttcgcgtacttttattttcatttcagttacttttcgtacccccttttgacgtgctttagtcatttatttaagtcattttct

SEQ ID NO: 17688 - DNA, 315 bp, Glycine max
  unsure (1)..(315): unsure at all n locations
tggaggggttgatggggacccggtgcttttatgaactatgataaaggctacgtaggagtgtgtgagctcanttgaaantgggcaactggggatggtgtgtttatgtttgacttatggaagtgggagagttgatttgcgccatcgcccgatcgccacctagtaccacatatgacgggtaccccataatccactaagcttgatgtgagaaagcgtggaagagtcagtcttcctacttttgtttgttgaccacagagtggtacctggagatatgtcgcgggggtcaggagaccttggggacgtcaggtggggtgctat

SEQ ID NO: 17689 - DNA, 359 bp, Glycine max
agctttgaccttttgaattgcctttctgttacaacttttatagttgcaacccatttcttatagttgttccccctcttattatgttgtttgttttgtgaatgtttcttggtttggttccttagaattaattctctctctctctctctcaatcttggatcacttatctactttgaactatttttcttgtatgcactgggacagcataacttatgcttgtatctcatgcttcagtctgagttcagtacaagttccatatctttttcattttataatttgcttttgggatgtgcactacagggctctcagtctcagagctaaatgtagcacaggcaaattttgataaagatgagcgtgtgtac

SEQ ID NO: 17690 - DNA, 317 bp, Glycine max
  unsure (1)..(317): unsure at all n locations
tgcaatcactaattacctcaacagcaactacagcctccaccaaacgtgtagacccagtcagtcaaagcccaaaaccnccatgaaagtgaaacagaatcaacaatgcaatccaatccatgctcttcaatttgaagaagtgcaacattacattacaaattcaactgtactagcacacggaccaagcttctgaaacccaattccagactcaatcggtaccaatttctcaccatcacaatttcacaaattaaatcatcagttcattacattctccctttttcttcctcctctcctccaacaaagcaccagaatctaaaaca

SEQ ID NO: 17691 - DNA, 365 bp, Glycine max
  unsure (1)..(365): unsure at all n locations
ncaagcttgaataattgacctgcatgagtgtttgaatcaccgtgttcaaaacttgtaactagctaacttttctcattcgagatcgatctctgaatgcaagatgggttattggtgaacctacaaatttcggattgccaccccaaaccacaatccactttgaacatgccaacacctcttgatctaatctcttcatgggccttggacatactttttgaccctttgccttttgcttctctcctaattttctatttcacaaatctagtcatcacaatatattcttatccattctagcatagctacgatgggttgctccctagctttcaaaattctaccattaaaagcctcttatatgttggtcatgatca

SEQ ID NO: 17692 - DNA, 317 bp, Glycine max
  unsure (1)..(317): unsure at all n locations
taagctactgctaaccagtaacaaaatttttatggttgttgagcaaacagtggaatggctgcgatgccaaagtttnngagaaacataaaaattatttattatttatgatatacatatatacatgcttacaagcccaaaaacaaaaaagacaattataattgaaaagatagacacaacaagagaaaggaggttgaattgtgttgtgttatattttttctacaggtcaaaagctttgtatgaaattcctttatagactgttgcagcgaaaaggttttggcaccagatgaatggatggatcttgacattgtgttatgaac

SEQ ID NO: 17693 - DNA, 361 bp, Glycine max
agcttgagaagtatctcataaactatttggagatgtgtccatagggatgagaatatagagatggggtcttctttttctggcaattctgtgagggaagaagaagggttggaaggtggagggagtggcctgaagaggttggctgagatcatggccactagaggcccccaaaactttttcatgcactggcttcttggaggacttcaatatagacactaatcttgtgagttgaagcctctttgagtctctttgtgcaggagattctgaagggtcagtgaaggtgaaaacaaaggtgcagtaagaaatggtggagagaagttcttcatttcctgaaggagaagatgggattgtgaaatgaggactc

SEQ ID NO: 17694 - DNA, 317 bp, Glycine max
tgttatatatgcagtcaacacaagagcctttgagggatttaatgaacatgtcaactaattggtcactagagttgacaaatcagttgtaatttcccctaaaagcacattctctctaacaaagtgacaacatctcaatgtgtttggtctcttcatggaagaccgactttggtgcaatgtgaagggaaacttgattgtccgtcacagatatgtttcacatcttggatatcatagataagtttcatatcttggatgtctctaaattttaactgttagagaaattgccctagcacaataattagctttgacattggatttag

SEQ ID NO: 17695 - DNA, 367 bp, Glycine max
agctttacagcagattttagtaattacccactaacctttaattaaaataacttaatgccattaacctagggaattaaaaaaaacttaatggctgagtgtaactgaaattgtggcaaccaaaagtcacccccaacagccaacaagtcagccaccatttggtctcccaaaaggctgatgcctaggttgccaattgggcccttattacaacttgaactaaacctaactaaagcccttttagttgattaacccaaaacatatttttggtcagccaactttacaaggattgggccattatttatacaaactaaacactctaaaattgagacaaggtggtgtcatttagtcctcctccatttgggccatgata

SEQ ID NO: 17696 - DNA, 319 bp, Glycine max
ttgtgtggagcttcaatggtgaatgagtttggaagataagcaacgtgagggagagggagggctgtctgaaatttctgtttgctgagtgaggagagagaaaagctttttggtcttaaataaaaggttttcctctttttctattattttattcaagctctgccacatgtccctatttgattggagcaaaaagggcccactttctctttttgactgtgacccatactcagtcacaaaagtggggaaaatctgacctttgaaatgctaaaatcctgcctcggtttgcgtgctgtttctctggttccagtttctcgtgtttctc

SEQ ID NO: 17697 - DNA, 347 bp, Glycine max
agcatgggtttctccctctttctcaccctctttatttgccctagttttctcagtcgtccaagcaggatgattaaatttgcctcttttcagatccactttgatctttttgctggcgaagaccaaatctgtaaaacttgaaggtgtgtaacccaccatttttttcatagtagaacaccggtgacgcgtctactatcattgtgataatctctttctctgtttttgggggtgctacttgagtttccagatctctccacctttgggcatattctttgaaagattcattgtctctcttgcacatattttgtagctgcattctatctgaagccatatcagagttatactgatac

SEQ ID NO: 17698 - DNA, 310 bp, Glycine max
tatgctgcaaacatttacattagaccttctcaacctcagcagcaaaatcaaccacaacagaacaattatgactctctagcaacagatacaaccctggatggaggaatcaccctaatctcagatggtctagcccttagcaacaacaacagcagcctgctccttccttccaaaatgctgctggcctaagcagaccatacattcctcctccaatccaacaatagcaacagccccagaaacgaccaacagttgaggctcctccgcaaccttccctcgaagaacttgtgaggcaaatgaccatgcagaacatgca

SEQ ID NO: 17699 - DNA, 336 bp, Glycine max
agcttctgataatgacagacctgtatctgggttggggacttgggaggcatacagctgcagaatgtcgttggctaaaacaggctgagaaagaaagacactgacgtgcattgagacaacatgtacacagcttcaatatgtgacaggcttcttactacatgagcgcctgttgaaatgttaaatgtgtgttccaaattagatggctggcatttgaaactgatgtgaagaccgtgttctcactatagaaggagatggctcaaatatattggttacccaggtccactataggagtggaagaagcttaaatcgtgatgtgcctgcaaaattatatatcactga

SEQ ID NO: 17700 - DNA, 231 bp, Glycine max
ccaactccaattccaagagaactcatacatgcgaaaactcaaaagcaatatatgacactaatacatgcctactaaaacacctaggagcacttacgacctagggaaacataagggcatagaaggtaatatataccaggcaccaaaatatgtaacactccataatgactaaggttaaacgaaatccccaaaaggaatacaagacgttgatcatggagtgcacatggaactaaa

SEQ ID NO: 17701 - DNA, 343 bp, Glycine max
agcttgatgttatgaagtgcggtatattcagtcttcctacttttgtttgttgaccacagagtggtatctggagatatgtcgcgggggtcaggagaccttggggacgtcaggtggggtgctattgcccaaaaccaagcttgaccaatcccgacccaacccgggcatagtcagtcagtgaggacctgtgacgtacctaaacaggcgagctcctggcagtcaaccaataaaagaacaaagaccacaaagcaaggaggcttgtgtggtggctggccaactatggatcttgagtggtatcaggaatttggcctttggtaatcgattaccaagggtgtgtaatcgatta

SEQ ID NO: 17702 - DNA, 309 bp, Glycine max
ttttaagtataaaaataattcgaacactttttataatgattaaaagaaatcacagggacaaaaatgaaaaaaatactaaattgtaagaacgaaaaatatatttaaatatattttttatgttatgaaaaattcagaaagatatattttatatatattgctattgtaattaatgttttataatatatagattaataatatttcgtataaatttatatatgtatacattccccccgggaggggggttggctcagtccctggttgctagctttttcttgttttactctctcgtgtacaaagcaagcggtatta

SEQ ID NO: 17703 - DNA, 347 bp, Glycine max
agcttcttcttcgtgaccgtatctgtttgtatctgcaaccttatcaagaccgtgacacctcgccaccttacctaggtacacatttcacgactctttcttctctttaacatgttgtattgaataccatgggtgagtttggggaacttgtgctcactgcaaggatttggtttgtggaagtcgtgctcactgcaaagtctatttggggtgctcactttgcagtccgtttggggtgctcacagggtctcattttgaatgaggtaattcagattgctaggtgtcctttgaattcttaatggctagctaggtaggtgtctgttgtaatgtgtatagcaccatggcaaatgaaa

SEQ ID NO: 17704 - DNA, 310 bp, Glycine max
tgttcagagtagaactgatttgactgccaagacactggtcagagcacaccgagtgcagcttgaaatccttgtgcaataaatactggaattcagggatttttgcatcctagcatcagtctatcacagacttccctgattgagatctttggctataagagatgcagaaacatagcgtgccaaaaccagcttccagctgatgattgtacctgtgagatatgcaccaacactaatggtttctgcaatctttgcatgtgcgtgatctgcaacaagtttgactttgaggtgaatacttgccgctggattggatgtg

SEQ ID NO: 17705 - DNA, 354 bp, Glycine max
agctttaggttcaatggctccgatcacatctatgccctatatagaaaacaaccaaggtgctaccaagacgttcaaaggtatgggtggagcattaacattattagcgaaggcttggcacttatggcatttcttcacatggatgcaacaatcactctccatagtgagccagtaataccttgctctcagaatttttcgggccatggcatgtacattatcatgcgttccaaaggatccctcatgtacctccaccagcatttgctcagcctctctggcatccacacatcgaagcagtaccatgtcatggttcctcttgtataggatattcccactcaagaagaaaccggccgccaactt

SEQ ID NO: 17706 - DNA, 292 bp, Glycine max
tctagccgaatggacttaacttgagtttattcctttgatagcccctttgagcctatgttcccctttctttgtttgaagctcattacacgccttaagtgaagagatgtgattatcacttacgctgtaagaaatttggagctttggaattgttttgggaataagttgggaataagtgtggggggtatgtttcattggaagatataatttttggccatgcttaatggtttattttggccatgcttgatgtatctgtatattgcctagttcttgctttaatcttcaaattcatact

SEQ ID NO: 17707 - DNA, 332 bp, Glycine max
agcttagaacaatatacttgtccttcatttaactgtctttgggcttggcagtcgcgatcaacaaattactttcgacacctactatatgttgatttgaccaaccttatttatacattctgagaggttggttatcatgtggctatatcgacatccttctctatcataagccatcatccatttttcctttgaaatgcgatcaatccatgttgctatggctggacttagttgacaaaatttttcttaattttgataaaaaaaaatgtgcttgcaaggagtgtagcctgcataaaattagttagcaacaatagttttaagtatatatgaaacttaaa

SEQ ID NO: 17708 - DNA, 308 bp, Glycine max
tgaagtggaagccatgtggccaatgtcttacttggagctgtagttgagttcatgctgggataatacggaaagagtccagggtttggatctgcacctgtccctaccacttgctctaaacttgtatatatttgatgctgatcatttgtctgtaaaataagtgaaagattgaaagaggattctaaaattatcaaaagtgaatgttaaaaccacatcagtggatcagaaattaaccaaaacacgaagtccttacagttcctatattcaatctcttgttgtcccaatcataaaccaactcttctgaagctaac

SEQ ID NO: 17709 - DNA, 338 bp, Glycine max
agctttgtatgaggctgaagaagttgctgctcatgttcaacaagatccggtggagattaatttatcccagcctaatttgtcacaagatagtgacatggagttggtggtaaatatttttcacaaaaaagtatttttatctcaacctaatttgttgcaacattccatttttatatattacaagtgttattcatgtttggcatttgcatgtaggtccttgcaactattgttccaccagtagcaaggaataaactaaacataacaagagccaaacaaatgaaggttgctgataaagataatgcaatataaaaaatgaagaaaactgaagacccatttttttg

SEQ ID NO: 17710 - DNA, 310 bp, Glycine max
taacaagcttaacttatcacaattcacttcattttaccatttatttcacaacatcaattgtcctaagggattaatcacaaaattacattccacaccttcacattaatcatgtgttaaaaacaacacatctcaagtacaacacaacatctcacgctcacacaattcattacacatcatcacataacaagtcacaaatatcattacacatgtgttatgcaatagatacactaagactcaatcttatatgcaatgtggtatcatgttaatgaaaaacctcatcgggcgcctaggagtacatgacaagacaaac

SEQ ID NO: 17711 - DNA, 356 bp, Glycine max
agcttagatggttcattggtgaattattacaaatgagtattatgagtaacctataaatgcttaaaaagattaataaactatattgtagcacatatagtagagaaaaaggctagagatagtgtagagaccacttgttttagattcaactctagttatctcttccaagatttggtcttgtataagaaaagaaccaatagtaaaggtgttccaacattgtctatgagattcgttaagataacacatctgaggtattgtttgatttgatgcatgattgctctgtcatggtttttttcattaaaaggtgcctcaatgcattaagggagaagggtgtttataaaatattctcggtctcaaat

SEQ ID NO: 17712 - DNA, 315 bp, Glycine max
  unsure (1)..(315): unsure at all n locations
ttgtcttaagtgtttatatatcaacttgtgatatgttctatcaaaataggtaggtaggagtaaaagtcttgttncatagcttggttctggtacccttgatggaatgtaatgtgccatgcaatctttttacgtattatttattcaaatttttttgagaattaattattttgaaattcaagagcttataaaaaaatccaatttttaatgtgacaaattttgatgaggcccgatcacaaaaatcatgagatttccttcttatttatttaatttttccttttatctttaaatacttttattaccgtatcaaactatcaa

SEQ ID NO: 17713 - DNA, 359 bp, Glycine max
agcttataagaacaaaattgccttattcatttccaaatttgcatgtgaattaggacgcatcaacaagaatcaagccaaggctattgtgcaagcaatcaatggggcaaaacacaccaaatgattatgatgatggatggctcaaattctcacaaaggtaaactcatcactttcaaattaagctttcaaaactatcatgacatgtagaggagaatcaaggatttcaagtcacaaaatgtcaaaaacttttattttcaaaacaattacccatttcttgaacatatcctataattcaaagaaaaacatgcaaagtcgtacatgcacacaaaattgacccaaaatattaaactaacaatccgacg

SEQ ID NO: 17714 - DNA, 258 bp, Glycine max
  unsure (1)..(258): unsure at all n locations
tgggtgatgttgcgcatactgatgggttccatgaagtgtttgctggggtttgacccacgcgggtgttgaagagacggnagggcatctccttccttcctttttgcccctgttgccccgattcttttggcgttcacgtttgtggaggaaacgtaatcaaactttcctctcttcaatccaacctcgattctttccccggcaaacaccagatccgcaaagctggacggcatgtaacccactagcttctcatagtagaacact

SEQ ID NO: 17715 - DNA, 360 bp, Glycine max
agctttctaaattggaaaggcctgtttgtatgataattttatttgtatgataattttttaggcagttgttatattcattctccctctttgcttatacactctgcttttcaatttatttttcaaaaatgtccggtttcaaaaaaaaacactccctttttgacagcaagaaaaatcactcatcccccaaaaaatctcaacctcctgataatactacgcttttttactataaatcatcattctctcttttctaaacctcaaggacaaacactatttttttaaaatcagcgaagagaataatatattaataccacaccagtggtaccaacagttcgacaaagaaacaacaacctttaaacaaaa

SEQ ID NO: 17716 - DNA, 316 bp, Glycine max
  unsure (1)..(316): unsure at all n locations
tggcagagcatgatagnatagtatttttttttattttgaacagccaaatatttttataaattaaagggaagaaacaagacagggtcacaaaaagtgccactgatccagccagaataacaagtgcatgattgtattttctttcctccgttattgctcaaaaagattaaacaaaaacagaaaggactttcaggaggattagcattttgaaacgaaataggttcttttgtaaattgttgtacataaatggtaattaaattgtttaacgaccagattatctgtttggactcaaattcgaaacacttatcggtacctaaat

SEQ ID NO: 17717 - DNA, 360 bp, Glycine max
agcttgcttgcctctagttgacatttgtgcggataactattaggtatcttcgcatgccacctgactcacgggttggggtgacagaactgtggggtggttgacaaaagcgggacttttgctcctacatatcttcaattgcgagactacatagttcttcaatttttgtgtgagactacaaatagtctcaatgttattttactaaaatgcgaacatgctaacatgctttagcaaagaaacaaaccttcaactgatcaaggcaacatatatttttttgaataaaaacaatgcgtctattggagaaggaaagtatgctaataaaattttctcataaccacaaatgagattttggatgttagcatt

SEQ ID NO: 17718 - DNA, 325 bp, Glycine max
  unsure (1)..(325): unsure at all n locations
tcaagcttgctctaaatttacattgatgttagtatttatgggatgaggntacatgccagtttttttttaagagtaacgccccactaaactaactttccaaatgtttgccttcgcaggaatggcaccgaggaagcttgcctcaaagaggtccaggaaagacaaggcggccgaaggaactagttccgccccggagtacgacagtcaccgctttaggagcgttgtacaccagcagcgtttcgaagccatcaagggatggtcgtttctccgagagcgacgcgtccagctcagggaggacgagtatactgatttccaggaggaaataggg

SEQ ID NO: 17719 - DNA, 358 bp, Glycine max
agcttgcattttttctgagatgctttgctgctaatttgtgttgtaatatatatcacaagtcaaccacttatttacaacattcaccaactgctattattataacctgcttccttgatgtttctaagctgaggttttatcatgcatcacactttctgttatgacacgtttctatagaagttttatttggcttctcaatgaaaagatatttcttaagtcaaaaaatgttggtgtttctctcacaaatgattatatcaattatttagttacttgctccttgcatctggtggggtgtttatttccatgaagttagaaactttgaataatatttgttcaaatttcaacagttgagattatgggt

SEQ ID NO: 17720 - DNA, 327 bp, Glycine max
  unsure (1)..(327): unsure at all n locations
ctatgngacactctagctaggaaaccctatcagagcatgcagaggattaggttgatgaatcttaggaaactactagagatgctactatcactgactgctacacacatgagcccgcttagaggtaagagatgagtttatcacaattggggttagaatgaacatgtgtagggatccttaggggaccaaattgggatttattgtgggatgtttattgaattataatttttcctttatgattataaatacaatattgttgtgtttgacagaccaattgatgtcctgatgcaaattggttgataaaattgagagttcttggtgttttcgtgt

SEQ ID NO: 17721 - DNA, 348 bp, Glycine max
agcttcctctgggccattcctgttatggcaaacatttggaaagttagttttaccagtgggacgttactctttaaagcaaaaatggcatataacctcctcccataaatacaaacatcaatgtaaatttagagtaagcttatgcgcatacttccttacaaatgttctcttgcacaagacattctattaaccgaaaaaatgcacccatatacaatcaaggcagctccgttacctagattatttacacgtacttctaaggtgtatttgttacttacatcacacacatctccttggctaaattcacatacatgcatacccaaagcattttggggtaccaaaaattgcacatgg

SEQ ID NO: 17722 - DNA, 308 bp, Glycine max
ttgagtccagcttgttggctaaagaggttgtccggtgtcgaggttggtaaccccgacttttgaaggttgcagtttatcaagccccccagcctgaacaaatgttgttcaggttggatcttgctaagttgttgagggtgagcatgcttttcgtccctttgggtagagttaggtgttatatgtgggaggcccctattttggacaatttagccctttttgactgttagaaggtcactaaaagagagatgtttcgttttccttctgatgagaatcctaaaactgcccaaatacagagacctatgactaggagt

SEQ ID NO: 17723 - DNA, 343 bp, Glycine max
agctttaacttgagtcatcaagatattataaatatgtgaccatggcatgaattttagaacaatcaattatctatctttcaatcttttctcaacatcattcaatatctttcaactctttctcaacatcatagatatgtatttcattgaccaatctctcttctatgatttgacccaattatctagtgacggtgtaccatttgaaggtgcattggacgatgattggaagtttgatttttctgtgcatgatgcccaccggttggtttgtaccaaccaagcggatatgaccggaaggctacttgtcggttcattggcatttgaatgcctcatcatgcactacttgatt

SEQ ID NO: 17724 - DNA, 309 bp, Glycine max
ttttagtttataaaaaaatatagaaaatttcttaaatgatatgctaaacatagtcaatatttaatgaaaaatatgaagtatatgatatatttgaaggaaagcaaagtgataataaacaaatgtttgaacattaaataattattggaacaactcatttaattttaggttatgtgaatgtaccgaataataaacatgaagatagaaattgtgacctcatatattgggattgaaactcatattttaagatgatatcatatctcatcctagtaattattgttaggtctattgtgttgtctattgtcgggttat

SEQ ID NO: 17725 - DNA, 341 bp, Glycine max
agcttgagatgaggaagtgttgtttggtgaaacttcctgcttttattgttgaccacagagtggtacctggagatatgtcgcgggggtcaggagaccttggggacgtcaggtggggtgctattgcccaaaaccaagcttgaccaatcccgacccaacccgggcatagtcggtcagtgagaacctgtgatgtacctaagcaggcgagctcctggcagtcaacagataaaaggaacaaagaccacaaagcaaggaggcttgtggtggctggccacctgtgaaacttgactgatatgtgagatatgatctctggtaatcgattaccaagggtgggtaatcgatta

SEQ ID NO: 17726 - DNA, 312 bp, Glycine max
tgtagaatggctagacatgtctcatgttagggtttggtttggtgcaaggttaaaagggatgccccacattatttccatgacacaaatgcaaaaatgatgatttggaaactttatgcaaaactggtcatgcatgcacctatgtggacactcaagtgtcaaatttttatggtcatgtgatgctagggctcaggattcatttcctctattttagtcaacccaacgtttccaaaatatgttcttttatcaatttgtgcattcatccgagtccattttgggcgtctgggaaaatcttcacagcattcacccttcagg

SEQ ID NO: 17727 - DNA, 352 bp, Glycine max
agcttcatttacaaatccctcatgtaagactaggcctaaactaaacatcattattgtaacaacataattaaaaccaaaacttaacccgtagatccctcatgtaagactaagtttcgatcctgcttcaatcaagttctaaggcaacaatacatttcccaatgctaaagtcacctaacagtgcacacaaatgggtgatcaggccaaaagcatacaaacatcaagcattgaaggaagcattgaacacaaaaaacataatcaattagatattaggtatttacatcagctgttcattagaaatccccaactagggtgttcagctagccattacagaagaaaccctaacaatattaag

SEQ ID NO: 17728 - DNA, 311 bp, Glycine max
tattgagagtgtaacaatctattctaatagcatctgcccaaagggatttttgtaggtttgtcccattcacaaagttctagcgccttcttcaagagatctatttttcctttccacaacatcattttgttgaggtgttctcggggcagaaaaattgtggtgaattccattttcttcacaaaacttttcaaaatactcattttgaaattcacctccatgatcacttctaattgaaataatactaagacctttctcattttgaataactttggcaagtttgtgaaaagcatcaaaagcatcatttttggttctca

SEQ ID NO: 17729 - DNA, 340 bp, Glycine max
  unsure (1)..(340): unsure at all n locations
agcttctgttctaaatttcgagcttctcgatatactatgggacacaatcagacatccgagtaaaaagttattgtcgtttgattttgctcagagcttttgttctaaatttcgagcgcctcgatatactgtgggacacaatcggacatccgagtaaaaagttattgtcgtttgattttgctcagagcttctgttctgaatttcgggcgtctcgatatactacgggacacaatcggacatcagagtaaaaagntattgttgtttgattttgctcagagcttctgttctaaattttgagcgtctcgacatactacgggacacaatcggacatccgagtaaaaag

SEQ ID NO: 17730 - DNA, 312 bp, Glycine max
ttacagcagattgtagttattaccctctttcctagaaaagaaataacttaatgccattaacctaaggaataaaacaaactaaatggctgagtgtaactgaaattgttggcaaccaaaagtcacccccaacagccaacaagtcagccaccatttggtctcccaaaaggctgatgcctatgttgccaattgggcccttttattacaacttgaactaaagcccttttagttgtttaccccaaaacatatttttggtcagccaactttacaaggattgggcccttatttagacaaactaaacactctaaaattgaa

SEQ ID NO: 17731 - DNA, 343 bp, Glycine max
tttcatgcaagcttgttatgtaaaactggcatttccatggagaaacattaatcttaatctacttcaggatgaaacacaaaatgcaacctccattcaaaggcctttcaaagttttgatttgcaacaatatgtgaaaaaataagtcaaagaatagccagtgtgatctcaaattgttttgaacaatcaattaagcataatcaacaaaccgattaattactgtgtacaagagaaatctgaatttccaaaagtcatgacacaggatcttccaggtgaaccttcaacgcactttacttacttgcatacttgcaacagaaaggcatttttgccctttccatgatgctctc

SEQ ID NO: 17732 - DNA, 238 bp, Glycine max
catatagatgtatctatcatctcatccacaatgattttagaggaaggcatctcatgcatattcaactctcaacataaggcatacactgttgtcacttcccaaaagatgataatcattttacgcataattacaaaacatcattttaaataactaccaaatagatactctaatttcatgcacattaatagctcataaaatcacacctggaattatagcatcatatgaatcaattaataat

SEQ ID NO: 17733 - DNA, 218 bp, Glycine max
agcttttgtcaacggagaacatttttattgcaaaagcttcaagacttgatctaaattttaaaaaaaagtactaattatataagttattaagtaaaacacacatgggcttgttctcattggttctatttaactatttgatgttttaaaattggaactggcgttctagttgaactgatttatatggaaaattacttatactcaccttaatataattatat

SEQ ID NO: 17734 - DNA, 309 bp, Glycine max
  unsure (1)..(309): unsure at all n locations
tgcacagagaggccacttaatctccttcatagtccccaaaagaacactaaccaaactacaacacctnaacttcaccctcacctcatcacctttgtccccatcactgttcctcgagttgatggtcttcctcaagatgctgaaaccacttcagacatacccttctctttgttcccacttctcgccacggctttggaccgcaccgagaaagacatcgaacttctcctaagggaactgaaaccacaatttgttttcttcgatttccaacattggctgcccaacctgactcgaagcctaggcatcaagagtgtc

SEQ ID NO: 17735 - DNA, 356 bp, Glycine max
agcttgagcaaggttcatatactttctttggagagtcacttgaaaaagtttaagcaaggttcatatatgacctttggagaatgattggaaagcaattgcaaacatgggtttggaaaacttcactctagtttaaaacagaatgatattaagttaaggattatgctagatctttaactgtaatgtggctttaaatgagttgcattccaggtcttgggaatgaactttctggctagatctttaagtttcttgattcgttctccgggatactacttgtttgtgtggatgcaaaatctaccggcaagtgctccgggtcgtcaagtaaataattaaaacggtgtgaaccaagtatcgaactc

SEQ ID NO: 17736 - DNA, 261 bp, Glycine max
  unsure (1)..(261): unsure at all n locations
aacaaaacttacctttcncccttttattgaagatataaaaaacaccacctatatcccaaaaaataatcatctgaaaaataatgaagtttgaaataaatgaaaaatcactaatttccttagaaataaagaacaaattcatatcaagaaaactggaaattgcaaccaacagtaaccccaatgaacctaagaagtagaaatggcccaaaagatgtgcttgctctttgaacctccatcatagagtatatgactacattgtgtgag

SEQ ID NO: 17737 - DNA, 355 bp, Glycine max
agcttggagcatacaatttgtattctccagcttgaggtttaatgttagatttatgtatgtagttctttatattttgatgtcttttctctctgttgtagttatctgtcatttagagacagtgtgtattttgactcttaatatataaatacatttcagctttgtgtgggtgagacacacaagttttattatcaaatatatcttattctcaactgagtcatttgtttatggtgttttactcatgaacatatgatcatatatatgttattgttgggaatggtttcgggatgcactctaactatgataaacctctacaagtttattatagaaggaagaaagggtccaatataggatataa

SEQ ID NO: 17738 - DNA, 312 bp, Glycine max
  unsure (1)..(312): unsure at all n locations
tgacagcaaggatgttggaaattgccattgcagaattttgggagttagggtttgaattctagagggaaagatgaanngttcaaagtagtaagtaatgctaagagttttcaacgttttaaggttttatagtgggccttttcaaaagcaatcgttaagcccgctttccaaaattaactcaggaaaaagcgttataatgtttcgatataaaaacgttgtgttttatacaataataataaaaacatgatatgtcatccatatgatgaacgttgtgagtgtgtgttaatgtcccttggacaatagatccttagatgc

SEQ ID NO: 17739 - DNA, 362 bp, Glycine max
agcttcttacaaagcatacggctttctggatgtagatgatgatatctatacagatggatcttatatatctatatatctatagatagatatatagatatagatatatagatatagatcatacaatgaagtaccgcacgagtgggtatataggaatccaaatctgccgaatcactcatgttatgatcttctacatcctaggtcttcccgttccttcatctggcttatgttcttcatgtagcattcagactgaatgactctatgaaattacgtcgctacttccacatggtacgggtaacgtaggagacatctctatttttcccggggggaatccttagaattaccacagcttagctttcaattcg

SEQ ID NO: 17740 - DNA, 317 bp, Glycine max
  unsure (1)..(317): unsure at all n locations
atccaggggatgttttttatttacattcacgtcttttggaaagagccgctaaattaagttctcagttaggcgaaggaatatgactgctttaccaatagttgaaactcaatcgggagatgtttcagcttatattcctactaatgtaatttccattacagatggccaaatattcttatctgccgatctattcaatgctggaatcagacccgctattaatgtaggtatttccgtttccagagttggatcggcggctcaaattaaagccatgaaacaagtagctggtaaattaaaattggaattagcacaattcgcagaan

SEQ ID NO: 17741 - DNA, 364 bp, Glycine max
agcttaatatacatattaatatattaaaatatttcaattttaatatagaaagagtgatagtaaaatacaaatatagacacaaagacacacaaacatgatagtacttgtatttcccctagttaattaataaaagtaaaagagaacaaatgaattagttacatgaacataatttgagagtggtttacacatgagcaattgagggcaagaagaatagttggtattttactaattatttaggggcaaaatcagtcaaataaagcatacaccatatgagtaatttccattattaatagttatagataattgaatttaaaataattttgaaacactgatttcacgattaatagtgtgggtgttgttacac

SEQ ID NO: 17742 - DNA, 317 bp, Glycine max
tgggtaacttagtcaaattttttgttggcactaagctgagcatacctgagctaagtgcatttcgttgcggcaaccattagctaagcgagtctggcttgctaagccctcgtacttagtgaattttctgaatttcattgtgctgctaagcgcaaccctgatgagcttagcgcacatctgttgtggcaatcgttagacttagcgggcacttgcctgctaagccgattatgcagaagtagaactttctacaacatcttctaagcggcctcacatgtcgctaagtgggtatgtgtattttgtgaaggtgagctaagcagacc

SEQ ID NO: 17743 - DNA, 286 bp, Glycine max
agcttgcccagagaaggagtccattgaggaaatgcttaccacctctaaagactggaaagcggtttctaatgactcctctgcggcctccacataaggcatagaggatgggcagctcaccaagatgtcttcttcgcctgatacgatgaccagatgcccttccactacgaatttcaacttttggtggagtgttgagggaacaactcctactgagtggatccacgggcgccccaacagacagctgtagggggggggggttaatatccattatttggaaagtgacttgaca

SEQ ID NO: 17744 - DNA, 307 bp, Glycine max
tggagtcatttgttgtgttttgtttagtgggatggagctggacaggagcgattcaggactataacaagcgttattatagaggagcacatgtttttgttgtccttttatattttttggtacttgtgggtcttgcagttgcagtgttcagatgctcaggttttttggaataggttacgactctcccacttttgccactgcaatgtttgatttaatccctgcttttaccttcatacttgtcatcgtcttcaggtttttattactgttctcatttgtaacttctgttttctcttgaaggcactgaaacata

SEQ ID NO: 17745 - DNA, 347 bp, Glycine max
agcttgcttatagaaggagtccattgaggaaatgcttaccacctcaaaagactggaaagcggtttctaatgactcctctgcggcctccacataaggcatagaggatgggcagctcaccaagatgtcttcctcgcctaatacgatgaccagatgcccttccactacgaatttcaacttttggtggagtgtagagggaacaactcccactgagtggatccacggccgccccaacagacagctgtaggggggttaataaccattatttggaaggtaacttgacaggtgtgagggcctatctgtaccgggagatcgatctcccccctaacctctcggcgggtgccgtcgaa

SEQ ID NO: 17746 - DNA, 310 bp, Glycine max
tcatgatgatgagtcaagtatgagtcattttgttttgatgatgacaaaaagcccaaaagaacccaaaagaatatttcaagaatgagtcaacaagttcaagatcaagattgatttcaagattcaagaaaagacatcaagaagaatcaagattcaagagaagaaatcaacaagcaacaagtcaagacttcacaagcgaagtattgaaaaggatttttcaaaaaccaaatatagcacagttttgttttacaaaaaagttttctaagttaccagagtatttaccctctggtaatcaattgccaatttcctgtaa

SEQ ID NO: 17747 - DNA, 342 bp, Glycine max
agctttcttaataagaagatgattgttgaagtatgaggattgaggagtgacggagcaatggagcaatggagaggagaagcaaatttataaagcaaatttgtttaaagcaaatcactggagggaatggcgcgcctcctttatgcaactcgcaatacccaatggtgcgtccctcacccctgacctgctgcccctgcgtcactgcaaccctgacctgctgcactctgcaacgttacaaccctagggacttgcgtttgactggagccatgaccaactcaccattagtgctggtgttttcaacgccacatatacaaaagggaaggcactggtgggaatggcaacacc

SEQ ID NO: 17748 - DNA, 303 bp, Glycine max
cggttgatcctgattctgatccactatttgtgttgcagcacggtggagtgcaacgtaatccgtaccctatggatcgcttgtgaaagcagtgtagtatgatgtacaaaactatttgtacagtgacatggagtaacatggtaaaactaaaagtgatatgtagcaaaaactcatgtcatttattttagtctaatttgcttgaaaatagcaatgattacgactggaattaggtaactttgaaattacatgcggggaagataacgagatttcaaaatttgattatgttattaaaaataaaaataaaag

SEQ ID NO: 17749 - DNA, 356 bp, Glycine max
agctttgatctcaaaatcctgacttaccataaaccttgacccagggtgagaatgccaatccttaccctcggaagcaaaaaaaaaaaggagaagagaaggaaaatttccaatcaaagaggaagcataaaaaggagagaaggaaaatttccaatcaaagagaaagaaaagaagaggaaagaaaactcccaatcaaagaatgggagaagaaaaaaaaaaaaaaaaggatgttaaaaagaagaaagctcctggtcaaagaaactagaagaaatgtgcagaaaggtcttttgaccggacgatatctgaacaatacagaattgtcaccaaatgaacaaaaaaagaaggaaaggaaatcacga

SEQ ID NO: 17750 - DNA, 311 bp, Glycine max
tcaaccttctgaaaaccgatagtaaattaatggtttagtgcaaatatgcccaacgtggtactttgggaatcaggctgctaataaaaaaacatatattttttatgcaagttgtaggttttttccttttccttgtcattattacaattttactttgggatatgtactattgtgttgctttcatgagatttcaacatttagcttttagattgttattctgaaatctgaaaataagttattcatgtatgctgctcttccttgatatcaagtggaaagttaactaggaaaagctcttagtcaatggctttttccag

SEQ ID NO: 17751 - DNA, 352 bp, Glycine max
agctttttccacgttttacttgatacctgtgtggttatgcaatttcaaaattctgttataacaacttagcaaaatatcttgtatgaaatggctataaaaaggggtaatgatgaaataaaaagatatgagaattattccctgcaatttagcttttcttttattctagttagctatcaactgttccgaccttagcttttcttttattctagttatctatcaatagactaataggaaagaacaaaatactaaacatttatttaattaaatctaataaaaaatttacttcaatcacattatttaacaaaatacttgcaaggtctgtaacttcatgaactaaagagcaaatacaaac

SEQ ID NO: 17752 - DNA, 312 bp, Glycine max
  unsure (1)..(312): unsure at all n locations
tcatgatgatgaatcaagttgttttgatgatgacaaaaagcccaaaagaatgatgtcaagattgagtcancagttcaagatcaagattaaagaaaaaacatcaagaagaatcaagattcaagagaagatgaattcaagattcaagagaagaaaccaaaaagcaacaagtcaagacttcacaagggatgtattgaaaaaaaataattcaaaaaccaaacatagcacaattttgttttacaagaaacgtttttccaaatttttctaagttaccagagtatttactctctggtaatcgattaccaattacctgta

SEQ ID NO: 17753 - DNA, 340 bp, Glycine max
agcttccatcaagtgtgtttcatatttcaataacaattgtggattatatggcacaacaaatcgattatcaagttcaataccatttttagcactgtacgcccatcatttcttctcctataaattggaaatccatcttggtcaacaattgttgatccatggaattttttaaggaaatatctaatacacttcccattgaccatacacagtgatcttttatttgcaaacccacatggtccatgaatcatatggctggagactatttcaaataattcgggatggctgtgtttgtttggtatttctgctaaaatgatgcgatcaatatcctctggatttggatatt

SEQ ID NO: 17754 - DNA, 310 bp, Glycine max
ttattggcttaacttgatctttaactccttgtttggcccaatgccaactagcttaacttctctcacctactatctcttcaacacaataacctcttgggctctattcctaactcatggggtggtagcttgaaaaataacttctttcggttttgaaaaatgatcatagatcataacttgtcgagtggaagcattcctgcttctttgggtggcttgagtgaactcagagagatttatcttagtcataaccaatttagaggagttatcccaaatgaaataggaaacctttctagacttaaaactctagattttt

SEQ ID NO: 17755 - DNA, 262 bp, Glycine max
agcttttgcacaaggataattgatactaaacttcactagtccaaattaatcaagtaactaaaaaatataagaaatacatcaaatatttattttcaattattgaaatttcaaggggtttcaaaaaagattataacttgggtggcattacatcattaatcaacaagactcatagcaaaaaatacacttaatcatgaaagacataaagctgaacacataagacataccaacataagacacaaaacacaacttataataggaacat

SEQ ID NO: 17756 - DNA, 307 bp, Glycine max
  unsure (1)..(307): unsure at all n locations
tcttagtctcacctgatgaattctggttacttcgtgcactcctctaatgataatagcatcactncnggactaaattgttgggagtttgaagccatcttctcaattaaatttctggcttcagcaggggtcatgtctccatgggctccaccactggcaacatctatcataaaaatattggaggagaagctgctctgaaatctggtggtgagggcaactagcacataattttttaaatatctcccagtatttatataggctttctccactgagttgtctaatgcctgaaatatcttttctgatggtcatg

SEQ ID NO: 17757 - DNA, 336 bp, Glycine max
agcttgattacctattggattgtcttgttttcatacgaatgatgaagttgcatccgaaaatttgattatctcgagttcttttttttttttttttgtattttaagcgtattccacattacattgttaggatgttaagctaatccgtattgtgtagacggattcgatggtgcaaaactaaaattaataaaaggaaatcgaggatattagatgcgtggtgacttgcttcactaaacattcttctgtcagaatttgttttgtggcgttctattcattttgtggatttttattttggctaaccgctactccactatgtcaaaagaacgagactggttttca

SEQ ID NO: 17758 - DNA, 282 bp, Glycine max
  unsure (1)..(282): unsure at all n locations
tgggtggtaatgtgtattgctgctactttaaaaaagatcttgcttctatctatgggtttctttctttnatggatataattttttccgtgtgctcgggtcatgcaaagtgtggcgcatcttgacgtgggagtgtttctaaagagagaatgatgtaagtatatttgggagtgtatttttttttttttttgaaaaaaaaaagagggaataagctaacatgaaaactggatacaataactgccctaattgaatacacattttttcccgaagcccttcccaagcaat

SEQ ID NO: 17759 - DNA, 251 bp, Glycine max
  unsure (1)..(251): unsure at all n locations
ctcgaggagtatttcaggttctacagaaaagaaacatctntntgaaattccgatcatgccaatgtgaccggngttcagtgaatgccgcanaaacaacctcaaggttataaaaagatagctnttacaatgtctcattctctangattnttcanaggaagtgtaaaaacaccctattacagtacccaacacataagagacactaagaggaactcanactagctagcagaaggcttagaagtcaagggtacctc

SEQ ID NO: 17760 - DNA, 198 bp, Glycine max
  unsure (1)..(198): unsure at all n locations
tgagaattatagggctagagcgtcctacaccacaatatttatttgtctggaaaacttcaacttggttattatcttgaaggcataaaagaagtctttccctccagtaattatcgctcgtccattaaaactgcagagatccgattgngtgctagaacactccgatagatggatattatacactagttacagtcaggagac

SEQ ID NO: 17761 - DNA, 351 bp, Glycine max
  unsure (1)..(351): unsure at all n locations
gacgcttctgaaagcttcttgaaacttcttgaaattttcttgtaagattctagagaagctagagcttagttacacacacctctctaatagctaagttcaccttcttgagatgagaagctagagcttagctacacccccctataatagctaagctcatccncatgccananatacatganaatacnaaaaaaaaaaaagtccctactacaaagactactcanaatggcctggaatacaaggcntanaccctatactactagaatggcaaaatacaaggcccanaagaagaaaaacctattctaatattacaaagataaacgggctatacttagccatggacccaaaattatc

SEQ ID NO: 17762 - DNA, 310 bp, Glycine max
  unsure (1)..(310): unsure at all n locations
gcaagttattagtttgagttaaaaattaaaagggtggaaacttaccttncatatcaatgtcatctttatataaagatagaggtagggacaaaatataaaaaatgggcaaatataactagtaactaggataagataagaanntaaataagtatttattcctttaanttattttntagaattaattttgacttttaaaattaaattataagaacatcatatttatcacaatttaaaattggtacttaaaatgatttanattatcataaaatatatattnttttaaaataattaatattaaaaattagatgac

SEQ ID NO: 17763 - DNA, 292 bp, Glycine max
gtttatcaaagtacttatgaagacatatctttgaaacttaattctaagggagtattaccgaaatgaagtatgttaatggaaactgaaggctttttacgtcattgaggagtgtaaactgatgccagatgaaatattctttatactcaaagaagatacttgtactgacatctctttcactgtgaaagaaatctgtgcgtcatatgattaacatggagtaatattttatctacttcaccaacgacattgtttgtgtacagcaagcagtatatattataacgccttgtaaagcata

SEQ ID NO: 17764 - DNA, 132 bp, Glycine max
taaaagaagcaaacagcaagaaagagagaaacctgtggaacatcaccgcaatcataccacatgatatacaaagaccttaccaatcaaaacaccaacacaagctgtgtacaacctagctaacacgctaccaac

SEQ ID NO: 17765 - DNA, 558 bp, Glycine max
  unsure (1)..(558): unsure at all n locations
atccaggggactttagcatgctatacagcagcctgcacgcgtgcgcgtgcaagactaaccagcgcatatgagagcaatacagaatcttttattgataatctatatacanaacannncagaccaaaagtatcgaaacaaaagaaaagttataacatggcgcagattagagccaattatgtataaccggccggaaacttacctatagaaactaaaagtacaatgagttcggatcagagccaactagctataaactgatctaatacaaaggcgtcgcgtagaatccataagcatagggatatatatagaaatctgaatgagagtgtattaattaagaccgtaatatttctccatgtatggggaaccgtctgaatccgcctcataacacggaagacggaagagatatgatcatgacgttcatacaagaaatacagatcatttctaaatgtatagagcactcaataccttttttaaaatgagatagctcgagcgaaagggacagcaatgatcaattgtccaatcggatgctcatccacacgcgctgagacagatagagaacaa

SEQ ID NO: 17766 - DNA, 654 bp, Glycine max
  unsure (1)..(654): unsure at all n locations
aggggnnnanannnttgtgncattacgcatcatgatgcattgttanancctgccactngatccangacanatncnnctcacccgaatgcttgatctcaatctcagcagtctttactcaccttgtggaangcnngntattaagccatccatcagagacctttaaaggcttacgaccccaatcaatgctcttagatntcatgaggatagggcagtgatcagagtagttcctttcaaggttgtgctgcgaactgtctggccacttagaaagccaaccatcagagacaacagctctatccacattgcttttacaggaaccattatgcctaacccatgtgaactgcttacccacactangaatatcttccaccttcatgatagcaagccaatcattgaaatctgacatgatgctggactctgaattncatgagtgttcccatctctctgaaggtgcctatacaataaaatcgccatatacacancatattcttgggatgcagttctctactcattctgcataatgcttttgccacatcacaggggataatattatacactaccttgctatagcacaaccctctactacgaacctttaaacttaatcattgaatgtgtgtcaaccaagacccctgacatacactgtgccatcagcagaan

SEQ ID NO: 17767 - DNA, 290 bp, Glycine max
  unsure (1)..(290): unsure at all n locations
aattgctcattcanatcattctcagacactcatttcatacaaaacaatccactgcatatcattntcaatcaattcactgttcacacacgctttntgtacaagcaaacaactcanagtgctgaaatttaaataactgaaatntaaagaactgaaacataaagactngaaattaaatgactaaacataaatcataaaatgacttanataaactaanatgttcaaaatgcataaatntaaatntcctactcctgtggttgctcctgtgcatgctcattaagatccaacacctg

SEQ ID NO: 17768 - DNA, 305 bp, Glycine max
  unsure (1)..(305): unsure at all n locations
acgcgccgttatagtctcgcgtgtttcccgcacgtgaagtccacgcgccgncgtgtcgtcatcgaaaggcttgcccgagtgtcccagcagcttcgtcggcccctcctgagtgtgtccaagtgttggttttcgttcagcagctcggtgtagctgtgctagtctaccctttcgtaggttgtgcatgatcaaatactttgtggactgctttcttttggacccactatacactgaaactaactgagaactattgctgctgctcgtgactgggtttggcaggcacctacccttgaaaagattgtctgtca

SEQ ID NO: 17769 - DNA, 600 bp, Glycine max
  unsure (1)..(600): unsure at all n locations
ttttaacatgctgacacgctgatactnagaggcagctgacgcatgcaagctngacaagccgactngtttaactaacgacaactttanctgcgactactcttataanaacaataagtaataatgttattctatcaaatcttcttatccaggctctactatatataaattgtatgttatccacatcttattccatataaatcttatctcatccaattgtatcttatctcgacaaatcatatttattttgttatgcgtctggacttatcatagattcgtgagctgtcgtggtgaggacctatactacancaccggnggtttagtctgcgcgagttatattcggagaggaatantattctaggatcaagcacgactctctctgatgctatgtactactattgacacatagtagtgttacacttcaccaatactttgtatttgtgctatcaaccatgcatgcttatgcatgactaatgctctgagctaattacatgctgctaatgacagctcgtcatgataactgtgatgtgtgttatccatatacacctatgtactctgctactttaatctggtggatcaagtgacgacttgatatttcgacct

SEQ ID NO: 17770 - DNA, 522 bp, Glycine max
  unsure (1)..(522): unsure at all n locations
nccgtttctttcatgagatcgtaanatgcgctgctacatactacactgcttgntacttagcnaactttgccgtttgctgttatggcncgccnacttagtagaagggtactgccatatatataacaatctctgcatgtgtgttgngcanaagtcaaagttcaaaccttgcctagataaatcttaatgaaacttcatataatgtaacctgtctttcagtcaaaaggaccagcttcactaggtgcaagagcttctgtccacatctttcagcacagatactatacaaacctgtaaggtccaaataataaaacaatggttgcaatactatacacaagacttgtgaatcataataaaccttgaccttcagagttatcaagcttacttaaaacatgatccattgttaactatatgaacgagttaaagatccagtgtcattattgctggggttaggttgataaactatggaactactgaactctaactgtgacaggcgagactcattgatatgtttgtaccttatgcgag

SEQ ID NO: 17771 - DNA, 545 bp, Glycine max
  unsure (1)..(545): unsure at all n locations
atctgcactatggctgagnattgtanatctacgncgcaactagncnacgcttgtangccncncgccaatanacnnttatgtctaccagnnnccacaggcttctctatacatactcggatctaggtaatcgatcgtaaaaagaccgaaggagnaatgtacgaatcaatctcttaacaaatacaataacatttccgataaaaacatctttgatgctaatacctctgaacacgatgctaacattcgttataaactaatgtaattacccttaataacagaatgaaacatgacataagaagtagttaacgcatttacatctaaagaatatgatgttctgtacacataatagtactgtgtgctatctaagatccatagtgtatcttgtaaagtgtagcctataccatgacacatcttaaatatgtttcgcactcaactgtgtaattgatttcatgctgctgtactagagtgtaagttctgtttgtttactgatgcctctctatatctaataccttaattcattaaataaataagtaattcttctatccctt

SEQ ID NO: 17772 - DNA, 243 bp, Glycine max
  unsure (1)..(243): unsure at all n locations
ctactttaagctaatgaaacaacccaaataaggatacttacggtgctgatcgactacttggcctaatgataaacttcaaataatgctaattaccgtgtcatcggtaaaatgtaagctaataaaanacttcgaatcatgctacttactgattcatcgactaatgcccgagcttaatcatgcgattaacgtgcatcggaaatttggctcaataccaacttagatatgctacttctgtgtgtccct

SEQ ID NO: 17773 - DNA, 160 bp, Glycine max
gtggcggacttgaaacggaattaaacattttatgacttctttacttatcaaatttggggacttctctatatttaaaaccactacttatttttcagatctgtaaacatagcgtgactaacactaacttacacactatgtacaacaaaaagtccaccttagc

SEQ ID NO: 17774 - DNA, 637 bp, Glycine max
  unsure (1)..(637): unsure at all n locations
cgggcgccttaagtgagnacttttaggaccttcacactcagcttcatgaccaatgacacctgatggcaagttttcataagatatgacatattctntctcgggggcatactctaatttcgtccgggggatataattngatgatatacaaccattgattgaccgcttcgagatatttggacnctttgtgcacaatatgtgaagtcccgagacgtgccgaanatcanaaggaagcacgcttacgcgatccgtngaaattccgtgatgtgacggaaatcgaaaggaagtattttagcaatccgtgagttntcgtaacttcttcgaaagctaataaagaagtaatacattaatccgtanggactcataaccttgcnggaggaanatangtatcattacgaaattcgtaaattttcgtaacgttacggaaaaagaatatcanaatatggagatgtngtgatntagtataaagggggtacaatagcatcttggccttcagattngtgctctgagaagcacctgctcgctggcgactggtgcaagctctccttttgttaatagggagaggaggagngggtaanctctgtctctatcttcaatgtaggaatattcggagaatcagcggcttcgacgtttgatatcg

SEQ ID NO: 17775 - DNA, 204 bp, Glycine max
  unsure (1)..(204): unsure at all n locations
gatgaaagctccaacaggcttcttttggttgngatgtgtgctntatcacgcaagattgcatggtcactagcagccatattctcaattaattccatggcttcttcaggggtcttcaattttatttctccccatgtagaagcatttaaaagctacttggattgtggccttaaaccgccaatgaaaatattgagctggattgattat

SEQ ID NO: 17776 - DNA, 284 bp, Glycine max
  unsure (1)..(284): unsure at all n locations
caatacaactgggagttattgtggtggttaaggaataagagaaagggagagatcatgggtcanatctctcacctacaaaaactaacanattaacaattaacattcgacaataaaaaanactagcanacccatctttntaagctcgtgaaccagtgngaactatnttcttctgtatatctagtgtagtgttacatagttgcattgtagactgttcatatnntaaacagtgaaaatatatacacgttcccgngggagagttacatacagtatggcacagctttaca

SEQ ID NO: 17777 - DNA, 324 bp, Glycine max
  unsure (1)..(324): unsure at all n locations
tgtgtctaccatcacgatcatcgtctccctttccatcattnggggtaccacctgngccaccagatccctccaccttntaggcgtgttctttgaaagatcccgtcccctttntgcanatgttctgtagttgcatcctatccggaaccatatcannaatgtactgatactgcctaacaaaggcaaccattangtccttccaagaatggactcgggaagattccaagttagtgtaccangtaacagctaccctagtaagactntcttggaaggaatgtnatagcaattcctcatcttttgcgtattcccccatcttctgacaataca

SEQ ID NO: 17778 - DNA, 460 bp, Glycine max
  unsure (1)..(460): unsure at all n locations
nnttcatccctgacgcttgaantttgcatnttgtcacnacacaaangaaaggttattgagacaccacttcctaattcacatagcacacaggtatgttatgtcttatcagtatcagattgatctgactgacatggatgaataatggtgaagaaatctactggtgctatgtctacaatgcctcttgcaacattttctttccagataaaatcagcctaagaaaccacactgcacaatctatattgattgtcattattcacactaagattatgtatcacgatgtaaatagtacttgatcatcaatacattgatattaaatatttgaaatacaatatctgtgatggaactttcatatgtacctttcttattaacatcttttaatcattatatactatgaaagtgaactttttcttgaattttttcttcattccatatttttcactcttttcgattaaaaatgagc

SEQ ID NO: 17779 - DNA, 146 bp, Glycine max
gtataccatgaaacaaattactctatattagctgtatcaatgaagggtgggtaagttaagtttgtgcctgaacctctggtagtgcaacacttgagaaatattgcggcaccgaagtacttgagtaatcttccaaggtcactcgtcga

SEQ ID NO: 17780 - DNA, 625 bp, Glycine max
  unsure (1)..(625): unsure at all n locations
nnaaataattggctgcgagtacntgacncntacagncacacngangccatgcagctcngagctnngagcacccatgagtggtncagcattctattacttcgcggtanagngactaacaccaacggggtaagcaccctaagncataactatcctctggtaagccaattctcgcaagctatgcatgataataacctgtccttggaataagctctgtagcatanggactaaggtttgggagctctagacatncggtcctattgnntgtgatggaggagctggagtggatgatgaaaggatgtcatctgctcaggccctttntctcgatgccatctgtaactaaaaagaactcanatttcttagaccaaatttattcatgttaaaagcagaaataanggctgaattacgatgggcgctagcgggatcaactcgccagcgtgccctagaaatatacacatngcttaccgaacagcgtgcgcttagctattcacgccgcaaagatagtgctagctcatttaccgcacttacagacattagttaaaaaattcccaagtttggacttancaagcagcttgttaactagtgttgcacaagaatgagctaccacaaagctaacttaccgcgcttg

SEQ ID NO: 17781 - DNA, 570 bp, Glycine max
  unsure (1)..(570): unsure at all n locations
nataatacttatgacaccctgagcnacngcngcngaagctcaagncggagagaacaacngcgcgacgccacatagcgtttctggaattcatntcaacangccgcgancggcagagaggagngctatatcacgcaagagagcctggccactagcagccatatnaacgaaaaaatgcatggcttcttcacgcgacttcaattatatgtttccacatgaacaagcatataacagctacttggattgcgaccttaaaccgactatgaatactcgagctggatagagatgagacacatgagtgcgcagttttctatagcccacgatgtctttcatagcctcaacagagactaactggaatttgtgaatagatagatggagcttgtctatacaccatggctttgcaagacgtctcaagaactgtcaccactcattcaagaccaaactgtaccttgatgaaggaacctatccgctctcgactngagagagacagctatctacacctctcagacgcagtaactgatggttgaaacaataaaagtaacccaactgtctatcgcaacagaacaatgctcg

SEQ ID NO: 17782 - DNA, 461 bp, Glycine max
  unsure (1)..(461): unsure at all n locations
cccctttcaagtgccactttgagcttcgatactcgatacncaagagangatatacgcatcaaggattataccttttaaatctttnnncccgacactcattgctgaggaatnggcatgagttgataaaaaccacaattcatatatggtcactattttgatatccctcctttcaacctactttttatgagataaattgggctatatttggaaaactaaaacctccactactttgcttaaacgataccagcatttgttatcatccaatgacaacatcatcatattgtgagagggagcccncatagtgatataaaagacatactcttgttatggaatacaagatttgcatccagtcacataataaattcatgtacatgtgaaatttagtctaaatgagcttcttctgcattattattactggcacttaaggatcttctgtttaatctaaataactcttttctgaa

SEQ ID NO: 17783 - DNA, 271 bp, Glycine max
  unsure (1)..(271): unsure at all n locations
acacatgagcccacttaaaggtaaggtgtgagtntaccgcaattgcggttagaatgaacgtgtaaggatccttanaagaatcaaattgggtttattttggaatgttttgtaacatcccattcttctgtaagataaatctaaaaggatntatttannaatgaatagagttntaggaaaataatgagatttctgtaattaaataaataaggagacataattctattgattaaaataatggctctaaggtaaataacatanatatatgttctta

SEQ ID NO: 17784 - DNA, 223 bp, Glycine max
  unsure (1)..(223): unsure at all n locations
cagtcgagatgttgaagtcgatgaatatgcttcatggaattgnngatgaagaaaagtggagaagaacgttcttatactcgttcaactacctcaagaagaagatgaggaagaaaacccaggtgaaccaccttcacctncatcacaacaacaagaagagatggagtattcatacagaanaatttgcaccagtagctcgtcttataagacagagctcaactctgat

SEQ ID NO: 17785 - DNA, 434 bp, Glycine max
  unsure (1)..(434): unsure at all n locations
cacaacaagctntccacatccacaatgcgcgcataaacccaccatccnctggtgcccacctncaactgagctcacgtactcccacgtagcccatatcctcgtttctctcaataccgggtccncatcaatcctcccaagcttccacaacatccaagcaaaacaacattcaaacagcacaagctatcacaaccaagcaaaacagagcanaggcagagtactctgctcaacacatcaaccaaaatcacagcttttctcgcttaaagaccccagtaacaattccttcgatctaattcgttaacccgttggatcgactccaaaaatgtactggaagtctctagtgcataagcctacattnntgaccgtgggatctactggcanacatncagaattcattctgcactagactnntcacagccaaccacacacacaagcat

SEQ ID NO: 17786 - DNA, 268 bp, Glycine max
  unsure (1)..(268): unsure at all n locations
agtgcaattattttcttagtggtatatgtagatgacatatttactaattggaaatgacataccaacattgcaaggcacaaagaatgggctatcataacaattcttcatgaaggatntgngagaagcagtctatattctatgtataaagaattatagagatagatataaaanggtgctttggactctccaatctatgtacattgatactatcttaaagagatataacatggataatccaatgagctatttctgtngtgtggaatactct

SEQ ID NO: 17787 - DNA, 133 bp, Glycine max
  unsure (1)..(133): unsure at all n locations
ggctatattattattacattngaacaatttagtacttttttatttgcatggtgtgtttgaataattatcaattatgttatatgactatgcgacttttctatatatctgatctattcatgtgtcttgcttcatg

SEQ ID NO: 17788 - DNA, 669 bp, Glycine max
  unsure (1)..(669): unsure at all n locations
ntctcactangccctgagnnctgnctttgttttcttngacgatctccgaccgatttttgcggangtctcatggaggtcattcctctctcgcccnaanangaccagccgtttgtgtcttaccttgnggagtccccctcacannaccaangcacacactttgagagatnttgggatgccctatgggaggaagganatcntnacatcaagaagcaacaatgtggatggaccggctatctcttactgtgaatgggagtcaagaaccttcccgattgctggcaaaggccagagcaatgtgagacacctactccagcctcgaagagagtcacgggctgctcagctatttgcagcacatgatagacttgatgacccatataantantgagccgtacgggaagttattttgtcactcatatcttgactagctatactttctgaataaatgagttatccatgatttactccaagaacatagtgcgaacacatactccgcattcatctctacttcattcattctcatacgtactctacattcggcgtttaggaanacgcantactagtgcgccanggctnctatgcccntatcacttatgagatggtgtttcatgattaccgaccatgaagccactgccgttgaagacaatgttcatatgatcatctggataacaaccn

SEQ ID NO: 17789 - DNA, 349 bp, Glycine max
  unsure (1)..(349): unsure at all n locations
acgtacttaatcttgagttcttcatcttgtctagtcttggtgaaaccctgacatgaatcaagtacttaatngagattatctctangaatagaaataatcttggtaagtctcactaattctcgaccattaatggtngatgcttgtgtggtatgtcaagggatangtatcangcaagtagttagaatctgtgccatgcagagctagtctaagtccaaatangattcatcatcaagacgcatcatctagctagattttatcttactaaatattgtgcattanatnntatgaattatntatgtattattctgacatacaaacaaatcaaaactagtctagtaatatatataat

SEQ ID NO: 17790 - DNA, 625 bp, Glycine max
  unsure (1)..(625): unsure at all n locations
cggttttatccgttgnnncctatgncctttgagtgacntctgantctaagctgaggcgganntaaataaaactatttggctcttatggaactcctttctatgattcctagagtcatgagacctcttcaatntctccttggtaatcttggagttctcataggcttctaagaagatctnctcaagttatttcaatcgaagctacctttccatacccgcttcatcaaatgccatgttacnaacccttcaccgccaataagcatggtgctcaatctncaccggaaggtggcatgccttaccananaccaccctatanggagaacatcccanannggtgttggtaagcagtcctatgggcccatagagcatccttaagtagctggctccaattgaaaagatgatggaactataaccaaanggtggggtgaatgggtntannataatcactannaatagtgtacaaaaacactattttccggacgatacaaatntataacatattataatacctacacaaacttgtaagtttctgaagatttcttaccctcgtatgtcnactgatggaganataaccgaanatgtctatttatgggtactttacttaaaacattacttctatcacaataat

SEQ ID NO: 17791 - DNA, 348 bp, Glycine max
  unsure (1)..(348): unsure at all n locations
aggtacttcactttccggtggaagttgcggtggcacccgcacgcggcgcattgtagtccccccgcgccgtccaccgtgtactcgccgcacccgtccgtggcgtagcttcctaggctggctgcatgatttctcaagcactctcggtatacactactgttcctctcgccacctganccctcttccattnntattctctctctctctctctctctccaaatatataaccaaaccaggcctactcactcactccttttcattttgaatgactactatagtcctacttggatacagacatacacatgcatntctatcttatctcaacanacatacncacacatctacctacta

SEQ ID NO: 17792 - DNA, 247 bp, Glycine max
  unsure (1)..(247): unsure at all n locations
caataacctctnaaaatagcacacagatntntatttcctgttgtcaaaactagtggtcgtntggatgtaaaagctaaatgccttggtcatgtagtcaaagtagttaaataaccccacattatagtgcagtacctgacccctatatgctataatggtacagcaaagcagctgctacaccaaagcanatagtntctatataacatgctcaaaactaaagtactcanatcaaaactggagaaaacagtgt

SEQ ID NO: 17793 - DNA, 186 bp, Glycine max
ttatgcttcattgtgataataaggttgccattctgactcccattgataatctgcagaagaatagtccctttcaaactgagttccctgctgctgcatggaatagcagtcgcctgtagagctagcttggtacgtcatgaagtctgccatacactatcaagatcaggagcctctcctttctcataatag

SEQ ID NO: 17794 - DNA, 171 bp, Glycine max
catgtatggcgtagatttctagacttcgttcatacaggctcattatacggatcttcgacatcaaaagtatgtgttattatgaactttgttaattcgagctattcacgtacatcacatcataaaattgcatgattctaacttgttaactacgttgttatgctaatatgaact

SEQ ID NO: 17795 - DNA, 355 bp, Glycine max
  unsure (1)..(355): unsure at all n locations
atggagatacttgtcattctccttaggttcttgttcgtgtttcagaagcaaggcctaggtgccaataatagttcaatggcatacataattaagtaataagtagtacttttgaaaatggctattataatctaanatttcacacaagtgagccctaagtgtcctaatttcttgaacttagagactctacanacatctaanactctaaactcatgaattatctacaatngngtagacttcttaccctttacaatgacactcaccagcctaaaattatgcanaactttgatacaaaggaagcatatatatgcaaatgtngcttcaatcaacatatgctataatctaccacatattggta

SEQ ID NO: 17796 - DNA, 666 bp, Glycine max
  unsure (1)..(666): unsure at all n locations
ncgatacacatgagcactttganatttgtcatgacaccccgcgacatctccccttatccctttcatataatgtgcactattcnntctgatgtgcgatatataccngaatgaacaccttgatgagtagcatggaattcttctagaaaatttggaactcaagctaatntctctgggatgactangcgantnttataatanagtacccctttgttatatacatatncagcatttgatcttctcccctgtcctntcttcacttcttcgattatttntctcaacttctcatctgcatgcacctcagcattgattctttgcaatgcagccatactgngaagtanatcatatnngttcagtccatttcatctctactacnggacanagcatangctcctcngntctccctttcanngctactanatatctcannaatataccctangagcttttgcccaccaatctgctgcccctcantnggatanntgtgtgaataattggtgnggctttttatctaagaacacatgaatttcacccagaatgtaggcccgcatgctgtatgcagtgctacgcatantctcgtcgacctgctagtaaatacnggactaccttgtgtatagcactggtctgtttgcataataccccatctgctaaccgtcactcagaaatctn

SEQ ID NO: 17797 - DNA, 191 bp, Glycine max
  unsure (1)..(191): unsure at all n locations
ctctcatctctatggcattctntgtcaatttgctgagtttcaaagatatttcanattgttgcactntaacgaaacggtgctatgttcgggtgaatgattcaatattgttttaaaagaaagttgtgatatgatcctctgggcaacanaagttntaaaactctattttttgagtattgatttacaccagttca

SEQ ID NO: 17798 - DNA, 601 bp, Glycine max
  unsure (1)..(601): unsure at all n locations
acataccgtgagacttgaaactggatagataccacgnganccncacatgtggactatgtgcngtctggcanggttttatcangttttcacatnncacaagcgcgcagtaacccatcatgcactgttgtccacctgcaactgagctcacgtacttccacgtatcccatctgctcggttatctaacaccgggtgcgctctatcctctcaagcgttcacaacatccaagcaaaacaacgttcagtacagacaagctatcacagtctagcataacagagcacatgcggaaaactctgttaacacataaccaaaatacagctttctcacgttagacacagtacatatcttcatcaatttgtaaccgtggtcactcaaaatatactgcagctatgtgttaacctgctttgaccgtggaaacttcaacatcagactcatctgacttacttcacagcaacacacacacatgtttgcactgtgagatctgtgccattacacaaactctctaaggcgattgaaatccctcttatcatttgcaatgatctcagtccaaatggtaactgttacangcagctcaccagaccaaatagtgcaacctatatgtttg

SEQ ID NO: 17799 - DNA, 613 bp, Glycine max
  unsure (1)..(613): unsure at all n locations
nggcttnnnnatataatactgcgtgcgancctaagcacctgaggctgcagcttgctatatnctatgaatattnctacaacncnnttgcattgtatttncttatcnnacnaagaagcnngnanaatacgcaattcttgacaaggtcagttctggtcttcaggaatngcatctctgattcctcaataaagtattttccaacttattatcctgtgaaaaagagtatgtgaagctgntctatgaaacacattactttatatcaattagttccaagaatcatatatcaatttctttccttttaaagtctcttgactcttccagttatatactcctgtgtagatggaacttggaaatcctatnggttntccccccacttctaaattaaactttgggagaagatcagaanaccaagaagcaatatagtgtcattctgagtcacttcagactggtgtaactggaacagaattgtcacaagaaataccgagtgagaatctaatatccgagataatttctccaaccaaagatactacantctttcaggatctctagattgannagttctgtaccgtaagtgcatgacgactgaaactanaccctctgngtgtgagctgtcagc

SEQ ID NO: 17800 - DNA, 273 bp, Glycine max
acctgtcattccattctagaaacacaaagttaatctaatatattctggaagtagttgacgtgacaatcaacaacataaagctttgttatattttatcaaagtaaaataattttttagtcaatatattatcaatttataattctaaaaatctatacaaaatatttttaaaattttaaatttaaaataaaatattaattctttattttaaaaggtttcattttataaaggaaagtttctatattaatattataatccttctctgctgccatgctg

SEQ ID NO: 17801 - DNA, 167 bp, Glycine max
  unsure (1)..(167): unsure at all n locations
ggagagaagttgaactcgagttgtgtctcacaagactctcattcatcatagatacgacaagtgtgacacatgcttctatatatagactacgtagcttccttgagaagctgtcttaagancactttcttgagaagcttctttgagaacacttccttgagaatccatag

SEQ ID NO: 17802 - DNA, 645 bp, Glycine max
  unsure (1)..(645): unsure at all n locations
ggggcccggctagtcccttatcacttgtagnattcgtanaattgcgcncnganccatnnggcacctatttgaagcncctatgggacactacatataatatacagtcctactcncccaaaagngcaaaatcatatgcatacatcattggggcacttcaccgagccactggtgagtgcatgttntgacatatattgcaagaagatggggacaatgtggcatgctccattgcttcagaatacatcataggcctaaggccttctcattcagatcctcaactccacgaaacaagcatgaanacaaaccanaactgnccnacaatataagcacattctcacaatttggagcaccacacgatgaagataatattcacactggaatgctaaaacatcatcgattgtatcttacttgtggagtgataataacaccacaatgaagcataggcactcatagtgctngatgagcacgacctcatgcttctgagtcttctcttgatgaatgtgctggnttaccattttataattcaatccattccgttactcgttcgttctcctatctttacttgctctgtgtacatttctctgtagctataatcaacctctcgcatactctcactcatctctttatgctgtctaccgtttcctatcg

SEQ ID NO: 17803 - DNA, 162 bp, Glycine max
  unsure (1)..(162): unsure at all n locations
gaataatganggttattctnacccccattgatagatttctntgcttccatcttgtaagtttagcctcgcatttgctaataatgggctgccacacagaacctattntagagctgacccctacaggaattccaaggtaagacaatggaatatccatttgactac

SEQ ID NO: 17804 - DNA, 550 bp, Glycine max
  unsure (1)..(550): unsure at all n locations
nccgtggcatgcccttgacgtctanacttcacatttcgagactgagtcgactgcaaagctgattctgcngctatnnctttagtncatgcttctaatagctcactaattttctctgaaaactcatactgctgactgggtctcaaccattataaaatgtcagctgaatcggctcgaataatccatgagttgggtgtcttcgcagcaaggtacgaaatctctcaagcgcttcacttatnggattcatctgaaatgatggatgaggagatagtgcttgccttcaactgtcttgacttatgaaagtacttcttcaaaaactttctgaacctcttccaagtcttaactgttccttanacgagtgcatcacctcttgcttctcagccacgaaatgatacaagctagctcatgcatcttcgacacctgatttactggtgcaatttattagtacacgatcatagggttcatcataactgacaattctgatactgttagatagtttatgttactactcgcccatctgaaatagcacactatataagacctcgtactcaat

SEQ ID NO: 17805 - DNA, 285 bp, Glycine max
  unsure (1)..(285): unsure at all n locations
tcttagcacctgcggctgcagcttggtcttgtgaactgcatgtctgcttgncatttgctacaagtcttcagggaaggtgtggagngcctaactgtggctgttctgggctatgctgttgtggattggggaggaatgcatggtctgcttggccatcaacattttggaaggaatgagcatgctgctgttgttgctgctgagggctgcaccatctgagattagggtgattcctccatccagggttgtatctgttgctggagaggtcataattgttctgctgtaggtgat

SEQ ID NO: 17806 - DNA, 676 bp, Glycine max
  unsure (1)..(676): unsure at all n locations
ccttttccgtatcacttgangnacctgtagantctgacgcttgancacatactnggccctcatttaactgnctctgggctnggcttgtcacgctctttcatagactnncgacaccnactggatgtngattngaccaanggctgtatgggaatagtgcgacactncttcanaaccttattgatacattctgagaggttggttgtcatgtgtccatatcgacgtccttctctatcataagccatagtcccattttcctttgaaatgcgatcaatccatgtngctatggctggacttagttcacgaaaattttctaaaatttgataaanaatgtgcttgcaaggagtgtaggctgcatannaatagttatcaataacaattttaagtatataaggaagctaaataaacgtgaccatcanatatganatcttaccncaacttctgaacatttctttttgtttggcgtanttgaatttcgattgaagtgcttgtatgtgcncacgcatanacatgataccgtaggaggtgccaccaatgctcattacacagngacttatactcgtgcgacagaataaacaatacattntatagtgactgtcagcagngtgccaaatatgaccncctgcacgctacgtcaacatgtgatgtgatgaagagcaccattcatctggagtgcctn

SEQ ID NO: 17807 - DNA, 202 bp, Glycine max
agagaaagcacaaagacgagaacgatgatttccaatcaaagagaaagcaaaatgagaagaaagacaattcccaatcaaagaatgggagaaagtcaaaaaggaagaagaagaatgaaagaaagctcctgatcaaggatcgaaagacaacagaatagatgtgcagagaggtctttggaccggacaatatatgaacaatacagaa

SEQ ID NO: 17808 - DNA, 584 bp, Glycine max
  unsure (1)..(584): unsure at all n locations
ccccagtagcattccnacttganggatgttaantctccgctctcctctttcctataataggggaggaggaagaacaatatgttcaactcttctgtatctaaggatcactngaaaataatgaagaaaatcatttncgtgaagaaaatccacgccgatgcgtcttcgtaatgcgtncgaaatgttctcgtgagtgattccgcgacaataatccgcatctctcgttagtcttcggcttaaccggtagtcccgaatcaactttaattatttattcccttggggtccacttttcggactttatttattcgtactttcgcccctttgacagcttagcattattaagcatttctcgctaataaaaataaataaattcacgacattgatgaacattgttattctgtaaatgaatcnaccgtcggcatgcctaccatgtggaaccaaaagaggtaatatataaatataaaaaatattttagtaaatatacaaaatcatcgacgtttttggattctttcttatgatgctatactaaggactaggtaatactcacacaacttgcgacacctgaaacgttagcacctactttacat

SEQ ID NO: 17809 - DNA, 463 bp, Glycine max
  unsure (1)..(463): unsure at all n locations
nttctaagtctattgacnnncaagngnangaannccaagcnncnganagcanagcnnacaccacacgcgatataataatctccctccnagaagaaaggggagggaggacaacaccacacaccaacccccccccgacaaaacagaaaaccaaaaagcccacccaaacacccaaagccaaaacagcaaaccaacacaaaggcaaaacacgccacaaaggaaaccatcaaaagcaaaaagggaccacccgacaggggaaaaacacgcacgccagaaacccaggctcataaacccacccagccctggagctaaacatacccggggaggaggaaagaccaaaacacgcgccggcacaaaaaaaaaaaaccaccacccacgggggggagccgggaaaaacacccccacacagcgccccgggcaaagaagaaaaagaacccacccccaacagaataaaaaaaccgacccc

SEQ ID NO: 17810 - DNA, 186 bp, Glycine max
  unsure (1)..(186): unsure at all n locations
caacaggcgtttaggcaccataactgcctaaaaaatacgcccgcctgnactcatcgagactgttgaatcataacatctgcgcaggaacctaaaacgcagatacctgatgcacggtcaccctgtgctgcgtaatttcctgtgaacggcaatattgtctatgcctttaataactggaactccaagtcg

SEQ ID NO: 17811 - DNA, 340 bp, Glycine max
  unsure (1)..(340): unsure at all n locations
tttcccagctggcgtatagcgaaaggcccgaccgacgccttccacagtgccacctgatgcaatgccctgagcgatttctctaccattgtgcggattcacaccgatatggcctctatacaattgcttgagccgatattagcagcccacaccgcaacaccgtgaccgacccttgngcgatgaattatttttaagttgctacagtctactagactgcctctttttttctggcaacgaatggacccagcaaagtgttccccgcgtacttttaatatatatataacgttatcgtaaagtccctccctcaataaaaaactcagttccctggtcgcctgtgccttgc

SEQ ID NO: 17812 - DNA, 358 bp, Glycine max
  unsure (1)..(358): unsure at all n locations
ggacactactcttaagacaaagatgacatacaacctnctcccataaatacaaacatcaatgtaaaattagagcaagcttatgcgcatatttccctacgaacgttcacttgcacaagacatcctattaactaagaaaaatgcacccatatacaatcaaggtagcttcattagctagatatntacatgtacttncaaggtggtattggtatttacatcacacacgcctnncttggctaaattacatacatgcatactcaaagcatntcggggtaccaaanattgcacatgcgctcatctnggtatntctaatacctatacatatacaaacttcatgatgaatcttgactacctacgcaat

SEQ ID NO: 17813 - DNA, 308 bp, Glycine max
  unsure (1)..(308): unsure at all n locations
acacttanatcacttattttcaagaatgtantttaggatattgaatcaggttctttcttataaacttagtgtatatgattaattgagatacaccaggttntgtaaaaactagtatttaaaaagccacantaaatttgtttcatacttaanagttaaaaatgatatatagaatttntttttttttttatcattntaggctntaatcttacgaagtggaaatcctcgttctcacggaaagcatgatataggagcaacatttgtgctaagtgcaaaccacgccagaatttcattatttccattaacacccg

SEQ ID NO: 17814 - DNA, 609 bp, Glycine max
  unsure (1)..(609): unsure at all n locations
agggcnnccggactgtacgcacatgatgnaccctatgannactgngcatgnatccagtncacgactcgatcagagaacttcttgattctggaagcaagngatttatttaatgctggtgaangccacctggatgaatctagtggctcgtaaagaatgattaagacaacataggatgaagtccgatcagcattatcctgtatttgacaacactagttactaaatagctgcatcataatggtnttctccatattatcctacatctgccaaatgcctgaagtttcagtcaacagaaaatagaaggggagggcagagaagactcctaaccaaatcttagcatcacacatttaagtttcacaatggcttctatcatatangacctatctcagacccagagagctcatatagatgcaagggcttcttatgatgccaatcttatctaaagctgtagacaanaaatctntgaagtttatactccatatccgatgccctatacaaagagaattactgctagaggttccattatacaatngatgagcccctcactagcatagtttggccttcaaatggggaacgatcttatttccatgagaccttaaatatcctttcagn

SEQ ID NO: 17815 - DNA, 302 bp, Glycine max
  unsure (1)..(302): unsure at all n locations
aaaatctgatcatcctgctntgatgaatgcgaannactgggcanatgatgaggatgagaatgaggaagaaacccttgctatgactgccattcccacacggtcaaatttcccatcagcccaacaatgtcattactcagccaataatagtccctctcacccaatcatccacaaagcctgcccgccgcacattcggtgccaaaacaccaaccaaaaaggaattttgtaacaaaaagcctgtaggattcaccccanattccggtgtcatatgctaactngctcccatatctacttgataatgcaat

SEQ ID NO: 17816 - DNA, 457 bp, Glycine max
  unsure (1)..(457): unsure at all n locations
ctgcagcttaagcttagtcttatgttgctatgttgctcccctatctctacaatcttcctntnntggntntgacgatgccaaacttgaatatgacgttgagtgccattggagggtctgagtcttgagaatagagacttgttnttcttagtcaatcttgaaaattcttaacacttaagaaaagatcaattcatatcatcatcatcatatatcatacttaataattntactgatgctaatgcaagcaataaagaaataaactagttgatctcccaaatgcttatgcaatgcaagcatatatgcagttcatctcccccctttggtataacaaggccaaaanagttgaacttatgcacaanaatagaacacacaaactgaagggaaataaaacatagcatttcattaatgatgaaacatcatanaccattaatcattaatcattgagctntctgatcaaaca

SEQ ID NO: 17817 - DNA, 463 bp, Glycine max
  unsure (1)..(463): unsure at all n locations
atatccgcacccaccattcattgattggtagttattctcctctccttcccttaattataggtatcaaagggcacaacttgctcctcagaatggagatcaaggatcttgcccgtgaggcacgtaagagaaggacttatactgtaatccacttgcctgtctaanatctttgttgtagttgagtntatgcatcatanatatgaaattgngggtannaatatataattataattacaatgtgtaatgatacttgtggataggcagaatagaaggcacatcagttngacaaagctacttaacaagttacagagcanaagtgttngactcannagaagtctggtaatngtgatgggtctatttctggtgggttatatangaatngtggtgggtagctattcaatcatatgtgataccaaatanattctatttaattgtatctttatttctgactgacatgtntactatg

SEQ ID NO: 17818 - DNA, 686 bp, Glycine max
  unsure (1)..(686): unsure at all n locations
atatacacttgatgacatgaganactgagatngactgcgcctctgtctctngagctctgcatagcaacaccggagccagtcatcttgctaagtttcttgtananngtgtcnntgtgntggaaccaagtggnctntggaataatttaagaacggngnngagtgaactaatatgaacgtgtcttgactaattaannaattatccttcttaatagtactcgattcaattanggcttactactaagttatgagaaagtaaagaatagaaataataacttatacaaaaagtaagcggacataaaaagtacatagcgganatagtaagatcgtangaaagaagaaagcanacacnaagtttatactgggtcagcaacgacctgtgcctacatccagtcctcaagcaacctcttgagaattnctttctttgtanagatcttttacaagcaagaccacanaggatatacgctcccttngnntctcttgacaaccaagtagatgtctctctacttgaacnaaccacanaggatgtaccctccttgtgtcactatacaaccagagctaccattcatcacaaaatctagacggtagtctttgattcagtgctggcaangaatctanacgatagtncttgatcttgtngngatcaagaatctcaacatagtctgatctttgagaggaaagagagaaag

SEQ ID NO: 17819 - DNA, 631 bp, Glycine max
  unsure (1)..(631): unsure at all n locations
ccccccnttatgtcttgacgcgtcntgagcancgcngctgcagcttctcgagccatcctggaggcaacattnggaattttagttttaccaatatatgctacccttaaaacanaaatggcatacaactcccttcaataaatacaaacatcaatggtaatttagagcaagcttatgcgcatactccttcacgaacgttcacttgcacaagacattcttataactaagaaaaatgcacccatatacatcnaggcccttcgtacctagaatattacatgtacttnncaggtngtatntgtacctatatcacacacatnttctttgctaattcacatacatgcatactctaagcactttggctatcanaaattgcatacgtgcacatnctggtatttctaatacctatacatacacaaacttcatgatgaatcttgactatctacacaataaggtgctacatttcatgctntntctttttcaagtgtttttactacctanagccgcatgcanantcaagtatattnntcttttgctactannantgtatcaaaatananggatttttgtatggtatttcttacatacatgcactattatagatnntgtggacatttgctacananatatatgtctn

SEQ ID NO: 17820 - DNA, 609 bp, Glycine max
  unsure (1)..(609): unsure at all n locations
ctgtcnctatagatagnncttgagntccttacnactatgcatctatcacactgagacanaatccacatgtgattntntgtacctnganatttaaatcactntgatntcatagtgagacaaganaaagtctcataacaactcctaacttgcttagttaatcagttcccgcatcntaagtaatgattatctgtatgattcccaccatatctcccncanggaaacgacccagacgatcccttgcagctgccacttcattcagctcataaaccaaatcatcactantaagctcacaacattcgtctcttctctcttctgtttcaaatcatcagcanatcttaccgccttaacactggaatangaatggtcaagaaagattggaatatggatctcaattgcccacnagtcttcaaccgcatacaaggctattgataaaagcagattaaataaatatttaatatataagtacaatatagaatcactatttctctattatttgtaaaaataggtgttataacactttaatatgtaatacaggaaaatgtattgtccctttctctacttcaccaatatataccatcactgtaactctattgttttaaatattttcag

SEQ ID NO: 17821 - DNA, 342 bp, Glycine max
  unsure (1)..(342): unsure at all n locations
tgaacgctctatcttctatcttgtatcttgattntaggaattaaattgtcatcatacaaaaaggagagaatttataagcaaagactttgatgttctgatgatgccaaaggatcatgcgcttctcaagtttaattcaagaggatcatatgcttctcaaggttaattcaagacaagaatccaagaaattcaagatatatgatcaagataatctctagagacttangaagggaattccaagttgaaacagcaagaggttnggccaaagaatatgagttaaaatggtcttacaaggatgtaatcgattactagtggcaganatacttactganatgctnttaaaat

SEQ ID NO: 17822 - DNA, 634 bp, Glycine max
  unsure (1)..(634): unsure at all n locations
ngtggtggacagtagccacttagancngatcgttgacattcagctgagtacatcgcaccaaaatgcngagctggtagtaatcatatctggtntgtttaatctatatngangnnnatngctaaggctttgcatggttgaaaatcaatatntgtaggctngctaggccacctgctggtggttcactttaaaagtaaaatgtgtttgcattaatgaagttattgcatgccaaagaagggtaaaataaaattataatgatctttgacctgtagttattcacatgnttggttnggcttggttntacaaaataacttctaagcgaaatagctctcgagtatacctatatatacatantacaagctaatttcaaacacanattcagtgtcccaaagctgtgtatttatcaggaaagatngntttctatgataatgcaaatcatctatagcgactaaatgttgggttatggtctagtaggctcantgagctataactctattgagtatcacgtatgaagatggacgattaatgatagtgataagtatgattattggtaaacatatacttcccttcagacgatcgatatgctcacaaagatgtgattatgatcgtaggattttggtaacaatattgtattttn

SEQ ID NO: 17823 - DNA, 324 bp, Glycine max
  unsure (1)..(324): unsure at all n locations
gagtacttattgtggcctttttccttgctaaatgagaccaatacgctccttgtcaacccgcctttcttcctggtctcatcaaaatttatttaaaaatttcaagttggcctaccccacacgggtgccctttcactttgccccattttatctacgttattgctcagctcttgtctttccacncctttcttttgcacccactacactaccacttccgatctcttctttttgtaactaataaataaatgtattaacttagtactacttacttcagtcaccctttctagcttaccttcttctagaagctggaacaccactttactactt

SEQ ID NO: 17824 - DNA, 195 bp, Glycine max
  unsure (1)..(195): unsure at all n locations
gactaataaacatctatacttcttaatggtactagaattaattaagtatttactacagaggtaagagagtcaagaacagtaattgaaacttaaccaaatgtaaacacgataattaanagagcacaacgaataataaaagtgtatggaagaagaagacagacactataattntatactggttcggcaacaacctgt

SEQ ID NO: 17825 - DNA, 306 bp, Glycine max
  unsure (1)..(306): unsure at all n locations
ttctaacaatngntaatatatattaaatattattattgtaatataactattatcattaaattctaatcagattaagctaattntatattttaaagttagtttgactcattgaaagaatataaaagaaatactcttgatntagataatcaaatgataatatataananataatntactntgtatatttgtgtagaataaaatcctagttctctctataaaatcaagtttatctnntaattagacttatttatntatccaaataaataaacttgactaaatgtttaatatgttgagctctatctacta

SEQ ID NO: 17826 - DNA, 254 bp, Glycine max
  unsure (1)..(254): unsure at all n locations
tataacgcaacgtggcggacaaaagtgggcagtaacttgaatggtcatcattgtcaatgcggaaggtattatgcgcttcactatccatgttcacacattattgcagcttgtggttccgtgagcatgaactactaccaatatatagatgctgtntacacaaatgagcacatcttattagcttactacgcacaatggtggcctcttgtgaatgaagcggctatatctncttctgatgacacatggacacttatccc

SEQ ID NO: 17827 - DNA, 176 bp, Glycine max
  unsure (1)..(176): unsure at all n locations
gtctctgatntaatcgantaccaagcggatcaatcgattacttctctctcatntagtngttcagaagtgaacatgaacactntaatcgattacttagagcatctaatcgattacattgttcttgagttatntctagatgttgggaagaacactgtatatcgatatttagataatct

SEQ ID NO: 17828 - DNA, 315 bp, Glycine max
  unsure (1)..(315): unsure at all n locations
atagaagactccaagaagattgngccagagaagcaagagaagaccctangattctcatgagtcttanggtagatttcgggcccatgggctaagtatgagcccacttatctttgtacatattagaataatgtttcattanttttgggactnttatttanggctccataatgtaggtagggtaccctagaaatgtangatttttcggcccttgtattttanggaacctagactagttttttgtattatgggtagttntgtaatttcacatgcattaagtgaatatttgatgtgtgtgtnggggaaataaattaatta

SEQ ID NO: 17829 - DNA, 270 bp, Glycine max
  unsure (1)..(270): unsure at all n locations
tttcttcctcatgacgttcacgattctctaatcactcaattctntcatacaactcctcgttgttctctctcaatagttttgcatttgagaattgagagcatccaacaagaatctttgtgccccatctaattgatgttcaccaccacctgacatattcaaaataaaaattataatagttataaagaanatagaacctcaccacactcaagtgtactctcnatatggctntttttttaatttggacactcttccttttccacttaaattctc

SEQ ID NO: 17830 - DNA, 238 bp, Glycine max
cattactaacacctgcttttgggattttcaagacgactacaattcgacactgttttcgagtacaactggatttattctttgatcgagtctggacactcggagactatcgactgcaagacccacccctatagaacgaacaaacacaattaaagtgatgtaccggagtaccaccgcagaagctatagcacatattctctatgttacttctattttttggccaggtctgtccattatgaag

SEQ ID NO: 17831 - DNA, 233 bp, Glycine max
  unsure (1)..(233): unsure at all n locations
ctgactcacngggtcgggtgacaaaaggggtgagactaanatagtctcgatcaacaggctcgctngcctctagttgaagaaggtgcggataacccttgggtatctccgcattccatcgaacttgccgtctctgaatgacanaggggtgagactaanatagtctcgatcaataggctcgcttgcctctagttgacaaaggtgtggataacccttggngtatctcacatgtcatc

SEQ ID NO: 17832 - DNA, 310 bp, Glycine max
gcacggctcgctgacgcctaccattactactacttattgagggctaccacgccgattaacctataagcgttggcaataggaagatctagccaatttcaatccagccattggaagacctgagccaaagacactggctgacctgttgataaaaattgtaaaggagaagtaaggagaaccttggagacaattgttacttatgaggttgagggacccatggatagaatggaactatatgattttgcagtctacctagtggctgcgacctggccgagatactgaagcgctatgtacgtactactcagacggtatg

SEQ ID NO: 17833 - DNA, 317 bp, Glycine max
tggaatttctgtttttgtacctgcatgctcagcttaagtcctgctatctgctgctataaagcactatcacaccccagtgattaatgaccactgactgttatgtcttgactgtttctattaatgtctagatgataattatgatgttatgaggtgttttgtatgattatgtgtagttatatgaattttatatggtggagtttatgttgtatgtcgagtttatgaggttataggtagctgttgcgtaatagaataagttaatctgcttctgaaggacattcctatattatttttcaggaattaataaatttaccttttac

SEQ ID NO: 17834 - DNA, 139 bp, Glycine max
acagataagaatcaaagatcagagagactcagattgtagacctcagaaagctagatagttagaagaatttcaagaaggatgatagaacattgtcaaatattttcaagaaaatcttagcaagtttactcttgtagcgata

SEQ ID NO: 17835 - DNA, 427 bp, Glycine max
  unsure (1)..(427): unsure at all n locations
ncctatgcacatgaggctgtaaactggctgctacgcatgctggtactggaatgggttctcggctccatttataattcttttgctaactaagatgccatatatctataagtgtgagatgcacaatgcttctgataaggtgaccactatctttcaaagtatcagcaggaattgagaccttgcaatgggaaataacagaatatgtcttctgcaactatagatggagctgtctncgtcacttcaaatgtatgcctgtaattaatgtacccttctgtaaatccaacttacgtatatcatctctctttgtgtgtgtatgctttctganaaaaatataagacttaaaaaagcccttcgcctacacttgctactaagggacagagcaaaatagccatgagctaacaagcctgtagcttactaaattgacatgttg

SEQ ID NO: 17836 - DNA, 618 bp, Glycine max
  unsure (1)..(618): unsure at all n locations
atgcttgacttcttgacangcgnaagcacctgangcatgcacgcttgacaggccaataatcatgccacattcaatctgcctttttcttctncttgaagcgctcttcgncgcagnggagcagcctcaccaaggcatcaagcctctacaagtcttccttaaagaagatgcttgcatgcgttagtatcttcaagacctttgatcgcttggtaagtgtgttgttccccttctgtatatggcatttgttttgtgattagctctgcgtggnttttgggttaatatggtaggaactacaagagtctggagttctgagtgaattggttcgattgcggaaagaattttggngcttgcataaccactagtttgtcagatggcgctgtggtcgcttatgcgtggacnacttccanngacagctggtgcttctgcttgttttaanttctcaatggttntttcactaactcaactctcgttccaatatttatttagtttatcacacttccaattgttatcgtatttcatctttccagctgaataacgcggttgtgataagaccngnttggatagcagttgttctcaggtcccgatatcgcatgtctttattatgtgtcggtgttagcgccc

SEQ ID NO: 17837 - DNA, 184 bp, Glycine max
  unsure (1)..(184): unsure at all n locations
atctaatatattatatntcaacacatatcagaataagactatataagattctgtgaaacaaataaaagattatataagatatgcatattataaaagctttaacacctatatatagtagaaagtgcttcctaacaagacaatatctatcgtcaacacctataaatacttatatctaatacatgac

SEQ ID NO: 17838 - DNA, 620 bp, Glycine max
  unsure (1)..(620): unsure at all n locations
nagctttatctgactgcgaccncagagncacctgaggcattgcaagcttangcantgatattaactacatgctacagctgntcatgcattatatatacccgtanactaataagactgggaatggacccaaaggaacatggtctncttgcctgagctgggaaaatatngataatatgttngatttcatctcttatacatgctcaagacatgttcttgaacatgaataaagggcaaaactttgtgaaaacctttgttggngaatcacaaacgtctccaacanngcaaagttggagaatgggaaaccatagataacagaggcaaagttggatttttgacctgtatagaatgtagtgccatgatggctttatagcangctgagaggactcaacatgaccttangtggaggtggacaacatgattgctactatgctanattctatgtttgctgtgctgtataatgaataaattatggctttatcttggtgctgacacatgtgaaattgttagtgatatatatgatgccatgtttctgaatatttatatttcagaatttgacacanaacattgtaagatcttgatctcaagacanaagcactgccatagtctgatagtggcttatt

SEQ ID NO: 17839 - DNA, 280 bp, Glycine max
  unsure (1)..(280): unsure at all n locations
tctcttgctctcagttnttctttcaccactactcctgtaggcctcttcctcttctttagtttcttcatccccacgttattcttctcgtactttgngcctgtgtgtttaaccttttttttaaaataaattaagcagttntctgttttttatgtaatttntatctgcattacaactaattgtttttatattagtccttgtaaatgacagagtttgaattggtcatatattttttatgatttcatcctatanaanttgaaataatgttttgtcctatttcatg

SEQ ID NO: 17840 - DNA, 600 bp, Glycine max
  unsure (1)..(600): unsure at all n locations
ncgatgccctagactgagatctaanttcgacaacccaggattnatacctcactganngaatttacnatttattaaatgcagaagccgcgaactgtccactataattgttgccanatgggcaacaatcacagcccaagacatattttctcaagggaaaatggaatgtggttcctgaatgacttctgtcggaanacatacaagaagactctaagaagtctctttcagcatgcatgacaacaaacacacacatggtnaggtgatagacctngataattccaaccttcaactattgaatgcaattgtctgactatgaaactcatcccctactcatgaggtgaagaaactccacagaatgatatgcttccgtgagggggacggacatnagaatgaatcatagtacctctcaagcctcacaaatctactaaagcttgatgtatcacacacaaggctttgaattattcatataagttgacagcgacctatagaagcaactaatgtgtcatatgaactaaagcctatagacacattgtcaggaaatgggtacatatntgctgtcacactagctcacttgtctgaaatgcctcatgacttcctacaccg

SEQ ID NO: 17841 - DNA, 330 bp, Glycine max
  unsure (1)..(330): unsure at all n locations
cgagcnngctctgtgttatctttttcttcaagttgttgcatcaattntcctccaaagcactggtaatttacttcttgtgaatcctactagtaaaaaaattacatgatattaaattcctcattatttcatcacaaacaacagtaaagtaaaggaattctaatcattcttaaccaaaatagactatcattttaaccaagatttcacagttatcacactcccacagataaaatctttgtcgtcctcaagcgaaaggaaaatcttgacaagttttgaatgaccaacacatgagataactgtgaaccatntcanacctttcaatgactgattctc

SEQ ID NO: 17842 - DNA, 123 bp, Glycine max
atcaataccatcctgcgcaaacttgctctatgcacatgggatcttggaacaccctcttcaaggtgacgccctgcccatggaaccggcctcccaagctgctaatcagcacatataccgtgtgct

SEQ ID NO: 17843 - DNA, 178 bp, Glycine max
  unsure (1)..(178): unsure at all n locations
tctagataagataagatgagataagatctagatganataatatctagatgagatcanatctaaataatatctagataagataagataagataagatctagatgtgtagaataaattagtctgccctcttcaagtccaagcccaatggtggactcaagcccaagcccaattctagattc

SEQ ID NO: 17844 - DNA, 275 bp, Glycine max
gaagttaattgaagcacagctgttttattatgtggcaaaccttaaagttcttaaaactaacataaagcaaccatgaagctttgtattaacaccggatatcaatagacatccagtttgaagagattcctgatgatcactaagctgatatccactgacatcgttaatatgacggatattaatttacattgtcgatatcaacgatatcaagaattgactgtgaaatgctattgaacttctatgtactctttgatatactgcgttatactatttgtatt

SEQ ID NO: 17845 - DNA, 618 bp, Glycine max
  unsure (1)..(618): unsure at all n locations
tacattacttcgatgacnncgctatactcagagtcacctgaggcatgcaagctnttaatggaagctatgagaatganagtacacttanacttctangctgttacannaaatatgagggggngagagatatcgtaagtatgtntgggaacaccacaaagaaggaatcattagagaagaacatatgcgaagataaggtcaatattctctgatcttccatactgggctgatttagatgtacggcaatgtagagacataatgcatgacaatattctgtgaagtcatgatatccatactcgattagaagctgtcgcacatgtgaagggcgcgtgggatgctaataccttccttgtgcgtaagataattccgaaccctcattatcaagatatgcagaccttcgtctgtgtggctttctaacgatcatctcgaataaacgctggtggcgaatccactctgttnccttcttagaagaacaccattaagtatccatctgcctccaccgaacgtaagatggatagtggagactcattngggatgtagaagcacgcgtcaacaagtgcaagtgtatacgactctttattatttcctctctcattgttgcctattgaatacctcgtatgg

SEQ ID NO: 17846 - DNA, 659 bp, Glycine max
  unsure (1)..(659): unsure at all n locations
nnnttgggctactcactttgangatctttagacactcagcttaacacatnnttcttcaggggaaatatacatgttggntgacatatntaacanatatnggctntggtgaacatgcaatntcaaacttcttaagacaatcatcgaactgatccttggaaggacaataaaccannactccccaggcatncataacantaatcttaggcatttgtgaccaaccagnggattacatcctngacattcttngtaatgtgaaacctacacaacaagtgggtacactcangaaatatagttntcactgcattcattaatgctagaattntatcggtagcaataacctcaaagagggcatcatgtctaagaaaaagacttcgaaaccgttctaaagcccacaccacnnatattagaacgttctcctctaatangcaaaaccatnagaatgtcatcncgtggtgtacaccaacaagtcagaacgggagccatacctgttgntntgaggtactgctatcaaataccaatacatcatggatactcactgatangatacacagaagaatatgacaactctcatcttaatcatgcatgatatctgtctgtcagaactcatagtgtgattagatactacttatgagacaatgctctgatgatattgtatgtag

SEQ ID NO: 17847 - DNA, 155 bp, Glycine max
  unsure (1)..(155): unsure at all n locations
aaatggagagaataagaaagagggagacacccatgttgtggcaaccgttcctaccatggccaaatntccattagcccaacaatatcaatactcgccaatatcagtctttctcattacccaccaccctaccagccaagaacacccaatcatncaca

SEQ ID NO: 17848 - DNA, 229 bp, Glycine max
  unsure (1)..(229): unsure at all n locations
tcggaaatcaacacagatatgacaaaggagtagaanaatatataaatatcagagtataaaacacaagaagccaaactcacaaagaagatataatcanaccagaatccanataactggaaatgtcaacaatcacaaaacattcaagactgacatttaanaaccacaagatanataagcanagtacttagcataataatgtaaattctaagaaactaaaagccaaaataca

SEQ ID NO: 17849 - DNA, 201 bp, Glycine max
ttatcctgcagaaaactcgagagcggcactcgtacaaagagacccgcctgaactataccgctgaacagaggattcaagagcactgttgcactctcatccggatgcaggcccctcccacagactcgtaacattgccgtatttgagtggttgtaaacagcttatgccttctactggattcacgacaaaccgcacgcctactca

SEQ ID NO: 17850 - DNA, 651 bp, Glycine max
  unsure (1)..(651): unsure at all n locations
tctgtnctgatgatcancttcgaccgccancnnnaagngacctgagcatgcaagcttatgcacatatggagaggtttatgtacancgagtttgatgcgctcatgagaggggggatcanatggagaatatagatcataatgaagaagaaaggacgagaagagggaatgatggtgttcctagaccaaaccgaattgatggtattaaactcaacattccttcatttaaaggaaagaatgatccggaggcctacttggagtgggagatgaanatagagcatgtcttctcatgctcacactatgangacgaccagaaagtgaagctngccgccacggagttntccgactatgctcttgtgtggtggaacaagctacaanaggagagagcangaaatgaagagccaatggctgatacatggacggagataataagatcatgangaagcggtatgtgccggcttagtactcaagggactngaaattcaagcttcanaaactaacccnaggcaacaaggggggtgaggagtatttcaggganattgatgtgctcatgattcaagcanatattgaagaagatganganggaactatggctcgatntcttaatggtttgactaatgatatccgngatattggtgagctgcaggagtntgtn

SEQ ID NO: 17851 - DNA, 305 bp, Glycine max
  unsure (1)..(305): unsure at all n locations
aagtgggcctgattgctatctgtaccctcctggttactaaatacatcccncttgccttttntttgttgattctntttccataacgttacagaactntacgaattacgtaatgatactttgtttctttccgtagtgtcacgaaaccttacagaatacgtaatcatcccttctttggctttcgggatgttacggaacttcacggatngtgcaacaatgcttnctttntacttncggcatgtcacagaacttcacggatggtgcaacaatgcttcattttgacttncggtatctcacggaacttcacg

SEQ ID NO: 17852 - DNA, 83 bp, Glycine max
ctcaatctgaagagacactcaatcttttagttgaaccataatgtatcctatgtatgtgctacatgctttgatctgaaatggat

SEQ ID NO: 17853 - DNA, 545 bp, Glycine max
  unsure (1)..(545): unsure at all n locations
agctttcctgatagcatcntttagagcacctgcggcatgcaagctntctagctnttanntgggtgtattngatcttcttnggtgctctatgatatgttgatgngctcaaatatgnggggcaattnntggttggtttcttgcttttgatgggtggattgannggttgtatgagatggccctangcctataatgcattttggagcaatggggcatgccacattgtccccattctcttgctactaatgcctaaacgtgccccaccaaagtgtcgtgaatgcctaatggcattgccatgatttganggaacacctatgggacatttggtgccgtgttgtgctttgacatgattagtcataaggtagaagatgccccatacacctagctggaaccaacttgtttgatcagagacacagatggtgctatagtgaactccttttgcacaatactatgcttgcctaagttctacactaatgtaaattgtctctggcctgggggatagagcaatcctttcattactctggtcgacacatctggatgtcctgact

SEQ ID NO: 17854 - DNA, 461 bp, Glycine max
  unsure (1)..(461): unsure at all n locations
nttgctcacctagntctttgcnattagcataactcgcacaaggagtgagccgtaaatgatcgcttcaactctatggtgactntagcgttgttatggagatcgatcattctatattttcagtatgcgagcatcactaaaaatgtaaattgatagtgaagaagaaaatctcgacttaatcagttgactctgtccaattgaaaaacagattaaaccatacttgacacgctgggtctacagctcaagaaacaagagaaataacaaggagtcgacactctcactacgaagagcacttcaatacaaccaaagacagccgcaatctgacagctgagaaagaagtgtcacacctcacatacatggaagatgatccatacaagcggaagatctgcagtacatcaatatctatgacaatgctactcatgattcaagtaaaacatttgaaagcgaaactgttctcacataag

SEQ ID NO: 17855 - DNA, 397 bp, Glycine max
  unsure (1)..(397): unsure at all n locations
ctgctggctgatcattagaactaatgaactcagtgacaatctncttggacagaagcttctcctaaatgaaatgacaatcaacctctatgtgcttagtcctttcatgaaagactangtttgaggcaatatgaagaacaacctaattatcacagtacaacttcatttgcaactcttcacagaaccctcattcttgcagaaattgttaatccagatgagttcacaagaaccatagcatagatcgatattaacttctgattggactgacaacaacatttgttcttgctttcaaagataagattcctcaatgaaacacataactgatgcgatctctatcatggacagtcagccatcacatacatatctcatagtgcgtataccctngcttcatacacatctt

SEQ ID NO: 17856 - DNA, 675 bp, Glycine max
  unsure (1)..(675): unsure at all n locations
tactcacatgatgagctgaganactcagctgttgcgagcgngctgcatccaccgaattggtgcngcacccaccgtactcacagcttatctaagantgncgantntacccagcggtccatcagccaaccncgncacgaccactcctgaccatccagtggacaataaccactgtgcgaagacccatgacatagagaatccgacgagggtgccanatatggaagcttctgatggaactgcagcagtatcgcatcccggaaagaagacagggngcannttgcatgaatgangaaaatcttggagccagacctatatgcagtatctggagtanggaggatcctcatgtggcagaaagggcttaccaaacngtcaatgaaaagctagaacagagttaacagcctcacatgacccgtgcttgcagtgnggaacagttagcattctgtaatacccacgtgacatgcacgctcattttaagacacacncaaccctaaaccacacgttatcatcaantggtgtacagacattgacactgctgtggcttactacacacccacttactacaccctgtcagcaagccnatcatatagaagagacctggtctgtacgttattcgagcaggaatggaaaacacaagtatctacacttctgatctacgaggatactcgagatctgcccgcg

SEQ ID NO: 17857 - DNA, 217 bp, Glycine max
  unsure (1)..(217): unsure at all n locations
tcaacagctttcatctttagaatgagcgcccatcttacggcagtacatcttgagatgagttttgggacaagtcgtccctttatacttgtcgaagtccggcactttgaatttcggnggaataacaacatcgggtactaagcaaagatccgtcatgtctgcanacggatagtgcccaaaatccttcacagccctcaatctttctcaaagagatcgagct

SEQ ID NO: 17858 - DNA, 253 bp, Glycine max
  unsure (1)..(253): unsure at all n locations
cacgcatatacaatcaaggtagcttcattacctacaatatntacatgtacttncaaggtgtatttgttatttacatcacacacgccttcttggctaaatttacatacatgcatactcaaagcatttcggggtaccaaaaatngcacatgcgctcatctnggtatttctaatacctatacatatacaaacttcatgatgaatcttgactacctacgcaataaggtgctacatttcatgctcttttttttttttt

SEQ ID NO: 17859 - DNA, 629 bp, Glycine max
  unsure (1)..(629): unsure at all n locations
naaatgggccttacntgacatgangngtccacaganacngcngctgagatccgangngtgangggganactnctgcttntatgtgaccacagagttgtctctgaganatgcgcgggggcaggagaccttggtgacgtcaggtggngtgctatngcccaaaaccaagctggaccaatcccgacccaacccgggcatagtcggtcagtgagaacatgtgacgtacctaagcaggcgagctcctggcagtcaacagaataaagggaaacaagaccacagagcaagganggctgtggtggctgggccagctgtgaatttgtgaatatgtggattgtggctctggaatcgataccacggtgggaatcgatacanggctaaaatgaagacagggctaagatgctctggtatcgataccanggnggtatcgatacangcttgaaacgaggcaggaagctaggaagctctggtatcattacangggtgtatcgataccngcttaaaaggaatggagatgggaagctcggatcattccacttggtatcattccagagattgtacataancagccactaggtcacatcctggcttatctattcatgctgactgtaatataatcctgcttataacattcc

SEQ ID NO: 17860 - DNA, 615 bp, Glycine max
  unsure (1)..(615): unsure at all n locations
tgatgctccattgaccgctacctcacagtcacctgaggcatgcaagctntggaggcattacctntatggatctanattgatgtgttattgactataagatnccgagatatttgtttgatcaanaagagcttaacatgaggcagaggagatgggtagaagtccttaaggattacgattntgagcttagctatcacccaggtaaagccaatgtagtagttgaagccttaagtaggaaatccttcanatgtctgatttgatgggtagagaagtggacctcttagagtagtttagagacatgagtttggcatgtgagatcacctctagtagcattaagatgggtatgttgaaagcaccagcgaactcttgagtgagatctgcgagggtcagaagtcngactcattcttgtcagcnntcagtagagtccatagtcgcagggagagagaatagtntagagtgggaactgatgagtcttgagattcaggatanggtgtgtgtctagtgacnncagctangagacgatctgggagatggcatagaagtagttagtatcactcggagcactagatgatatgactangcagatgttgtggcggtatgagaagaagtatanttgct

SEQ ID NO: 17861 - DNA, 178 bp, Glycine max
  unsure (1)..(178): unsure at all n locations
aaaatgtatacctgcaatgatacgactaacagtatcatttaccaaagccaagatgacaaagtcatgcaaaagcgggcaccctaaggtgaattaacacttgcagtgcaatgacccatccctggtactccatcctacttnggtcatgatgaaattggactaatatggaaattacagatgt

SEQ ID NO: 17862 - DNA, 222 bp, Glycine max
  unsure (1)..(222): unsure at all n locations
acccttgaacacacaatangaatctatggactatggatngcacaatttgatcgngtttatgattgtaaagtattcagccaaagagtcgtaactgatggaacaactgctattggcctgaatctacgtgtctgatttcgttaatatcagcangtcactatatctgattaggcatgtatactgctgtgttcccgtagttcgctgttataaaaatctcattttgaa

SEQ ID NO: 17863 - DNA, 670 bp, Glycine max
  unsure (1)..(670): unsure at all n locations
atgatgtctagtagctgangnactgtananattgcagcnancngcctctcctnngagnttatggaggcngagtgcanagacattatatatcttatttcaatatgccganannatcatatnaaattaactattcanactnttcanacacatgtcttatcacaactggtattatgattattgctgcagactgtatatgatgctaatattattccttatcttgttcnaagtcttcaacatgctgagtttgacgtcaagaaagaggctgcttgcgccatcttttatgtgacttctggaggatctcatgaacatatcatgtatatattgttcaccattacattatattnnttcttntcatgatgttaccccatctgatactcacaggtgtagcggnatgttgtgatgacactgaactangtgaatgtatgctatgataaaccatattacatgtacgacagatcaacaccgttgcgtaatggactatgtgactgttagctgtccgatcaanagtgtgtatactccctaatgagctgagacatctcgaggtctatccgaaatctgacaccaattgaagtcatgtcttgtaacagttgacgattgactgatgatatatgacaantctgacctcgatataatattaagacttcagtttactaagcaatatgggtgtgcg

SEQ ID NO: 17864 - DNA, 197 bp, Glycine max
  unsure (1)..(197): unsure at all n locations
tacacatgcatanttgttatcttgggacaggngcaggattgttttatgcaatagtcaaacaccgagccaaatccaaaggcagagacgaatcgaggtaagcagtaacgcggccatgatgtgctgcgcaatgtcatttcctgctttcangtacttagggatgggcacaagtagaggttaggcccatgatcaacagatca

SEQ ID NO: 17865 - DNA, 715 bp, Glycine max
  unsure (1)..(715): unsure at all n locations
nattcccctgtcactttgacggtctttagacattcaagctactctctggtaagcacactngacantataggagaaagatcctgtaagaagtattattatatatattccagcagtattcataccttaaggctcttcaacanatagaccttcaggctctgatggaaaanactactactactagagggacanaatgaagctattcctggaatctcanaatgtagatntgtgggacatcatnagaaatggtccatataagtccatganaagaaacacaagtcggannaataagttcctttnggactccaatgcaanggttatttaaacatgtgcagtcagcagaattgagaatgacaagattgcttagtggttgatatgaaaggatacctggaacactcttaagaacacatatgagggaacanatctgggtaaagattcanaggggtatatactaactttacangtntaagatgtntaagtngcngggacangaanntcattgangatatgtcantagattcaccaccatagtgaacanatctggtaaagaatcaacggggtatatactactacanngttngatgntangatgccggacangaatcatngagatntgtcatatattcacaccatagtgatgactaantgtctcgtngaagancacacncacttganatcacgagatcntagaangctaccannattngtngccnanggt

SEQ ID NO: 17866 - DNA, 129 bp, Glycine max
  unsure (1)..(129): unsure at all n locations
atatggatgttgaaagtaagctttctctcttatgatactaagattntaagccagaatcataagttacaattgtttagacatgtctatcattctaagagaactcttccgcctatntaaatgacatactac

SEQ ID NO: 17867 - DNA, 226 bp, Glycine max
tgtgaagaattaaaaaacttagttaataaaagcatatcttttttaaactgggttaccttccagctcaaagtcggaacctgtacaataatcattgagcattgatgatcatacttgtaattggaacgacacacaagatatgtgaaatatactatcacttttttatcacataatgataaacctgggaaacactgggctactacgtatgggtgtgcgataatgccgaact

SEQ ID NO: 17868 - DNA, 264 bp, Glycine max
  unsure (1)..(264): unsure at all n locations
atagatattataccctattgtactangctaatgttcttcttttaattttctgtatctactatgttctgagttttctgtagaaagctttctttgcaagctaaggttgatatatataagagaagctcattgtccagaanacactaaagcatttcatccaaaaatatatctcattattttctactanaatcatttatcataattagaattattanattataatagcattcacatatatcatgtaaaaagaattatagttaaaggtag

SEQ ID NO: 17869 - DNA, 234 bp, Glycine max
  unsure (1)..(234): unsure at all n locations
agtctattctgcaaatactagttntgaatctctgctggagtcactacttgcctgtgctaagccttctccacagtctggtggcattgctaacaagctctgcattcgatagctcagtgtgttgctgttctatgcctngctgcttgtgatcagaagtgtcatctacagtgcaatgctcactgacattctcaaggatgacagcagttctaacttcgtaagctttctcttcagtatttc

SEQ ID NO: 17870 - DNA, 145 bp, Glycine max
tgtttttcatgcatacgtgctggaaaatgtatcgtccaatcccacaacaacaccggaagatagagaaagctgggtgctaagatgactaactaattatgcgtgcctcactgccgcttcaatcggaacctgccgccactgataatga

SEQ ID NO: 17871 - DNA, 125 bp, Glycine max
tacatactgcggtaccgcacgaacctgcgaccctatccgaaatccttcccgcgaacaaagccccacgcctcacggccgcgaggaggccgagcgtttctcctggcgtacagttggcttacatgttg

SEQ ID NO: 17872 - DNA, 592 bp, Glycine max
  unsure (1)..(592): unsure at all n locations
nagttccacattgagacctatganactcagctctagtcgtnctagacctcctcatggtaccgtccagcanacgttgcatctgtgtattcatcgcatctcattacagaacgtgaacgccgtcctactgatgatactcgtcaccaccaccacctgctnncagccatattcaacagggaaaaaanatgtgccatanannatattaanggttcaggacctcacaacactctactcacgtgtttaactcttagatggtagtacacttgtgttaatgctctaatacggctttgtgtaatgattccctctgcctttaccactcgtgtttctcttaagtctctgatggaccacatagacacccanggtaatataatatataggaagaacattaatgacacaacagattgatttgtgtacatcttgactgatagatatatatataattggtntggtacagngctaattggtacaaatgtacaataattataactgtaccttaaatacgggttcattatttatgtactatgcagactcgtcttacttgtagtgcgtgagccttattatctaagcctaatcattcgatgtcacttttgaaccc

SEQ ID NO: 17873 - DNA, 599 bp, Glycine max
  unsure (1)..(599): unsure at all n locations
atgatgacttcatgacatgcgtaagcacctgngcatgcaagctgctaatgttgactgctgaggataagatcatgagtgtttggtgggatcagtttgngtcctatatggatgttagttcaaggtggtgaattgtgggctgtgacctaaatccataaggaaagttattcctgtattttttttggtctgccctcttgctatataaagcanggatgtcctgtatttcaaagatagaataagccttcacttgtatactgcaactattataaaagctttctgttttttccttccgtggatgtagcctttctcaaagggaaccacgtnnatctattgtgtgtctttctcatgcttctctctttcacctttgctgcacaattcggtgtgtatgacatttctgggctactgcattttctggctgtgggtcttgctggtcttcatcacttcataacaatacaaccacaacccatcacacatagacttatccactggtgatgcatgtcatggatacatgcattgactanttaaaataatctatatttatcacatcatcgtatgtacaggaactatctcntacatacaattatgaggatggagtaatctan

SEQ ID NO: 17874 - DNA, 109 bp, Glycine max
gaaatcttcatctccttggagctctgattctcctgaactgatctcttctgatctgataactctttgactactgactgtgctaattgaacatcttggctttgctctcttg

SEQ ID NO: 17875 - DNA, 588 bp, Glycine max
  unsure (1)..(588): unsure at all n locations
tatagtctatcgcgacttaagcacctgngctgcaagcttctagctttatgggtgtatttgatcttcnttngtgctctatattatggngatgngctcaaatatgtggggcaatnttggttnngtttcttgcttgattgggttggatnganggtttgtatgagatggccctangcctataatgcattntggagcaatggggcatgccacatngtccccattctcttgctactaatgcctaaacgtcccccaccaagtgtcggtgaatgcctcatgcatntgcgcatgattttgtanggaaacaacctatggggacaattggtttgcgcgtgtttgctgtctttggagcatgtattcagtntcataagggctagaaagattgcccacatacacnctangcctgngaaccgaaagcttgttttgatgcaagagacacgagaatggtgcatatangtgaactacccttttggccacatcactatggctatgcctagaagttctacctagagttagaatttgtcatatgactgtgggagaaangacaaatacttacattacacttgatatgacagatctngattggacatgatn

SEQ ID NO: 17876 - DNA, 644 bp, Glycine max
  unsure (1)..(644): unsure at all n locations
gggtacacatgagcagcttaacactgcagctcactcgcacaangagtgagcggtanaagatcgtcttcaactcttatatgtgactttgagcgtttgtntatggangagtccgagtcaatttctgattatttttctcgagtattggccgtagtcaatcaacttaaaagaaatggtgaagatgttgatgaagtgaaggtaaagggaaaaatacttcgaactttaaatccaagttntgacttcattgtaccaatattgaagaanacaaggatntaaagaccatgactatngagcaacgcatggggtccttacaagcttacaaagaanaacanaagagannaataaacaaaggaggctcngagcactactacaactcaacgttaggaagcnactatgcanatacatgagccnagaggacanggtactgcaaaatcttgacatgacatgatgagaaganatgtggtacacaacactcccacaatcacnatgagaagaagtntgatcacgagtacagagtcgggagagaatcatggcaggatacaatacaatcaatgctcatgacagatgcactaccatcatgtatctcagaggtgaagaactacttgtgagaaaggcgaagagaacttgtactctgcaacaattgaaan

SEQ ID NO: 17877 - DNA, 605 bp, Glycine max
  unsure (1)..(605): unsure at all n locations
nnnaattttnnnttaatgacgttacgcatcgacntcgctanagtcgcactgangcctgcanngctncntgagaagctagagctangctcacacacncntcttatatttaatctaccttcttgagaagagaagctagagcttagctacatacccctattatatctaagctcacccncatgaccaaatacatgaaaatacaaaaaaaagtccctactacaaagactactcaaaatgcccagaaatacaaggcttaaaccctatactactagaatggtcaaaataccaggcccaaaagaagaanacccctatttaatattacaaagaaagtggatccaacctgaccatgggctaaaaattaccctaggtcatgnaaccctnaggcttcttagtactctacccaacctctggagtttctatcataccgtgggggangattgatcaatagtctaaaatatcgtntgctgcactataattaacaaacccactctgacacgctcanggtcatctgacgtntgattatatatgctacttcgaaacggtccnacggtgaagaacgcgagactgaccanagagcgcncaacanggagttttacatcaaagtcact

SEQ ID NO: 17878 - DNA, 666 bp, Glycine max
  unsure (1)..(666): unsure at all n locations
nntctggacctttgatgnagcttgangatacccgngcancactagagaccacntccagggtgctggaactacttacatggactgatggtgtctatgcagttgatagccttggagganagaggtatgcctatgtntgtgtggatgatntctccagatnntacctcgcgtcaactnntatcagagagaagatcagacaccctttgaagtattcaaggagttgagtctaagacttcaaagaagaaaagactgtgtcatcaagagaatcaggagtgaccatggcagagangtttgaaacagcaagtntactgaattctgcacatcntganggcatcactcatgagtctctacagccattacaccacaacaaaatggcatagtngaaaggaaaacaggactntcaagaagctgtanggtcatgctcatgccaagaacttcctatatctctggctgaaccatgacacagcgtgctcattcacacagagtacactatgagagggactcacacactgttgaatctgaaggaggagccactgcancactcacatcttggagtcatgtacattngcgataagacaaggaaagatgcccagagtgtcaggattcttgatcttcaacgccactttagttcatccgacgactggtgatctcattgtgtgtataccacca

SEQ ID NO: 17879 - DNA, 457 bp, Glycine max
  unsure (1)..(457): unsure at all n locations
tgtttactgacagcatctcaaggacgagctgcacttaccaagactacctgatatttttgtagcctttgagcctgtcccttcctggttgaactactcaagccttagtgaaaacatgatttaccattccttaggaatttggactttgaattgtttgaaataagtggggggttttgttcatgacaactgtttgtgctagctcatgagattgggccaactgatgacatgattggtaaatgtgacatctaatgaagtgttctcaagtaaaaaaaaaatcgaaaaaaaatcgaagaagaaaaaaaaaaacatagtgatgataaactaatgccagatgagaacctcgtcacttcatgtatttatctactctttattctatnttttctaaagcctatcccttgtctattcttggatagcctatctatttctacttgctgccatacattaaacttgacttgctggg

SEQ ID NO: 17880 - DNA, 636 bp, Glycine max
  unsure (1)..(636): unsure at all n locations
ccgagtgccatgccacttgatggctttgaattcagcttaccactcnggataatgggcaatgtatgacatananggttatgacctaatttctgataggcttgaatgcaatcaaanggttcagcagaanagaattccatatcaataaacttagggtcgataatggaacgagatgaganaagattggagtaccgtttctgctggtcgtcggaagaanacactggngaagaggacaatgatggtggaatttgtgctatggatgcactagtggctccggaacgatgagctcttgaagctgaagcggaggcggaagaacccttnntgttctttgacgattctntcatttgaaggagtttttgcagaatttaatcggtgaaatcaaaagagaaatgatnaagaagaagaatcgcattacnggagttgatngatggagaatgagtgnatacgaagaattgagggttggaatgangacgtctgagaaaaaggctggcaggattctganatggtattatagagagaccgtgtatcatacagtatggaatcatacggagagagctctggattnntnttnttnnttntntnntccttnnttttttttatttnnttctntanttataaatctccatctttcttaacttt

SEQ ID NO: 17881 - DNA, 173 bp, Glycine max
  unsure (1)..(173): unsure at all n locations
accgagttccaaccaaggttgtctcanagaccacctttgagttattcaaggatnnggaaaccaagttgcgacatatacgcgtttggggatgcccgtctgaagtaagaatntataatccacaagagaagaaactagaccctaagactattactgggtatttcattggatatact

SEQ ID NO: 17882 - DNA, 652 bp, Glycine max
  unsure (1)..(652): unsure at all n locations
nggtgncccgtgacgcacgttggacgtgacctatagacattgcngctgtgatccatcacactgacanactcttggatcagtactgatacaaatctacgtgttagtatatgatgtgtgaactccgcaatagcttgacatatggacgacatctctctataatcatctgactgctttcgtgagcacggtgcaagtatctcgnaagaatacgctatcaggcgtgcatatagatgctacactgcacctataccaactcctgatgcatcatgttgtaagataaatggctgatggagaatatgtaacccatgatgagagtgctgacatcatatgcgtgcttaagatttaggaatgatattcacgtacgatcagccgtanatagccatcgttcttacgtaatctcagtgaaggagcagccattctggcatatgctatgatagaacgtctataggatcctgtgagacccaatacactctcacatgttcacagtatctggtggtggtcatgaagatagctgaaactgtatatcatagcactcttgctcgaacatgtgacaagatcaattctatctcaatgacactgatgctccaacatctgtgtgatacctaccattcaacggcaggtcttcaggagttttagttttacaacaccattctat

SEQ ID NO: 17883 - DNA, 347 bp, Glycine max
  unsure (1)..(347): unsure at all n locations
tcttcaggttcgaagacaaccttctttcttccttttgtggcttggttagcataactnttatntctcctctncaattgatttttcactctctcatgaaacttcttcacatagtccgcctttgcttgagcttctttatacttaanaacagaaacattatgcataggcaaaagatcaagaaggagtagtggggtaaaaccattaacaacttcaaaaggagaaacaatagtggtgctatgaacaactctattgtaagcaaaatcaacatggaggtaaacaaccttcccaagttttaagttcttcttanaactggccctaagcaaagtcccaatgtccctataacaacttcc

SEQ ID NO: 17884 - DNA, 280 bp, Glycine max
  unsure (1)..(280): unsure at all n locations
tattctntctagactntagcttanaaacttaagagnttaaccatgcctaggtatcctatggtaacatctcatnttttacgctntcaatagtctaaaagtaatacacaatcacatgacagagcattaacactgtctacaacacacatggaaaattgagatgttgaagataacaccacgtcaaatgataaagcaatcgaatatctgcacaagagtctatnttcttggaactgttgccttcgaatgaagatcatcttcacatgtgtnngtgtgcacacattat

SEQ ID NO: 17885 - DNA, 388 bp, Glycine max
  unsure (1)..(388): unsure at all n locations
ctcatacctagcactctttgatgcannataatattctcttcctttactttgtttccttcaacatgtggtacatgtattccttaattgngtttcaaagtgcatcacattnagttatgcaactaatagctgtagtacctttttccttgttctggatggagcactaccactttntncaaacccaataaatacattnttttccctcattctattaccacaaccatataattaataatctaaacaaggccaatggatgtgtcagaattttaattattaatattatatatatgataatatgaatatacatcaattagctgcgatgggtgcagattacagagttgaangcagcaccaacatctgtgcttactttaccaatacaacatctacaagt

SEQ ID NO: 17886 - DNA, 133 bp, Glycine max
  unsure (1)..(133): unsure at all n locations
aataatataaggctatgccatacggacgatggtcattttacccctaacaatcttagaagataatatagaccatggttttacggaatacccttacaccatttatatntacataatgaaatattcatatctatgt

SEQ ID NO: 17887 - DNA, 309 bp, Glycine max
  unsure (1)..(309): unsure at all n locations
atgaaagaagcaaaaccatacaacaacttttaatgttccgtgaagggaaaggaagaaaggaatggaaatcttcctccctggctatttgagtacttccatttttttttttattaattttcattcatcatttctctgctcccacaataaaccgaccatttaaatatcggccaacaaatacaccgtacttgcaatatccaacactagtatttattccgtaccaaatgctaatagaaaattctgcatgatngttttacattctcttattattctgcataataatttttacacacaatcagaataaaaagatct

SEQ ID NO: 17888 - DNA, 139 bp, Glycine max
gatgcatgggagatcctgacaaccactcatgaaggaacctccaaagtgaagatgtccagaatgcaactattggctacaaaattcgaaaatctgaagatgaaggaggaagagtgtattcatgacttccacatgaacattc

SEQ ID NO: 17889 - DNA, 584 bp, Glycine max
  unsure (1)..(584): unsure at all n locations
ncgcgcgtatttcctcaatgatcncatttgatgnccgcgatcncagagncacctgcggcatgcaagctgnangcangagcngngnctttataatatancttcantaaacanngcaggataanatagagacattcatgcattctaattgattctgaaatctgcgtggaagtgcttgcacatgtgcanacaaaataataataagataagatattcatttcgattctataacttcatgatagtttttagtcttataatttgacagggtgctttaagctatatagttacattttaattttctagaccgtgagttaaaagcatcttttagtcttatctttatatttaattctttttagtcctataattacagcgatattttagtcttataattatatntgattacctttagtntttatacaacaatattagactaataactacagatagctttaatatcagtattttttatatacatatttacgataatagtacaaatcctcctatatttggagtaattgaatggataatctcttattacccangactaaaggaatanatatatgttcggctacagatccttcaactcg

SEQ ID NO: 17890 - DNA, 672 bp, Glycine max
  unsure (1)..(672): unsure at all n locations
nncgtgtgngcttttnnactatgnactttgangngacnttcgaattgaangctctgcgcagccgtctggggctcagaaagcncatatacanannccttctannatcnatctatntngaanncgntagttcctgaatgacaactttcaaatcgtcgttcgttcccctcttctgtttatgcagaaaatgagatcaatatcaaacagaacatgcatacaattgtcatctgtattgctacttgaaccataaggaataccatctaaagaagtacttcanaacgcttatctattcttgttggtatttcttgaatacaacttgacttcatatctaatttttaatgtacttangtggaggatgttgacgaaaagaacgagaatgaagaaagtaattatagaagttaacgaagtgtacactcttttttctcnctaagaagtgcacatgaatgctcgtggtaaacagcatatggcatttgatgacagagcctangagatacaaggangagtatatgcttctacagattgacttcatgacttgagagcattcntgtgagcactttatgtagggaacttatgctgtagctatctcttttcgatanggcactttgacagtgcacaggangacgctacattatgctgtgtgttaacaggaatatanactgcatgactacttcattn

SEQ ID NO: 17891 - DNA, 243 bp, Glycine max
  unsure (1)..(243): unsure at all n locations
agcctacatcanacatttgtattattgatgttnctgncacaatcaagcaattgttaacgttctcatatgggtgtacattgtggtcatgttttcgcttctagaattcattgaaatattattgttgattctgaataagtgatcattgtttattatttcataattattgtctactaatcaatcgagtgttcatcttattattgatttctcatcttccaatcatgtcttgataaactgcttgatata

SEQ ID NO: 17892 - DNA, 202 bp, Glycine max
  unsure (1)..(202): unsure at all n locations
tatacttcatctaataaactatntgtctcacctgtcaagatatgtcacccatgacattctggttggtactcanatctctgagtgcaagcctatttctgctcatctgaaatatatcaatgaatatatattaaaatcgtgactcttagactaanaaataatgatcaccaactaagatagatattatctatggactatattatgc

SEQ ID NO: 17893 - DNA, 253 bp, Glycine max
tatcacatgatcgagaagaacaacacatgggagttagtaaatcgtcctcatggaacagatatcataggtgttaagtgggtctataagacacaactcaaccctgatggcaccatacagaaacacaaggcgaggctagtatctaacggttactcacagccacccagaatagactacaatgagacattggcaccaatagctcatcttgataccataagagctctaatagctcttgcgtcacaaagaggatggagta

SEQ ID NO: 17894 - DNA, 260 bp, Glycine max
  unsure (1)..(260): unsure at all n locations
tacaaatatgtattaaattgtatgtttaatactttgatttagcataacactacantttttttttcaaataactaattaagaaaaacaagaacatttaagctaattntttattgttgctacttcgaatgagaattatgacttcatgtagagaagaatatggtagggctaatgtataaacaaaatgacttttactacaagaataaggtagtacttgattcgattttttaaacagcaatgctacttagtatgagagaagtgta

SEQ ID NO: 17895 - DNA, 178 bp, Glycine max
  unsure (1)..(178): unsure at all n locations
cgccgttttcacatccatttaatgcagctcaagaatcaaatgagctactaatgccaaaattacttgaatctttcttagatacacgngaaaatgtctctctgtaatcgattccttctctatgagtgaatcctgtagcaacaagtcttgccttatgtctctcaatgttgacttctgagtc

SEQ ID NO: 17896 - DNA, 275 bp, Glycine max
  unsure (1)..(275): unsure at all n locations
caagtcgactctccacatccacaatcacacataaatccaccatccncagttgcccacctttaactgagctcacgtactcccacgtagcccttatcctcgttcttctcaacaccgggtccncatcaattcctccaagcttccacaacatccaagcaattcaacatccaaacatcatgaactatcaaaaccaagaaaacagggtagaggcagaaaactctgcccaaaacataaaccaataccacaactttgtttactcaaataccccagtaacattc

SEQ ID NO: 17897 - DNA, 166 bp, Glycine max
  unsure (1)..(166): unsure at all n locations
atcatcaacctcgtatcatatgaagctcanagtatgaatgaatatcatgcanggtttgatgatgccaaanatttacttgatgagcatggattgaatcaagtnanaataacaagatcaagttaaactaagataagaacttagttaattttggttaaagaatctcaat

SEQ ID NO: 17898 - DNA, 173 bp, Glycine max
  unsure (1)..(173): unsure at all n locations
caatcctattacgcaacgtggcgggcaaaagtgggcagttaacttgaatggtcattattgtcaatgcggaaggtattatgcgcttcactatccatgttcacacattatngcagcttgtnggtacgtgagcatgaactactaccaatatatagatgttgttacataaatgaaca

SEQ ID NO: 17899 - DNA, 436 bp, Glycine max
  unsure (1)..(436): unsure at all n locations
tgacattagtggctgcatctgacttcctaagagcctttntaccattagcatatcaccctgcatagcttcctcctcaatctcttattccacctcttcttcttcactgaatntagattcactggtgatttctccatttgacttcatgatcatggtcctcttggttggacacttagaagcaatatgtcatctacctaagcatttgaatcattntatgtttctggtcccaaagttggatgaatgaagcagaatatgctnggtttcagcacttgacacttctgagttccatgtcactggatgtatngccaccctcttctgatctgtggccagttctgtgaaattgtgatgagtcttctcctacatntcatcttcagtgtgtcaactgatngcttatgcacaagtcatcantccacatactctgtatcacacatctctatgt

SEQ ID NO: 17900 - DNA, 653 bp, Glycine max
  unsure (1)..(653): unsure at all n locations
ngccccnnaaggaagatgcccagtgagcaccttgangtgatttataganacttgcagcttacagccgatgccactctactccaagtnnttgaagaatatgtngtcatggaaactcttgtatattcaccagganaacatnngtgtggaatgaagatgtagtgctgtgattcanaagatccttccacccaagcataaagaccttgngagtgtaaccattccttgttcaattggagaagtcactgtgggaaaggctcttattgacctgcgatccagtattaacttaatgccactctccatgtgcagaaaggtgggagagttggagatcatgcccactanngatactntacaacttgctgactgctccattaccagaccatatggagtaattgaagatgtgcttgtcagagtagaacattatatcttctcgcagactttgtggtattggattctgtgaggatatgacattcctgtaatatgggaaacatcatctaactgaccgctaattatatggagaacaactgagctgcttgagactaaattgtcttgtttttgtaaacaactgccctacaactttgttcagtatgacctgtagagtctgaataaccaacgattccatttggatagttcttgcgtaatacctttgggcgctcttt

SEQ ID NO: 17901 - DNA, 306 bp, Glycine max
  unsure (1)..(306): unsure at all n locations
agtttctgactatgctcttgtgatgtgtaacatgcttcannaagagagagcaagaaatgaagagccaatggttaatacatgggcagagatgaaaaggattatgaggaagcggtatatgccaactagttactcaagggaattgaaattcaagctccanaaactaacccaaggcaacaagggggttgaggagtatttcaaggaaatggatgtgctcatgattcaagcaaagattgaagaagatgaagaggtaactatggctcgattcttaatggttgactaatgatgttngtgaatattgtgagctac

SEQ ID NO: 17902 - DNA, 183 bp, Glycine max
tggggcttgaaaattctctcttcctggctacctcaaaccttgcattttgctctcttccccataattgctatgtcacaacttcttgatactttgactatattgctttttgccctaccttctctcctttcaaccttaccatcctttctcctatcatcagtatcacaactgcagtttgtctacttt

SEQ ID NO: 17903 - DNA, 521 bp, Glycine max
  unsure (1)..(521): unsure at all n locations
gcagcttctataatctgtaagaacanagctctcaaatatcctgtatacatntagagaaaagactaaatgtctntagtgatatanttttctataagatgatcatatatttcaaccagtagacaatcttccaacanatcctattaattngattagagccatcagtgactaggacaaagaattctaggttaaagtcaagcttatggtagagcttacatgtgtaaaagccagaagtgacagtgaacacactactacacaantatgcatttgcaatatttaagatgtaacacttgtaaaaatgtcattgctagttaaatntgatttttttctaaccattattanaacaagtggtactannttgatataaataannatttggaccatnnntaaataatgtacccaagcagctttcttcaaactataactctactcctacattttgtacatnntgacactngtattagtacatcattataaatatagtcctgacaaatacctctacctctgctactcaattgctatgt

SEQ ID NO: 17904 - DNA, 218 bp, Glycine max
  unsure (1)..(218): unsure at all n locations
ttgatctctaagtacatcagccaatacacgttccatttccaaatttccatgtaaataatntcttgtntcctannatatttttccctagaccctttctttgtccgtcatttttttcattaaatgactccattgaagttaatgtcacttattcaacctgcacataacanatagtagatatgacctactntattcatttgactagtccactgcacaatcat

SEQ ID NO: 17905 - DNA, 156 bp, Glycine max
  unsure (1)..(156): unsure at all n locations
cagctcanaattcatagagtaatacaccctanaagcaagcgcttcannaattcaacttactcanacttcatccaaaacagaananaacctcacgacacgcatagtcaaccagactcccctttatcaagcaaagacgcaataaaaaataanaaaatt

SEQ ID NO: 17906 - DNA, 163 bp, Glycine max
  unsure (1)..(163): unsure at all n locations
aatttcgaaaaaacacctctggggaaaattataaatcccttttcacaatactacactatctcacctatatattcactattactgattcatactctattatactatatcacataacattattctttgtatcaaccatatatatatcctacngccctgattatga

SEQ ID NO: 17907 - DNA, 152 bp, Glycine max
  unsure (1)..(152): unsure at all n locations
catgtttattgggattaacaaggagctacatatatagaggctactagtcaccaatgtgtagaaacaaaatacttatagcaataacaataacgttaaaaaaatatcaaacaacaaacgtcctaattntaaagacgtgtaacattcataagaga

SEQ ID NO: 17908 - DNA, 659 bp, Glycine max
  unsure (1)..(659): unsure at all n locations
cggtgtcatatgaactcgcacacatcnangtgaccttcganatctcagctcatactccctgtcagacaaaacgcagtcctcgagttttgttagtccatcntatattcatatncatgtatnnggcataactgcatgttacattgggacattggngtactatcaccctcaatctcctgatcaatgcatcaaccgttnttatgaggatgatgctatagtcacaagaaacatatnntctntaccttcaagtgtggcaattgcatgtcaaccctcagagacattgtcatgataacaaaggtacggacattaatatgaatcntcacaatcanactgaacgtctagtcatgaaccattacaagtgatagtgataagcacaacttctatctgattaaccagactgatatgcngatataaaccctagtcacaagtcaactataagactatatgctcactgctttgaatcagacacaaaccatatgtgataaatacatcatcgccaccatcaaacatccatagctatggtttcaaagttacaatacaactaaatgcaacttcacttaatcaattaccacgacatcatctagcggacttcatcattgaactccactagacacccaacagtgcagtccctaaacatctgcacatcagatagtattactccg

SEQ ID NO: 17909 - DNA, 279 bp, Glycine max
  unsure (1)..(279): unsure at all n locations
cgtatgtanggattgagtgatagacgatagtggatcatggttcacaaagggcatggaggtgttgtcgatggtgatgcacggtnggtttttagttgtgagtggggctggtttcagtcaaccatggtggtgcacagtggttccttggttatgaacaatgatctaccatgagagaagagagaagagaaaagagaggagagaggaatgactcatgagcactattatgaatnnntaaaaagtaaacactgaatactatngatccttantcatgatgaataatat

SEQ ID NO: 17910 - DNA, 524 bp, Glycine max
  unsure (1)..(524): unsure at all n locations
cacatccctgagtaccacttgagaacccttcaatgagctatactcncgtgataatcctgataatttatttgctccgcnatatatccctctcattgatcaccaactcttttattccttcatcatgtgaaaagaaataaatagctttcagcatacaaataagctaaactaattgacaacaatggatgaatacataatataactaccccaaagaatctattaaggatgatatgactgcatatggcctgaattgtgaaacggcagctcacttgaaactgttaaacttattcagtgtgacacatatggatacaatgagccaaacacattatcacaactgcaatagcagtgaactcttaagtttttaaaaatagaaggaagggaattgagatgactaataacactgattactgagctttctcatgctcatttcagagtaatagactgaaattgtagaaaacatataatgacacgcagtgtataattataaatgtactatgtacgtgtacatgatgttaccactgaacaat

SEQ ID NO: 17911 - DNA, 527 bp, Glycine max
  unsure (1)..(527): unsure at all n locations
agctttgtccattattntgcanaccagngaggcagctgcaagggtcgcaacgttngaaggtcataaaaatttgttatagaatctcaattgacagaaaatcattcccgacaccggtcattgcagctaaatggctattgtccatttcttattaatgctccctgcanatacttaaatgtttcacatgatcatttcaactttctcattaatcaaccanatgtaattcacaaaacccttaaaaggaaatcaccatgtgtttaactgcatttgcatctgtangaattaatgaagtaaaaaattgaaagatttcaagaagtaatatttttataatgcttattcagaagtgatcactatttatatgaactcatgacaatactattacatcttctaccccatatttagtgcattcatatanatgtgtgcatangcacctaacatttttttacatggacaaatatctctgacttatctattactatttttttcacatacgtatttgagangaataatatatatgatattngatcggt

SEQ ID NO: 17912 - DNA, 204 bp, Glycine max
  unsure (1)..(204): unsure at all n locations
aacactgatatgcgccgtatctcatgcgtggagcggttctcagatactgaagggaaacaatctcaccccgtgacaaatgcgcgataaatatatcagtagtatcccnaattcaaactaccttaaatctgtagatagaagaaaaatcctactttataataatttaatcgaaagattagtactctatatctctcttcattcagatat

SEQ ID NO: 17913 - DNA, 793 bp, Glycine max
  unsure (1)..(793): unsure at all n locations
cgccttgatgatactgtttgaacggatcgtctnagtagacctgccggcatgcaagcctggttttaaacctttttgccagcaaaaaantgatttgataattggcattaaaggggacggcccattaaacaatctttgttttttttgggacgcaggagatacactaaagcatttggaccatcaatgatctcttggttttttgaaagaggcgacataaatatatactgatttgaggctcttaagacccgaccgttccttaaaaagcaaataaaccaatttcaccgcgactgacctcaatatgggtaaaggggtttatacaacctcgcttgaccgaaaagagggttatactccaccgaatcctaagcaaaaaaaaaaaaaaaactcttatgacattaaacataaccaacccccttgagtattgcatacctgtactacccatcaccacctggtatgcaaccttataaagattgagggagaagagccggcctaagattctaaaccctctttctgccacctggccgcaacatgccttaatgagacaccctccttcgtattaaaacattaatcttttaccttacacctacaataaagatatctattttaattcccactttattttgttaaattcttttcattcaacaaaactatttaaaaaaatgtcttttattttaatttaaacactcccaactttcttcgtcaaactttgtatatttcctccccccaaccaacacggttaatctaaataaaattccccttttaaaaacaaggtctttattaacgacacctattcaacacc

SEQ ID NO: 17914 - DNA, 133 bp, Glycine max
caataatatcaacatgctctttcacaaaaattggatcgccaattgcaataagagaatcaacgatattttgtactaagattttagtccctaaactttttcgaaatttgattttagtccctaaacttttggggcc

SEQ ID NO: 17915 - DNA, 270 bp, Glycine max
gacccccgcgacatatcttcaggtaccactctgtggtcaacgaataaaaatatgaagtctcacccttccacacattctcacttcaagcttgtatgattatggggtacctgtcacatgtggtactaagtggcggtcgggcgatggtgcacgttaactatccacatacacaaatcacacataaatccaccattcccaggtgcccacctttaactgagctcacgtactcctacgtagaccttatactcgttcctctcaacaccaggtccccat

SEQ ID NO: 17916 - DNA, 450 bp, Glycine max
  unsure (1)..(450): unsure at all n locations
gaaaaaaaaatgggcatttacctggggtgaaaagcaagagcaagcctttgctttgctcaaagaaaagcttactaaggcacctgttctaactcttcctgacttttctaaaacttttgagctagaatgtgatgcctctggagtgggagttaaagctgtattgttacaaggtgggcaccctattgcttattttagtgaaaaacatcatagtgccaccctcaactaccccacctatgataaagagctttatgccttaataagagccctccaaacttgggaacattacctaatttccaaggaatttgtcattcctagtgatcatcaatcacttaagtacattagatggcaaagcaagttaaacaagaggcatgcataatgggtagagtacctagaccaatttccatatgttatcaaatacaaaaaagganaaacacatgtggtagttgatgccct

SEQ ID NO: 17917 - DNA, 367 bp, Glycine max
ccttctggatgaatcttctggagggcccaagtgggtctggttgctatttgcacacccctttttactaaatgcaccccccttctattcttttgtaattctttttccgtaacgttacgaaactttacgaatatcgtaacgatacttattttacttccgcaaggttacgaatccttacggattatgtatttactcttttttagctttcaaagaagttacggaaactcacggattgcgcaaaaacacctcttttcgatttccaccacattacgaaatttcacggatcgcgcgagcctgctttcttttgagttctgagaacgtctcggactttaatttattgcatgtcatcaagtaataatccccggatgaa

SEQ ID NO: 17918 - DNA, 319 bp, Glycine max
  unsure (1)..(319): unsure at all n locations
tagattatgtacttgttgcgataaagacttgaccagatgtgtcggccaagcaaggaaggtctaaattgcctaccccacttatgaaacctcatgagtgggtacaggaactgaagcatctgcatctataacctcctccacacttacctttacttggccaggcaacaaaggagtgttatgaacaatagtggatccctcataaactctccccagggcaaccaggcgggcaggatctacttcgatgtacaagccgcacctatctgagtcacctatctcangatcgtttcctgagggatcaacacaactcccctttgtgcttact

SEQ ID NO: 17919 - DNA, 337 bp, Glycine max
attaatttttgctttaccttctcttcccattgtgttttcttcattttttttctccatgtatctcctcacatgtcttgtgctaaatgtttttaacatgattctttagagtttccaccaattaaacttgctataaaagctagatttgattttctatggttcaaatttcttgttcttgttcttgttcttgaaccatgaattgtgttgagtttacgttcctttgagttttgtcttgttattttttgtggctgaaacctaaatcataaaattcttacaaaaatattaaagtagacgaaaaccttcaaaatctggagtgacttgttcacctattgtagttttg

SEQ ID NO: 17920 - DNA, 394 bp, Glycine max
  unsure (1)..(394): unsure at all n locations
cgaaccaaacccggttagagtgtgatcttaaactatgagtgattttctagcttcgagtaatagnctttgcatcaatctctgaattttagaatgaaatgtctgaatgagaacatgatgaaggccatgattgtgtatatacaagccgattgaccaaaaagcttaccttgaattataattgtatcctttgcaccctttgtgagctgaatgatagtgtctaataaatttgaaccctgaacttaaatgattatctccatataccttgcttagattctaggagagcatatggttcaaggcaaatctaccccaaatttgggggagtggatttgattgggatgtaaaggaaaagggcaagcatcagcacacacaacaaataaatttgtatgttaacaaaaaa

SEQ ID NO: 17921 - DNA, 611 bp, Glycine max
  unsure (1)..(611): unsure at all n locations
agcttgcatgaatntgataatgaaacaagaagagaatttttattattattcaacttgnatgaagcttggaataagaaagaaatggactcctctccctcttggtgaactcgtgcaaaatggtgaaagaagggttccaaattgatttttaaagaaacaagataatgttgaaagcttaaggagacaagcctagatgacaatatgaatgacctatggccaaccctgtttaacatgccaagccatgccttttaggattagagttgcttttgaaattttaaccaaaaatggttaaagtaagtttaaaccaaaaatggaaactcatcctatcctaatcccttagatagaggtgtgtaaccttccttggattttgtgtaatttgagtgaaccttgcacaaagtccactctcatagagcaaaattacactgtcactcaagacatagtgtaattctttcacagatganactntagctcataaattttttatatctctctcaagctatgtatnttaagacaattcctaggtataatttgctaacacattcatactaaaaaacaatggtgcatatcgttactgatatctaaaaaaatatattaaaatacttaagtattttaat

SEQ ID NO: 17922 - DNA, 327 bp, Glycine max
  unsure (1)..(327): unsure at all n locations
tcatgaggaaatgagaaccttanaaactactttagcatttctttttattggaactaataatcttaatagacttttaggatagtgtagaagttcctttgacaaatctagaaatggatattgttagtgcttagctctactgagttttaaaagattggctaagattttgttaaaacataagcacttagacaatgaaagaaagctggagttgctgcacatgatgtccaacgttatgtcaaggaataagatcgggctgcacaatgcacaaggcaagataaaatgtcaaatgaagaattgaagctgcagaatccacgatgtcggatacaatgt

SEQ ID NO: 17923 - DNA, 806 bp, Glycine max
  unsure (1)..(806): unsure at all n locations
ccccttcgaccttttgagcgcggtcccttagacactgccgctgcagctttgaaggggcaatccacccacctctctgttatttttgaccgacaanaccggacgtccggccacaggttcagattccacgacaccaactgttgtgcggaaagaacatcgaatgattcacaatattaggctcgtcttgcgtgctatcgtacattaatccattagtcgttttcatgacaaccaaacccttaagaataaaactaatcactggtcgcttacaacgttcaatccgaggtaagggcattttacacacctcctctccactacacaagcttaattcaccacctacccctangcatcagagaagacagactgtcttgacttataaccaaaacacacccgccttgttactgccatcctggtcctaccctgcaacaccttgttctgccccttcaaaactatgtggcgaagacgaaccggccatccacactaacgcctctttatgaccccgtggcggcactaatgcactttaatgagacgccctcctcttattttcaaattatagattgttgcctttaaattaaatcaaaaaaattatttttcttcccacgtttattttattgaaacccttctttttcaataaaacatatttttttaagacatggctgttttatttaaatttcaaacacctaaaatttttccattttaaacatttttagcgattatccttccccaaattaaaaatgttaaacccaaactaaaattccccttttctcctaaaaaaaagtgttttttttaaagcatctcaacttttatcaccg

SEQ ID NO: 17924 - DNA, 730 bp, Glycine max
  unsure (1)..(730): unsure at all n locations
ctttatggtaaggcggtacttttcccaataggggttttggttttcatccttaacatcacggggaatcggtgccatatgtgagacgccacgactgtcgaccgtgggaacgtccaaattcgatcgtagacacctgaagtgtaactttgtcgtcggtgaattatgagcggaggctgggaatctcttaccggggagcaaaaactctgctagcaaacaacatgtagccgaatacactattgaattacgaacctgcgccgtgttgtggttggacacagccctatcatacaccccttgagaagatggatagaatgactccctaggtacgaggattcatgatttggggaatgatgagggaaaacagagttagatgctggcatatgatcgtgatatggactagccaacctactgttgtgccttttgtcgagatcattagaacatatctggcacttcccgaatacaactngtatccgaaataatgaagacttgctgtttccggttacggtatttatgaccaactatttaaagagcgttccatctaggcctctcctaacgggagaggggatcattttaaggagcttcccccgacccggggggacaataatttctggagcgaatccgggggatacctctctgtgggctctattccaaacaaatataaaaactaatggggaatgaacctctggatggacattaaccaaggtcgttttagccttctgggctgggcaacccctcg

SEQ ID NO: 17925 - DNA, 592 bp, Glycine max
  unsure (1)..(592): unsure at all n locations
gtacttgatctttgaactaaacccacngagctgcactggttggcaaacccccctacgtttttttttttccccccaaaaccaggccactttgtggaacaaaaagatgaaaccaccctccccttcttactaagcttgtagaaatgggaccgtacagggactaggggcggcgggcagggcatcaacttcaccccaaataccaaaatcacccccagtccacctcacgagcccgactctcgagcctatctcgttttacaccgtccatatccccagcttccacatcaaaataacatcaacatatctcttaaaacaaaaagcgagcaaacttgccaaaacaacaaaccatttcttatctcccatactttttttaaatggaccggacactaaaatacggggcctaaaaaactcattacgtggatacaaagccctccaatgttttttctaaaccacactattgcaacattctcgccaattccccttggcaaagggtttaaccccgctatctttccatgtttcactcctaattctgctcccctcgatccactccctatttgtgcaaccacgctccttagccaacaactacctcagcctattc

SEQ ID NO: 17926 - DNA, 402 bp, Glycine max
  unsure (1)..(402): unsure at all n locations
agcttacagcagatttagtaatgacccactattttantattaaataacttaatgccattaaccctaggaattaaaaaaaacttaatggctgagtgtaactgaaattgtggcaaccaaaagtcacccccaacagccaacaagtcagcccccatttggtctcccaaaaggctgatgcctangttgccaattgggcccttattacaacttgaactaaacctaactaaagcccttttagttgattaacccaaaacatatttttggtcagccaactttacaagggatgcgccattatttagacaaactaaacactctaaanatgagacaaagtggtgtcatttagtcctccttcatttgggccatgatacaacttacaaccttggacttttctctttgaaacttggc

SEQ ID NO: 17927 - DNA, 361 bp, Glycine max
  unsure (1)..(361): unsure at all n locations
tgccttgccccttgatatatttgagggactcatgtgtcatttatgaatgacaanatttccttgggataaaggtagtgttgccatgttttcaaagcacgtactaaggcatacaactccttatcataagttgaatagttaagggtaggaccacttaacttttcactaaaataagcaattggatggccttcttgcatcaacacagccccaatcccaacatttgaagcatcacactcaatttcaaaagatttttgaaagtttggcaatgcaagtatgggggcattagttagcttttgcttaagaacattgaaagcttcttcttgtttctctccccatttgaaaaccaacatttttcttgagcact

SEQ ID NO: 17928 - DNA, 338 bp, Glycine max
agcttaacagacttcaatgacgagagaaaaccatatctttttacacacattagaaactagagtatacgattcaaaagatttatagtaaatattataatcaatgacaaattttattacatacatatttaattttattatgttttaaaatattttttaattaataattataaatatatttaaatttaattgaaatgcattaatagtataaaaaataaatttatcatttaatttaaattattgtataattaaaaataatactttttatataattaaaattaatatttttttctaataatttttaatttaattaaaatgtataaatatataaatattttttt

SEQ ID NO: 17929 - DNA, 378 bp, Glycine max
tgtacttgttcacccaacctgagtttgagggggtaattatttttttatatctagcatactgtcgcagagctttgggtagctcatgttatgcataatgccaaccgtatagctgttttaggtaaccacaattaattatataagattctaacttctaaagttctggaatttgttgtaacagacttcagacacttgaaaacccgacatctgtctctgtagatatatgtggaacttatgcagataattaagtaactttctgcgaaatatacatttaagatatgattgatatgctttaattgtatagctaaaattagggatttccgtatttattcttcattattaggattccctttattatgtatccatttttattataaataa

SEQ ID NO: 17930 - DNA, 786 bp, Glycine max
  unsure (1)..(786): unsure at all n locations
ccttgatttctaacggaccncgagnganngagcagcagcnggngaaaaggaagctcgggcggcttttttttttttttttccncgcaggaacccagggaaaaaaaaagaaaggggactcatctccctttgtcggcctcggcaaaaaggggaaaataaggggtcccaacttgtcttttcagaaacgaccatatctctaaagcttgtgggaaccgcctacaatatgactattaatgcccttgcccaccctggggaactacccagcgcacccctcgtgatcatagttgtgttgtatttgtaccacaccggcgaaagcctcgtgacaccgaatgggacttgccctattctatgcttatagggaggacgatcttccgcactttgggccaggagtggcactcctcacgtccctctgctgggtacattccacttccccaaacctaggactccttccctagcacgttgcttctatatttttttcacctccccatggatttagcccagcctattataaatgtacaactctctacaaaacgtgggctctcaaccgttccacaaacttatacatcctctagttttattgctgcgaaactattccattgggccacaccctttcttctttccagtgggtttaaaaccccacctattccgcgcctccaaaaatccctttcatgttcgcaacttcgtccctccggtagattatcgcatcctcataacctacttttactcacaccactctctcacaatcatctctcatttctntggcatgcccctggccatcctacccatccg

SEQ ID NO: 17931 - DNA, 777 bp, Glycine max
  unsure (1)..(777): unsure at all n locations
cggggatgatacatcagatcggccngccactaaaactacaccccccgggaagatcgaaggggacccagggccgagagaatttattatttgggcaacgggggagaccaagagcccggttggacgagggccacaagccctggcggggacaaaaccccgaataggcagagcgtaacgtctacagccccaaaaaccaaagcggcccaagggcgcaaaagcgaagcgccccaacgcccaccggaaatcaatatgaaggaacaatgcagaggggcgcgtgacacaacggacgaatcggccccgccttggccccgggcatgacaacagggcgaagggaaaacgaagccgcaaaaacacggatggcggaaccaaggcccagaaatcccgcccgaaaaaccggagggggggaccaagcaccagggacgaaaaaaaaccgaaccggcagacacccgaattgtcgacccaagcccacaacatccagcccgaaacactaggaacgaaaacgaccccgaccacgacacgactaaggaccaagggcgccgagaccgcagggaccaacccgaagagacgaaaaaaaaaaaaacaccgacattacccaacccacacaaggccggcacgggaagtccaaactaagagaaccacaccgacagtgaccaatggccaacctgcagaaccccaaaagcgagaactctcgcaaacaaaccgagaaacccgccccgacccaaggggggcgcagcccccaacccccgccgcgactataaccggggcgccccccgggatggc

SEQ ID NO: 17932 - DNA, 623 bp, Glycine max
  unsure (1)..(623): unsure at all n locations
gaccgaaccacgacatcaccggaccaccggaaaagagcgcacaccgcaaacaaacaccaaaacccggtgaccgaactcgaaccccaaacgggagcgnaaaaaaaacaagaaaatttttaaataaaaacccaagggggaagagatagagaacaagcagccaaccagggcaacaaacagagaagaaaaacaaaaagcagaaaaagagggaacgaagcgaaagggaaaacaggacgccaaaaagagggaacaaaaaaacaagaaaacgccggaaacgagcaaccaaaacaaaaacaggcagaaaaaaacggcacgacaagaaaaaacaagaaaaagaagagccccgaaaaaagaaaaagaccgcagaaaacaggaaagaacagcaaacgaacaaaaagcacccaaaggagcaaacaagaaaaaaaggaacggaaaaagaacaaaaaccggaagaaaacaaaccgaaaaaacgaacaagacaaaaaaaacacccccgaagaaaaaaaaaaaaaccggggaaaaaaaagcaaaaaagaggcaagccgaaaaaaaaacagggggcgcgaaaaaaaacccacgaaaaggggaacggaaaaccaaaaaaaaaaccccgggaaaacccaacc

SEQ ID NO: 17933 - DNA, 790 bp, Glycine max
  unsure (1)..(790): unsure at all n locations
aaacacgaccgagcaacaccaaccaccaaaaaaccgacagcacgaaacacaccccccccgcacaaggttgatgatgctgcaacccnnnnnnaaaanccgcgaggagcaaaccgagagaggggggggaaaagttataccagggcacnaccagcacagacacaggcacaaacaaacgaagcacggccccaaacaanggggccaaccgcggccaacacaaacaaaagccggcgacaccccacaacaaagcagcggaaaggggccgggcccacgcccaacaaaagaaagccagcaggcaagcaaggccaaaacacgcgcaacccaaaacgcaaaaaaaaaaaggaagcgcagcgagcaaacgaaagagacgaccgaccgagaaaaagagcaacgacaccaagagggcaaggcgaaatggagaacaaaaacacaggcccccagccaagcgggacgaaacccacagagaaaaagggccgggcagggggcccaaaccaaagcaaggagaaccaaaaccccaacagggacacgagaagcaagcgagaaccgggcgaagaaacaccaaacgaccaagacaagcacaacgaacgcaaaccaagacaacaagacacgcaaaacaaacgcaccgaccgggcgcgcccggaaaaacaaaggcagagacgaacgagaccccaacagccgaggaacaccccaacaacccaaaagaggaggcaaacacacgggacaagaaaaaacagaaccacccaccaaagcgggggaaaccacaaagggaagaagaccaacgccaaggaccaag

SEQ ID NO: 17934 - DNA, 862 bp, Glycine max
  unsure (1)..(862): unsure at all n locations
cctgtcactggancnnctanngaaggcgatnctctacacgtcanctgcccgcatgccagcctgatcaccaagggattaccatgggcaacggcatggttttgttgtttattcaacttccaaagcataaatcaaggggtctttcagatttgatcctttctacccattgggaggcattcaaagaagctgcttaagaatggtggtcacaacgcccatcaatgaactgtgcataagctgaatttgactcactaaacttatgggtagggagtctttcattagtaaactcaaggaaagcgttcaagagcctcactcaatggatcatcatggaccatgaggaataacgagattccactttccctgaccggacttggcctttgcaaagagtttttaacaacctcataacacgtatttcatgtttctaactgttgcgtgtaaacaaccaaactttgccttttggctaaaaacataaaggaataaggtgtgggtgttgtaaaagactaataatctttttgaccggggtgtcatttgcttataatggaagaagccaatgcctgttcaatgttttgcttaacaagagaaaaccaaaatttttttatgaaatatttgatgaaaaggtgccaaaacgttttgggggatgcaatatcaaactctacccaagttggcactctttcttattaccctcttcttgttctggcgcgccccccttataactcctcacatagtggcggctattgcacgtccagcaaacgttacaacactcttcgtgatccttatgcaacgctacactacctgttttgtccgtcttcctactctcaatcttcccctatcaatcgactatcgccatcttaccctcctttcaccgacg

SEQ ID NO: 17935 - DNA, 764 bp, Glycine max
  unsure (1)..(764): unsure at all n locations
nagcttatgatcgatgacgaccccnaaacanaaccgcgcaaggcangcgacagcaaggccancattttttttacccaaacgcaccangcgacgacggagcacatagccgcgaaaccacacgccggcaaaaaactgacagaaacacccaacgggaaagcccccaacggaccgcccgaagggaacggcagccccacaaagttcaacaaaggtgccccccacaaagcgccaaaggaacaagcacacaacgctggaaccccaggacccactgaaggacgcccaacacacaagagagccaacgccccacagaagccccacgaagacggagggggaaccatcaacagggccgacaaaacaggagaggccgcaacagcaaccacgacacaaaagcgccgacccgaaagagccaacaccgcaaacggaagaaaaaagaaaaagcgggccaaacaccacacaaccgcgaaaccacagcgccacgaagaaccccgcgacaacaggccaaaggccgccagaaccaaccagcgacaagccaaagccgcccacggcgcccccaaaacgacaaaacaagccggaaaaaacaaaaaaggggcaaaaggccaccccaancccccaggcacgcaaaccccccaaaagcacaaaaggagttcaggaagccctccccacacgggaccccccaccaaggggggcgggacccgaacgctccacggcaccaggaccacccaaggcgcccccccgaaacccgacccccacccccaagcggaggaccg

SEQ ID NO: 17936 - DNA, 756 bp, Glycine max
  unsure (1)..(756): unsure at all n locations
cgtccattgaaaanctttagaanangctngancctttagancanccgcacgcangcaaactaaaantgatccacttgggaagcgcgaattaatttattttgcgnngcaaanaaaaacagctggcattgaaaaataagaatagggattgctgggaagttgccaaaataaaaatggaaaaaacaaaatctactgcccatattcgcattcttattgaacgggcgtctgaagacttttacatcttaaagattactcataggggaaaggttgtcacacttccccaagatcataactggacttttccagcccgcctatattggctgcccagggtatcatcggccaaaaataggcttaagcttgcacatgtgagtgagacaccaaaatatgccataggctgaaacatgaggattgaaaggttgtgcttgaaaaacatagaatcatcgacacgagatcatgacttagaatgagagcacagcatgtccatgttatgcttatcaaagaaatcagattttttatgaaatgattgatgagacggtgcagaaggttttggtggagcaattaaaagactccaagttgggaccttttctttaacacctacctatccaagccacccccccctacttctttccggatgtggccctacacagcctaacttaacacactccctctcgctgcttccctcaagctaatacccggcttgtgacgcttccgcggccttgtcccgttctctcccctccctagtccttatttttccagtgc

SEQ ID NO: 17937 - DNA, 702 bp, Glycine max
  unsure (1)..(702): unsure at all n locations
cggctagagcnggcgccctttctggaagcaaccctattatattttatccaaccatgccataacaacacatgtgtctaattcatcttgaacaaatgtggatggaaacatatgcatgcaagcactcacgtgcacatatataagatggcgacgtagggaaaagtttccaacaaaaacatcacgatccactataaccgcaatgatatatcgcaaggctacccaaagaccatagatgtagaaaagtttattaaagagcattagccatatataaaaactgtttatgaacttgtggatgcataaactaaaagttcatatattaataaggagaaaaaaaacacttcaaataaatgtgtgacccgagattgcgtacagaaaactgaagaataaaattaagtgttctttaatgccaaaaacggaaggtcctaagcaaatggtgagactcgtgatgaaacgcacgcttgtttctataacgacatggatgaagtccaaaataccccatggcttacaaaaaagaacaaaccaccctgcccaatgaaagagcgcctaaagaccacccaaacccgagtagggaaaaccgtagatccccaaaagattgtatgaaggttcccaccctcgagacctctcataggggtgggagccgaagaacctacgactttgtttcactcaagggccctttgaaagaggtaaaccacccaaatggggggc

SEQ ID NO: 17938 - DNA, 514 bp, Glycine max
  unsure (1)..(514): unsure at all n locations
gattttttaccattcaaggtgtaatttttgtcggctttttcacatggggtgcttttcaaattattttttaaaaggaaataaatcataatagatgttacgatttattttattttttaacaaaagtcgtaaaattatttacaattttaatgtaatttttttaagtatttaaaataaaacaaatattaaaaaaattaaatatcgttatgttagttttttatttcatttacaaaataaataaaattcaatagcattattaaaaaattatacaaattttaaatatattaaataaaacaatattaaaaaatatataaaatgctttcaataaaacaatattaaaaaatatataacatactaaataaaatcatattaaaatataaaccatatattaataaaaataataatangtaaactaaaaatatttatttaataataaataaataaaattaattaaatttttttaaaaatgaaacacaaaatacatgtaaataaaaaaatctaaacagtaaaaaaaatc

SEQ ID NO: 17939 - DNA, 459 bp, Glycine max
  unsure (1)..(459): unsure at all n locations
cctatgaatctcagcttacagtnnttttgggggattctcataaatagccctcttcattcttattcgnggacgccaccaacacaattacggactcaaatacacatcctagggctacaaagattgtgctcaattgctctacaacgaagtaaaaacctccgaaacccccgaagtagcgatcaagatttttccatggcataaaatcacgaacataaccaaatcaggaatcaaatttcaagtctcttcaaaccgaaaaagcgaataaataaaggaagcgattttagcaagcgaaaaaattaactacaggagaaagattactacgacacgaagtggagagggggaaatggagaaaaaaaacaggtacccgaagccatgttgtatgaaatcgattgagtttgaggtccgagttagggttttgatcggaggcgatgagtcccaaacttcgagttggtatctgaattg

SEQ ID NO: 17940 - DNA, 458 bp, Glycine max
  unsure (1)..(458): unsure at all n locations
tctatagtcacctgccgcatgcaagcttgcaaccactacaagagaaagaacatgtgataagattttnntattgaaaatgttagtcagttcgtcagattgattgtgaaggaatgcattgaccgtatctcggcgagagtgtgatccttaaattttgagagaaacgactatcatttagtactgatttttgcatgaatctctgaagtatggactgaatgcatgaaattgaggatgatgaacgccatgtttgattgtgatagccacttagccaaaaagctgaccatgtgcttgaatgatgtatcccttgcacccagtttgagcttgtcataccttaatttcgtccggggaccattcgtttgttgagatgcgaccctcgtttgaccacttcgaggtacttggcacccatcgttaggcaatccgtgaagtttcgtaacatgccggaagtcaaaaggaagcattgt

SEQ ID NO: 17941 - DNA, 438 bp, Glycine max
  unsure (1)..(438): unsure at all n locations
aatactcagctcgcatacaagattctacttgcctggcacttcaaaaccttcagtgtgtgtcatatagangnctacctgtaaatccccatgcaagaatgcagttgtaacatctaactgctccaagggaagattctctgcagctactatgctcagaataactctgatggtactcatctttacaactggagagaagatctctgtgaaatcaattccttgtttctgctgaaaccctttcaccacaagtgtcgccttgcatcttcttcttccgtcacattcttcctttagcctatagacccacctattctgtaatgccttctttccttctggccattaagtgcaagaccacgtcttattcttctgaaggaagtcatcttattcttcattgctagcttccacctcaatagtgtcattcccctgtgtagcctccatgaaacattc

SEQ ID NO: 17942 - DNA, 857 bp, Glycine max
  unsure (1)..(857): unsure at all n locations
ntgttaattactagncagtgctanctcngtttgtcaagggaatgcagantgtatgattatggagtaccatcaaaggggatttatttgatttttggcganggngcaaagcaattctccacattcacacatcgcatatgagcccaccatccactgtggcccacacacaactgagctcaagtactgccacgtagcccttatactcgtgtatagtaacaacgggtccacatcaatcctcccaagattacacaacgtccaagtgattcaacgttctatcatcacaaaatgacacagacaataaaacacggcaaaggcagaaaactctggccataacacaaaccaatatcacagctnttcacattccaataccccaccaacattctcttcgtaccagttcgttaaccgttggatcgactcgaaaactttactggacgtatctagcacataaagttacattatcgaccgtgggatctgctacaaaaagctctgaaccccatatgtactaccatcntcgccaccaggcatacacaatcatatatttgacatatacaaacttctgctgacatgtcaacaggaaatctgctgccatgtatcagaaaaataacttcattgcttatgtgaggacacttggagtaaacgaatttcctaatgaatctacagtacaagtatgttaatatgttaaccaagacagcttcgacatacactaaaattaggttccaaacccttaattatgatataacgttgaaaggaaagagaagggtaaattgatcaacttctttacaaggtatacataatttacttcgaaacgggtgaatccaagatagccaatcaaatgagttctagcaccatttagcaatacg

SEQ ID NO: 17943 - DNA, 354 bp, Glycine max
  unsure (1)..(354): unsure at all n locations
tgcgtagcccaccattttccataggagaatattgtttttttgtctactatcattgncatcgngttttcgtcattgaggtgccacttgagctgccaggttctccacctttgggcgtattctttgaaagatccgtgccccctttttagcacatgttttgtagttgcatcctatccgaagccattataccgaccctgcctaacgaaggcaaccattaagtcctcccaggaatggactcgggaaggttccaagttagtgtaccacgtaacaactaccccagtaagactttcttggaaggaatgcattaacagatcttcatcttttgcgtatgcccccatcttccgaccatacattttt

SEQ ID NO: 17944 - DNA, 402 bp, Glycine max
  unsure (1)..(402): unsure at all n locations
tgattgcaagttgctttgtctatatgcatcttaatttctcnttatcccatcctaccattacaccaagtgagactagatccccttgaacagaggtgggtgagatcattctaaacagaccaattggaaaaatcttcacaagattgcttgaggggaaggtagccaccaattttttcatgtgcccctaaaaccgcattgaaatcaccaatgtaaacccaaggtccaaggaagttgatcagcatagaagagagctcatgccataaatttgttcttttaatgttggaggtggaaccataaatagtagctacataacatgaaatgttgttaatagaaactacaaaagaaatgctttgatcagagatagcttacatagaaaaaggaagaaaaaagaaaaagtgtgcaaaa

SEQ ID NO: 17945 - DNA, 934 bp, Glycine max
  unsure (1)..(934): unsure at all n locations
atgccttttttttntcttgtatggnancnnnnncnnnngaaanacncccgcggcagggaagcaccccaacgcgcaccggaggagcggaggcgggtttatttttttatgtcttttggaaccccccaaaacaaggggggcggggataagggagaaaaaacacggacccccacaaacggggcaaggaannnnacgacccccccacgaacccaaggagacgcaacacaaggccagaagaccgaaacccccgcgggccagngccacgacaagagcgagaanaaccacgaaagccgaggccggaggaagggaaaaacccccaaccgcaaaccggcgcgggaagggaagcggaaagtgtganaacacaaaagagaggagaaaacggcaaccgggcccgaaaaacggagggggaatattctatatttgagatcattataggtgctgtattattaaaatttgcgctcttatgcggcggatcttttactgcgcgggggttgtccccaatcagaaccacattagttgtaatgttacgtgtttttatcatacttgagaatcataaattctggtgtaaataaaaagactttggttgtcttttattttaccaaaaggttctatattttcttcgtgtggctttaacgtattgtttttatccntccgttgtgtcttaaaggatgttaacaccacccgctcccctctcgtattgtggcgcctcatgtcccctcttaatattcttgtgtttttttgtcgaacttaggatcgttttttctttttactgtcgcgtggaatagacttatccacttgtgcttaataagtattctttgtggatctttcacagtgcgctcttgaggctctcgtctcgatattttagttttcgttattgtgcgcgcctggattgtggcgtcttcttttatcaccttttgatgtgtggagggcttggccg

SEQ ID NO: 17946 - DNA, 556 bp, Glycine max
aagctggctatgagccttgaagatctatcctttgcactcaaattgaacttgccaaaccataaatacgtccgcggaccattacatagttgggaggcgcccctctgtgttacaacggtcacgttctattgcctcaattatatggcatccgtcgaagctttttaacacaggtgttgacaaatcaatacactgtctaaacatgtaaaccttttaaactgaggtagttcaacgaaagctacctttcttttcgaactaattaaaaacttaatgaaatgtgtaatattgtgaaaataaattctgtgaaaagttattccaagactaaaaccatccttcattcagaatccttacttaaaaaaaccttctcatcaggggtgcttgacaaaaaataaattctagtctgaataaaaatttcggcaatgtttatctacttttgttcctatcacaaaaaaaaaccttctcttgtcaatttttataagaaaacaaccctctgtaccatattctttaaatattgcaacctctctaaacagaatactgcccatagggacatcccattcctttg

SEQ ID NO: 17947 - DNA, 646 bp, Glycine max
  unsure (1)..(646): unsure at all n locations
cccatcgtaacttttgtagcnacgngacacnananaanacncaagcgnggaccganncnaacancttgaaaaaggcacngcatttttttaagacaaacaccccgaaaggaggggccagcaggcaaaaaacaaaaagagggacaagaaaaaaagccaggcacaccccgggaacacgggacccggagaaacacaagagcaaaacccgagagggaaaccgccgaccaaagccgccgaacgggaggccagaacccggagcaaccccgaggcaaaagaaaagaaagaggcgggcacacccaagggaacacaagaccngaccaaaaagaggcgacagagaaacacagcgaaggcgaacgggagccacccaaagccaccccaagcgaacacccgaaaagaacgaggcacaaacagaaaaggggacgggaaaggaaaacagggcggaggcacgaancccaagaaccgaagcgcgggaaaacaacccaaccccagcccaagcacaaacggcaccacggaaaacaggggaaccgcaaaacgcaacagaacaagaaaaagcgacccccaaagcaacccgcaacagcaaaaacccaaacacaaaaggaacccaacaaaaagacgcaccaaggccaaacgcaaaaaaacaacggaaccc

SEQ ID NO: 17948 - DNA, 734 bp, Glycine max
  unsure (1)..(734): unsure at all n locations
nttcttanacttgcangtgatccctnntttgannggagttgcaaatttttggttttttatggnaaaaaanaannattttttatttttttanaacnaaaaaaggggggggacgagtaaaattaaaataacctccatacgcggggaataagtatatatatgcgacaataaccgagaagcctatgaacttttgggggcggaggggagcctgcatcgcctggcttggctaacaatcgggaagttcatgactatgatcaagaaagagcaaccagacatcccgtgggggcgtaaggtgtaagagacacaccctccttcaccttttacgcgataccgggatatctccgcaacctatgtgagggcgaggaaacctaaattactggacttgagaagaaatgaaggtggcgcgggacataacaaaagaaaaaccttggagctgacagcaaaactcttttcaacctgtatggctaaaaagtcctgtgttcttcgactgagtcctaggcacccataagatccgaaaagtgcgacaaaagtcttgaactttggtctttgagagggaaggggaaaagatatttcctgaccggaaaactctaatgtgaagaacacaaaacttggtgcgaactgcatacaaagataaggaagggaaattaggtgaggaggtaaaactgagttaaacgtatgggcagacgcgacacatggaagtactatttaaactacaggggcggaaggaagaggtaacg

SEQ ID NO: 17949 - DNA, 678 bp, Glycine max
  unsure (1)..(678): unsure at all n locations
cggcaactgatgtcttgtagngacgnnncntttnggnanaaacggaggggcganncngatanaaacagaaggaaaattttttttttggctgacaagaaacccaaggggggttcgtgaagaagaacgcacacccaaccagcaggaggaggggaagtaggagcaacagacaaagaaaacgggcccggaaccaaaaagagaaaagagacggggaagaacccgggacggaacgacccccccggcgaaagaggggaccgaaaaggggaccgagaaggcccaccgaaaggccagggagggggccaggaaaacaaccccagaaaaggggagggggaagggacaccagacgagaggggggagagaccagaatagaaaaacaaacagaagggagggggaagaaaccccacaaaggaagaagcaacacaggacgaaaaagaggggagaacaggaagaagaaaacacatcgaggaggaacacaaaaacgaaccgccaaggccaggaccacgccgaagagcagaagcgaagggccaagaagaaggagcaaaaggaggaacaaagaagaggaaaacgggaaaccaagacaccaaaaggggagcagggaaaacacaaaagaaaactgagaggaagagaaaaaaggcgaaggaagaagaggagacgggcacaacaggaggaacagggcagaag

SEQ ID NO: 17950 - DNA, 733 bp, Glycine max
  unsure (1)..(733): unsure at all n locations
cggaagagaggaaaaaaagaatggggagaacgagagaaccaaacaaaaacaaaaggatagatgagacaccaaanaannagggagagagaaaaaaaagaagaagagttttagaaaaggagaaagggggggagaaaaaggaaaaaaaaaaaggaaggagaaaatgaaaagaaaaagaagagggaaagaagagaaaagaggaagggggaaggagagaaaaaaagaaaaggagaggaggaagaaaaaaagagaaagaaaaaaagaaggaaaagaaagaaaggaagaggggagaggagaaagagagagagaggagaaaaaaaggaaagaaaaaaggaaggagaaggtaaagaagagagagagagaggaaaaaagaagaagggagaggagaaaaggaaagaagagggaggaaagaaaagaaagaaagaaagaaagaagggaagaaagaaaggagaggaagaaaaaagggagagaaagaagaaaaaagggggaaagagaggaggaaagaaagaaaggagggaagaaagggaaaagaaggagaaaaaggaaaagaaaggaagagaaaggaaaaagagaagagagaggagaaaggaaggaaggggaggaggaggaaagaaaaagaagggaaagagagggaggggaagggaaaggggagggaaaggagaagagaaaggaaggaagaagaagagaacggaaaggaaaagaaggaaaggggaaaaggaagagagggggaaggagg

SEQ ID NO: 17951 - DNA, 408 bp, Glycine max
caacacaaccctttggcctaataggaactccaatgtttttgcagcttctgatgttatgaatggtttggccacaccttccacatgtaaagtcaggcaatttgctctttagcctatgtcctatgacattgtctttatctatagatctccttctatttttcttaggccttcctctttggacctttttatgtggtggaacaatgtgcatactgtgtctgggcctaatattgtggtccttcgactggttcaataaaatggtggcatgtcttattataagcctctattgacggccactcatgacacatgtcctcatgcttgcctccttgtgagttattgctgcatggcatgttggcatgacatccctacatcaaagggaaatcagcagacattgtagtttggaatgaaaaaaaa

SEQ ID NO: 17952 - DNA, 923 bp, Glycine max
  unsure (1)..(923): unsure at all n locations
cgttgacncttttgaganactgggaaanngccaaccngaacgccggcacggcggcangcaagaattaagcacccgggccgaaaaaaggtgnattttctntttttgngcacgggcacgcacccgcggaatttatttgacattaacatcatttttcctcgcttggctccaaacttggataagtactcgccttgggccttggaaacatttccttggcaagaattttgttcttttggaatcacacaaggatgtgggaacttttgattgatgtttcccttaccaggggaccaattgtttcttgataaacgtgaaattcacccgattttcatctgcctgtttaggaagttattttgacttttaatttaaccttaggtcctgtcttggaccacattacttttaattcatgttctactttgccttcggccacctttttgttaagcttttttagaaagattttatttctccgaccccaaatatctctgtgggcttcctccttccaggccccttattttgcgaactgtcctgaggtgacctttctattgacacgctctgttgattatcattccatctctctccacctccttgtctttctttctctctaattactcttgctcctctgatgattttatctccgtctacttgcgtgtactcctcttcattctgtaaccactccatactatgtgtctcatctctgcactagcgtctctatgcctttccctatttctacctctctatccccttgttcttcatcttctcgtctcacttgttctcctcattctactgctcgttctcgtcgtcttgcgttctatctacctcctgctccttgtctccacgtccctcgctgttcttgtgcattttgtcatcccctatctatcgtcttagtccgtctcgattcttctcatccaccggctttatcgtcaaccccg

SEQ ID NO: 17953 - DNA, 482 bp, Glycine max
  unsure (1)..(482): unsure at all n locations
tgtccgcaaaaaatcactaataaggatgnnaagggttganatcttagggnttctcaccaagtaaaatggttcattttgaggtccaacgccttaaaaggaccaccttccaagtaaaaataatcgtttgattcacccttaaaaaagaactacgtaggtctgttaccaccgtgtccccatcgatcctctgaagccttcacaaccatcaagctaaacaacgtttaaaccgcacaagcttttacagccacactaatcagatcaaaagcggaaaactctgttaacacatgaaccaaaattacaacttttctcacgtaaagaccacagtgaccacttcttcgatcccattcgttaaccgttggatcgactcccaaattttactggaaggcttagggtataaacccgcattttgaccgtggggtatactaccaaatatcagaactcattctgactttactttccacagccaccaccccaagcattttttt

SEQ ID NO: 17954 - DNA, 337 bp, Glycine max
  unsure (1)..(337): unsure at all n locations
gtcacctgccgcatgcagcttgacgttaatctcaaaatggcaaagacatgaccttgngtttgtttaccaaggatgtcatacaaagatgaaacaaattaaaacctctttttcaagcaaaaactttgtttcctcaagaccacttgaactattacatattgatctgtttggctacaatgaatgactacattagatggacatgggtaatgttccttgctcataagaatgagttctttgaggtattctttataatttataaaagagcttaaaatgaaaaaaaagtctgcgttacttcaattagaagtgatcatggtggagagttttgaaatgagaacttttt

SEQ ID NO: 17955 - DNA, 265 bp, Glycine max
tcaagctggtctactgatttttacccagtatccggttattggttttatctacccaactattcctatttccaaattattaacataaccatccctattactattcttagtgtgaatttgagcccccagtctcgaattcacacctttttttttttttttaactttttgtatacctccattcaaaatttaagaaccctaaacccgaattttaaatgagtgtttttttttgctttctgctgatcccattttactattcacattttttact

SEQ ID NO: 17956 - DNA, 258 bp, Glycine max
tgagaatcttttaacaaataaactaagtctttatctaactcttgatcttagtttcttggttgacgccactttcacagagggaagataagtcagggttgacgccacaaggattaccttgataagtcccagattggatcaacgaggaacctatagagaagttctcacaaaattttatcaaatgccaaaagttcttctatttgaaacgaactccatacatatagtgtatctgaacgaaaaaaatagaaataaacctggacc

SEQ ID NO: 17957 - DNA, 387 bp, Glycine max
tctcccctattttgctataaatagggggagaaatgaatggtaaattatgttcagccctcctggtaattcgagaatcacttgaaattagtgagaaaaattgtttccgtgtagaaaatccaagccgaggcgcttccgtaacgtttccgtgtgtgacttcgcgaagattttcaaccgttcttcaacgttcttcgttcgttcttcatcgttcttcggtcttcaaccggtaagttctcgaaatcgaactttgtaattcattctatgtacccttagtggttctcattttttttcacgtgcttttattttcatttcatttacttttcgtacccccttttgacgtgctttagtcattttcttaaatcattctctcgccctataaaaaaaaaaaaa

SEQ ID NO: 17958 - DNA, 210 bp, Glycine max
  unsure (1)..(210): unsure at all n locations
acgggctatgtcggtgatgatcaatattgtntaaaagaagagtgtgatatgatcctttgggcaacaaaagttttaaaactctatttttgagtatttgattttacaccagttcaccccccctcttggtttggttagtcctgttgtcttttttttttttttttttttcagagggtaggcagtggcatgaactcttgatgacatttgttcatg

SEQ ID NO: 17959 - DNA, 430 bp, Glycine max
  unsure (1)..(430): unsure at all n locations
tgtagaattatggggtacccatcacatgtgggactaggttgcggtgttgccaagggggcacaacaggctgtccacatccacaatgcgcgcataaacccaccatgcgctgtngcccacctccaactgagctcacgtactcccacgtagcccatctcctcgtgtctctcaacaccgggtccccatcaatcctctcaagcttccacaacatccaagcaaaacaacgttcaaacagcacaagctatcacagccaagcaaaacagagcaaaggcagaaaactctgctcaacacatcaaccaaaatcacagcttttctcacgtaaagaccacagtaacaattccttcgatccaattcggtaacccgtggatcgactccagaaatttactggaagtctatagtgtataaccctgcattttgaccgttgggatatact

SEQ ID NO: 17960 - DNA, 754 bp, Glycine max
cctccgtggtgttgccgcaacgagcccaagcaagcggccacacaaaacggctcaaacgcgagggacactcaaccagaacaaagggagggctagcgagggacaggcaaccgaccaacaccatacacaacaccagaaaagcgacgcgcgcgggcaaggagcaacccgggggcaaaaggagggacaacacgcaaaagaacgaacgaacagcggaaaggccccaacaccaaaccacgaagagcccgacgggaaggagcgtacccacagaagagacccgagcgcccaaacgcccacccacagagaaggcgaccacgcacgcgcgcgaccaacgcaagccaccaagatggaacgaacgcaagcaatgcacgcaacgagaagagtacaagagacgcgaacacccagcagaccgcgaagggacgaatcacccgaacagccagacagagagggcaaacagacgcgcgaaacacaagccaccgggagggacggaaagcaagaccaggccaaggaagcacggcgcagcaacaaagcgcccaccacgtacgggacgcaaccggccacaccacgacggcaaccaaacacgaacgaacgtcacgcgaccggaacgcaacggagacggagcggaaggcacgacaacgagatcacactggccacacacagcaaacaacggcgcacaaacggtcacccaacacctcagccggacaagagaaggcaacacaaatgcacccagaagggacgccacgagcatcgacacaagcac

SEQ ID NO: 17961 - DNA, 688 bp, Glycine max
cggaggaggcgcgcgaacgcaaggaaaggaagagagaagtttttattacaacacaagaggacacaaacgcggcgagaaggggaaaaaagccgcgcccaccgaagagggggaggcacagcgaagacacccaaactggcagagagagaccaaacacagagaaaaaggcagacacagccaaaaggccaaggcgacaaaccgacccaaaacggcggcagaccaacaccgcgggccacaacaaagggcatagcgaaaccacaccacaaagaccgcctgggcgcgacccacgggacaaacaaccacggaaggccccccacaaaagcgggagcacagcgcaaacaggcgggaacaccaaaacgcacgcaaccgaaaggcgagggaaacgcaaaccggacccccaacagacgcaaggccacggccagcacacgcacaaccagggcgggaacccccacgatccgagacgccccacggcccacaacgcacgctcgacgcacacaccgcacgcgcaaacaaaaggggacccaacgcacaagacgaaaaagccacaaagggccggggcaaaaggccacaaaagcccgaaaccccccgaagcgcacaaaacccaggggcacctcggacagagacacacacacagagagaaaaccaaccaccgcgaaggcgaggaagcgaacagaaccgaacagggcgccac

SEQ ID NO: 17962 - DNA, 262 bp, Glycine max
ccattaacctaaggaattaaaaaaaacttaatggctgagtgtaactgaaattgtggcaaccaaaagtcacccccaacagccaacaagtcagccaccatttggtctcccaaaaggctgatgcctaggttgccaattgggcccttattacaacttgaactaaacctaactaaagcccttttaattgattaacccaaaacatatttttggtcagccaactttacaaggattgggccattatttagacaaactaaacactctaaaa

SEQ ID NO: 17963 - DNA, 382 bp, Glycine max
tctattttagacctcgatcggtcatgtttgctgggccgattcttttgtcatttttttcgatcaatatcggtgaataatatttttttttccgtgaagggctaatgttttgctggccgaataaatgggaacatgccagtttcggcccgaacaaaaggacggttgagatcgcacaaaaaaacctagccgacctacattgtaaatttcttatgccacaccaaaataagaaaacttcctctgccgtaaaaaaacaattatctgccagcgagacttttttaaaaaaattgctcaatgtcagctgaaaaatatcagtcggggctatttcacgaccgatgtcggctattgagttttaaattttatccgggaacgaaatttgcatgatgtt

SEQ ID NO: 17964 - DNA, 373 bp, Glycine max
agctttccccagccccttctcatcaagggacttttattttataatcgtcctagaagtgaatgcatttttaatttttatatctctccctctcctctcttgaatttctatcgctctccctctcactctttgactccccttctaccttcttcagttatccctcgttttgtccttctttggaaccctcccttccacaccattgttgctactccattcaccgttggtgactcttccgtaactgaacaccatcgatttgtcaggagcctcagatttcaaatctaagtgaaacaaaacgatgtcgtcctggaagattcactcaattctgaattcgcaagaggtgtaaatgatagtgatgctggggttgaactcgttgatg

SEQ ID NO: 17965 - DNA, 478 bp, Glycine max
  unsure (1)..(478): unsure at all n locations
tgcctaattaacctaaaattgtgagaaaaggagtaggataattttctaaanggaagcactaagggtttattacctatacttaacaaaaaatacttataacactacaaaataaccataatttggaagagtttgatacaatttacacaagttttatacacaaaagttagtcattttcaccgactaacagctagcagagaataatttatgagcaacctcataggtatagatcttcgaacaccggtgtctacttatgtgtacatgcaaagtatgcccatacctttgtttgcttcctttcaccaacgtataacggtagtttttccactaatgacctcctccaagaagagcaacctattgttgctgatgaacaacttcaatcacaagagccggatgagtacattcaaagccaacaagatacagacaacctcttagatgtaaaactagtggatacaaataacatttatttcccttgtaattatgt

SEQ ID NO: 17966 - DNA, 169 bp, Glycine max
  unsure (1)..(169): unsure at all n locations
agcttgaccaatcccgacccaacccgggcatagtcggttattgttttctctgngaagaacctaagcaggcgagctcctggcagtcaacagataaaaggaaaacaagaccacgaatcaaggaggcttgtggtggctggccaactgtgaattttgcgtcatatggggattg

SEQ ID NO: 17967 - DNA, 323 bp, Glycine max
  unsure (1)..(323): unsure at all n locations
ttgagccaaaatcctgactcaccataaaccttgaccctggtgttataatgncaatccttaccctcggaagctaaatataaggggagagggaaaatttccaatcaaagaggaagcaaaaaaggagagaatgaaaatttccaatcaaaggagaataagagaggaaagggaattcccaatcaaagagtgggagaaagcaaaaagaaaagaaagaaaattcccctcaaagaatgggagaaagaaaaatgagaagaagaaagggaagaaagttcccgatcaaaaaaaaataatatgcacaaaggtctttgtaccggacaatatttgaa

SEQ ID NO: 17968 - DNA, 757 bp, Glycine max
  unsure (1)..(757): unsure at all n locations
ctgtgaaacttgacnacancctttaagcaccgccgcagcagctaaaaaaaatttgaacaaggggcgccttgttgttttaggaacaagacaaaaacccacgcggccattatttttatatgattatccacccccgcttaactatcggagcacataaacctatcagccttttaaagcagctgcctaaactaatttgatcatgagataaataagaaagtctgcgtcaactctttgacgtattgaacccatagatagtcctattgattcacgccggtatgcacatgtaatttatgtactatcggagagaatatacacggaagggaaacagattcgaaccagaagaatgtggaagttttcctctctaggaccacaaaacaggggaggggcttttaggaaaccgcgtccttgaaggggaaaaaaaatacagggggaatccctccacatcccgattgaaacccagccccgtcgggggtaaactatcaaaactcttctgccgccgcaacgaacattcgccggcctccaacgaagttgcacacgtaccgaggcgacaccgccttgacgcaatccacggccggacctcccacggctcagctaggacccgcggtaggcccgcatcactcgacgaaggcacccgcgcggacgggcccgacatatcgtaacgacaccgaggtctgacagcacctcagggcaccgctctgaagccaccggatccaccgactgcccacggcaaccaacgatactcatcccaatcctaccgtcg

SEQ ID NO: 17969 - DNA, 331 bp, Glycine max
  unsure (1)..(331): unsure at all n locations
gggggacacagatctgaatggggagacccagttgtcgttttatacagccggcggaccgccgggnatttggaaagacaaggcccttaaagcggaaaggagggtcaatggcagacgccttattttgctggagggtgtttggcatcaagacatgcaggaaatgtttatcgtcaatgtatatgctccgtgtgacatacatggcaagcgagctctgtgggactctatcaagcagctgaaaaaccctcaaaatgaaggcttgtggtgtgttttgggagacttcaacagtatcaggcatccatctgagagggtaagcttgccccaaggaaggggacct

SEQ ID NO: 17970 - DNA, 762 bp, Glycine max
  unsure (1)..(762): unsure at all n locations
acaaggaaaaacacaccacaacaacagaaaagcgtgcgcgaacaccgcaccacccccaaaaaaaaaagggtgacccctgaccccgaaaaccaaaaaggcggaggagataaaacagtgagaaaagccagggtttttttttttaaagcgacaccgggggggcaggagacaaacaaagcagcccaacaaagaccgaaggggggggcacacagcacaaagaagggaacgcacccccaaagcaaccaagccagggcagccgggcaggacaaacccccaaaacgagaaggaccaaggcaacaaagaaggcggcagggggaacagggaaacccgaaaaacaaggaaaagccaacaaaaccacgaaccaccacagagtggaaaggagggcaaaaacaaggggagaagaaacgcaggagaccaacgacacgcaaagagaaggggggacgaagacaaaacaggcgagacaaacaagacaccggggacaaccaagcgacaagcagagaacccagagaaaccagagaacccggaaagacaaacaaaggcgggacgaagaacacaacgcaacgagcgaggaaacagaagagaaacacggaaaacaggcacagggcaggaccaccgggacaacaagcagaggaggaacaaccgaagaagacagcggagaaacacgagccgacaagacaggcaacctgggggngcagagaagacgcaaaaacagcgcagggcaccgaggggcaaaacaagaagcggggaaccaaacagcacacgccc

SEQ ID NO: 17971 - DNA, 151 bp, Glycine max
gtaactgaaatgcggcaaacaaagggaccccctacagcaacaagtagccaccatttggtctccaaaagctgaagcctagttgcaattggcccttattacaactggactaaactaacaaagccctttaattgataacccaaaacatattttg

SEQ ID NO: 17972 - DNA, 100 bp, Glycine max
gaaacttccttggaggaaaagaaagagagttattatattaatacaggggagcacgaaagtgaatgaggataagaggaagacaagttggcctttgaagtgc

SEQ ID NO: 17973 - DNA, 422 bp, Glycine max
  unsure (1)..(422): unsure at all n locations
agcttaaagtatgcccgagtcattcatctttatgagatgttgtcgaagnattggcgatcagaattgccattccttggattatagggttgaaccaagctcatgcttttacaaaaaggttcatcaagtcaagttgaaatatggaagtaaccgtcttgcaaaattggggcaaaagatgaattgagtcacatcactgcttcgtctactgccaaacatatttaggattattgatgtccttgttacttccagtttcaccttgacaaagatgtcatggaccatgttgaaaatctaaattgattcaaccccatatcttgcgtaaaaatcgcaatacttcaactgtgcatcattcgcatgcatccatgcttttcattggttgcatttgctcgtgcattcttttcttganaaataaaataaaatgaacttaa

SEQ ID NO: 17974 - DNA, 480 bp, Glycine max
tccttgagaaaattcctaaagaagctagagcttttcttttcacacctctctaatagctaagctcacctccttgagatgagaagctagagcttagctacacaccccctataatagctaagctcacccccatgacaaaatacatgaaaatacaaaaaagtccctactacaaagactactcaaaatgcctcgaaatacaaggctaaaaccctatactactagaatggccgaaatacaaggcctaaacaaaggtaaaatctattctaatatttacaaagataagcaggctcatacttagcccatgggctcgaaatctaccttaaggctcatgagaaccctagggccttcccttggatctctggccaatctacttggagtcttctatccaatgcccttgcgggatatgattggatcattcctcccttcttctcattctctctatttgggtcacgcttttttttgtcccagcaggatgatcgaatt

SEQ ID NO: 17975 - DNA, 194 bp, Glycine max
aagaggaggagaccttctatattataacgcaacgtggcggacaaaaatgggcagttaacttgaatggccattattgtcaatgcggaaagtgttctgcgcttcactattcatgtgcacacattattgcagcttgtggttatgtgagcataaactactaccaatatatagatgttgtttacacccatgagcacatc

SEQ ID NO: 17976 - DNA, 357 bp, Glycine max
atgaaaattggccctttgttattagggtttaggacttaatggataaaaatacttgtatttttttttttgtgcatttcatatgtaaggttgaatttgctcattgggctttaaaaagactattacataatagtcttggagacctatgtaatatttgggaagccatgaacaacatggtcacactacaacacactgaaattaaggcatcttttgagacaagtacacatgtggttggacattgttttaaagttaccctatacaagagactacttggcatgaaattcaaggatgctttaaattatattggtgccgagtttgaacgtgtacattatgctaacaaaaacctttctcattggggat

SEQ ID NO: 17977 - DNA, 854 bp, Glycine max
  unsure (1)..(854): unsure at all n locations
cgcctttgatctcttgatnntctgacaaacgcnaaaannagaaagggaaggcgaaagggagcanaaaaggagaaggaaacccacttttttantgttataaaaaaaaaaacgaaggagggggagcgggggcgagagaaaaaacgcccacacggcccacgacggnacacaggaacacagaagaaaaacaaacgagaacgggggggggaggggaagcgaccaccacaacgcaagaccagggccgaaagacaacaaaggggagacacaaacagagcgaacacaacggccgcagaaaaagagggagaggaggaagccgccagcggagcacgcacngacaccactgaacaagggagggggaggcggcgcaagggaaagccaacaggcgaaaaccaccgcaacgcgaagaaaacaaggagggcacccaaaacacaccaggaacaggggcggcgggccaaagaagccagaaaagcagggagaacaacgggaggaaaacaaagacgcggggggccgcacgccgggacgaggggggacccgcacagaagcaccaaggagcacgccacaaaaggaaagcggggggaaacgagaaacaaacacggaagagccgaacgcaacagcagaaaaaacggcccagaggacgaaggggaaccccaaacaaagaaggagacacggagagagcgccaccagagcgacggagaacacaacgcggaaaccgccaagaaaagaacaggcagaaggacacggagcaagcaagcgagaccacagagaagcaacaaagaggcagcgcgcagagtgaggaaacgaagcagaccacgagacacgcaaaggacaggagatgcgccccacgaagaccacagccg

SEQ ID NO: 17978 - DNA, 832 bp, Glycine max
  unsure (1)..(832): unsure at all n locations
aagaaaaaaaaaaagacaaaagaaacgaagaggaaggaaaaagaggatacaccnncaaggagaaaacagagggatgagctagatgcacgcnnnnnnnannnaanggggggggngaaaggaaaagaggagggagaatgtttattaaggaaaaaaaagaagaggggaaaaaaggaagagggaaagagaaagaaaaaggaanaggggaaaaagaaagggatatgagaaaggaagaaagaaaagaaagaggagagaaaggaagagaaaagaaagggaaaaaaagggggaaaagagagaggaaaaaaaggggaaagaaaaaaagggggaaaaaaagaggaaaaaagggaaggagagaaaaggaaaaaaagagaaaagagaaggaggggaaaaaaagagaaaagggggaaagaaaaagaagaaagagaaagagaaaaaggagggaaaaacatgggaagaatggagaaaaaaagagaaaaaaaaagaaaaaagagggaagaagaaggaaaagtaaaaagaaaggaaaagagaaaaagaaaatggggagaaaagagaaaagaaggaaaaaaggaaaggggagaagggggaagaaataaggaaaaagaaaaaaagaggaaaaaggagaaaaaagaagagaaagaaaagaggaaaaaaaagaagaagatgagagggaaaaaagagagaagaagaggaaaaagaaaagagtgaagaagagagaaaaaaagaagaagggagaaaagagagaggaggaagggaagaaaggagagagaaaaagagggagaaaaaagaaagaggaagaaaaaaaggaggagggaagaaaaaggaaaagaagggaaag

SEQ ID NO: 17979 - DNA, 732 bp, Glycine max
  unsure (1)..(732): unsure at all n locations
caaacaagaggaagacaacacacacacccaccggaaggggagaggaagaagtaataccaaccaaccagcaccccnagtgttgagctgggaacgcccccaaangacagcccccgcagcaggagaaaggctaacaaaaagccctttgntaaaaaaggaaacgacagaggggggaaaacaaaaaacgggcaaagaaggggagagaggaaaaccacgccggaaggcagaaaaaagcaagggcccacaaccacaaggaggacaagccaaaaaaaagncgcaaccaacgccagagcacaaggcaccccaaaaccacaaggcgcaacgaaaacaagagaaacccgcagggggcgaaaacaacaagaaagaaggcagaaaagcgaaagacaccaaacaggaaaagcaggggcacaagcacgaaaaacaaggagcaaagaccaacagccaagaggaanaaaagaaacaaagaccaccgggaggaaaaaacccacgaaacgagaaggaaaaaggaggccaaaacgggcacagaacacaaaaacgaaccaagaaacaaaggagggagagagagggagcaaacgagcagggaaaaaaaaaacagagcaagacggcacgcagacgaaagcacaaaagagagaaacgaagggagacagaaaaggaaagaagcgaacagagacaagaaaagacagggagacgaaagcggcgcagaagcagggcaccgaagagaaagcaaaacgaagc

SEQ ID NO: 17980 - DNA, 402 bp, Glycine max
  unsure (1)..(402): unsure at all n locations
ctattaaactaagcttatcatctttgataaggatgcccccatgcgtattgtttttntacacattagctcaaatggggtgtccaataggtgcctgaatgataaggtggtagtcaccgcacgcttgaggcaatcaaaagcctctttgcaccggtcatcaaaatcaaactccacctcctgttgcacagattggacagtggaaaggccactttgctaaaatctttgataaagcacctataaaaccctgcatgaccaagaaaagaacgaacttcttgcatgccaaaggggtaaagcaattgtgaaataacatctatttttgcagggtctacctctatgtccctactggaaatgatatgcactaaaactattcctttgtctaccatgaagtgacatttttcaaaattc

SEQ ID NO: 17981 - DNA, 274 bp, Glycine max
cagatataatccacggtggagtaatcatccaaatgtaagaaggacaagtcctccacaacaacaacagcctgtgccttcctttcaaaatgctggtggtccaagcaagccattgttcctccttcaatacagcagcaggaacaacaacaacagtcacaacaaagacaacaagccactgaggcttctcctacaccttccttaaaagagttagtgaggcaaatgaccatccagaatatgcaatttcagcaagagaccagagccttcattcagagtctca

SEQ ID NO: 17982 - DNA, 366 bp, Glycine max
tttcgcgacctatgaatctcagctttaggcttagtcttcatgttgctttcctatctctatttctcttcatacaatttttttggtgccattaggtttttccctagtcatctatgttattattattttttaatgtttatacctccatgactctcgtgagcattggctaagtataactgactttgtacttcattgaatatttctacttttttctcctcccaagattttttccttgatctttgctaacgtgaaacagattttgcatttatctttctcgcttaatgcttactttttctaattggttgtatctagcaatttgtttgcctataaatcctatgtttccgtttctccttcttcaactcttccttt

SEQ ID NO: 17983 - DNA, 941 bp, Glycine max
  unsure (1)..(941): unsure at all n locations
nagccttgacncctttgtacngngcatgactagagtcgaccagccggcacgcaagctnctgtggaaaantntgagcgccacgagacatttgttttttgaaccgggcacccgaacgaaagggggggaccatgcggaaanccncgagagcccccgacgagccaagggcaagcaaaacgaaaaagacaaggccccgaaaacggacacacccgagggaaaaacccaggaacgaccccaaaacacacggagaggcgccccgcnggaccacaacacaagacgggcaaaaggagaaaaaggcacccggagccggaacgcgggggcaaaaagaaaacgagcaaccgggacnncccgggggagcncccagagggccaagggaggagggcgccgaaaaaacacggacccccgaagggagacacccaaggggaaacccaaagaccgagcccaancacacgggaggcggcgcggggcgaaaagagaagcgccagaaaaaggagagcccgacacgcaccaaacgcaggagacgaaagagccccccgaggacccgagcgcgcccgagggacaacacgacccgcgcgaagagcaaagggcgccaaaccgcgcgacgcgggacaaccgaaagcgcgcacaaaagccacacggagtcgccgcggggagcgacaccaaccggcaaaacaaaacaggccccccgcacggaacacaccgcgaggcgaagacacgccagcaacgagggagcgcgccgaacggcaggagacaaacaggcagacgaagcccggacacacacacgggcaccaacgcaaagcacacggccacggatcacggccggaccggcgcgcggcgtaccccaacacccggcaccgagccgcgcgcaccacacccgccgacaagagcggaacatcgagcagcccgcacaggggcgcgaaagccggaccggcagcggaacgccg

SEQ ID NO: 17984 - DNA, 405 bp, Glycine max
  unsure (1)..(405): unsure at all n locations
ccttaaaactcagcttataagtgcgggtctgggagacgaaggtcaagtggtcgctanatgttaagatgatgttccaagaactctggatttggtccgaccatgccctcctgattttcaactgggaaattggcgggtggaggaacgccccggcatttacacaacaagcataatggtaacctttaaccgtttaaaagctctatagttgggcctacgctttaaagttttcattatgttaaagctttgcgtcttttgtctttgaatgtataatacaaagatctttctttatctgttcctggtctctacccattctcattcattcggcatgttaactttctttctcttaaacggcagaacccgatgacgagtccccctaaaggtccaatacctggacccggtctttaattt

SEQ ID NO: 17985 - DNA, 880 bp, Glycine max
  unsure (1)..(880): unsure at all n locations
ctgaattaaaccttgatntacttgtacatacgcncacctgtggcatgcaagcttttgggacatatatacatggcaactggtggagtattatttttttntgtcntattgaanccacacacggnggccacgngagccgccaaattgactggctttgcattaaggacagcggctgaccccaaggacccttcccgatacagaccttgggatcctggaagacctctacagactcaaaacaccttgacgacattgtgtttttgaagggcatgaaaatgttaccaataacacaaaccacatgcaattggcctagtacgtgaaggtagcgcccaacacttgcatcgtgctttctataagaaaagtatgtagggaaaaaaggaatatggtgtgtaggataatccattttggcatcatcttctgttatgcgtggggggccgcatggtccccttgacaatatactatatatgtggagtggattgtgcgctatcaatactacacaaaaatcaaaaccgggtctcccttagtcttccttccccctctccttctcttcttggacgttcctaccctaccatctaggatgttcttttcccgtcttggatcactcttatttattaaagggggggccttcctccatgaagaacgactatttatgtccgggcacattctgcgctgtgttatcatctcgacgacttagtactgtatccaccgtttatccatcattctatgttcttccactattctctcctgcgttacaacttctacaccttctccctttacgttaatcttatttcatcaccccactccgcactgacatcttctaaatactcacactgtccctacgtctcgtcgtacatacgtttaatatctccgtctctattgcctggcc

SEQ ID NO: 17986 - DNA, 670 bp, Glycine max
  unsure (1)..(670): unsure at all n locations
ttacccttagacccttcgagacaccgtgacantctcaagctctgacgctatggtctttactgactaaaggatcaagcgatttttattgtataaaaacggatgatcatactttgagaaatgccgggggactaaggcgagtgaaaaggaacatatgaagggaaaaacctatcgtgggactgaagatactatccgaacaaagagccccacaacccaacaatgtccattattcgccgatgacaaaccctttacttagaccactgcccgttttacacagaaggcgctccttaaattaacacggagcctacatcccgacttacatgtcagacacatcttttttggaaccgcaccgccacaaaagtgaatttgctagagaaaccttaaatcaccccaatcagggtctatgcgagagttccaaggaacagaaaataagggggtccgtaaccctgccgggtgataacctatttgtcctaatacactaaaccaaggtgtttgcccgaaaaacccggggcaccataaaatttggcctcaacctaggcaaggttattgtgccgatgggaaatttgggaaatctgggatccccatgtgaaaaaaaccacttgggattttaaaaggggtcaggtctaaaaactggttttcaaccccccttcctttgctcaaaaccggtttaaaa

SEQ ID NO: 17987 - DNA, 864 bp, Glycine max
  unsure (1)..(864): unsure at all n locations
cccttcacaccctgacanggcagcncctatnagcaacccgccgcangcaagcangaggcgacctacacaaaaaggagcatggtttgtcttaaggagaagcgaaacgaacaaggagccatgagtggngccaaaaaaccaccgggcgaaccaaggaggggggaaggaggacaaagcccatgccgtgacaggaaggaacacacacccaaagggcacacgaagcaaccgcggcactacaaggcacacccagggatactgccatagcaacgccaatgatgcaaaaatgcaccacccgaaacaccccacaaggtgtcaaacggacaacaaaagagagaagccccatcccacgcgggggaaacccccaaccaaaaagggtggaacggaccaaagcaccaacagggggcgccaaacacgagaacaaccaatcgccaactaggcaaggacaaccacaggcagccatgggtccccacaggaccgcaagaggacccaacaaagggacccatggcccaccacttgaaggagacccaaaatccccccccccgagagaaaggaacaagggggaggaccatcacccggggcagaaaatccccagcaccccgaatgaaggggaaacacaatgggggggcaacggaagaggcgccccacccgagaccagggcaaaaaaaaccggcgcgggacgtaaaggcccagagggggagaacgaggcacaaaacaaagaaccaaatatgcgggggcgactgccacacctcacaacgcacgggcgccgtggcgcacggacacggatcaacgacgcgcggacaccaacacgcgaangcgccagcaccgccgcgacgcaacaaacgcacgccacctcacccacgctccacg

SEQ ID NO: 17988 - DNA, 372 bp, Glycine max
  unsure (1)..(372): unsure at all n locations
ttaagaggaacttccggcatcacgggaggcgatgttgatagtttaaaccaaaancgacaaaccgctaaaaatatgtttaaagagattaatctatgaaaggtcaacttaccaggggttcaagagcattgagcattttctgagtaaaccgaacagtcgagatatgctttctaaatgaatgcctttggctgtcacaagtttgccgctccaatggtggtatgaagtgtatgtcaaatacgcactgatggtcataggccaaaaagttaatggtggttgactcgtagatttcaactttcttgaaattttgagtccatttgccaaataccactctttctttgtgtcgtctgacccgtatttccgaaatgactccatcat

SEQ ID NO: 17989 - DNA, 190 bp, Glycine max
  unsure (1)..(190): unsure at all n locations
tctaagacacctgccgcatgcaagcttgtagaacaccccaaaggaaaaacnggtgttgattattttgggtnggaagaaacaagctggaaaaaatatgtaaggatgtgaggaaccaccctaggcttgtggccaaaggttactcacaacaagaaggggtagaatatactacaacctttgctcttggtgccta

SEQ ID NO: 17990 - DNA, 383 bp, Glycine max
ttgagccaaaatcctgactcaccataaaccttgactccggttgtttaatgccaatccttaccctcggaagcaaaaaaaaggagagagagagagagagaagagaacgaaaatttccgatcaaaggaaaaaggagaaggaaaatttccaatcaaaggaaaaaggaaaggaaattcccaatcaaagagtgggggaaagcaaaaagaaaagaaagaaaattcccaatcaaagaatgggagaaagaaaaaaagagagaagttaaaaagaagaaatctcctggtcagagaaaccagaagaaatgtgccgagaggtccttggaccagacaatatctgaacaatacagaatggtcaccaaatgaataaaaaaaaagaaaggaaaccaccac

SEQ ID NO: 17991 - DNA, 188 bp, Glycine max
  unsure (1)..(188): unsure at all n locations
agcttgagatatatcatgtcaattaacactaatttttanaagcttgaaaaaaggatgcatcttaaattttttggagcaaacttcataaaaaaaaaaaaaaatcggcatcaaaacaaccattaggtttcactacttttaactaacgccatattttattgggcgtgggggcactatctctacgcaaatat

SEQ ID NO: 17992 - DNA, 340 bp, Glycine max
tcaccttacactgttatgtgttgtgctccaagcggattcttttctcagcctgatgctgaatgtggttgaattatatgatttaaaactgctatatatatatatatatatgtatgtatgtatgtatatgtaccatttttaggaaaacattgaacagagtatccaataacggggattccacatctctggtgctgttacactaccatggtgttcacacgttcctgtgatgcatagagtatcatgtcttgttttgacaaagaggtcatcactgtgcagacaccactggtgaaatgtgaatttttgcctgaatttctggcatatgccaagggggataaagtttttt

SEQ ID NO: 17993 - DNA, 888 bp, Glycine max
  unsure (1)..(888): unsure at all n locations
gagaacgacaaaggcgacccccagcagaagccgaacaaaacgccaacggaagcgcgcaacacacaccacagcccacggggntgtgactcatgcaccccaacccccaacaaagccgcagcaacgaagagaaaagaaacgaaagaaggagattttttttatatttaaacaaccaaaagggggagggaagcaaaaaaaccagaggcaccccccccgagagaccgaaacagcagaaaacacaggccaacagagggaaccagcgagccggggaacaagaacacggagaaaacaggaacggagcacgcgcagaagaacacaacgcaaagaaaacagacccccaccggaagacggcggcgagaaacgaaacaacagaacgcaagacaacagaaacgacggggaacgaaacgagggcagcagaacacacgaacgagcaagcgagcacgacggacgaaggcaacgcgaacaaccagaagcaaccgcgaacaaaccaaggcggagacgagagcaaacaccgcgcgggccgagacgacagggagacagagcgcacgccgaacggcagcaaacgaagacaacaagcgacaccgaggcagaaaacaggaagcagacagagcgagggcggggggacaacaaaagcacgaacggcgcgccaagaccgaaaaaaaagcaaacgaagaaagcgagcagaggaccggaaggcaagcaccgaaagcaaggcggcagaccgaggaacaaggcgagagagggaggcgaagcgggacaacaacaccgaaacggacagaacagcacgagccacgaagcgagagcacccagacggaacacaaacgcacgcgaaaaggacaggcaacagagaggacggcaaagccgacacgaaagagcagcggaacgaacgcg

SEQ ID NO: 17994 - DNA, 849 bp, Glycine max
  unsure (1)..(849): unsure at all n locations
gccctttgaatactgtagtatcgacgcgcacacnanagaatactccaagccccggcagcaggagcggcaggacgaccaacggcagacacggcttttttatgatttttaacgcacgaaggccccaaaaaaaccggagaaccagggagccgaaaagcccacccacccacccccaggaaaaagcgcaggcggagagaacgacgacggaacaacgccgacacagaacacacggaaacgctcaacgacaaaaagaaccccagaaaaccacgctcccgccaaaaaaggcacccacgggggagcacaggacaccagcggcaccaacaaaccaagagaggaaaacacaacaacgccaacgacgaccgaacaaagagccccgcaccacaccacacgccgggcggctcgaggacggaaaccacgcaccgaagcccccagaaaccgacgaacacgacccacgacggagaacccaaccacagagccccgcacaaaatggcccagcaaaaaaacccggccaacgaaaacaaggaaagagagcacgacgcacgggacccaccccccaaactgcaaagaacagaccagccacgacggccacaacagcgggcccgaaccaaaaacaaaaacacggacggaacacaaagcacacgccaacccaagaaaaggccaacaacaagaaaggcgaaagcccaccacaaccccaccccggacacaacacacagccaccccaaaagcgagcccacaccaaagaactccgcggaatcacaacaccgacaagaccccgccaggacgaccgaaccacgcgcagaaacccacgcgcggcacgggatccgcagcgaacccgcgcaacaaacacaacac

SEQ ID NO: 17995 - DNA, 493 bp, Glycine max
  unsure (1)..(493): unsure at all n locations
agcttttatgtgaaaggatgtgactctccacatttgtttttgtatttcaacgttcaaagccactggtaatcgattaccaaaacattgtaatcgattacagctttttgaaattaattggaacattgtaaattgaatttgaaaactttttcaaaacaattttgctactggtaatcgattacaacaatctagtaatcgattaccagagagtaaaaactctttggtaaacatgttttgagaaaaatcatgtgctacttaatttttgagaaaaacttttcatacttatcttgattaagccttctcttgattcttgattcttgattcttgagtcttgaatctggatcttgattcttgagatcttgattcttgactctaaactttcttcttgagtcttgaattcttcttgattcttatcttgaactctcgaatgttctngattcactcgacgtgctctttgattgatctttgagctttttgtcatacctttgccatcatc

SEQ ID NO: 17996 - DNA, 325 bp, Glycine max
  unsure (1)..(325): unsure at all n locations
tctaagttagtgtaccaaactaccgcggctccggtttagctantttgaaagaagtgtattaatagcttctcatccttagagtgtgcgcccatcttgcgacagtacattttgagatggtttttgggacaagtcgtccctttttacttgtcgaagtctggcactttgaacttctggggaataacaacatctggtactaagcgaaaaccctatatgtctgcaaacggatagtacccaaatccttccacggctctcaatcttttctcgaggagatcaagcttcctcttttctttggttgccgggggcggtcctttcgtggaccaaacta

SEQ ID NO: 17997 - DNA, 339 bp, Glycine max
ttctcgccatggagatcaccggaagaaaaagagaagaggtgaggggaggcgccatctactatggaataagccatggaagaaggagcttcgccaccaaaaaagtgccttggataaaaagcttggagtgggtgcttcaatggaggaaaagaaagagagagagagaaagagagaggggggagcactaaattgtaggaagaaaagagggagagaagttgaactttgaagtttgtctcacaatacgctcaatcatgaaagttacaacaagtgttacacatgcttttatttatagactaggtagctttcttgagaaactttcttgagaaaatttcttgagaaact

SEQ ID NO: 17998 - DNA, 317 bp, Glycine max
tgagatgaggaagtgttgaagggtgaaactttttgcttttattgttgaccacagagtggtacctggagatatgtcgcgggggtcaagagaccttggggacgtcaagtggggtgctattgcccaaaaccaagcttgaccaatcccgacccaacccgggcatagtctgtcagtgagaacctgtgatgtacctaagcaggcgagctcctggcagtcaacagataaaaggaacaaagaccacaaagcaaggaggcttgtggtggctggccagctgtgaattttgtgggatatgtggattatggcctctggtaatcgattac

SEQ ID NO: 17999 - DNA, 864 bp, Glycine max
  unsure (1)..(864): unsure at all n locations
ccagaacgacaccccccaccacaccccgagcacgcaccagagacgcccccaccccaccaccccaaaaagagctgagcctgaaacccaccnaaggaacggggcgcagggnaaaagaggaaagggcgggttaattttttaaaaaggggggcccaaaaccaaaacacaacccccgaaaacccaaacgggggggggaaacccccgttggcccaccccacaaacaaaaaaaaacgccccccccaaaagaaagcaaccaaggaaaaacaccccccaaaggggggtcaaaaaaaagaaaaagaacaccggggcacgggagacccccgcccattaaatgaaaacaggtgcctcacccgggcccaccccaccgtataaaaacagggggagcccgcgaaggtaagaataccccaagggaggaaaaagagggcgggcaaaagaaaaaccccccccccacccacgcaaacaaacacccgcaaggcccgggccaaagcggaaaaaaaaaaacaccccgggaaacccaccggactccgcaccgggaaaaccccccaaaaaaacccccgccccgaaaaccaaaaaggggaaagcaccccgcccccgcaaaaagggacccccccaaaaagaagagataaaccaaaacgcggaaccgaggggccaagggaaaaacccaccaaaggggaaccccccgccccaaaaaaaaaacggggggggggcccccaacccaacaaagaagacgggggcgcccccaacgggggcgaaacgaatccaaccagcagacacccccgtgtccaaaaccagcggggccggacacccccaagagcaacagcaacccagaacctacacacacgacgcggcggcgacgcaacgcgcccg

SEQ ID NO: 18000 - DNA, 265 bp, Glycine max
  unsure (1)..(265): unsure at all n locations
aactatgaaactcagcttnggataaggtgtggttttgacaaaaatatttttttttagcgaacacgaaaagagacaaaacaattgtccacatgtcatgctcaaatatgtgcaacggcaagaaaagtatggaattgaaattaaattcaaacatttatgacactgcccaaatattgatatcgaaatataagttgttggaaattgttaatacctaatttttcattgatctcctacaaatgttcaacctacgaagttgcctaaccaaatt

SEQ ID NO: 18001 - DNA, 201 bp, Glycine max
catcctcaccacttggatttttgcaatctttcatcttgttcttctctttggtggtaaaaaggctttctggtatggaaaactaaatcctgtgttggatcttccccgtaggtacctgatgtaaatatatttctatctatttaatgatgttttgtgtgttctctgcgatatcttcttttcattccagtatgcctttacctttat

SEQ ID NO: 18002 - DNA, 371 bp, Glycine max
cacaacaagttttccacatccacaatgcgcgcataaacccaccatcccctgttgcccacctccatctgagctcacgtattcccacgtagcccatatcctcgtttctctcaacaccgggtccccatcaatcctcccaagctttcacaacatccaatcaaaacaacattcaaacagcacaagctatcacagccaagcaaaacagggcaaaggcagaaaactctgctcaacacaccaaccaaaatcacagtgtttctcacttaaagaccacagtgacaattccttcgatccaattcgttaaccggttgaacgactcccaaattttaatggaaagtctatagtgaataagcctacattgtgaccggtgggatcta

SEQ ID NO: 18003 - DNA, 812 bp, Glycine max
  unsure (1)..(812): unsure at all n locations
tctttgaactttgaacgtcnccaccccgnacggcggccgcaagctgatcaaaaagggcacaaccaaaggacacgggtttgttttctttttttccaccacggacccacaagaaggggcttttttggaaaggataacccctcccaaagaaaagcaaacaatttctccttcaatttccagtatacgaaaggagacccttcttggagacttaccgttcgatgcgtcaccaacacacccttacctatggtcaaatgtgttaaatccatttcccattccccttatcttggacatatgagccccgtgtctaaaaaatgaagaatattttacttactaacctctgacatgatccttaatatgcccaacagcccttcccctagttcagtcacgtaccatttttggggggactagggctccatatatccaccttccctttcaatgccttatgaagattggttggctgacaaacataatgtgactcgcgtccttcttgcctcgtcttcaaaagagtgacgaggttagcactggttctgcacacatccctgcggacttgcactacgttgcactcgttgccctcttcctcctctcactccatttatacaccatctgtctctccctcacacacccctcaccttcacctcccgtcatgctcttcacaatctttcctacaatgccgctcccttacccccaccgccattcattcccgatgccatcctcattcatatgcgtgctctctccaccctgttttcgtcatttaccctatacgattactcgcgtcatcaccagctcactccccgcctcctctccatctctcaccc

SEQ ID NO: 18004 - DNA, 365 bp, Glycine max
  unsure (1)..(365): unsure at all n locations
aagttttgtcttttacatgtctaactctcggatangtantttattgaangcagcgtgttgcgttgtatcttagtctctaccatttcatatgtgcataatatatcatcatgtaggagtaaggagaaagtttctaaagctagaaaatttcttcaaaaggaaaaactctctattttaattgattacacaagtttatttatgccattaagaatgtgagaatacccaagtatttggacttagagtggttctcttatcaaggtttcaacttccgtaatttgctagaagctcaaggtctatccaagcttgtgtagatgaaaagaacattctattcaaagctagtgaaagtcttatacacgtgtacacgcatc

SEQ ID NO: 18005 - DNA, 712 bp, Glycine max
aaagaaggaagaagacaacagaagaaaaggaaagggagggaaaagaagacaaaaaaaaaaaaaaaggatgtgatgagactgcagaccccaaagggggaaagggggggaaggaaaaaggagaaagaggggttaattttcaaaaaaggaggaaaggagaggaaaaacaaaaggggaaaacaaaagggggggggaaaaggcgtgagaacggaggaaagaaaaaaaaaagaggagggaaaaggaaaagaagaagaaagaacgggaaaagggaaaaaaaaagaaagagggggggggggaaacaacaaagagaaaaaagggaaaaggggcgggaaagactagggaggggggagaggaaagaagaaaccagggaaaaaaggcgagggaaaaaaaaaggaagaacaaaaaaagaagaaggaagagcggagagggaaaaaaaaacaggaaagagagaggggaatgaaagaaaaaaaaaaaggggggagaaaagagaaaaggcgaaacgggggaagaagggcgagagaaaaaaaaaaggaaagggaaaaggaggggacgcagaaagagaagaaagggaaaaggaaagcgaaggaagagaggggggggaagaaaaaaagaaagaggagggggaacagaggggggggagggaaaaagagaaaagagaagggagaaaagaggggggaaaaagaaaaaaaggagaggaagagaaagaacaaaaagg

SEQ ID NO: 18006 - DNA, 692 bp, Glycine max
  unsure (1)..(692): unsure at all n locations
tggtgtacgaggacatgtggttccgagtaggagacgatcntttttgtgcaccacccatggtaggatcctggatattttagtacataatatatgggcctcagcaaagagctgtactggtaaaaccctagacgatgatctaagctattatatttcagcacctgttataatgagactgtttaagatcctgtgaaagggtgggccatactgtagatatgcgtattttaaggccttggcacctattattgtagaagttccttccctaacaggatcaggatctatggtccatcaccaataaaggccttatttttaataaaaggaccaggttgctccggggttggccaacccttaaagggggatataataaaatgttgcggggccatggggtcctttgtagggccaaacctggcggtgcccatgcggccacaaaaggtggataactcttaggagttttggaccccccggaatttgatcacccttcggaggatattcggaattgcctacttcgttttgggtaaaggggatatgattttatgaaaaaaggtgtttggggttaacactattctcttgggccaggatggtatcccttgggcgcttttttcccaaaaagtggggggggctaaaaatataggaaggccccctttttttaggggtttgacccaaaacccctttttatttcacaatctttttcaacg

SEQ ID NO: 18007 - DNA, 551 bp, Glycine max
  unsure (1)..(551): unsure at all n locations
agctttataacacagacttcagtggccacgtggatattttatgtggactaataaagccaacaatgcacctcactgacggtgttaccttcgaatttaacggcaaagactattttacaacacttatgcaaagatagggactnatttttacatttcaataggatagggactaatatgcaaaatgactacaaagacagggaccaaaatgcctattcactcgatttttgaataatgagttttgacatttagagacacttaatagtcacttttgtccctgcatgtctttgaatgtgtaatttgcttacaaatgcgtccctggatataaaaagtgcgataaatatattcggtcattaactgtccgtcacggttaataaaatagcctacgtgaaacagaagaatgatgaatttgtcactgaaatgattgttaatgtggttatctctaaatgccaacatagagacatatttgtcatataatattttcttaacttttatatgaaaataggaataggataaataactacttttatccctgattgtgtaaattcgtgaaaagt

SEQ ID NO: 18008 - DNA, 374 bp, Glycine max
tgttaaagaacttagaaacaatcaagaacaagcttgtttcgtcattgttcgcgtgtatgacatccactccacaaggtttgaagtagaggagaccttcaatcctattacgcaatgtggcagacaaaagtgggcagttaacttgaatggtcattattgtcaatgcggaaggtattctgcgcttcactatccatgttcacatattattgcagcttgtggttacgtgagcctgaactaataccaatatatagatgttgtttatacaaatgagcacatcttaaaagcttactccgcacaatggtggcctcttgggaatgaagcggctattcctccttctaatgacacatggacacttatccctgacccaactacaattc

SEQ ID NO: 18009 - DNA, 359 bp, Glycine max
gatcgcatgttcgttggacactagtgatcggagacttatatctacttttgcggagaggtaacataaggaaactagtagtttccatcttccagtaggagaagtgaccatcaccctggatgatgtggcatcgttgctacatttgcccattataggcgcattccatagctttgaggatttttttgtggatgaagacgttgtcctgctagtggaatttcttgaagttagctcacaagaagctagagctgatacagtacaatgtcatgggacatatgttaggatatgctgtggagagacatttatcggagcaaaagtggtgcacgacagtggattgtagtagctcgagcaatattgttgtatct

SEQ ID NO: 18010 - DNA, 431 bp, Glycine max
tgaccaggaattacttgtatgggttggatgttgaattctgtttgttcctggtgcggagatgatggtacagcgggtgaaccagaagcggaaatttcttttggtgaggtagccatggaaaagcagagcgtttggaatgatttcgtaaatctcagaaggctattgggaaatgctggtaaaaacacgaatgccaagcagatataaatttgaatgaagaatgtagaggggcgtgtgaagcaacggtcgaattcgttttggcttaatagtgaacgtgctattaatgttaagtgattcgtttgggcacgttcaaattgctgtagttgctataattcctctagcaaacaaatgcccagcttgcccctcagtttttcaaactgatttgcatgcaaagcctttgtgaaaatatctgctatttgttcctcaatgtcaacatg

SEQ ID NO: 18011 - DNA, 783 bp, Glycine max
  unsure (1)..(783): unsure at all n locations
ccaacattttngtagcaacccactacgaaangagccagcccactatagagggactcttccttctaggtcctaaatcatttcacacattatttagattaaagagctaatgactgttcactgcattccgtaaactatcggttcagacattgtaagaccttttgctttagtatcggcgaccatatagagctctgacaatgattccttagtgaagctacaaattagggggtaaaattggaggataattgataaataaacaatagtgtttagtatgcaatggaataagcaaatcattttgaaatcgtctgacgttgtgtggttttagaattaaactcactttggcacaccagtgtcaaatgccaaccattcggttctaatatctatccttttaagaacttattcccaaaggtaaaacacaggagagtttgcacaccccctggagtaactatattgcaggggttaaccccaccctagcgatactgagtcatcccaccacagtatacccaatttacataccttataaccacatattttcaatgtgttagttgtgggaaggaataaccttacaccaaagggaaccatgacctgctgggattataaccttttctgtaacatctacttagataagggagatgctggtttaaaaccggacgagtgaaaacatggttggcggaggaacccattaagggaaagcgcgttttgaggacccccgcacccttgaatacatatttatattctcctataaggcttcacgtacggcggcctctccaacgtctagcactctcc

SEQ ID NO: 18012 - DNA, 277 bp, Glycine max
tggtgtcgagcttccatggttagtgaggggcgaattagtaattcgtgagggagagagcaaactgcgcgaaaaaaaatgagggctgagtgaagagcgagcatagctttttggttttaaataaaaaggttatactctcttacaattattttattcaagctgtgccacatgtgcctattcgattggagcccaacgggcccactttctctttttgagtgtgacccatactcagtcacaaaagcgagaaaaatctatcctttgaaacgctaaaaacccgcct

SEQ ID NO: 18013 - DNA, 799 bp, Glycine max
  unsure (1)..(799): unsure at all n locations
gggggtcggcnntttgaccctagaacnttgcaaaacccacagncacctgangcatgcaagcttnttatccaagacacattattggtggggaagtttttatttttattgtttanaccctagaggaaggcggatgccctcttctcttgtcgtttgccttccgctgcatctgcagggaggaaaatcaccatcgaaggacttccttgaagctcacagattcagtcttcgtataatctccacacgccatcttccatcaatgatgaaagtagctgcttgggacagcaattacaaaaagaatgatcatgtcgggatctgtattatttatgtggcagtaaaagagagtgctttgtaacaaaagatcaccctttttattgtttgtctacaacattgaaaacttggtgatggctcactctgctatagagtagaaatagtcttatataaaatcgttgtgcagaagtaaactgtttaataaacggcttctgtactgatatgccaataaaaatatggacactgctaatatagatgggacaaagacatgttgaaaaacccgacttcgatccgggggcccccattctatgctagcacctttttaccgaaaagaagagctgcccgtatacttttggggtgcttttcatctaatgggccacttccggttgaaacaaaatggttgttcgaaaatttgtaaagtgactataatgtgatagtttaaattgtaaaaaatttcaataccttttcttaaaaacaggttccatattttggtgggtcaaccctctattaaacgagaacttggcgtgcccctccc

SEQ ID NO: 18014 - DNA, 385 bp, Glycine max
tatataagctgaaccattttatcaataaacacttgtttgttttttattcaaaaaattaaagggtatctgttttatcttaatgagagtgattctcctaaattctcgagtgattcaagaacaccctggctgtatcaaaggactttcacaacctttgtgtgttgccctcgctggaaagagagattctttccttcctttcatcttcacccttggtctttcaaaccacaattccagaaaatccacctctgcccagaattatctagtggccataactcccattttacgcactcaaattaagtgattcttgaggctaaattgaatttcaaaacgagacctttcacctcgttttggaatcacctcatttggatccctgtagcttcagttattg

SEQ ID NO: 18015 - DNA, 780 bp, Glycine max
  unsure (1)..(780): unsure at all n locations
aaacccctttgtgnattctgttgctaccacaccaaccgaaacctggcgagcagtatgaatgttgtgggaacttttttggcgtttgaactcaaaattccttcattaagcacctaccaagtaaacatttgaggaaagaaacgagagatatgaccacttgacactcaggattgactattgactaagaaacaaggaacaccaccagacagtacttatgtgcagtattccaacataccacccagaagtgcatggaatgaaaatgaatagcaaacttgaaatgttggaaaaatctcagcatctggagagaaacaagaaaaaataaaatgaaagggtaaagtaaaatttcaaaataaatgcatggttcctgtaaaaaattagtaaatgagaagggaaaacttttacttcatgcacagaaacatagcgccatagtattccagataatggcatcgggcagtcgatcccaaaacgattagcaagatagaagtacaggaggatggtatatgaaatctagaataaaaaaaataggggacattcatgtatataaagctaaaaagaataccataatgaaggattattctagttacaattaagcttaatttagctaacccaaagcataacacaaaccagtatatttaaaaaacaggacggaaacgcacatagggtctttaacattgggaaaacggccggccggggtttacccgtgctgtcggaactaaggatggaccccccacccgggaccggcggttgtaaaaagagaccgcgtggtttctaccgccgggaaca

SEQ ID NO: 18016 - DNA, 838 bp, Glycine max
  unsure (1)..(838): unsure at all n locations
acaaacggccgaacaacccccaccacaaacacctacccacgcgaccgacgatcacacattacacccnncagnnnnnnnnnccagccacgatccctgtagccgcgcacanananaaacccccgcgagcgaacgagcccangacacgcgcgaggaggagttttttcgcgaacacgccggcacnccccccgccaagaaagcccgcgcttcgcccccccaccaaacacaaacacccaaaggggaaacacaaaaagaacacgccacgccaaagaaacggcacccaacgagccaaaggcggggccagaaccacacagaggaagagaaagacaaagccgactaagaagaagaaggaccaaaaactacccacgggcagggaggtgaaaacaaccgggggagagaccaaccacccaaaaagcccaagaaggatggagagacaaaagcaaggaacaccagaacaagaaggggacgagcccccagccgagaaccccaaaaagaagggcagcaacgggaggacaacacccgcagcaaacccacaaggggagaataagggctaccgggaagagggccaaccgaacagccctgaccccagaggaaaacagtccacaaacccccaaaaaggagacacgggccagcaaccgcgggagccaaaagggcaacacccaacggacgcggccggggacaaccatggcagaaaccagaaaacagagggccccaaccgggaaaaacaaaggcgaagaccaaaggcaaaaaggacccacaggggggaccaaaaggcacgccaccacaaaaaaaaaaacaaccccaaaacgcaccaccccaggaaaaaaaaagcgaacaaacg

SEQ ID NO: 18017 - DNA, 188 bp, Glycine max
ctcactgacggtgttaccttcgaatttaacggcaaaaactattttacacacacttatgcaaagatagggactattttatacatttcaatgggatagggactaatatgcaaaatgactacaaagacagggaccaaaatgcctattcactcgatttgtgaataatgaggtttgacatttagagacactta

SEQ ID NO: 18018 - DNA, 707 bp, Glycine max
  unsure (1)..(707): unsure at all n locations
cccctaccttgcattacggacactataaatacccagcctatggtatgccatccataaaaccattaccaaacctatagtcctttaataggaacacggtattgaccaaccattggcttcccccataaaaaaaccttaatctaaggggcctgggcaaaaaccacattattcctgctcaggaaaactggcattctattcttacccacaatgaaagcaagggtaccttgcggtgaaaggggatttacctaagcctccaaaatattgtaaataagaatttttgctggacacttttagggaattgatgttcaacgaagcattcattaacctcatattccattggttgtctataanctctttctaggttatggtcaatggagataaaactcaagagttacgccacaaaaagtcttagtcaatgggaccccctctccccctacatttgtgctgtgtgggaaaaacctgtgcacctcattcagaaggtgcttgaacctatcangggggtaagataaccctatgggttgatttgtttttgctgagatgtgccgctctctctgagccagtatgacaaatgtaagtatgttgaatgccttcgatgtttgtaatcacagacaccagctaattggacaaactcggtcaatcttaaagagtaccccatatacccttcatggcctaggatgttaaaagttctgatgggaaccctgtgcaggaat

SEQ ID NO: 18019 - DNA, 240 bp, Glycine max
  unsure (1)..(240): unsure at all n locations
cttaactcggatgtccgatcaggcgcattttatttgagtattttganaanngaaaacagaagcgctcgagaaaatcgaagggccataactcttcacacggatgtcccgatcgggcgcataatatgtcgagacgctcgaaaatgaacaacagaagctctcgagaaagtccaatggtcataactttccactcggaggaccgaatcaggcgcataatatatctatacgctcgaaattgaacaa

SEQ ID NO: 18020 - DNA, 158 bp, Glycine max
  unsure (1)..(158): unsure at all n locations
acatagaaacacaagctcctcgaacattatgcgcctaaagaggacatccgattttaatgttatgacaaancgaatcgcgctagagattccatgggtcaattacgagcgccgcgacatataatgaaagtgaatcggacctccgagacaaaagcaatgac

SEQ ID NO: 18021 - DNA, 784 bp, Glycine max
  unsure (1)..(784): unsure at all n locations
cactcgccttgttacaatgattacnttgcanacnccgganccttagagncacctgccgcattgcagcctgcataactaactttggtggaaaattttttatattatcttntaaagaaacacagaaactcgggactattaatattggaggaactggttatctactaatagtggacaaaatggagtattaaccaatcatgcgcctaatggcaccggcataaatataagtattttgagaatacatcttaaagaccaatggttaacgatggctcttatgggcggtttgctagaaaaataataatgagaatattgtttaataaatgatgcgganaggatagtgacattgatccacacgacgcacagcatactcttgaatagcacaagttattttgataaggcgaaggaagagacaacaatgaggcaatctactctaaacagcttgacacgagagagctatcatgttattatacaagtgagtgtccatatcgattataaaaatggaatgaacgtagaaagatgaaaaataaagatggtgagtcgtctgctaaacataaagtctaatatatgaagtgacatgactaatgcttaaatatgctatggttaacttctgaagtgcatgaactatatattatcacttgacatatgtacacccaattttatgctaaaatggtagagcaatttaattaagtgactttgagttgaatcaaaagaaacctttgcctgagatagaaaagtatctttgaaatgaaccagcctacaggaggtaaaagttgaaaaacctttttct

SEQ ID NO: 18022 - DNA, 320 bp, Glycine max
aactatagaaactcagcttcttatccaagcaattcttggtgggaagcttcttcttcttggcttattccctaggggatggcgtctcccctctcctattatcctttgccttccgctgcatctccatggtgaaaaatcaccattgaaagacctcattgaagctcaaatatccatcctccatagaagctccacaagcaagcttccatcaagtggtaatcagagcacaagagcttcaagtaggtgctccttaaacctccattaatttttagctttaccttctcttccattgtcggttcttcatttttttctcccatgaatctcct

SEQ ID NO: 18023 - DNA, 1041 bp, Glycine max
  unsure (1)..(1041): unsure at all n locations
ggctaggacagcgtactgaactagtgcagcnancaactccagntcaatgtgatantacgcgcaggcacgtagcacagaacgcggangacggcagcgaacgacgcacgaacnnnctaccacntccacagacncncacaacaggaggggnnnnttggacntntcgatngccatgcggcnacancccgcncngancangnanaggaaaggcagacnccggagaaagaaggaagaagnganacacggaggagacaaccaccagtttttttttattgtgttgacccacacacaaaaggcacacagcgggaaagcggcacggggggacaagagaaaaccaggggccacccatgagggcgaggcaaaggcccaaaagccaaggatggaacacaacccgacacccaaactgagcagaaggccggacaaagaagaacctagggagagaacccaagccacgccaagcccccggccagcaaccaaaaaaaacggaaaacacaacacaccaaccaggagggcgcgcggcggccggccaacagggaaataaatgaaacaaggagaaaggggccccagggaaacgaaaaacaaaggggaggcaaccgaaaacaggccgaaaaacggaggccggaggcgaaaagcggccccaggaaccaaagccgcggcgggaggacacaacccgcctgaaaacaaaaaaagaaacacggggacgccggggaaaggaaacgcgcgacgagcggacaaaacaggcacggggccgaaacgcgaacaaacaccaggcagaacaagaacacaaaaggcggcaagacggcggaagcgaaccgcgacgaacaacagcgacgagcggacacggcaggaccaacaagcggaaggcaacaaagcacaacaaacgacacgcgcacgggagagacgaaacgcaaaccacgcaaaagacaccgcaccacgaaaaacggcgacagagacgcaggagagacagagagcgaaagaaaagagaccgaaggcggcagcgggctaagcaaaaggcacgaacacacgaacccgacgaatgagccc

SEQ ID NO: 18024 - DNA, 772 bp, Glycine max
  unsure (1)..(772): unsure at all n locations
cgcccctggggcttgcgaggacgnncgcnncacaannaagccgcccccgaggggaaggaacacacaggaacacaaatatttgtttttactcggaacccgacgccgacgagccgggggaggcccaaagaaacacgaccgcccacccaagagggccacggaccccaaacacacaaggaacagcgcaaggaaacccggcaccccaaggcccacccagcggcgaccagccagcggaacaaagcaggacaagaggggaaacacaccccccgcgaagagaggcgaaagaccccagcgaaaagcaggacaccacaaaggaacncgaaagccaaaagacgcaggccgaaaaacgaacaaaccaaccggaacgccaaaacccaaaaaaacaggggaggggggagggaaaacaaaaccccggagaaaggggccgaaaaggggcccaagcagggggaggcccaagcccccccccgcaaaagggcagcggacgaaacacaaggcgcaccccaaaaaagaaggcgagacgcccgccaaacaagggcgaggacgacgaggccagcggggaaccaccccgcgaaggcggaagaagaggcgccccncccccacgcgagggaggggcacaggccacacggggggacgcgcacacgagagaaaaccccaggggaggccgggcaaaccccaaagaaaaaaaccgggccggaacaaggggccccccacgcgggaaggaaaacgccccaaccacgaaaccaccgggggaaaggaaaaggcgcccgccccgacg

SEQ ID NO: 18025 - DNA, 771 bp, Glycine max
  unsure (1)..(771): unsure at all n locations
caagatgatgcttgatgtacgtacaacaacaccgacngaggangcagccgganggnnangggggacccaacacaagggggattattgtgtgctttctgttcgaaagagcacaacaaaggggggcaccaaacacaaaaacgcgcagaaacccaccacccccgggggagcaccaacaagggagcacacggaccgccacggagcccaaaaccccggggaaaaaacaccgggacaacaacaaaccacccaagcggcacaaaaggcggcaaggccgcgccaacagcacaagcaacacaggcagccgaacagagcaaaggcagaaaacaggccaaacacaaccaaaaacagcgggcccacccaaaaacaccgaaacaatgccncgaaccaggcaagagacggggaacaaccgaagaaacacggcagacaaaagcaggaacgacncgcgaccgagggaacacacaaaagacgagacgcccccggagaagcgaacacagcgaacagcaccaacgaaggaagaaacacaaacggggcccagggcaggcaaaaaagaaaggggggaacacaaacggaaccgcaaccccgggaaaagccacggagagaccaaagggaaacccaccccacacaccaggccggcggggcgcccacacgcggcacaacacggggggggagcacaaagccggcacaaaggggaacccgccngcaggccccgcgaaaaagaccagccgacgcgccccacgccaagcagaggccgcaaaaccaccccaggaccccccg

SEQ ID NO: 18026 - DNA, 348 bp, Glycine max
tcttatccacggctcatcttggtggtgaagcgccttctttctgtttttattccctagtggatggcgcctcctctcacctcttctcctttgtcttccgctgcatccccatggtggaaaatcaccattaaaggatctcattgaagctcaaagatccagcctccatataagccccacaagcaagcttccatcatgtggtatcaagagcatcttgatctaagcgatgttcttttgcttcctctatctttttgatcggtgaattatctttaattcccagtgcttcatcttattctccttgtatatcctccattggcttggggttgggtctttttacagtagattaaaaaaaaa

SEQ ID NO: 18027 - DNA, 271 bp, Glycine max
cccactgggagtatgattacatatcatagcttgccattgctaatgaaatgaggtgagatgtttctttccaaaaagaaaaaaaactatcttaaaacacacttagaattagattttgcacttgtgtgtttggataccttaaacaatggattttaacaacacacatcacggtgaatgattaaaaaaatcattaacaacgaagaatcgcttctctacaaccatgaatacaaaatcgattatgcaccaccacatcgcgtattaactctgcttatat

SEQ ID NO: 18028 - DNA, 412 bp, Glycine max
  unsure (1)..(412): unsure at all n locations
ctgatctatttgatgaagagaaacaacttctagaccagttngtcngtttgaaggngaaggagtgtggataagagatactaaaggagggaaccaagttcgatccagacctttgaagaccgatgtgtcaagctagtgacgttaaaatagcgcttcctgggaggcagcctagtcctctctctattttcattgcatttagttatagcttgcttgtttgtggttgcatgaagcattttcaacatgttttgcattgcataaaggggttggatgagcttctttgaagctgtggacgaaaaataacttagaaatttttttcagtagtccactcgctaagtgcatcatccgcactaagcgaatctttcttcattcgctaaacgagctattgtgtgcacttaatgccatgacccttggtttt

SEQ ID NO: 18029 - DNA, 768 bp, Glycine max
tgctgcagcctggaaaaggaaggtaaaggggaaacgtttttattatatgttaccaccgagagcggccctgggaattgttgggggggtcaaggaaacattggggatcgaagggggggggctttgcccatgaccaattgtgaacgaaaccgaccgcaacggggtctggactgtcagtgagaacctgtggtggccataggaagccaacttctagccggctacgaatttatggtttcgtaaccccataaatggggcttgcgtggctagtcaggtggtatatagtggaaaagtggattgggcctttggaaaagataacaaacgcgagataagatacacggttataatgtgacaggcgctagatgggctcggataacgagaacccggggggaggcgctaccggcctgaaatcaagcaccgaactttggccctctaggaacaattgcccgcttgttttgccacactctccaaagaaaatgtaaacaataacggacaggcgctttttggataagagacaaccttattaccgtggggaaaaatgatgtgcaaatctttgaaatgtctatcagtttgtgggagttttatcgtcggatcagtatgacatctgtttcctcggtgttgtgtgctgactcacatcgtttcagtcacggaacgttaccttatcttaattgtaaatttgagcgtgaacttagttgtagcgtagtgaatgtactgttccgcgtcgttcatcgttgtgtaactgatattgttgtctacatggatttcttacagacc

SEQ ID NO: 18030 - DNA, 338 bp, Glycine max
  unsure (1)..(338): unsure at all n locations
ccttgaaactcagcttttttacaaccttttctccccctttggcaccatcaaaaatcnatttgaactcggaaatcaacacagatataacaatggagtagaaagatataaatatcagagtataaaacactataagccaaactcacaaagaagaaataatcaaaccagaatccaaataactgaaaatgtcaacaaccacaaaacatccaagactgaaatttaaaaaaccacaagataaataagcaaagtacttagcataataatgtaaattctaagaaactaaaagccaaaatacacggcttataaaagacatataatcagaaacttaaatctaagaagac

SEQ ID NO: 18031 - DNA, 390 bp, Glycine max
agcttgggaggattgatggggacccggcgaagagagaactaggatatgggctacgagggagtacgtgagctcagttggaggtgggcaacagaggatggtgggtttatacgtgatttgtggatgtggaaaacttgttgtgcaccatcgcccgaccaccacctattaccacatgtgatgggtaccccataatcctacaagcttgagatgaggaagtgtagaagggtgaaactttctgcttttattcgttgaccacaaagtggtacctggagatatgtcgcgggggtcatgagaccttggggacgtcatgtggggtgctattgcccacaaccaagcttgaccaatcccgacccaacccgagcatagacagtcaatgagaacctgtgatgtacc

SEQ ID NO: 18032 - DNA, 322 bp, Glycine max
  unsure (1)..(322): unsure at all n locations
ctctgaagactaatctttgggaaattgcataccctaatcaaaatttgatgtgtcctcctccagcaaaggttaacacaaagggggcaccaaagaaacctatgagctggaacccaatgtcaacaaagcgcgatccatcttactangaatatgtagatgcctttgaatctatgaaaaatagcaattcgttggtgagacgtactgcatcatcctctgagcaaccgaatcatagaacgatgatgcccatgttggatcagtttcagccatttatgtacaacttcattgataagattgttggtgtcaaagctgatggcaactggggata

SEQ ID NO: 18033 - DNA, 485 bp, Glycine max
aagggcttagagaccatacaagtttcctaacgatttctaattatgtgggccattaagtctatcatatgctgacaatagccgagaagcccatgaatctcttcgggggcggagtaggtgtctgccatcgccttggccttggctaacaatcggggaagttcttgactctcgttcaaggtaagagcaaaccgatccatccacatggttgcctcttggtgtaaagagtcgatcacccttcctctagcctctttttccgcgtatacttgggcatattcgtccgcaatcctatgctcgtgggccgcggctagacctaactcttcttggtccttggcgatgatagctagcatgttggtctccgtctcgcataaacgttgagacaagcttcttttggaccttgaacaggcaactaactcctctttcaaaccatgctatgtgctcgcgactggtccctttcttccttttgcaacttgagttcactattgctaccc

SEQ ID NO: 18034 - DNA, 365 bp, Glycine max
tgaggaagtgtagaagggtgaaacttcctgctttattctttaaccacagagtggtacctggagatatgtcgcgggggtcaggagaccttggggacgtcaggtggggtgctattgcccaaaaccaagcttgaccaatcccgacccaacccgggcatagtcggtcagtgagaacctgtgatgtacctaaacaggtgagctcctggcagtcaacagataaaaggaacaaagaccacaaagcaaagaggcttgtggtggctggccaactgtgaattttgtgtgatatatgggttgtggcctctggtaatcgattaccaaaggtgggtaatcgattacaaggcttaaaaatgaagacatgaggctatgat

SEQ ID NO: 18035 - DNA, 538 bp, Glycine max
cccccttgagtcgagaaaccaccaagaacgcacggccacgcagatacgggccagccttttttggcacagcagaaaacagagcgaacaaccgaaaccgccaaacacacgaaagaccacaaccacgacaaccaacaaaacccgggacgaacaagcaaaagaggggcaaaaaaaaaaaaggaaaagccacccagaccagcgggggacaggaccagccccgacaaacgagcagcacaaacaaaaaaaggcgcccgggaccaaacgaccaccagggggccacaaacacgcacccagaaaacccacagcgaaacagacccgggaaaaacgcacccccccaaaagaagggaacaggcaaacccaacaaagcacaccaggagacgagccgaagaagccccgaaaaaacacgggaaacccggaaacgcaaagagaaaccccacccggaacaaaagccaagaccgagggccaaaagggggccaaagacaaggaggccacccgaccacggcccaaaaggaaaaaacccgggcaaaggcacaaaaaaacg

SEQ ID NO: 18036 - DNA, 762 bp, Glycine max
  unsure (1)..(762): unsure at all n locations
atgttgagctttgagaacaaanccannnanngnngacgcagccnnnaanagnacagaccacaacgacccttttttttgtgtttttcaancaaaggccccacggggggggggagaccaagcaaagccccccccgcaccggaacgaggngagaaggccccttccaaaaaaaaaaaaaaccttcttagaacagacttagaattaacattttggacctgggggggtgggaaccttaaagatccgcattacacaaaaacacggggatggaaaaaaaatcttaccacaagaatcgctccctacaccatgaatcaaatcgattatgcccacccctcgggattaaccttgcttatatcggtgaggcggaccaaaatcgcccacactaaacattataaagcttgggtattgtgccccccccaacacattaggggggtgggacccccccttaatcaataaatgaatcgtgggccaaaaccgtggacctggatcatgctccagaaagtgtggggcctatcagccccccccgtcactcctggggggaggcgataaacaccattttttataaaaaacatgggctttacttaccccgacaggcatacgccctctcccgcacatcgggtgggtcacctagggacgggaaaacacgcgtaaaagggtgtgggggaaaagcccttacntagggaaaaacctaatcgttgcggcgcaaacaaaggctatttggcacataaccccagacggcgggggacagcttggggtcaccataacggg

SEQ ID NO: 18037 - DNA, 707 bp, Glycine max
  unsure (1)..(707): unsure at all n locations
aaagcagttgacctttagcnntcaanaanggaaaaaaacgacgggggggaanaaaggatttaggggggggaatttagatattttatgggggaaggaagcgggcgcggggttagaaaaaaaaaccccccccccccaggcacaatgagaacgagggggaaagagaagaggaaaaaaggggggggggggaggaagaaagggcaaagggaaggggaaggagagagggaagagaggtaggggggggggaaagaagaaggagaaaaagaaagggagggggaaaggggtgggggagcggatgaaaggggggaggaggagaagcgagaaggaagaagggaggagagagaaaaggagaaaggaaagagaggaaggagggaagaggaaaggaagaaggggggagggaggagaggaggagggggggaagaggaagaaggaagagagaggaggaagggggaaagaggagaagagaagggagggaaagactgaggaggggagagggacgaaaggaaagagagaagaagggagatgggaggggaaaaaaaggaaggggggaagggggagggaaggaaagagggagaagggaacggaaaaggggggaaggaaaggggaggggggaaagagagggaagaaaaggaggagggagagaggagagggagaagagaggagaggagaaggagaaggcagtaggagagaaggggaggaggagggagaag

SEQ ID NO: 18038 - DNA, 739 bp, Glycine max
  unsure (1)..(739): unsure at all n locations
accacgacccaaaggacacacggagccgcgaccacacaagacgacaacgaacaccaaccacacgaccccntggggttgaccgtgacgcccccnananncnggggagcaggagaggaagggcccgaaaggttaattgttaaaaaccaaaaccgaggaaggagggggacaggcaaagggacgaagggggggcaagccagaaaccggaagaaagcgcgaaggaaaggccgaagaagacagaagggccaaggaggcaagcgaggggacaccaaacgaagggaccccaaaaggggcaacggggcaacaacggcgaaaaagggaagaaaagggccggggaaaaaaaaccacgaaaaaaagaaacgggagagccgggaagcggagagaaacaagaagggaacaagggggagggcaccccccaaaaaaaaaacaccccaacacgaaaaggagggcgcaccacggcaaaccccaaagaagaggaaaaaaaggaaggcggggccggaaaagaccaaccacgacccaggggaaaaacggggaaacgaccgaagagcaacaaagacgggagggaaccgcgcccgaaagaaacacacgcacaggcgacggggcgagcgacggacggactccaacccacggagcacgacaaacaaccacgcggcaggggaccgagcgcaggcgacaagaacgcacacaaggggaaggaggacgacggcgcatcgcagagcaacaacgacgcccgaagacaacg

SEQ ID NO: 18039 - DNA, 719 bp, Glycine max
  unsure (1)..(719): unsure at all n locations
ccgcacgatacttgtgcanccgngcgaacaaagaaacgcagcttctaagaaacttcctgagaggagctcgaatattttcctcgagagccagaaccagcgacacaccaccagcaaaaaccaagctcaccccccgaaaaaaaccggaaaaaacaaaaaaaaaaccccacaccaagacaccccaaaagccccaaaagccacgcaaaaccccaaaccacaaaaaggcccaaaaacacggcccaaagaaagaaaacccaacccaaaaccacataaaaaacgggcccatacgaaccccagggcccgaaaactacccctaagcccatgaaaacccagggccctccctggagcgcggggccaataaaaggaggctactgggcacgacacccaacacggctggaaaagtggtgacaaacaatggggagggacactccaccctcctgtgcatcaaagagcacaaggaggcaaaagatttccaaaacgccgggcccaaaaaacacggccttgaagcccaaaggggacccaaacgcaatcttaacccaagggaagggaagagccccaatcgaaaacgggaccaaaactaaaaatcgggcgcaccgggaccaactccctgggaagggggaaaggaaaccccgaactcaaaagggaaggtggaggagcgccgggaaagcgaaaaaaaaaacccaacttttaaaaaaaaaggggggcgcctcgggcccaacacg

SEQ ID NO: 18040 - DNA, 734 bp, Glycine max
  unsure (1)..(734): unsure at all n locations
ccgctgaacttttgacgcgaacccaaaacaacggcggagcaactggcccttatttcccaggagatttttttttttttctcaacccccnaaccggggagcccaatattccttacgtctcacctcaccctttggaaacccccttgaaacctggctacttccctaactcttatcttttcttccctttaataaaggccaccggaccctaaggggtttgcttagcttattgaaactcacccatgaaaaatccatggcttctctgaggcgccctctatatggtacctaatggtttatggcacacggttatattataccaccctctccccattaagaagaattggaaatctccatgaacaaaacttatgcccccctttttccccgggaaccactatgggccccctatatggcggcagaatcttctaaattgtttgcctttatgataaaagcacgacttgtgagggaacaaatacttaagatgaagaggggaccaacctgtgatctgttattgatgagcgaaagaatactcattgattataaaatgggaaaggatgttgttattatttgagaggaaaaaagcccttaatctatctcatagaacataatcctaaaattctcacacctttcttgataaaaaccgtagcacacctcggaatgttcgggccgcccgctctaatatgactccatatacttacaccaatcttcgcgtaacttcgccggtccttaacacaatggatccg

SEQ ID NO: 18041 - DNA, 471 bp, Glycine max
ttataagcgcgggtctgggagacaaaggtcaagttgctcaatatgcgaagatgatgttccgagtacattggatttggtacgaccatgccctcctgatttccagctgggaaattggcgagtggaggaacgccccggcatttacgcaacgagcataatgtaaacctttacgattttaaaagctctatagttgggcctaggctttagagtttttccttttgttaaggctttgtgtcttttgtttttgaatttataatacaaggatctttcttcatctgttcctacgtctctacccattctcattcatttgcatgttcacttttttttctgaaacggcagatccgatgacgagtcccccaaaggtactaatacctgggacccgcctatcgacttcgagcaagaaatgaatcaaacggaagatgaaggaaacgaggatgtgggacttccccagaattagaaagaatggtcgccatg

SEQ ID NO: 18042 - DNA, 495 bp, Glycine max
  unsure (1)..(495): unsure at all n locations
agctttcatttagttagtgacctaggctataattagtagcatgtgtaacacnngncataactttcatgaatgtgaaacttgtgagacacacttcaaagttcaacttctctccctctttttctccttcaatttcgcgcccccccccctctcattcttttcctccattgaagcttcctctctaagcttcttatccaaggcattctcttggtggtgaagctcctccttccatggcttattccctaatggatggtgtctcctctcacctcttctcctttatcctccgctacatctccatggttgaaaatcaccattgaaggacctcattgaagctaaaagatccagcctctatagaagcttctcaagcaagctttcatcaatcggtaatcaaagcacaagagcttcaagtgggtgctccttacacctccattggtgtttcttcatntttgctcatgtatttcctcacatgtcttgtgttgaatggttgtaacatgattc

SEQ ID NO: 18043 - DNA, 321 bp, Glycine max
ttaggaataagaaaaagaggcatcttcctttggatttattttttattcacatgtccaagcctagcatgtcacatatcagaacattcaacatttgcaacaaaagaaaaaatgctagatattttattaatagaaagaggcataaggcttaacttaaataaaccatcagaaatgtagcctttaccaataaaaacaacctgtctatttataacgactctattccaactctaacaatcttgtacccacgttggattaacaaagaaatacttattaaattttccaaatattgaaaatgggataaactccatctgaaacaagaaaatt

SEQ ID NO: 18044 - DNA, 893 bp, Glycine max
  unsure (1)..(893): unsure at all n locations
cagctattatgtngttttatcnntaaacnnnannaaaaananccgccggaggagagaanagcgggnatgtgagaggggcggagggtttanaataattttgtaggaagagaacaaccgaaaggggggggggggtgtgagagataaataaacccaccaccacaccggaggaatagaaagggaaaagaaaaagaacaatagagagagagagaagagaaaggaagggagagggaggagaacaggggaaaagagggaggagagaggggaggagtnaggaggggggaagagaaggaagaacaggaaggaggagggagggaaaagggagggaataaagaatacaaaggagaaggagagaggagaagagagagaagaaaagaaaagggagaggaaaaaaagaaaggagagaggaggacaagagagagaggaagggaggaggaggcaaaggaaaggggagagacgaggtgaagagagagagggcaggaggaggggaggggaaagagagagaaagaagaatgggaggaaaggagaaggagcagaagggaggggaacaagaaagggagagggaangggaacgaagaggagagggagggaagaggggagagaggggaagagaaaagaaagaggaaagagaaggagagagagagaagggaggtgaggaaaaaagggaggaaggaaagaggcgggagacgcacgggcgaagggaagggaagaaaaaagacggagaagagaacaggaagaggagaggagggggaaggggaggagagagggagagagggagagagggagaagagacgaagagaagaatgggaacgaggacggagagaaggaaaggaggagaggagagagagaaggagagagggagaggagaaagggaagggggaacaggaggaggagag

SEQ ID NO: 18045 - DNA, 264 bp, Glycine max
agaaactagaacttatctaccccgcccctataataactaagctcacccctatgccaaaaaaaacatgaaaatacaaaaaaaaagtccttactacaaagattactcaaaatgccccgaaatacaaggctaaaaacctatactactagaatggccaaaatacaaagcctaaacgaaggaaaaacctattctaatatttacaaagagaagtgggctcatacttagcccatgggctcgaaatctaccctaaggctcatgagaacccta

SEQ ID NO: 18046 - DNA, 732 bp, Glycine max
  unsure (1)..(732): unsure at all n locations
ccgcactangacttcgtagcacgacgcgaactatagaaagcaagctagagcaacagccgagaacccggggcgtttgttttttttcnacacgactgccgagtgaatttcttctgcttaaatggcccaccctgaaaacctccttgggaagggggccaaacacttaaaccaccctcctccaaggagggatctgacaagaaacgttcacgaaattcagatctgaaatagaaggctctaacgcaacctagaccattcgtggggttacgacccaagacccatgaatcaacaggcaccaaacaacgatccttcttctgctggaacaaatcctctgcgaatataaaaaatttggctgcctcctttttaatccacccgctccaaaccttggcctaaaccagcccgaggaaagtggcctcccccaaagaaactttgggtcttctaaactccggaattgtagaacaaaggtgaactggacaaccttccccatacaattaactttgctcgaaaggccaaattggtccccaatccccaaaaattcatttccttaaatttgaaatcttggcggagggcggaagttaaatttcaacactaacccccccaccccggaggttaatttcaaacagccttccttaccacctgggggaatttttgttattaacccaccttccaaccccttaaaggttagggccccaaacaaggcattaaaaggcgataaacacgggccttggatttaataat

SEQ ID NO: 18047 - DNA, 734 bp, Glycine max
  unsure (1)..(734): unsure at all n locations
aatgttgaacttttgagaaacctagaaancacgcnaaaaanaaccgccgcgggcgcaaganaaagccacccccaaaaaacgcgcacttttttttttngtttacaacggcacaacggccggggaggngggaaacaaaancgaaacaacccacggcaacaaggagggcagaannnnaacggggagcccaggcaccacccaaaaacccagaagaggttccccaaagctcataaaaggtttacaccctcaacatctttcaaaacccacgccaacagggaaggctttaagtgccacccatttcaaaaacaccgtaaaaagcgggcccattttaccaggagttctgtactttctaaaacttattagaaggtctccaaaacttctcgtggttttttaaaattcctaaaggctcttgaaacacacccttccatcccccctcctttataaatacctcctcaaaaaattcaaggaaacccccccataatcaccctcaccatcttacaaatttatctatttcggggggccaccccccccttaaaaatccgttcgaaaaccctcacaacagggggggtcctaccacagtttattcgcgctgatcccccattacaaccaagaagtacccaaactctcgcccccaaggactctcaccctcgcacacctcctatattctaatcttacttcctcactctatcctacctcctctaacgaacttaccgtcactcgaccccacccaacatacg

SEQ ID NO: 18048 - DNA, 897 bp, Glycine max
  unsure (1)..(897): unsure at all n locations
acggcctaatncctttgagngacannncnnnaanaataacgccccctgcggtccaaaaaaaagaggaggggcgcccgncacntggggttaccttacgaacaccccaagagcgnnggcccaacacaaagtttcccttgaagcggcccccaccctctctccgcgggccaaagagggaagggacccgccgagggagggggaccttgaagggaacacccgtcgaaacctcgggaacccggagcccaccgagaatgtaagcccgaaactcccgcattgggtccgcccgaccacacggacggaagtggcccaaaaggcggaagtgggaaacaacagctctcgttcatcacaccaccccccacgcaacccccacaacgcaacccgcgcccacgccaccaccggcctcgcacacgcacgcaccaaccacccacaacagcccagcggaacgcccaaacacccccacaccctccaccacccgcaacgcactgcaccccacccaaacacaacgcacaaaacccgcgcacaccaaccccgcatcccacacaccgccaccagaacacgcacccacccacacacagcaaccgccacaacgacgcaccgccaccacgacgaaccagcaacacacacacacgaacacgcaaacaacaccaaaacgaacagcaccacaaacaccagactcgcaactcgcgcaccgacagccccagggaaagacacacaacacaccgccgaacccaacccacacgaaacgcaaccacgccggcaacaccacgccattaccaacacgacacacagccccacacacagccccagcgtcgggccaccgaacatacaagcccaacacgaaacgcaaactcaccccacacgagcccacgaaccgccacgaaacaccacgcgcacaacccc

SEQ ID NO: 18049 - DNA, 845 bp, Glycine max
  unsure (1)..(845): unsure at all n locations
ctgtaattcttgnanngggcngatctcattggacacagccgacgaagcttgtgattaacccgtactggagccctgacgtttttatttgtagaaacaaagcaaaggacacagggggcggtagtatttgtaacttgaagacactaatgtggataaaagaaagtcatcccaacttaaccggcctcaacctcgaacaaaagcccttgcttacagcagaaggctatgccactggaataactaacaggtgagttttacggttatgaaataacggccgagaacacgtttatattattatggaatcagaaataattattagcaagacttataacgtgaatattctacaggtcacgaaggcagcgcatattataaaccaaggccggatgatggggcgtttattacaaactttctaaaaggaattctctaaggaactcatgagagattaagagaaacttctttttcggggtggtttaaaacttaaatcctatcgataccacccctctttaaaccaaataacctccctaagaacaattaccacggaaaacacccctccactaatcctacatcaacctaatgctatcacatatacgcttttcttacggcgcgacacccatccacaccttagaatagctcgctgaaggccacctcccccacacggagggaggctacgctgctactctccaaccacacggaacgcatctccggcggtcctcacacttgcccaccatatacgcacgcatcatggttccgcacgtatatctcgccaggacgtgatttatggacctctcttcggaacctagcacgaccttataccgtacatacttgccgtggtgcgcctactcgactcttcg

SEQ ID NO: 18050 - DNA, 344 bp, Glycine max
gatctcaaatcctattgccgttaaagcaagaaaatgcattaggaatttggggagaaaatcaaaaatcacaagtttacccaagagaaaacctaaccaatgtgcactgcgaaaaatgggttattgacgcctgcaatgaattgaaaacttttttttttttatatttgagtccaatggcagcctagggctgctccactatagtgtgctattgacagctatgatctgttgttcaatttgatagaagatataaatgctgggagaaaactgttgcaagttgcaagttgcaacagtctgctaagcatatttgcattgataaattaaagggcaataattcattgatattcatg

SEQ ID NO: 18051 - DNA, 852 bp, Glycine max
  unsure (1)..(852): unsure at all n locations
cccgttatacccttgtaaaancctgttacantccagacgacctgcacgcatgcaagctgtattaccacttctaataaggatatcaacgattattttaattttcttaagcccaancncgggaaggagtagttatatattgaacactcctatctaaagcctaatacacgaaccctccaatgttgttgataacaacggcgaagatcaaaacgggtttgtgctgagccgagaccatgttgaaaaaataaataaatgggtgtcttttaacagcatgagtatctatgggttttagatgcgctcattgcagagctcaaccttatgaacgacctgttctttgatgtcggatagtagggtccaattacaagagaccaatgctgctaacactacttctagtatataagaaacctggggactgcccttgtgctcgcagtgcatacacaagaagggcatgctaatatgcacaaatgctgtaagatgggcacttatcctattatagagaggatttagcatttcagcttaatgcattaaacggttgaaactgtccntctcactctgaagacaacaacaaccatgactaaaggggtttgcaattgaaggaagcaagatagaaatcttaactggcattgtcgcgaaggacaaggtactcacacctcaagggggggctcgatattaaaatttggataaacgttggaaagttgttatcattggcccccaaatttttttattatggaggggccctcagatacctttatttttatggcatggaacctcggtcctttgcaattaaaaaaaccactaaactctcttcctcgattaggagaaatcccacacacatcaaatacaaggcctcgtcag

SEQ ID NO: 18052 - DNA, 391 bp, Glycine max
  unsure (1)..(391): unsure at all n locations
taacccttaaggtcagggtcatcgttgtaccggaggataataaggattaagtaaaggataaaccccatctatctctaacttcgccctcttcatcacatgtgcttgtcattgaaaaggaacttccttgcaagtggacacaacgacaatgacaaatctaagattattntgagggattccacacttgaagttctctcactttttcatctatgtttagctagggttctgttcttcacttgtttactctgaaatccacaattattttgagaattttttttatttgtttgtttgttggaaataattagtataaaaaaacacacctgggttctcattggattattttgaggtgtgaacttggggagaccaatgttggactggaaaatattgagatggg

SEQ ID NO: 18053 - DNA, 856 bp, Glycine max
  unsure (1)..(856): unsure at all n locations
catgttaaaaaccctgcagnnnacgngancctatagaaacgacccgcccgcgcgcaagcttgccgaaagaacctgaaaagagagagatttggttttttaccccaaagaaaaaccgcgggcggggtaccggtactaaacagaacacccgcacacagtacaaaaaaaccagaaaatgggagagagcgatacaaaatacacaaggggcacacaccaaagggagtcatgggcaccgaccaacacccacctgaatgggaagcgcaacagaacaactgaatatgaagaatggagaaaactacaataacccatattgggccccactggaaaggacactggcaaaagggacgccactatgccaaaggaaaaccctggaggctggctttgaaccctgcgtaaccggccccaacacacctcaaaggagaacgcaaccgccacgggaggcgccaagccacgcacacaaccgaacacgcagcaccaaaacagaaggaagcgggggcaaccaaacgaagcaacggcacacgagcacgacaccggcgaacacggggaggccatgcaaacggcccacacgcgacggaacagaccgaacgcacagacaaagcgagcgcagccgaaccagcccgacgcacgcaaacccaggcgcagcacgacggacccacgagacggggaggcgacggacaggccaccgccagcaaacgcgcggaggaggcgaccgcaccggcagacacagcgagcggcgaaggacagaccgcacggcgagcgcacgcgagcgaggcgcgagacgcaaggcgaggcagagcgacaggcgcacgcgaagcgcagcgcaaccgaacgggcgacgacaggcggagcagtcgcgcgg

SEQ ID NO: 18054 - DNA, 747 bp, Glycine max
  unsure (1)..(747): unsure at all n locations
agtcaggccttgtaaaccngcgcctaagaacacccgcgcccaaaggcgcaccaggcgacaggcggggccagttaattttaactggaaagaaacggacaaagaaccggccacgaggaaaaagccgcccccacgcgcaggcaagacaaacaaggaaaggcccnccgacaggaagaccgcgaggccccagcacagcccggcgccgggaacaagggaggggcgaccacaaagcggacgagacagaacggacgacacaaccgcaaaaggggaaaacggccagggcccagaccgcgcccaaaccgcaaaacaagcgcgcaaaaggggccccgaaaagacacgaagggaacggangcganaacgggggagggcggaggcgggaaaacgcggaccacgcagggagggggccccccgggggaacacgaacccgaggcggaacaagaaaccagagggcaagcccccgcggcgggggcgaacagggcgcaagacaaaaacgggccgcgcggcagaaagacaaacggcgggacaacaaccgcaaaaggcgaggggagggcaaaaaacggagggaacaaagaggccgcccgagagccggacagcgcccaaacgacacggaacgaacacagaccagcgggacacaaaggcgaaaacacagacaccaccacggaccacaaagcaacagggaccagcacgggcagccgaaacccacaaagagacaaccgagaacccgagcaaccggccaagcccagccggacg

SEQ ID NO: 18055 - DNA, 281 bp, Glycine max
acgacaataactttctactccgatgtctgactgagtcccataatacatcgagacgctcgaaattgaatgttgaagctctcagcaaatttaaacgacaataactcttttactcatatgtcggattgagtcccgtaatatatctagatgatcgaaattgaattctgaagctctaagcgaatccaaacgacaataactttttgctcggatgtccgatcgagtcccgtaatctaatgagacgctcaaaataggaatctgaacctgcgagctaattcagacgacaa

SEQ ID NO: 18056 - DNA, 146 bp, Glycine max
tccgagtaaaaagctatcgtcgtttgaatttgctgagagcttcaacattcaatttcgagcgtctcgatgtattacgggacttaatcagacatccgagtcaaaagttattgtcgattgaaattgctgagagctccaacattcaattt

SEQ ID NO: 18057 - DNA, 724 bp, Glycine max
tcaattaattcaattgtcagatcatggacaattggcttgtgaaagtgcagaacaaatttcgagaagatccaccggttaacgaagggagggccgcatttttaccgaggtagcttcatgtagctttctctaaaagcttcattaggaggctttctccaaaagctttattaagaggcttctagcacactccagacatcttttttcaagatcccaacggtcagatcatggaaagtgtcttttaaaggtgcaaacccaatttcgagaagaatcaacggttaacaaaggctgggcagcatttttacccgcgcagctttatgtagctttctctagaacctcattaagaggcttcctcagaagcttcccgtgggtttcttgaaaactttttaaaagcttgttgagaacttcatcttatcttcccccccctctttaactaattccctcctaaaattattccaaggaactccgcacaatacccactctaacctcttttatacgtattgatctcttcgggggctcaccctccccctttaaattctctctaaattcttcttcaacaggtgggggctccaccgttactataatacccgtggctttctcccgtcctccccgaaccttacacaagtttttccctatggctgctccccaccgtcaccatccatgcaatttatcctccttccgccccctccccctcatcgcggaacggtatcgacgctaatctcacccaatc

SEQ ID NO: 18058 - DNA, 228 bp, Glycine max
  unsure (1)..(228): unsure at all n locations
tgtggtacaaagaagagtggagggcgccgccattggcgtccnttacgaactccatgagcgtgtccaacacaagttccttggacgtctcatctccttgcggcaaaatgaggacgtcgaggagggacttgaggaactcgtccaacttggaacggagccacgagaagtaactgaactcggattggtcgccgacgacggagggagtggcgaatgcggagtgggaagagagct

SEQ ID NO: 18059 - DNA, 855 bp, Glycine max
  unsure (1)..(855): unsure at all n locations
ctttaatccatgtanaatcgtgatncttttgntcancactgacggatgcaagcttgttgcattttacctgtgacgaaccaacatagttattagtttatgtcgcccacattgctctgggcatttgtagttgtggaactttgtccgccttcctcataaaacgcgcacaacagagcgtttctagatttagatgcatcaaaaacctttgctttgataaaggaagctaggccccgggaaacttaatctatgaccccaaggttaatgtagaaccgggcaaaacagggaagagaaactcgtgaccctgccagaaccatactaagaaggattccgggcttccttactacgtccttgaggtaccacacacaaagattatcgattcgatacattataattactggcgtaaaatgagcgaatttgggggttcgataacttatgagccaacacgcttaggtccacaattgtggggggtaaaccaaatccaaaacctagaaatggctctccccatttccttcgggatcttcaatgggtttacatctcccaatggcggtgggggctaaccttagcctttggacagaaaacatttggctaaaaatggggtacatctttttttccccagcccccacaactctatcaaaattgggagattatctctcctcggtggaaaaaacaaactttttgtggtctccaaacactgagatctcacttcatgaaggcgcaaacactcccctgggattaaaaacacggggtgatctttaaatcacaccctaacccattgattaaaacctcggtctgaaaaaggagaccccttggcccccgatggaacacaaaagattgtgtagtggctcccccaacaagacg

SEQ ID NO: 18060 - DNA, 640 bp, Glycine max
  unsure (1)..(640): unsure at all n locations
ntgagccctagagcaacgcgaccaagaaactcaagcttcctgaaccagcaccacttacgcagacaaattgtttgttaagaagcgacagagngacggcagggcgatgaggaacccgaagaacgaaacgcccagagagaaccccaaagggcacggggtcccgcttaaaacccccaagcccggcgccccccccctctctctccttccctccaaaagcatcctcccaagcccctatccaggcaaatccggggggaaagccccctctccctggctatccccaggggaggggcccccccaccctctctccttgccttccgcgcatccccaggtgaaaacaccatgaaaggacccatgaagccaaaaaccaccctccagaacccccaagccaccccaccaggggcataaacccaaaacccaagagggcgcccaaccccacaaaatttcctacccccccccaaggggggcctaaaatccccacgacccccacaggccgggcaaagggggaaccgaacctaaagtcccccaaaaacggcaaaaaccaaaggatccaagggaaaaaccggccggccagaccagaaagggaggaaaggcccccaagcggccgccattcgggccggggagggcggcccacgacccaaaaacg

SEQ ID NO: 18061 - DNA, 252 bp, Glycine max
agcttctgtccctgagaaactggttcccagatgacatagtggagttgaagatgctgaaaaccctagccttgcaacaagtcctagggaagtagacacggagatggacaagaaaatccgcagtattgtgagtagcattttaaaagacgcctctgtttctgaagctgatgaagatgttccaacatcttccaccccgaatgtttgtgtgcccgatgctaaaaaatatggggcaacatcttaccgcccaagtgctga

SEQ ID NO: 18062 - DNA, 456 bp, Glycine max
  unsure (1)..(456): unsure at all n locations
gctaaagtatgcccgatcattcatctatgaatgngttgaatgttggcgatcagaattgccattccttggattatagggttgaaccaagctcatgcttttacaaaaaggttcatcaagtcaagttgaaatatggaagtaaccgtcttgcaaaattggggcaaaagatgaatcgagtcacatcactgcttcgtctactgccaaacatatttaagattattgatgtccttgttacttccagtttcaccttgacaaagatgtcatggaccatgttgaaaatctaaattgattcaaccccatatcttgcgtaaaaattcgcaatactttaactgtacattattcgcatgcattcatgcttttcattgggtgcattggtaattgcttcttttctttgaaaaataaataaaatggacttaatcattggtttaaaaaaaaagggacaccttttacacgccctta

SEQ ID NO: 18063 - DNA, 300 bp, Glycine max
  unsure (1)..(300): unsure at all n locations
agcttgcctaattaacctgaaattgagagaaaatgattanatacacacaaaatgaaaatactaagtatttattacctatacttaacagaaaatacttataacattacaaaataaccataaattgggagagtttgatacaatttatacaagttttatacactaaagttagtcattttcaccgactaacacctacctgaatgggtaagtcaaactgaacaactgaatataaataatgtataaaactacaataacccatattggtctccactgtagtggacactggcaaatggtcgtcatttt

SEQ ID NO: 18064 - DNA, 372 bp, Glycine max
tccatattggtataccatgctacagctgctccggtcattgtcttgaaagaaatggaccaagaacttttcatccgcagaatacgcccccatttttcggcaatacatccgaagatgtcctttcggacatgtcgtccctttgtacttatcaaagtccggtactttgaacttgggaggaatgacgatattgcgtacgagacataagtccgctagatccgagaatgggtaattgccaaggccctcgactgctctcaacctctcttcaagcgccttaatctttcccttatcttccacgaagggaacggattcttttacgggtgtgggtgaagttgggatatggcggactatgtttggttggggtagttcatggggaga

SEQ ID NO: 18065 - DNA, 297 bp, Glycine max
  unsure (1)..(297): unsure at all n locations
atggggcaaaacacaccaaatgattatgatgatggaggctaaattctacaaaggtaagtcatcactttaaattgacttcaaactatatggctgtaaggagaatcaggtttcagtcacaaaagtaagaactttattttcaacatacccattcttgacatatctatattcaaaaaaacatcaagtctacatgccacnaattgaccaaatataactaaaatcgatgaactacacattacaattacacactacaaatacaaaccacaaactacaaacaaaacctcccccatcttacaccat

SEQ ID NO: 18066 - DNA, 354 bp, Glycine max
  unsure (1)..(354): unsure at all n locations
tgggtgatgttgcgcgtactgatgggtaccattttgtgtttgctgggntttgacccacgcagttgttgaagagacggcatgggcatctccctccttcctttttgcccctgttgccccgattcttttggcattcgcgtttgtggaggaaacgtaatcaaactttcctcttttcaatccaaactcgattctttccccggcaaacaccagatccgcaaagctggacggcatgtaacctactagcttctcatagtagaacactggcagagtgtccaccatcatggtgatcatctctctctcaaccatgggaggagctacttgtgccgccaaatccctccatcgctgcgcatattcttt

SEQ ID NO: 18067 - DNA, 267 bp, Glycine max
tgaatggttcgttcagtctgaccatctgtttgaggatgataagctgaactaagcttcagctttgtccccaaggcttcatgtagactcgtccaaaatcgcgaagtgaacctcggatccctgtcagatacaatactagaaggaattccatgcaaccttactacttccttgatgtacaactccacgagtttctccattctatacttcatattcactgggataaaatgagcagatttggtgagtcgatctactatgacccacacagcatca

SEQ ID NO: 18068 - DNA, 363 bp, Glycine max
gacactatgaaactcagcttctcaggaagttttcttaagaaagctcctcatgttgtactctgtctataaatagaagcatgtgtaacacttgttgtaactttgatgaatgaaattcttatgagatacacttcaaagttccacttctttccctcttttattccttcaatttcgtgctccccccttttctctttcttttcctccattaaagcatcctcttcaagcttcttatccaaggcaattcttggtggtgaagctccttcttccttggcttattccctagtggatggtgcctcccctatcctcttctcctttgccttccgctgcatctccatggtgaaaaatcaccattgaaggacctcattg

SEQ ID NO: 18069 - DNA, 995 bp, Glycine max
  unsure (1)..(995): unsure at all n locations
ggtacaggagaggaaagccaccacacggcgagcagccagcacacgacggaatcatctacccccaacaccgacccacacnnnaggttgagccgggacacgcacccccagnagacaacgcacgcagcancaaggggcgcaacccccaaagagaaacctgatgtttaagaaacggaaagaaaaaacgaacggaggggggaccgggacaacaacgggagaacaacccacggacgacgacaaaaaaaacnncaaagagggggagaggggggacacaagaaaaaacagagcgancaaacaccgaaaagggaaggaaaggcggcagcgaccaaacaccaccacccggaagggggngaggccgaacacgaccaacagaaaaggaaaaacggaggaaaccacaaaaaggcacagggacggcacaggagaggaaccggcaaaagggcagcacagagacaaaagaaaaagcagggagggacgaancagaaaccacggaaaaggaagggaaacgacaacgccgaaaaaaagaaaanaaagggggagggggaaaaaaaggaaccgaccaaggaaaaaacagacacacaaaagggaggggggaagagaanacggggcgagaaaaaaccaacacgggggaaaaagaggcgaaccaaagagagcgcggaaaggcgccggacgcaaanccacaaaacacagacaaacacaaaagaggaacgaacaaggagagagaaaaacggaagagaaacagangacacaaaagcaacgagaaaggcggaaagangaaaaaacgggaaagggaagaggaggacgagcacacgaaaagagacaacggaagaggcagagaagcggaaacgcaancaagagaagaaaggaagacacagcgaaggggaaagggaacgagaaagagagaagacaaaacgacaaggaacgggaaaaggagggcaaaaggcgacgacgaaggaacggganagcgaagaggaagacagaaaacggaagaggaaacgaag

SEQ ID NO: 18070 - DNA, 126 bp, Glycine max
gaaagaaaaggaccaagaaccgggcattcgccagaaacgcccccatctttcggcaatacatccgaaaatgtcctttcggacatgtcgtccctttgtacttatcaaaggccggccctttgaacttgg

SEQ ID NO: 18071 - DNA, 719 bp, Glycine max
  unsure (1)..(719): unsure at all n locations
cccccggtcagactnctagtaaacagaccncnnnanaaanaaccctcgtgctcgacaagcggggtgcttaagaggaaacattgtttgtgtattgacagacagaaaaaacccccaggcaccctttttgctaaaaagaggcatgagggaggcttgataaacggttccaaggttcaacaatttacgattttgatagcatagggaacggacaccaccctttgctgatgcgcttcctacatgcaaccgtcctccgactgctcctcattcaacgcacggcgtggtggggacgccactccctccttggctgattcaacgaatgggagcgcgtccacccacccttatgggtcctgcgtgcgcttcatccccctgcgtaaaatcaccatcgcatgaccacatcgatctttctggacagccactctaacagctcccctgggctctaacctttcttggcagggaacacaagacatgaacaagacccccattaacccccacctactggctttttaccataaagcactggagactttcaagttccacgcctacgacccttcctgtttaaagtaaaaaccaatcttggccacgccctcagaaacccccgctttaccaaataaaaatttattgagaaaatcccgtaacgaccttgccccaaataaacaatcttgaacaccgaaatccattagcccccacctgccacttaaaactcccccgctaatccccaaacc

SEQ ID NO: 18072 - DNA, 733 bp, Glycine max
  unsure (1)..(733): unsure at all n locations
cgtttaactttagaggcggctttagagaacgccgccgcagcagcttgctatggtacggaaaggggnggttttttttntgcagagcngccggngaccagggatccgtcgcaatgacacacaaacaccggaacaccagggtgtgtcgtggtgccttagaggaactgactaattaatgcgttgacttctgtccgcattcatacgaaactgctcgcatatgaaggtgaattaatactcatagaacgcctttgcaaaaaaaaagaagaagatttaagaccctaccaatcacggcttttgtaaccatattactgttcatggtggaaacataaaataggaccatttcttacaacttctatcacagttcaacacccatttatttataccctattgatacataaaacccacatataccatcgcccttggacttttatccccagaatccacgtcataatcttttcctaagcaaacgtcccttataaaaaattaatgagaaatttaatattttagaaaataaaaggattagttatgacaacctcttaagaaatttattgtaaaaattgtggaaaagagtatctctaacaggaaaagtttcacagctgcaacggacttttggtaaacgttttggatttcaaaaactcaaaacattgggatgatatacgtaaatgttaccctggctggtgactcaaatcttctattaaggacatgtatcgaaattccctacccatctcaacctccg

SEQ ID NO: 18073 - DNA, 721 bp, Glycine max
  unsure (1)..(721): unsure at all n locations
ncgttatnccttgagaagcgcccactaaaatacctagctgcctgacgagactgttatgaacaggggactgatcttttttggccctatagagagncaccaaacattcctctgtgccgtaaatatgccacgacggaggctgggaaaacgctggccatgcccaacatagtcggcttgtgacacaacacggattcaacagataacaaaggtgcggcgatgcccaatcgcaaccgccttccacacatacgtccatcctgaatggcgaacggcgcccgacactgaattagcatctgacgcaaggatgcggaatcggacaatgcacccggagggcgtccagtagaagtgctctgacgcccatatattagtctaccattaccaatatcacatctgctgacgagaaaatttcaactgatcatttgagctataaatttctttcaaaaggaagaaagttaatgaacaaaaccaagataaaatcaacccattactgccttttttccattaaagcacttgaaaccgttcaagttcaacccttaagaatctttcccttttcaaattaaaaaacatttcaaggccaaccccttatgattctctcggttttcaaaattaaaaaattgttcaagaaccaaggcctaacaaactttgtcggcaataaaacaaactttcaaaaaataaaaaaatttacacacaatttcaaactaaaaatacttggagaattcccaccgcg

SEQ ID NO: 18074 - DNA, 835 bp, Glycine max
  unsure (1)..(835): unsure at all n locations
ttaaaggaggtgntatctataanggngnccaccaatcacgaattatcgtcttctctttccatcattgggnggtaccaacctgggcgcgccaagatcccctccaccttttaagcggtgttctttgaaaagatctgtccccctttttgcacatgttatgtaattgcatcctatccgaaaccatatcaaaattgtactgatactgcctaacaaaggcaaaccatatgtccttccaaaaatgggactcggaaggttccaagttagtgtaccacgtaacatctaccccaagaagactttcttggaaggaatgtataaccantccctatacttttgggaattcccaatcttctgacaaaacattttataatggtcttgggaaacaaatttttccttttaccttgacaagtcacacccctttaacttgggaagggggatagattataggctataaacaacactttttggtgtaaaaagggtataattttcctccttttacagggccccgaacctctttctttttatatttttcccataacaagagggtttataacccgcggaaaatgggcgggttgtggnctccctataattacactatntcaacgtggtgatcgattgtttacctactactgttcgctcttctctactaatcatattattaccgtcaccccattcgtcgccttaccttaaactacatctaatagtgcacaccacacctccgcaatcatctgtctattttcttcccttatctcctacgaccatgctaatccctaaaatcctgccctcctagtcgttttaattgatgcccaaagacttaactttcttcttatctatcaccccg

SEQ ID NO: 18075 - DNA, 342 bp, Glycine max
tgaaggcgtgtaaccaccttcttctcatagagaactcctgatacgtgtatactatcattgttatcatctccctctccatcattggggacactacttagtttaagttagtctaaacctaggagggctatctaaattaagcctagtccaacaagagggatctgaagacaaagcttggattgattcagtctaactagggatcgaggtttagtaatttaggctacaacgtagtacacagaatcatgattgattagagaaacatctttatatacatcagctggtttgttagaaagacccaacacctttacctactgctgtcaatcttacttacttgcatttttacta

SEQ ID NO: 18076 - DNA, 842 bp, Glycine max
  unsure (1)..(842): unsure at all n locations
ctgatggcactgcanagcggacctctcgacagccgccgcagcanggagaaggaaggtgaaaagagaaactttgttattttcccccaccccccacaacaaaaggggggaaattttattggtactgtagaacacctgaacttactctatctacactatacgggtagccattatattaataccaggcacaccctaaaattagagaacattgagcttggagggacaccatacgaagccgacggtctttactccattgtcgcccatgcaaactaaaacggaggaactgcggggtgaaaacacagcgctatgctcggaaaccaggtggctgaccccgaggccaaatttttttaagtatattcaccccccgcctacacaaaatttaatagggttgggactggctaggacaatcttgtagtgagtggaacctatcttgcttcttttacaacatttctcattggctcttaacagggggttaacccccccttcaaccaccctttcacggttatccatcacccctcggtagtaaacgtcaccgaactaccggagacggatcttacgcattcgtcgaaaagcacagattagctccgtacactggagaggtacattgagcgactccgactgaaagcatatcatgctgctactattgtagtccgcaaataacttgtttattgacggtcctctaatgcgtggtcaccgctaacgcaccttttgttctcccgccaccgaatcggcattgtgtctcggtgtctgacacgcacatgtaaccatatccattgggagtagctacctctatcgctatacgtatactctacagatgtgtacgtcgtatcgttaactgtacgaca

SEQ ID NO: 18077 - DNA, 317 bp, Glycine max
  unsure (1)..(317): unsure at all n locations
tattaatactacctcgtccacttcaaagcagataccagaaggcaaaggttcnatcatgagttttatgccaaagtacatatatcaaaaaagagtttaagtaaaggggtagacatcaaaagttacacacaacttaaggatcactataggatgaattgctaaagacaatagtgatgatgatagatgtgtctacacaatcgagaagcacacaccaaaagttgtaaagacaaatgtcatgcaacaatgcattgtctcgatgaagctctcttgatccaatccggctatttgaaagaaaaaaaaagctaaagtttgctttgcag

SEQ ID NO: 18078 - DNA, 326 bp, Glycine max
  unsure (1)..(326): unsure at all n locations
agctattatcactccacccaaagcttttgttttttttttatagacaaaacngcggaccaccgcgtaaaagatgtgcaccccgaatacaatggcatcttggaataaccttctattgtatcatacagaggagcatgcgctcgctcaaaagtctcttggcaagatcatggatcatttactctgtacgctctccggtgtcttcgtggctccgcttgatctgaaaaacaggtggaatgtctggcaagtgcccatgccatacccatcttgtgtaattctgaataaagtacgaacatatcagatgtgatcggatttcatcaactgactgtcat

SEQ ID NO: 18079 - DNA, 317 bp, Glycine max
gcttgtctttttagggtatacgaaagaaggccctattaattatttatttaatgactgccctcacgtactgtctcgtggggggtatgaactgcttgacaagaaacttatggaggagaagagcaagcgtggacatgaggaacattcgtgtactgaaagcccaacactcaacttcgacccaccatccccagttgcaagacacttgaagtggaaaattgcccgtactaagcggcatggccaaatgacgtctgaagtggcacaagaaattgcagacaaaattgtcagttcatatatttttttggttactgtcattggcaaat

SEQ ID NO: 18080 - DNA, 390 bp, Glycine max
  unsure (1)..(390): unsure at all n locations
catgaattagctaaaacatctaaataaaccgagtatgtttttataaataaattaaaaaggtattgagtaaaattactctatcataatctcctctcacacattttctaacataaactacatcagtatatttaaaggtaattattaattataaattagtaacgcactttgacaaaaaaaaaaaaagaagaaagaatttaatgtacactaacaaattctactggctttttgttaacgcatatntactggttctatggttggaaaacataagatataggaacacattttcattacaaacttcttatcaacagttcaacacccatttttttttatatctctattttaatatataaaatacctatncatattacattggctctcttgatcttttat

SEQ ID NO: 18081 - DNA, 392 bp, Glycine max
  unsure (1)..(392): unsure at all n locations
ctccctttttgctataaataagcatgagggaggctgaataaagggttccaaagtttaacattgaaagatattgagaaaagaaggaaagaagagaaaacaaggctgaggcgctaccgaattgcaaccgtaatcgacttctacatcattcttcattcggtgttcttcgttcgtcattcagttagtatttgttttaaggatttggatacggtctatgcacccttaggggtccttgttgttgctttgcgcaccttcatctcattcttctaccattagtaatatcttttcttcttgtaagtaaatttcaactgatcatttgtgctataaattttctttcanagggatagaaagtttatgaacaaaaccaagataaaatcaacacattacttgacttt

SEQ ID NO: 18082 - DNA, 370 bp, Glycine max
  unsure (1)..(370): unsure at all n locations
gcttttcgattcattctatgtacccgnaggggtatttattgtgttttttgcaanncatacncgggggggtactttttataccccctcttgacgtgcttaagcgcgtttacttaagtcatttcttgcttaacttaaaaataaaataaatttccaccgaacggttgaattgtattatccattatactttgataaaataaaatgcgaccgttcggacgtgccgtaaccacgttggaaatcaaaaagacgtgaaaaacatagtgatataataatcaaaagatatctttttagtcaaataaagcggaaaatcaatcggacgttttctctttgggatgtctcattcttaatcgaatcgattaataactaaagtgaa

SEQ ID NO: 18083 - DNA, 364 bp, Glycine max
  unsure (1)..(364): unsure at all n locations
tgagccttttgtaaatggcgacataaagtagcatgttaattgttttgtgnaaccaacaagtcatcaactacttctgcctgaaaggtaccctanaggtactggggtattgacgatgggagcttcccataagtggcttcggatattgaaataccagtgctcaaatgaaccaaagtattgtatgaccactccgtaataggaagatacttgaaccactatgatggtcgatcatggacaaacgaatggaagtattgctctaaaacatggttgaggacctccatctgtctatcgatttggggatgataggcagtgctcatccatagcttcgtcccacataagcgaaagagtttccgccaaaaggcactta

SEQ ID NO: 18084 - DNA, 203 bp, Glycine max
gccttattacaaaaaacaagggtaaattagttataatgaatgacagaatttaaaatatgcctatattgcataaacaaattaaactcgatttttataaaagttaacacacctattgtcttttatctctattataatggtaaactatcacaaactacaactttaaaacaaatttataggtcagattaaacttttatataagtcaa

SEQ ID NO: 18085 - DNA, 355 bp, Glycine max
gatcttcaagcacctgtgctaattacttgtgcggaaggttaacaattgttgaaatcggacttagatatattcaggaaactcgaaacatattaggaagaagccttgaaactctgtatgacaaaatcaggagacaaaccattctactacagtgcatcaatcccaattgcggaaccagatgtcaccaaagcaaacagatcaagaacttcaactgaaggcatctcgcgacgtaaggtggcaactgtgtatcacttttttatgtggtaaaagtcctgcgtggttaaattgtgcagcattcaaagtgttcaaacatctaacttttttctttagtttttttgtggctacattttctcttttg

SEQ ID NO: 18086 - DNA, 757 bp, Glycine max
aaggtcggttgtatgttctatttccgctccggagtatgacagtcaccgctttatgagcgctgtacaccagcagcgctttgaggccaatcaaggatgggcgtttttctggggaccgacccttccgcttaaggacgaacaatatactggatttcaagaagaaatatgggtgccgcagatgaaaataacgggtacctccattggccaattccaacccaaaaatttcctggattttttccatgcgtcgccacaaaggagggggcgtgaaaatgagacctgggaagggggacagggaacccttagaccgccacctatcgataacttctggatatccgtggttgcggaagaggccaaaaatgtagtatggccgaggaggaaccttctatgggttctataggaggccactcccagctgctttttaccgcgcaatatttcccccgtctgctgggggagcgagtgcaatctccgcccacatgaccccctgcccagaagggatacgtttctctcaaaacatcctgccaaagaattattcccactcccctgcaaatgtcgctgggtcccattctacctgagcacatcagtcgacaaaaaacgggcgcactatattgtgtggcgtggccacaacgctctggatccattaatacattgtcctattctctccatattcacccctctacactttgatacctcctacgtccactgctttcatcgccactcacatcgcgtcatgattacctcttacgtgcatcttgctcatccg

SEQ ID NO: 18087 - DNA, 289 bp, Glycine max
caagtggtatcggagcacaagagcttcaagttgtttcttcttaaacctccattaattttttgctttaccttctcttccattggtggttcttcattttctctccatgtatctcctcacatgtcttgtgcctaatgttgttaacctgattctttagagtttccacctattaaacttgctattaaaagcacatttgattttctatggttcaaattttttgttcttgttcttgaaccatgaattgtgttgagtctatgggcctttgagttatggcatggtattttttgtggct

SEQ ID NO: 18088 - DNA, 351 bp, Glycine max
  unsure (1)..(351): unsure at all n locations
agcttttgacggactataccaagctcnatgactcgttattgagaaagatctatatataggcttgctaaggatagagagaggaagactacagatttggatcaagtaaagtgtgttaaggatgaagaaagcaaagtcttagtgcatgaaaaagatattaaggaaaggtggaaggcgtatttccacaacttatttaatgatggatatggatatgactctagtagtctagacacaagagaagaggaccggaactataagtactatcgtcggattcagaaacaggaagtgaaggaagcgttgaaaagaatgagtaatggtaaggcggtggtgccagacaacatacctattgaagtg

SEQ ID NO: 18089 - DNA, 435 bp, Glycine max
  unsure (1)..(435): unsure at all n locations
tgaaccaaaaccggtgagagtgtgaacttaaacggtgagntaacgactagctgngagtaataatctttgaatgaatctctgaattttagaatgaaatgtattaacgagaacacgtgaaggccatgattgtacatacacaagccttttgaccaaaaagcttaccttgaatgataattatatcctttgcaccctttttgagttgaatgatattgtcaaaattttgaaccctgaacttaaataagtatctcctgataccttgcttagattctaggagagcatatggttcaaggaaaatttaccccaaatttgggggagtggaactaattgtgatgcacagaaagagagaaagcattagcacacacaacacacaagttgtntgttccaaagagagagagagagagagagagagagagagaaaaaattaaagattaaatg

SEQ ID NO: 18090 - DNA, 722 bp, Glycine max
  unsure (1)..(722): unsure at all n locations
tgttgacattgataacnttcgaaanccggaccatttagaaaacgcccgctgcaantttttggggggaaaagggggttttttacttttttaagaannnaaccaggggggccttggtttaaaaaaaatgacttccacctccccccaaaaaccaacaataaggggaatttaaagcaggtttaagccatttttcccaaagaaaggtatttgcaaaaacattcttttaaataaaaaagggcccaatcaaaaaagggcctgcaatcccaaaaatttcaggcctccaagggggttgtgattaaacaacaccccccggggtaatacaaccccccccaaaaatttggggggcaaaaacgccacccgcctatgggttttaaaccttaaaaaacaattaaggaaattgcccccccggaaggggcaacttttcttttttttcgagatggggcaaaaaaccaggaaatgaacttttttttgtgggaaaatggtaaaaaagagggttttttttgttgtggttccaaaacacgccagtttatttgtttgggagattgtccaaaaaatttttccacccccggtttttcaccaccaatttgctcaagggtttttctcttacaacactatggaagtaaccttaaatggggggggaaaattggggggcgaacctttgccaaaagggacacaatatacgactttgggtgtagtacataaattccccgccgcgaatcggcccc

SEQ ID NO: 18091 - DNA, 412 bp, Glycine max
  unsure (1)..(412): unsure at all n locations
tcaaaccacagcaacacaaactctagggggccttttcctcnttttcaatgggctatctaggcttgaaaagtgaaattgaaaatgacgtaaatttgaagcaaactctcacctcacacaagtccataacatcaatctaaacttgctcaaactgaatttacacctaaaattccaccgaatcaaaatttgactcctcaacacccaattttgccctaaaaatggctcttggttcactttggtcatttgtttttctctctagctcagcctaacctttctcacatgtcctaaatgacatttcaagctaggattaactcattttaacctccatttaccacagaatccagatttagcctttcaactctcaaagcctcactctttttccactcataacaccacattctcactgtctaaccct

SEQ ID NO: 18092 - DNA, 819 bp, Glycine max
  unsure (1)..(819): unsure at all n locations
cgcttaactatgacttgacaagcgcnacntaaggaagcagccgccttcaatcttgttgtgcaccatcaaccagacctctttctaggttgtttatggtgaagggcaccccccgaactactacacgctttgtaatgatgtaacctctgaacgaagattctctctgattttattgatgacctccaactgtgacctgtacataattcgcaggggtcacgagaccttggggacctcccgtggggtgcttttgaccgacatcaagctctacctgtctcacctccccaggccttctctgagaatgagaacatgtttcgtaccttaaccggcgatcgtctgacggtcttcaaatcaaaagaggacacgacctctgatctaggacccttgagggaggttgcaactcttattttagtttgtgatatgagagtggcctctggcaatcgatactctagtggggcattatactgagcttaaattgttacagggggtacatgggaatgtaactattaccagggtgtaatctcaccctcgttaaaagacgctgaattatgtcgcctcgctttctctacaaacaatggtctatttaactgtatctagaaacttaaaatcttcctttttttttatcggataattttcatttggtcataaactttctgactgtataaggatttgactaccctactttttgtggtctcttcaaattcctttctatatttcgcattttatcgctatggcgtgttgccctatcactactctcttctttattctatcacttctgactgtatctcgattgctctctcatgtacgcactactctataccctca

SEQ ID NO: 18093 - DNA, 867 bp, Glycine max
  unsure (1)..(867): unsure at all n locations
acacgccgcgaaccaaagcacagtcactcacgcaccgcgaatcacagccacaccacgatacgagagagaaacccaacctcactccccagacnccacccccaagggcctgtagtcacgtcactgcaacanccgcgacaccnaaaaaaaccccagcacgnnaaggagaagaaacaagggaccaacgcaatttattttttaaaggacgccggaaccaagcaagggcccagaaaacaaacaaagtacccaacgaaagccaaaaaaaggggcccagaaagcgaacaaaagccgacaaaaagccagaaacccaaaaaaacccttcggggccgaaacaggggccgaatcaaccaggcccaggctaacagaacagggaaagcccaagaccacccgaaaaagaaaaaccaaccgaaccatcccccaggggagccactgggggaaagaagcgaacacccctacccaaacccctatatccgcggaaacacagggaaaatccgccccaaaccaaaggacgggggcacggggtaacaaaaccaactgggacctggcaaggaaacccacagggaggcccccaccaacaaaaacccggaacaaacaaccgagaacctgaacagccaacaacaccattccaaaaccagccaagagccccgaacagaccccttacgcgagccaaacagagtcgccaatgacaccccaaaaagaccccgcaaaaggggaacagaaccaacgacatctaacaagcccctcagaggcctttggccaaaggacccaaggggcaaattggcagacccacccggaaacacgcgcaccaccccacggacgagggggaaccgaacaaccagacctaccccaggaagagggggccccccaccc

SEQ ID NO: 18094 - DNA, 291 bp, Glycine max
agcttgcaaatctatttttaatccatgcccataaataaaataaaatctagataagataagataagataagatctagatgaaatcaaatctagataagataagataagataagatctagatgaaataatatctagatgagatcaaatctagataagataagatctaaatgaaataatatctagatgagatcaaatctaaataatatataaatgagataaaatctagataagataagatttggtagaataaaatagtctactctctccaagtccaagcccaattctggattca

SEQ ID NO: 18095 - DNA, 291 bp, Glycine max
agcttatgaatggttttgtctttaacacatcacatgctagaaacttttgggctttagcttagaatgttggatcgcacgcaggtttactccacctcatgctgaaacttagagcctgtttgaattgagaaactacttttttctagataattttaaaaatatcacttcatatatattttcactccatttcctattttaaagacacagaccaatataaaataattcattgtttcctgcccaaatatttgaaaactggaaataaagtaaaaacaaggcgtcatttttataactatt

SEQ ID NO: 18096 - DNA, 290 bp, Glycine max
agcttgtaacgttaggcctatttgtggcaaagtaggaacaataacacatttgaatatctaaattatgacaatttagagacttagatttattttgaattttcaattgctaaggatatagtgtacaatatcttctaatgaaacacaatggattaatgcgacttacaatgccattttttaaactttatttgagaagaaaccatcaggatatgaaacgaaagatcctttacatttttctcctccaatctaagtttctaaatctttacttctacagaatactttgtctacattga

SEQ ID NO: 18097 - DNA, 287 bp, Glycine max
agcttataagctcattttattagcataaaaactattttgatacacagacttattttgtttgtgaattgtcattgtcacactatttcttaatattaaaaattatttgaatcatatcaactttacaattatttgctgaattatttttattttaattatataatctaatttaaacaaaatttcaagtatatatgatgagttttaaataaaatattttatttgtatcatgttttgtggtcatgcaagcgaaagatatatacatccaagttatttttgtataaatagaaaaa

SEQ ID NO: 18098 - DNA, 206 bp, Glycine max
caacggaacggggcaaaccacccccaaccaagaggaatcccgcacaaacccaaccccacaaaaaaggccacgcgacaacccagaaagcgcgacaacccaaagcacaccaaacatgacgcactactacgcaaaaacagcaacaaaaggaagatgccgaaaaccccccaacacccagacggaagggagacgcacgaaagcaaacacac

SEQ ID NO: 18099 - DNA, 274 bp, Glycine max
agcttgcacccgttcaattagaatgatcatttggttggaagtatgactggacttgctcttcatctcgtcagaatgaatgtgagggaatgcatttatcgtatctcatgtgagtgggaaccttatatgttgagagaaacgactatcgtttagatctgatttttgcttaaatctctgaagtatggactaaatgcatggaattgacgatgacgaacaccgtgtttgattgtgattgccacttaaccaaaaagctgaccatgtgcttgaatgaattatc

SEQ ID NO: 18100 - DNA, 97 bp, Glycine max
agcttgacttttttctatcgacccgggggatggtaaggccctagagcactttgttagaacctaggcacgcaatcttgtctaagctggcttattcata

SEQ ID NO: 18101 - DNA, 291 bp, Glycine max
  unsure (1)..(291): unsure at all n locations
agcttgcgttttaacatttgaaatcaaatccaatacaatctcattcaaaagacaatgatagctcactgtattgttgatgacttgagtttttaaatttcaatacccaaatgntatntttcttccacatggggtgggcggggggggggatatgctnatctctacacaatgatgggatatgttactattactactacataatcaacttaaatcattaattttctaacttaacatgaataatatttgaacaacatgaatctagctacctaaatcgcatgatgattcaattcaaat

SEQ ID NO: 18102 - DNA, 313 bp, Glycine max
ttgcgtcgagaatctgaaatgctgcacatgtacgaaggcgaatcagtgaattgatacttagcccacacctttaaaattgctaaaagtgtgagtgcgtgtggagaaagcttgtgagagaacattatttgtgccaaaaatcttgcggtacatgattccgaaatttaattatgttgtgtgctcgattgaataatccaataatttggacactatgacaatcgatgaactacagagtagtcttttagttcatgagcataggatggtgtgtcatgaaaaggaagaacacgcgttacatattacgcatgatcatagggga

SEQ ID NO: 18103 - DNA, 126 bp, Glycine max
agctgagaagcctaggcttttttcttgtaaactagtgaacaaacacgcactttgataagcttgtgacattgccatttgtcagacttttgacttaattgtcaaaaaattaaattgccatcagatcta

SEQ ID NO: 18104 - DNA, 282 bp, Glycine max
agctttcaactaaatttacaatgttctaatcaatttcaaaatggtgtaatcgattacaatatattggtaatcgattaccagtgtgtttgaacgttgaaattcaaattcaaatgtgaagaatcacatcctttcacaaaaatgctttgtgtaatcgattacaatgatttggtaatcgattaccaatgataagttttgaacaaaaatcaaaagatgtaaatcttccaaaggttttcaagtttttttaaaggttataactcttctaatggttttcttgactagaca

SEQ ID NO: 18105 - DNA, 375 bp, Glycine max
taatttatataaaaaattgaaatgtttgaaatagatcatgaggagtaaaatcacaaatctctaaaaagtgagaaacaaaaaatctcatttaaaaaatggaatgattaaaattatgaaattttaaaaaatgagaagacaaaatgtctcaattaaaaaatagaggaaataaaattacatatttagaaaaataatgaaataaaaattacattttaaccaaatttatttattaatattttaatatcaatttctattaatggagtgatattattgataatagctattttatactttttatagtaattgttggtgtagtattgattggcaatgactaaagccttatactataaaatacttttagaaatgttctacactttt

SEQ ID NO: 18106 - DNA, 286 bp, Glycine max
agcttctagcctaatggacttaccttgaattaattcctttgatagcccctttgagcctatgttcccctttctttgttttgaagctcattacaagccttaagtgaaaaaccatgataacaccttaaccttaaggaattttggagctttggaattgttttgagaataagtgtggggggtatgtttcattggaagatatgatttttggccatgcttaatgttttattttggccatgcttgatgtatatatatattgcctagttcttgctttaatcttcaaattcgtact

SEQ ID NO: 18107 - DNA, 371 bp, Glycine max
  unsure (1)..(371): unsure at all n locations
ttaagcaagtcctgcacaaatgaaaagtgaggttgaataataagcaaccacatagagcaaaaggaaagagtagtattaattgatagagagaaaaataattgatcctctaaaaagtaataagattattagattttgatgaggcaagaaaattaaaccttgaatcttcatctttagaatctctcgatcaagcgcaagttgatgttcatattgatctcaatgattgaaaattttggtttgcatatccaaaaaaaggtaagtcatgttatgagatttancacgatgagatgtgaaaaggatgaaagatgtgaaaggtataagagctacgctagggtttcaaagggagaagaaaaatctagtgattaaagtttatg

SEQ ID NO: 18108 - DNA, 281 bp, Glycine max
agcttccttctgccgaagcttgtgtgtggcctggttgtggattgtttttccctcattcccccatatgaagtagtggggtggttctaaagatttgttggcttaagtatgggtattctctgaaatgttattaataaatatcaatctggagctatacccaaggtgagttagatcataatttagtttaatttgcacttttataggctccgattttggttattttgttattgtatgttacaatgtattatctttcaaggttgtggagagacctgttgattttgcat

SEQ ID NO: 18109 - DNA, 320 bp, Glycine max
tccttttagtgcgtcacgtttaaaaccgagctcgatggtggtgcgagcctttgatggtactcggcgggaagtgatgggggaaatcgacattcccattcagataggcccccacacttgcaatgtggtgtttcaagtaatggatatgaatcccgcctatagctgcctcttgggaagaccttggattcatgccctgggagtggtcccttcaacgcttcaccagaaattgaagttcgcagtgggtggacttttagtgatagtgtcgggtgaagaggatatgttaataagttgcccctcctccgcaccgtacgtaaaagtggcgg

SEQ ID NO: 18110 - DNA, 279 bp, Glycine max
agctttgcttctacacctaagtccactagttctgtctcttcttgatgaggccccatctcttggtcctcatgggcgaatatcttctccaactccgggggaagtcccacatcttcgtcctcttcaccctccgtctgatctgtttcttgcttgaaatcgatggtcgggtcccaggtattagtaccttcgagggactcgtcgtcggatctggcgttttaaacgtaaagaaataaacatgcaaatgaatgagaatgggtagagacgtatgaacagatgaagaaa

SEQ ID NO: 18111 - DNA, 361 bp, Glycine max
  unsure (1)..(361): unsure at all n locations
ttgatctaccaccaccaccgccaccatcatcttagttttctattatttttaatattactagtactttgttttctagtcgtgtatttagctatattatgacatttggataatttagtatttctttatttgcatggtttgattgaacaattatgaattatgttatatgactatgtgatttttatatatttgatctattcatgtttcttgcttcatgattggtttatattcttcaatgtatgtcttgtgaatgattaatagtatatggttgtcttatacttgttacgcactttggctttntgttgatgccaaagggggagagaaataggaattaaatcaagaactcacataagtaatcaactta

SEQ ID NO: 18112 - DNA, 290 bp, Glycine max
agcttcaatccttgggttaattttatttgaatttgtttttgtatttttattgatttttgttgtttttttattaattctataattaaaaaatcccccccatttattaaaattaatttttggtgtttaatgatttgtgtttttggaagaatgacttagtgttgtgccctattctagaaaattaatggggatcttggtagcttttgatagtaacctcaacagtgctatcaaagttggcatcattgtcaaggacacaattcattgtgtccttgttttaatttgtgtttatatag

SEQ ID NO: 18113 - DNA, 509 bp, Glycine max
  unsure (1)..(509): unsure at all n locations
gtctagcccgacaacatggtggatgtgtaagtcattgagtgtagcagtggtntatatacgctacgatgtgataataaagatgagcgtaatggatggttgaggcttcgatagacacttacaanacaaactcatctattaatccaaggtagagatacagcctcttgttgaagggaatctccccgagatattgagaatgaacgggaccaccctataaaagacatggagcattcttacctacataaacatgagccctacctccgcgaacttgtgatgtcaacctggacaaagacaaacccatttatggcgcctttatgaaaaaggacatgaatatacggtaccatatcgcctatcagaactctctcacaattcaatatgacacatgctgacctggatctcctaactggattacaactctatggtaaggctaggggagactattcttgactcaaggcccctggaaaaccgggatcctgccattaaatcgggctacaatgtaaagaactgagggg

SEQ ID NO: 18114 - DNA, 292 bp, Glycine max
agcttctcccccaattttctataatttgggggagaagtgaagtagaaaagggttcagccccttaggcacttctctctctctcgaaatagctgaggaaaattagttccgtgaacaaaatccaagccgaggcgcttccgtaacgtttccgtgagtaattacgcaaagattctcgaccgttcttcaagattcatcgttcgttcttcgatttcttcagtcttcaacgggtaagtacctcaaaccaagcttttcaattcattctatgtacccgtggtggtccacattttgtttcatg

SEQ ID NO: 18115 - DNA, 290 bp, Glycine max
agcttcttatccaagacactttcttggtggtgaagcctcttcttccatggcttattctctagtggatggcgcctcctctcacctcttctcctttatcttccgctgcaactctatggctggaaatcaccattgaaggacctcattgaagctcaaagattcaacctccatagaagtttctcaaccaagcttccatcatgcagtcatacttttggccatgaatagctagtctccttagtccaggattatgatgtagtcatacttttgtaccccttttctaattttaatgaaac

SEQ ID NO: 18116 - DNA, 290 bp, Glycine max
agcttctatataagctgatccattttatcaataaacacaagttgagttttattcagaaaattagagtttatctcttttatcttagtgagagtgattctcctaaattcttgagtgattaaagaacaccctggctgtatcaaaggactttcacaacctttgtgtgttgccctcgccggaaagagtgattctttccttcctttcatcctcaaccttgttctttcaaaccacaattctagaaaatccacttctgcccagaattatctcgtggccataactcccgttttacgcac

SEQ ID NO: 18117 - DNA, 293 bp, Glycine max
agctttgaaaagtgttgtttttcaccttctcgctaagctaatctactggtttagcgagcgttcgctaagcacaacactcattggctaagcgcgaggaagactctggaagaagatgagctgtataggttctctaagtgcaccgcttcagtccatccgctaagcgagaaaggcacgcgctaagccaaaattcactaatgtgcgctaagcggtccataattgcgctaagcgcacgagcacgtacaaggccacctatttaagccagaaatcaaattttgtgaagggagtttgggctg

SEQ ID NO: 18118 - DNA, 291 bp, Glycine max
cggcctgcaagcttggttctatgtactttcccggagaagatcgaagaacgatgaggaacgaatgatgaacgtctaagaacggtcgaaaccttctcgagattcctcacggaaacgtttcggaagcgcctcgggttgtattttcttgatggaaacaatttttccaagcaaattcgaaagagagagaagttcctaaggggttgaaccctttttcacttcacttctccccctatttatagacaaaaggcgcagaagacgacgttagtctgtacgcgctatcatgctttgagtctt

SEQ ID NO: 18119 - DNA, 373 bp, Glycine max
ctataaaactcagcttgatcccaggaggagattcgagcttaatgttgatgggaagccgttgaagatattggtgaagaacatgaccaccctagcttaaacatggagcgttctttccttctctaacatgaaccctacctcgcatacttctgatgtcaacctggacagagccaaactcatttatggcatcattatgaagatggacatgaatatagggtacctcatcttctaccagatctccctcacagctcagcatgacacatccagacttggattcccgaccttgattacaactctatgtaaggctaggggagtttagtctgactcgaggtccctggaaaacttgagtcctgccattaatttggcatacattaag

SEQ ID NO: 18120 - DNA, 285 bp, Glycine max
agcttccctttctttggccaatgctggactcgtttggcagtgatttccttggcaatttgatgctcagaaacatcaatatctatcactccatcagtaggtctgcccagatatttgttaatcacagcaggggagaatttaacacactttcctctgacaaacaccttttgatactcatcactttttctgttagatatgtcagagggaatgttgacaatgaattccctgactaagccttcatagcaatctcccaacttgctgacagtcttcagcagtccagcagccttg

SEQ ID NO: 18121 - DNA, 344 bp, Glycine max
cttgatgcaacatttggagaggttaatgaaacaacgagatgatgcgctccatgagaggttggatcaaatggagaatagagatcataatgaagaagaaaggaggagaagatggaatgatggtgttcctagacaaaaccgaattgatggtattaaactcaacattcctccatttaaaggaaagaatgatccggaggcctacttggagtgggagatgaaaataaagcttgttttctcatgcaacaactatgaggaggaccagaaggtgaagcttgctgccacggagttttccgactatgctcttgtgtggtggaacaagcttccaaaagagagagccagaaatgaag

SEQ ID NO: 18122 - DNA, 232 bp, Glycine max
agctttggttgttcggtattgcctaaaaaacttgcaatgcatttcggctacgtttcttcgtgcgagctgtaccgaagagggatatcgggccaccccagtttttgggtggccaagaaaacatcaggccgcctcagcagaaaataaacatgattcaccggtattgacagaaagaaaggctgggcttatgcggccagtaaagatgaccgatcgaggtttaaaaaagaagcttgat

SEQ ID NO: 18123 - DNA, 370 bp, Glycine max
tcctctaccggtgaaaaaacattgtcggcttgcgcttgtcaaaaaattgcgcactgtcggctgaaaaacatcacttggggctgtttaactaccgatgctggctactggtatttctattacacccctgaataatacttggacgatgtccatttgaaaatgttcgatcggagtcatccggacatgcttctttataagacctcgatctgtcatctttttctggccgacgacggctagcattttttttgatcaatatcagtgaatcatgctttttgccaaggtgggctaacattttcgtggctcatgagatgagagcatgccagtgtctgtcgaaacacaatttcgcacgataaaccctatccgacctacattg

SEQ ID NO: 18124 - DNA, 285 bp, Glycine max
agcttgaacgaatgtaatacacatcttcaacctttgtgattcttgactccatttcattgaagcgcatatccacttgtaattccaaattgtcaaacatctcaccaacaaagatttgaagaccattaaacctgtctaaaatctttgaaaagagagatgaatcctctccatcatgtccttcttcaccaacatgtcgagcacctttctttacccaagagccatcatgctccttttgataaccaaaagatgttatgactgaagtgcctataaggaaagatctcttgattg

SEQ ID NO: 18125 - DNA, 372 bp, Glycine max
ttcttaagaaaacttccttgagaagcttctttgagaaaactttcttgagaagctagagcttaactacacacacccatctaaaaactaagctcacctccttgagaagcttccttgagaagctagagcttagctacacacacccatctaaaaactaagctcacctccttgagaagctttcttgagaagctagagcttagctacacacacccatctaaaaactaagctcacctccttgacaaaatacaaaaaaaaagtccctactacaaagactactcaaaaggccctgaaatacaaggctaaaaacctatactaccagaatggccaaaatacaacgcccaaaagaaggaaaaacctattctaatatttacaaag

SEQ ID NO: 18126 - DNA, 286 bp, Glycine max
agcttgtgtgaagagatagacagaaaaagacttagaaaattttagcaattgtctatccgctaagcgcagaccttgcgctaagcactcagtcttcacacgctaagtcgagcttgctcgcgctaagcggacagacccttaggctaagctcagctgttgcgttaagcttaatctgcagaaaaaatactttttgtgtcttcaggctaagcgccagtctactgcacttagcgcctgagtaaaatttcataaggtgcactaagctcagcctgttgcgctaagcacccagtca

SEQ ID NO: 18127 - DNA, 304 bp, Glycine max
ttagtttctttaggaatcttcttaaggaagcttctcaaggaggtgagcttagttatgagaggggtgtgtgtagctaagctctagcttctcaaggaagttttctcaaagaagcttctcaaggaagttttctcaagaaagcttctcaaggaagctacctagtctataaatagaagcatgtgtaacacttgttgtaactttgatgaatgagagtcttgtgagacacaactcaaagttaaacttctctccctttttcgtccttcaatttcgtgctcccccctctatatttatctccctctttcttttc

SEQ ID NO: 18128 - DNA, 261 bp, Glycine max
agctttttggatatattatggatggcccactaaccatagatggaggtaacttaatgcccttgacctatggaattaaaaaaaacttaatggttgagtgtaactgaaatggtggtcatccatagtgaccacccaacagccatcaagctgctcccaattatggactacgaaaggctgttgcctaggttgccaaatgggcccttattacgacttgtacttaacctaactaacgcccttttagttgattaacctaaaacatatttt

SEQ ID NO: 18129 - DNA, 379 bp, Glycine max
agctatctaggaccttatatactcagcttcattgtaacctcatcgcctgttgctgcccatgtcaactgtcatctttttggagcaatatctgccgaataattatttatttgtccggcgaagggctaatgttctgctggccgaataaatgggatcatgccggttttctgcccgaacaaaaggactggttgagatcgcacaaaaaaacctggcccaccttaattgtaaatttcttatgccaccccaaaatataaaaccttcttttggcggaaaaaaaaatttatcgtccaccaagaacttttttaaaaaaattttcaatggttggtgaaaatatccatccgggcttttcccaaccaatgcgctttggggtttaaaatttttc

SEQ ID NO: 18130 - DNA, 281 bp, Glycine max
agcttattacgtgttgatgattataacacatatattgtatatgaattgttaaaataaattaggaattaatagttcaaataataaaattaaaattgaaggaaattaatatatcaagattcaacgataaattctttcaatgcatttttagtttaattatttattaactctttttaattgaaaataatatagttcgatttaatatatacatgttttgtgccatgtaaatattaatactgtgtgatgtttatatgatttatgaggtgtgataacatgttaagttg

SEQ ID NO: 18131 - DNA, 348 bp, Glycine max
  unsure (1)..(348): unsure at all n locations
ntagtcactttttgaagctgtttctctggcctttgaattgctttgggatgagttgtgtatgtggcctttctttgatgtgctgctcggggctgtttctaaacagttgtcatttcaaatatggatagagattgggcagcattgctgcatttatgatcttttgaagttatctatatgtttccttttctgttttggagaatatcttatcttaatcattgctgtgtttcccccctttcctttttaataaataaataaaattcatttctacaaaagatttgatatctatttttttatgttcaggcaatggttactaaaaaacagtaatctgaatcagtaaatttataagtcatg

SEQ ID NO: 18132 - DNA, 291 bp, Glycine max
agcttggaaggatgctttaatggaggaaaagaaagagggagagaaagagagaggggggagcccgaaattgaaggaataaaagagggagagaagtggaactttgaagtatgtctcaccagactctcattcatcaaagttacaacaagtgttacacatgcttctatttatagactaggtagcttccttgagaagctttcttgagaaaactttcttgagaagcttctttgagaaaacttccttgagaagctagagcttagctacacacacccctctcataactaagctcacctt

SEQ ID NO: 18133 - DNA, 290 bp, Glycine max
agctttttgctactatggtcaaatgaaaaaaatcaacgaaatcaaaacatttgttgtggcattgtgcctgctgcaatttaagggagatgagaaatgaggcttatgatgggcaaaaatgacttcaacattctaagattatctgccttgggcttgatgtaggataggccatagatagtgatctgccttgttttcttgggcttgatgtttgcctatttaaaaaatgaataagctgcaaaaccaattggagaaagtcaagtctcttactcaagatcttgaagaagggcttgagt

SEQ ID NO: 18134 - DNA, 287 bp, Glycine max
agcttgctttagtataataggaagcacgaatataaatatcttgatgcctactattgatatatagcattgaccataaatgaaactagctagagagaataaaaactgctgataatagtacactccataggtagtcatgttgcgtaaaccactactacatgaaatcactttaaattatagtattaggtagtaatttctgcgattatgttgatcatggtcgccctcacataactgacaggtgccctcactttaaattgtgaattggctagtgccacattgaaggttgtcac

SEQ ID NO: 18135 - DNA, 288 bp, Glycine max
agcttttaacaagtattatgtttcatttatttcttcagggtaacaatcacaaaagacaatacggcacatggagaattcaaaatccaggaagcaatgaatttttatcagcattagcagcaggaatgaaagcaaaactcatagtggaagtgacgtcctgcgtatcgctaaccaccttagcccttgcagctgctgcaagacaaaccggaggcagagtggtgtgtattctacccgagtcaatccttaatgattcacaacaagttatcaacaactcagggcttaaagaccaag

SEQ ID NO: 18136 - DNA, 291 bp, Glycine max
agcttgaccaatcccgacccaacccgggcatagttagtcagtgagaacctgtgatgtacctaagcaggcgagctcctggcagtcaacagataaaaggaacaaagaccacaaagcaaggaggcttgtgtggtggctggccagctgtgaatcttgtgtgatatatgggttatggcttctggtaatcgattaccaagggtgggtaatcgattacaaggcttaaaaatgaagacaggagggtacatctaatgttagtctctcatgcaaaacctttgggatttctcatgcaaaccc

SEQ ID NO: 18137 - DNA, 283 bp, Glycine max
agctacctccttctcaattatggaaagaagacaatatatacaaggcgttaccaattgattaggagaataaatttttccttataaatttttacaaaatattaccaattctttttcccatataggcatgcaataaccccaactgcttaatcaggcttgcctgaacttcatcttggaataattcctggattaggaggtagtaactggatccaagattctctccaagactgttggctaatttccctagcacaatttgatttttttttttgtaaaaatgaaaagaagt

SEQ ID NO: 18138 - DNA, 375 bp, Glycine max
taaagtatgcccgagtcattcatccctatgagatgttgttgaagtattggcgatcagaattgccattccttggattatagggttgaaccaagctcatgcttttacaaaaaggttcatcaagtcaagttgaaatatggaagtaaccgtcttgcaaaattggggcaaaagatgaatcgagtcacatcactgcttcgtctactgccaaacatatttaggattattgatgtccttgttacttccagtttcaccttgacaaagatgtcatggaccatgttgaaaatctaaattgattcaaccccatatcctgcgtaaaaatttgcaatacttcatctgtgtatcattcacatacatccatgcttttcattggttgcattg

SEQ ID NO: 18139 - DNA, 284 bp, Glycine max
agcttgcagaaatgataatacatcaagaaaccattcatagacaaataaagtaaaaatggctgagaggtggtgaagcaaagcttggacttggagagtaaacaaacccgagtgccatccgaactttaagttggactccattggtgaagttgagaaggtagacatcattgagaagcacgccaaaggtcgagtactgatctgcataattaatttcatagtcacattgatcagggtgttcacagttgtagtcctcagttggctgcaaggatgcacaaaggggatccctg

SEQ ID NO: 18140 - DNA, 366 bp, Glycine max
  unsure (1)..(366): unsure at all n locations
tgtataagaattagtgaaaatattttacactttaaataaagtgttttttttatgttttctatatatatatatatatatatatatatatatatatatatattaaaataaataaaaaataaaatgacatctttataattaaaagtaaaaatttaaaaaaaggtatatttatcatttctactttctaggctaacgttttactttaaaaaaaaatctctnttcttcacccgtgaaattaattctccacacattaaaaagtaatactaatatctgacattaattctacaggtgaagacgagagaaagatttctttctggcaattgaaaagattttcttggcgtgaacttcaacttgccactaaaaatttca

SEQ ID NO: 18141 - DNA, 282 bp, Glycine max
agcttttattttgactctttattggttaaaaggagacccttgtcagtatttacaaatgaggaatttgaggaaggtaaaatgaaataaattgcttattatgattacctaataaattatgatttgttaagcaattagatgcctctttcttttgcaaaaatgttttcatcacaagatattgcttatgcggtcttacttgccttggaagaccactatctcttgttctcatgtctgaggtgaagtttaaccttatcaaatgcaatcaactttaataatagttttata

SEQ ID NO: 18142 - DNA, 173 bp, Glycine max
ctcagcttcttgcgtagccgctcttgctgctcggaatatcctaaaaacaaatccctcttattactagctattttgaattctttagttcctgaatgtacaaccttcaaattgttgctcgctcccctctttgagaatgaagaggatcttcataggacttcatctagctgatgttt

SEQ ID NO: 18143 - DNA, 285 bp, Glycine max
agcttagcatatattctttgagaagttaacagaaacacaaattcagaataaaaaactcaacgccaaacttgtggagtaaacagaaaaaccttgtggagtaccaatttcaatttagcattaataaaaaaactcaacgacaaacttggtcaaagaaagagaaataaaaaataaagtattcatcaaattgaattggcctctgcattcaaattgtctcaatctcaatcacaatttttcataaaagttaaacatctagtgataaagaaatatatcttgaagggttgaagc

SEQ ID NO: 18144 - DNA, 374 bp, Glycine max
tggttttgggcaatagcaccccacctgacgtccccaaggtcttctgacccccacgacatatcctcaggtaccactctgtggtcaactaataaaagttggaagactgactcttccacgctttctcacacatggattattgggttatggggcacccttcatatgtggtactaggtggcaatcgggcgatggcgcaaaacaaatatcccatttctacaagcccaagcataagtacaccatccccaattgcccacctttaaattgagctcacacacacgtacgtagcccttctcctcgttcctctcagcaccgggtccccatcaacctatccaagctttcataatatcaaatcaattcaattccatttgtcatgaaac

SEQ ID NO: 18145 - DNA, 285 bp, Glycine max
  unsure (1)..(285): unsure at all n locations
agcttcaagttcattaatttaaacttgcagncgcccaagcatacacaaattctcattccttcatataaaagctttcatagaggtgtgttagagaggtagcttttctaagttggacatcttatgttcctttatagttgatgattagagaggtccaaatcactttggtggtttttaatctgcatatcttggggtactcatttttggaaacagcgcgtgacaatgtgtaacaagattttgtgtttagctccattatagtcagatcttcgtttgtgcattctactttag

SEQ ID NO: 18146 - DNA, 326 bp, Glycine max
  unsure (1)..(326): unsure at all n locations
tatgcattcaatatcctgatgagggtgtttcatatgttcttaagactggactaatacatttgctgcccaagtttcatggtcttgcaggtgaagatcctcataagcatcttaaggagttccatattgtttgttccaccatgaagctccctgatgtccaagaagatcatatctttctaaaggcttttcctcattctctggagggagtggcaaaagattggctatactaccttgctcccaggtccattttcaactggtatgaccttaagaggatattcttggagaaattcttccctgcatctangaccactgccatcagaaaagacatt

SEQ ID NO: 18147 - DNA, 278 bp, Glycine max
agctttttgactcaaatttggctctttgcaacataatgctgcttttgctctttatggccttgcagataatgaatgaggtatgatataattgagaattcaaatgaaatgaagatcttctgtcttaattgcttaaaaatttgttacattgagacttaattaactattctttgtttttggaccatatattttattttgacccttaggataatgcgttcgacttgcttaaaaatttgttaccttgagacttaattaactattctctgtttttggaccattta

SEQ ID NO: 18148 - DNA, 361 bp, Glycine max
  unsure (1)..(361): unsure at all n locations
tcttgaatttgtatcatttagctacataaacgaatgttggacattgttcctctctcaattgactgcttttctgacctttttttttacaactcttaactaactttaccatgaatataattaattaattgtaccttatacattaattttaaaaactattaacattcagtaaaaaaaaaaactattaaccttatacattaatgtcattttcaatagccctcacttttgtttttgttattgcatatattaaaacctcatatcanattataaataattattactacattaaaaatattccaaattataaacaagttttctaagtcgaaattataaacaagctgaaagcacttgatattgcaataaa

SEQ ID NO: 18149 - DNA, 289 bp, Glycine max
agcttccacaacaattactagcagtaagtccttttcattcttctgttatgcaggtagggggatgccacatatgtggaggaacacacgagcctgggcaatgcgtaatgcaacaagatccttccagggaagtaaactacatgggcataccaaatcgccacggattccaagtgtaccactagggaggaccattaggattcaatcacggcccaccaagattcaaccaagggagaacttttacacaaggctcaagctggaggagtcatccttagaatcagtacaacaaagagaa

SEQ ID NO: 18150 - DNA, 289 bp, Glycine max
agcttatttcaggttgactaattgttgagttctgcaaagcccccactacaaaccgatagagagtaggatcaaaaaagatatcagccctagacttagacagtttacagttagtaaccataggagaatatatgagttgtgcctctgccatgtgagttttctgtaagagatttctgatatatgtactctgagtaagtactaaggagttatcagaaagagtcttgacctcaataccgaaaaaatagtcaaactttcctagctgttttaaagagaaagtggagttaagtttggc

SEQ ID NO: 18151 - DNA, 288 bp, Glycine max
agcttgaaggtttgtacttgaccaaatctttagttaatcgtctttacctaaagcagtctttgtattcatttaaaatgcatgaagatagataagtaggagaacaattggattagtttaataaactgattctagatcttgaaaatattgatgtcaccattgatgatgaggatcaagctttgctattgctgtgctttttgcctaagagttactctcatttcaaagagactttattgtttggaagagattctgtttctcttgatgaagtgcaggctgctctgaattcaaagt

SEQ ID NO: 18152 - DNA, 291 bp, Glycine max
agcttattccgtaaaagttattccaaaaaaaaaaattgtatatgatagtcaattagcttagctatagacaagactaaacaaaatggatggtctgactatagatagaaaatgtcatttcagaattttataacatgataataaaataagagattatatgtaaccttccaaccaattcttatttatttttatgaacattttattattctctttatttgaaaatgaaaaattataacttttctctgttcccctccaaacatttccatccaaacataactgtccactaggggcatg

SEQ ID NO: 18153 - DNA, 291 bp, Glycine max
agcttcctcggggccatttcctgcgaaggcaaacatttggaaagttagttttaccaagaaaagctactcttaaaacaaaaatggcatacaacctcctccaataaacacaaacatcaatgtaaatttagagcaaacttatgcacatacttccttacgaacattcactcgcacaagatattcttctaactaagaaaaatgcacccatgcacaatcaaggcaccttcgttacctagatcacttatatgtacttccaaggcgtatttgctacctacatcacatgcatttcctttg

SEQ ID NO: 18154 - DNA, 284 bp, Glycine max
agcttgaccatatatttgggtctaacatatatatacctttaaccattctacatgttaaaatggcaattaaagaactgaagtcaaaatgaatacgtaccgctactactactacctaactctagaattggcatcctaagagaactctctagaatcggttagttcttaactctgcacatattttttatgataataaataagataaataatgaaattcatctttgaaaatgtaatggtaatgaattgattttaagagataaaaaatataaatttaatctttaaatgtg

SEQ ID NO: 18155 - DNA, 363 bp, Glycine max
tgaaggaaaactggatgcattggttaacttggtaacccagctggccttgaatcaaaaatctgtacctgtcgcaagggtttgtggtttgtgctcctctgctgaccaccatacagacctttgcccttccatgcagcaacctggagcaattgagcagcctgaagcttatgttgcaaatatttacaatagacctcctcaacctcagcagcaaaatcaaccacagcagagcaattatgacctttccagcaacagatacaaccctggatggaggaatcaccctaacctcagatggtccagccctcagcaacaacaacagcagcctgctccttccttccaaaatgctgctggcccaagcagaccatacat

SEQ ID NO: 18156 - DNA, 282 bp, Glycine max
agcttgcatttggaattgcgaaagccccactccatcattaggattagtacctgacatctcaaacaaacaaatcaaacgtaacaagacaattatagttgctgtttgaatacctcacccactcaagtgtatcacacaattatggcttttctctaatgaaacactcttgccttttaccactctaattccccttgagttcttaggcaattcaagagattatggccacaacaaagaacaattcaccaatatgtgtaaggtaaggctagacaaggaaaaggttaacca

SEQ ID NO: 18157 - DNA, 129 bp, Glycine max
cttagttgtcaattacgagcgtctcgatgttttactcgattctttcagacatccgagtcaaaagctattggcggttgatgctagaacttttctctctggactggaaaaacaagcatcccctatattact

SEQ ID NO: 18158 - DNA, 286 bp, Glycine max
agcttgtaggattatggggtacccatcacatgtggtactaggtggcggtcgggcgatggtgcacaacaagctttccacatccacaatgcgcgcataaacccaccatcccctgttgcccacctccaactgagctcacgtactcccacgtagcccatatcctcgtttctctcaacaccaggtccccatcaatcctcccaagcttccacaacatccaagcaaaacaaaattcaaacagcacaagctatcacagtcaagcaaaacagagcaaaggcagaaaactctgctc

SEQ ID NO: 18159 - DNA, 368 bp, Glycine max
tctcaggaagtttctcaagggagctacctatgctataaatacgagcatgtgtaacacttgttgtaactgtgatgaatgagagtcttgtgagacacacttcaaagttcaacttctctgcctctttttgatgtagctccatgtggagcttgtaagccttggatcttcttcatcaatggattcctttgcttcttgaggtttgattgcgatctaatatagaacgagaaagatgaatggagacttcacatcaagtataagatgggtatacaagaagctcaccaccataggaagccatggataaaagcttaaaggtagaagaagatgaatgaatggagaggaagagaagagcatgaaatttactgcctctaaag

SEQ ID NO: 18160 - DNA, 282 bp, Glycine max
agcttgatatttacctctaagttcttctccaaagccttcacttgttccacacttagtcgacgcttcttctcagattgatgccccggttcttcaacacacccttcctcgtcgagtccgtccaacatcgatcggaactccctgccatacatgtggtggctgttcctcggactatgttcctctaaaccaatgcaaattaaatcagacatcatcattattagtataaccaacataaaacatggatcttggatctgtgtctgaattttaaaaaacaaaaaccaatat

SEQ ID NO: 18161 - DNA, 378 bp, Glycine max
ctcagctttgaggtaggaggggcagtaaatagaattttgaagcagtgatattggcttgaagggaatgagattggactgttggttatcattttaatgaacagatttcctattctgagtattctctttgccaagacaccagctggattttgtcttttcatctaacatgtagcaattccccaccctcttttcttcttccaggaaaaaaatgatcaattttttgtactaagaaaaatgtgcaaatcattaatgagtttcatgttgctaggtttcttttgtgattatttataggaggatttggctccttaaaagtgcagagtgtaattgaagatgctttcgaaattgtgataaaacagatgcacatgtaaaataaattattaa

SEQ ID NO: 18162 - DNA, 285 bp, Glycine max
agcttgaaggtgtgtaacccaccattttccatagtagaatactggtaatgtgtctactatcattggcatcattttttcgtcattgatgtgccacttgagctgccaggttctccacctttgggcgtattctttgaaagatccgcgcccccttttttgcacatgttttgtagttgcatcctatccgaagccattataccgaccctgcccaacgaaggcaaccattaggtcctcccaggaatggactcgggaaggttccaagttagtgtaccaggtaacaactacccc

SEQ ID NO: 18163 - DNA, 341 bp, Glycine max
tatccttatggcttgcctgcggacttcaccccccgtgccaccccggaagagttaagccaagcccctactttcgaggggcaactcccaccttatgacgactatcccgggcaagacgatgaggaaggagatacccatcttggccccctgctccacctcaaagatccgtccccccatgaactaccccaaccgagcatagtccgccatatcccggcttcacccacacccgtaaaagaatctgttcccttcgtggaagataatgggaagatggaggcgcttgaagagaggttaagagcaatcgagggccttggcaattacccattctcggatttggcggaattatg

SEQ ID NO: 18164 - DNA, 278 bp, Glycine max
  unsure (1)..(278): unsure at all n locations
agcntttgatgtttcgaattaacgagggagcgcatgattgaccatggccttccttgttgaccacgatcgtggtcaatgtaccataaccattatcaagtgaaattagcattagatcttcatgaaattgcgtattttccaacttttccactttattgagcgattgttcttctggaagataaaaactaatgtccaaatgtgaattctatcaataaagtacatggaataacacaaaaactcacattaaatatcacttaaattatgatttatcagcctcccta

SEQ ID NO: 18165 - DNA, 360 bp, Glycine max
tgcaaatgaaacatcattacatcggttctctcaattcgcaaatttcagcttacaaagaggggttctggctcaacttttcgtctgatcctgaaaaaaagttagacagagggaagcaagtgtttagcaaaatccaccaagtagttgggacacaagccaagtccaaattacattacaaatacaaacttgtgagattaggcaaattctacacttttcataaaacaaacatctttcttgcacttgcaagtgtcaattattgggattaaggaagacttataaccgatttgggacaagcataagtccaaaaatgatgcaaactctaacaaaagttgaaggcaatgaattctagacacacacaaaact

SEQ ID NO: 18166 - DNA, 282 bp, Glycine max
agctttctcggggccattttctgcgaaggcaaacatttggaaagttagttttaccaagaaatgctactcttaaaacaaaaatggcatacaacctcctccaataaacacaaacatcaatgtaaatttagagcaaactcatgcacatacttccttatgaacattcactcgcacaagatattcttctacccaaaaaaatgcacccatgcgcaatcaaggaaccttcgttacctagattatttatatgtacttccaaggtgtatttgctacctacatcacatgcat

SEQ ID NO: 18167 - DNA, 362 bp, Glycine max
tctagaggaagcctcttaatgaagcttctatagaaaactacatggagcttcatcggtaaaaatgctgcccagccttctttaaccgttggatcgtctcgaaatttggtttgcaacttcaaaagacacttttccatgatctgaccgttgagatctgtgcgaagatgtctggagtgtgctagaagcttccgttcccgagagcatctcttatttaagcatttcagcctttgctttcttgtagcttaggaaaaatgccatttcttcttctttctttcttccaaatccatttctaaagttccaagtactttctccatcacccacatccaccattagccaccacaaaccatcattgttctccattgaaa

SEQ ID NO: 18168 - DNA, 288 bp, Glycine max
agcttaggttaaattagtttaaactttcgtaagctatttaagctgagcctagtcttaaatgagggatctgcggatgaagcttagtttaagttagtctaaacctatgagggctgtctaaattaagcctagtccaacaagagggatttgaggatgaagcttggattgattcagcctaactagggatcgaggtttagtaatttaggctacatcacagaacacaaaaacatgattgattagagaaacatctttagatacatcagcttgtttgttaggaagacccaacacttt

SEQ ID NO: 18169 - DNA, 301 bp, Glycine max
cagaaacacatacacacatttttccctaggcgaacactcacttggatttccaatctgccgcttaggttatgagtttaagcttcacttgaaaataaggaaattacttatgtgagtgctagatctaatccctatttctctcgccctttggcatcaacaaaaagccaaagtgtggaacaaggataaaacattcatatactaacaatcattcacaagacattcattgaagaatataaaccaaccatgaagcaagaaacatggatagatcaaatatataaaaaccacataggcatataacataaat

SEQ ID NO: 18170 - DNA, 289 bp, Glycine max
agcttgagctttagttgttttacctttcagttgaccctctgaaattgtcaggcattgacgttggagtgacacccatgcggctatggttcaagttcataagaactgtatacatggaattaagtaacttttgttgatttcatacattccacaacaaatgaataaagtaacaaacaagttagccaaattaggggctaagaggatacatgatgtatgtatttgtattttttgtgacaccttcgcctgaagctatggataagtctataaaagaaaatttaaatttacccagata

SEQ ID NO: 18171 - DNA, 288 bp, Glycine max
agcttgccaccacgaagttttccgactatgctcttgtgtggtggaacaagctacaaaaagagagagcaagaaatgaagagccaattgttgatacatgggcggagatgaaaaggatcatgaggaagcggtatgtgccggctagttactcaagggatttgaaattcaagctccaaaaactaacccaaggcaacaagggggttgaggagtatttcaaggaaatggatgtgctcatgattcaagcaaagattgaaaaagatgaggaggtaactatggctcaatttcttaatg

SEQ ID NO: 18172 - DNA, 82 bp, Glycine max
cggacaaaaaaaggtcggagaacaaataggggaaagaatgattgaactcgaaacccgcgcttaaaaaccaagcccaaaacaa

SEQ ID NO: 18173 - DNA, 283 bp, Glycine max
agcttacaaatagaagattttagatttcaactgattggtgattaagtaatcatcaattccaaaacatagggggagtatgaaatgagtgaacacaatgtatcttgcatatacattgcttgtatcttgatttcacgaattaaattgtcaccatcaaaaagggggagattgttaaagcaaagactttgcctttgatgttttgatgatgccatatgaacgggatgttttgatgccttatgaaaatgtgcttctcaagtttaattcaagacaaaaattcaagaataca

SEQ ID NO: 18174 - DNA, 344 bp, Glycine max
agttgtggagctctatttgaagattctatataggattagttccaatgccctacaaaaaagtgttagtgggaccataatatgcatgtattattttgcggtctccagccataaggctaatttgaacatgagccacctctgtagccttgatagtctccttggaagttctattgacgtcttgcttgaatctatatataacgggcctcctcttcctattgacaatgctgaatagtggccattctgatggtgaccaccacagaagtcacatcttagaactcgttgaacttgatgagcttggtgagttttttgtgatccaccttattcatattgttgagggagttaaccta

SEQ ID NO: 18175 - DNA, 285 bp, Glycine max
agcttctacaattggtttttcctaattcctttacactttcctcacctctcaatgagccagtgaaaaagaatgtggcattcacttgagatgaaagacaagagcaggcctttactttgctcaaagaaaagctcaccaaggcacctgctctagctctttttaacttttctaaaacttttgagctagaatgtgatgcctctagagtgggagtgggagttgtattgttacaagatggacaccctatttattattttaatgaaaaacttcatggtgccaccctcaactacc

SEQ ID NO: 18176 - DNA, 371 bp, Glycine max
  unsure (1)..(371): unsure at all n locations
cgatttaatggatgagttntgtgttagattttagtgtgcttggcttgtataatttgtttgttagtatttaattttttacgaggataagtgcgaatgatttgttagttaattgttcttatttatttatttgttgattcattaattctgtctttaatgatgaaaaaactatgtcgtttaatgttctggtttgtccttattgacttangaattttgttgtgtaatttgtgacaaatatgagtggaaggggtgaaaatatacatggtgagaatggtggtgatgcatcggaaacattttttgtggtaagactaatgaatgatatatggtattgctgttttgtttgtttaaattttatgagaagcattttaatgatt

SEQ ID NO: 18177 - DNA, 284 bp, Glycine max
agcttgtgcaaatcaaatcactcctacatttcatctctagcatgcatcttctttctttacccactcctcacgtttggttttttagggaaaaacaccataactaaacgcgccgcgagggatccctatcgcaccaaatccaaatctagaacgatgggtgatcaagaagagatgcaggaacagatgaaagccgacatgtcggctctgaaagaacaaatggcctctatgatggaggccatgttaagtatgaagcagctcatagagaagaacgcggccaccgccgtcgc

SEQ ID NO: 18178 - DNA, 374 bp, Glycine max
tgcttctacaatctcccattttttgatgatgacaactctgaaatccagaaacacatacacacatttttccctagtcgatcactcacttgattttccattctccccctttgtttttgagtttatgcttcacttgaaattaagttaattacttatgtgagttcttgatttaatccctatttctctcgccctttggcatcaacaaaaagccaaagtgtgtaacaagtataaaacattcatatactatcaatcattcacaagacattcattgaagaatataaaccaaccatgaagcaagaaacatggatagatcaaatatataaaaaccacatagtcatataacataattcataattgttcaatcattccatgcatat

SEQ ID NO: 18179 - DNA, 282 bp, Glycine max
agcttgttctttacctctctatcatccccctcagcaagaatcttgagcacctcctctgcgagcttctggcagtgctgtggatcaatctgctgctcaaaagcctgagagattttcctctgaagccaataagcatcaatatcctgcacattcaaacccatcccttcattaccctcttccatatcctcatcatcaattccacccatctgcatagccccagaactgttcggctctgtgacatcctcatcctcttcctcctcatcctgcacaatatccaaatcactc

SEQ ID NO: 18180 - DNA, 371 bp, Glycine max
  unsure (1)..(371): unsure at all n locations
tcagtgtcaaaatatcaattaaacaatgcttatgtacacattgagaaacagcttaaatcaggttgagcaaaaatatgatgccacaactcacatatcagtcaaacattttcaaaacactagtgttgacaaaatgaaccatgaaggggtgttgcataattaagtccaacacaatttattcaatctctaaagagttgtgttatccttggttggggcaaggatacgcatggccacttggtcctcaatgacacaattcataaaattcataatttcagtcatcacaaagtcataaacataattaataaaaacaccaagaatttataaggctataactgaaaaaaaanaacaatttggacaaaccttaggacagcaaa

SEQ ID NO: 18181 - DNA, 282 bp, Glycine max
agctttgagccaattcatacgactttaactttttactccgatgtctgattgagtcccttcatatatcgagacgctcgaaattgaatgttgaagctctgagccaattcaaacgacaataactttttactcggatgtctgattgagtcccgtaatatatcgagacgctcgaaattgaatgttgaagctctgagccaattcaaacgacaatacctttttacttggatgtctgattgagtcccgtcatatatcgagacgctcgaaattgaatgttgaacctctgag

SEQ ID NO: 18182 - DNA, 353 bp, Glycine max
tcaacatctcaatttcgagcgtctcgatatatgacgggactcaatcagacatccgagtaaaaagttattgtcgtttgaattggctcagagcttcaacattcaatttcgagggtctcgatatattgcggtactcaatcagacatccgagtaaaaagttattgtcgtttgaattggctcagagcttcaacattcaatttcgagcgtctcgatatatgacgggactcaatcagacatccgagtaaaaagttattgtcgtttgaattggctcagagcttcaacattcaaattccagggtctcgatatattacgggactcaatcagacatcccaataaaaagtattggtcgttggaat

SEQ ID NO: 18183 - DNA, 285 bp, Glycine max
agcttttagaatttatatcaaaagaactatgattattaaagaatctatccatgttgcttttgatgagactaaccctataaggccaagaaaggaaacacttgatgatattataggttcattagaagacatgcacattgatgagaaagggcacaaaggcaaaggaaatggaaatgaagaagactgtcaaattgatgaaaataaaacaaatatagatcttccaagagagtggagaacttcaagacatcatcctcttgataatatcattggtgacatctcaaaaggggt

SEQ ID NO: 18184 - DNA, 285 bp, Glycine max
tgcaagaagagcattccaatgacttagctatgcatggttttaaagtgcattgtctcaccataattaggatatcactattaagatttttcaaaatctttacacctgcatcgcaaccacaattatttataataatgacatcatccgtatttgtttgtaattattcacaattatttttaattgcaatgtgatcgccatctcaatttaatttggaactggattaatgtgagtctggtgccgttgatgtaataagaataataacgcgaatctggcttggtttgggaaatt

SEQ ID NO: 18185 - DNA, 278 bp, Glycine max
agcttgcctaattaacctaaaattgagagaaaatgattattaaacacacaaaatgaaaatactaagtatttattacctatacttaacataaaatacttataacattacaaaataactataaattgggagagtttgatacaatttattcaagttttatacacaaaagttaggtgttttcaccgactaataactcccccaaatttacagctttgcttgtcctcgagcaaaaagagaacaactcacttgtcctcaagtgacaaagacaagcagtggctatg

SEQ ID NO: 18186 - DNA, 360 bp, Glycine max
  unsure (1)..(360): unsure at all n locations
tgtagaattcaccccaattccagtgtcctatgctgacttgctcccatatctacttgataattcaatggtagccataaccctagccaaggttcatcaacctccatttctccgagaatacgactcgaacgcaacgtgtgcttgtcacggagaagccccggggcgttccattgagcatggtatggctctgaagcgtaaggtgcaaggtctaattgatgcgggctggctgaaatttgaggagaattgcgtgtaaatcctgacattgacaagagatgccacacatggggcaattttgaaagctgttgttangtgtccctaatgactcatcagggtttccaagtttatgccattattgtcaaccac

SEQ ID NO: 18187 - DNA, 281 bp, Glycine max
agcttgtagaattcaccttaatctcgatgtcatatgctgacttactcctgtatttgctcaataatgaaatggtagccataagcccaacaaagatccctcaaccttcatttccctgaggatacaacttgaatgtgacatgtgcttatcataggggagttttggggcattccattgagcactatatgaccctgaaacataagatgcaaagttagattaatgtacgctagctgagatttaaggaggacaatcactcgtgaattttgatgtcatcaagtgatact

SEQ ID NO: 18188 - DNA, 349 bp, Glycine max
  unsure (1)..(349): unsure at all n locations
ttcanagttgaaatgaattccaagttaattggaggcaccgatcgccaaatctgaataagttcaagacaactcagattattattattattattatttaacccacaattccaaattttgatggtcattcacatattgcaacatgcgctcaaggattaaaatcggatccaacgaacttcaccaatatgagatattgaaattggtctcaataccaaatgatgagacccctttgtggatccctaattcagcatctcaatagatcaaaattaaaaaaaaaaaattgtaggaaaaaaagggaaaatggattgagatgagaaatggaaagaacaatatcactattcctaagaattga

SEQ ID NO: 18189 - DNA, 290 bp, Glycine max
agcttgagaggattgatggggacccggtgttgagagaaacgaggatatgggctacgtgggagtacgtgagctcagttggaggtgggcaacaggggatggtgggtttctgcgcgcattgtggatgtggaaagcttgttgtgcaccatcgcccgaccgccacctagtaccacatgtgatgggtaccccataatcctacaagcttgagatgaggaagtgttgaagggtgaaacttcctgcttttattgttgaccacagagtggtacctggagatatgtcgcaagggtcaggag

SEQ ID NO: 18190 - DNA, 287 bp, Glycine max
agcttcttttggaccttgaacaagctattaactcctctttcagaaccatgctatgtgctcgcgactggtctctttcttccctccgcaacttgagttcactattgctaccccatagagctccgcgaaatttgttccggccatactcttccttgcgagccctcttggtctcttgttcaagggctcttgcggtaatttcattctcttcccgtaacccggcacactccttccgaacgtgtgtagcggccaacatgatcttctccttggcaagttttgcctttcctaactcg

SEQ ID NO: 18191 - DNA, 288 bp, Glycine max
agcttttctttgagcaaagcaaaggcttgctcttgtttttcaccccaggtaaatgccacattcttcttcactagctcattgagaagtgatgcaattgtagagaaattaggaacgaaccttctatagaagcttgctaacccatggaagctcctaatatctcccacactttttggggtgggccattcttggatggccttgattttctcagggtccatttggaccccatttctaccaactacaaacccaaagaaaactatattatctacacaaaaagtacacttctctata

SEQ ID NO: 18192 - DNA, 203 bp, Glycine max
agcttatgtgttatagcttttaattagttgtacaaaaggtaaaatccttttaagtaggtgatcgaggccatgcccgaatcaaataaatattaaaatgtagtaactaggaagtgatcctaggtcgtttcccaacgagcaaggatacaccaaatgttcataacagatagtaggaaatagtcacaaattggggggggggggggggt

SEQ ID NO: 18193 - DNA, 71 bp, Glycine max
tggcacggcgaatatgacatactgatatgaaaggagggagaggggtgatctcgaaaccggacctaaaccca

SEQ ID NO: 18194 - DNA, 291 bp, Glycine max
agcttgcctcaaagaggttcaggattgacaaggcggccgaaggaactagttccgccccggagtacgacagtcaccgctttaggagcattgtgcaccagcagcgcttcgaagccatcaagggatggtcgtttctccgggagcgacgcgtccagctcagggacgacgagtatactgatttccaggaggaaatagggcgccggcggtgggcaccactggttactcccatggccaagtttgatccaaaaatagtccttgagttttatgccaatgcttggccaacagaggagggcg

SEQ ID NO: 18195 - DNA, 381 bp, Glycine max
ttcttaagaagattcctaaggaagctagagcttagctacacatacctgtctaatagctaagctcacctccttgagatgagaagctagaacttagctacacaccccctataatagctaagctcacccccatgacaaaaaacatgaaaatacaaaaaaaaagtccttactacaaagactactcaaaatgccccgaaatacaaggctaaaaccctatactactagaatgaccaaaatacaaggcccaaacgaagaaaaaacctattctaatatttacaacgataagcgagctcatgcttatcccatgggctcgaaatctaccctaacgttcatgagaaccctagggccttccattggatctctagcccaatctacttggagtct

SEQ ID NO: 18196 - DNA, 282 bp, Glycine max
agctttgtttggagcttttatggagaatgaaggagaagagaatggctacgtgagggagagagagagctgtctgaaaagtgtgggggctgagtgaagagagacaaaagctttttggttttaaataaaaagggttttctctttttttctattattttatttaatcaatgccacatgtctccatttgagtggagcaaaaagggcccactttcccttttgactgtgacccatactcagccacaaaagtggggaaaatctgacctttgaaacgctaaaatccagcct

SEQ ID NO: 18197 - DNA, 371 bp, Glycine max
tgccgccacggagttttccgactatgctcttgtgtggtggaacaagctacaaaaggagagagcacgaaatgaagagccaatggttgatacatggacggagatgaaaaagatcatgaggaagcggtatgtgccggctagttactcaagggacttgaaattcaagctccaaaaactaacccaaggcaacaagggggttgaggagtatttcaaggaaatggatgtgctcatgattcaagcaaatattgaagaagatgaggaggtaactatggctcgatttcttaatggtttgactaatgatatccgtgatattgttgagttgcaagagtttgttgaaatggatgatttgcttcacaaagcaatccaagtggagc

SEQ ID NO: 18198 - DNA, 283 bp, Glycine max
agcttgacaggtgttttatgtagaagatccctgcgactctagatggtcaatggttttgcaaaggagaacaatttctagcaatcaccatattgatggttcaacagttgatgtcaatgatatgcctcctttctctaaagacatgccttcgattaatgatgaacaataacaggatgatgtatatgcaaatcatactgatcatgatgagggtttatgggagaacattcctacataactgcctaagcacaaagcaccatatatgtcgcataattgtaatgcataaatt

SEQ ID NO: 18199 - DNA, 374 bp, Glycine max
tattcacattatagtcttagtcttgctgcttctcacttaaaatacctttagaaatagttgctaaggttcctgacctatgtcctcttatccccatgggcttttcttcactatctcttttaaaaatttacattgttctcatttctagtaggaagagcaatgatagtatccatatggtagaattgtttaattggaaaaatcaaggaatacttcaacctagtacattgagggaaacaagacataaagcaaccgtgcttaatgaatcatttagggatttccttaagtatgtttttcttgcattaaaatcctttttccaactattttagccctctaaaaatgccgaatttataggaataacctttttccaagatggagta

SEQ ID NO: 18200 - DNA, 286 bp, Glycine max
agcttctcagtgttgtgagcttagttatgattggggtgtgtgtagctaagctctagcttctcaaggaagttttctcaaagaagcttctcaaggaagttttctcaagaaagcttttcaaggaagctacctagtctataaatagaagcatgtgtaacacttgttgtaactttgatgaatgaaagtcttgtgagacacaactcaaagttcaacttctctccctttttcttccttcaatttcgtgctccccactctctctttctctccctctttcttttcctccattcaa

SEQ ID NO: 18201 - DNA, 357 bp, Glycine max
tcatgatgaatcaagattgattcaaggagttttgatgataacaaagatgatgacaaaaaactcaaagtcaagatcacttcatgataacaaagatgatgacattcaagaatgagttcaagattgagtcaagaacacttcaaggatcaagaggaattttgatttcaagaatcaagaatcaagattcaagaataatcaagatcaagatccaagactcaaagattcaagaattaagagaagacttaatcaaaataagtattaaaaagtttttcaaaacattgagtagcacaagaaagtttcacaaaatcattaccaacgagttttaatctctggtaatcgattaccagattatagtaatcg

SEQ ID NO: 18202 - DNA, 287 bp, Glycine max
agcttgatgtttttaaagtttggaatagtcaggcttcctacttttgtttgttgaccacaaagtggtacctggagatatgtcgcgggggtcaggagaccttggggacgtcaggtggggtgctattgcccaaaaccaagcttgactaatcccgacccaacctgggcatagtcagtcagtgagaacctgtgacgtacctaaacaagcgagctcctggtagtcaaccaataaaagaacaaagtccacaaagcaaggaggcttgtgagacggctggtcagctatgtatcttg

SEQ ID NO: 18203 - DNA, 369 bp, Glycine max
ttgagacgcatgtgatcttttggcatcattaaaacatcgccttgatcctttgtctacaatctccccctttttgatgatgacaatccctgaaatcaagacaaactatatacaagatgatagcacgttcacacaacccttactccccctatcttttggcatgtatgcctaactttacttgataatttatttctaacccaagttctctcaaattctctccccctttggcaacatcaaaaagaactaagcaacataatcaatagccaaacagagccaaacagtaaaccaaaataaatccatacattgtcataaccaaccaaagcaaagttcagaaatataatataagtgcgagagtacaataatctaagcaat

SEQ ID NO: 18204 - DNA, 287 bp, Glycine max
agcttgtacgaatgtaataaacatcttcttcgacctttgtgattcttgactccatctcattgaagcgcatgtccacttgtaactccaaagtatcaaacctttcaccaacaaaggtttgaagaccatcgaacctatccaaaatcttttgaagaagcgaggaatcttctccaccatgtaaatgtccttcttcatcaacatgtcgagcaccctttttcacccaagagccatcatgctctttttgataaccaaaggatgcaatgacaacaacgcctattagaaaggatctc

SEQ ID NO: 18205 - DNA, 365 bp, Glycine max
ttgaattcatgctatgcacccatagggagccatccttgctttgatgtcttcatcttcattcttctactatcgataatctttttctttgttttaagcgagttttgaccgaacatttaagtcgtaatctcacttaatcaatgttaaaatgaatttcaaccgatcgttcgtgttgtaatctcatttaatcacctttaaaataaaattaaacctatagtttatgttgtaacctcggttaatcatctaaaaaatgagtttcaaccggtcatttacattgaaagttctcttttaatgagttgagaaataaccaagtgaaaccaaagctaaaatcaactcataaacaagcttttgtccacaagaaaatcact

SEQ ID NO: 18206 - DNA, 280 bp, Glycine max
agcttcggtagttcaatttcgagcatctcgatatattatgcgcctgaatctgacatctgtgtaaaaagttatgaccattttagtttatcgggagcttccgtttttcaatttcgagcgtctctatatgtgatgagctcgaatcggacatccgagttaaaagttatgaccatttgaatttctcgagtgctttcgtttttcaatcttgagcgtctcaatatattatgcgcttgaatctgacctccgtgggaaaagttatgaccatttgaatttctcgagagct

SEQ ID NO: 18207 - DNA, 364 bp, Glycine max
gcttgttgacacgcggagatttacgtcaacttttgtgctcacaagatttgtcatactgacatttgagtcacgttgacgggcggagataccctagtggttatccgtataaacattcttttttgctgtctgtaaaacgaaaagcctgatagcatgcagagactaacgtcgtcttctgcgcccttcgtcaatcgcggccgacaagcccgttgacacgcagagatttacgtcattttccgcgctcacaagatctgtcatactgacatttgagtcatgctgacggacggaaatacccaagtggatatccgtataaacattcttttttcctgtctgtaagacgaaatgcctgatagcacgcaaagactaa

SEQ ID NO: 18208 - DNA, 280 bp, Glycine max
agcttgtagagttgagtctcgtatcagtttcatcgattaccgatatctcgtaatcgattgcactattgtttgtgatgtaagctaaattggagcttgtaggcctatgatcttcttcaccaatggatttctttgattcttggaagatgaatgacaatggaatggagaaggaagagagagaggagaccccactttaaggagaagatgagtcaagaagaagctcaccatcataggaggctatggataaaagcttggaggaagaaggagatgaatgaagggagag

SEQ ID NO: 18209 - DNA, 364 bp, Glycine max
  unsure (1)..(364): unsure at all n locations
ttgaatctcttagaacttcttcttcttctttgtaccaaacgctttctgaaggtttctggtgttctaaaccttgaaaactagagctattcatcttttcattctcttctacctttgccaaaaagaattcgccaaggactaaccgcctgaattctttctgtgtctctcttctcccttttccaaaagaacaaaggactaaccgcctgaattcttttgtgtctcccatctcccttgtcaaagaattcaaaacgacacagtctgagaattctgttgattcttccctttccctaatacaaaagtgttcaaaggactaaccgcctgagaattcttttgtatccncattcacaaagtatcaaagttttaacaa

SEQ ID NO: 18210 - DNA, 289 bp, Glycine max
agcttgttacagaacttatgaaaaatcaagaacaagcttgttcgcacatcgttcgcgtgtacgatatccactcgacaaggtttgaagtagaggagaccttcaatcctataacgcaacgtggcggacaaaaatgggcagttaacttgaatggccattattgtcaatgcggaaggtattctgcgcttcactatccatgttcacacattattgcaacttgtggttacgtgagcatgaactactaccaatatatagatgttgtttacaccaatgaacacatcttaaaagcata

SEQ ID NO: 18211 - DNA, 288 bp, Glycine max
agcttgtaagaagacaatttccaattatgctcccttatgcaatgacgattaataagtctcaaggccagtcattatctactgttggactatacttacctaacccattgtttagtcatggaattataaatcaaagaatggattaaaagttttaatacatgataaagacaaaacaagcttgacctctaccaccaatgtagttttcaaagaggctttcaaaagcctgttaaggtatatatataatatctatatactgaccattttccttaagcattataatgtattcactac

SEQ ID NO: 18212 - DNA, 290 bp, Glycine max
agcttttgtcgctccacccatatttggccttcacattaaccagacttaacactgtcgacaacagcatcaaggaattcttgcacctcggatacaaaggcttctttgaatcagtttgaaatgtatcatacatagaggcatatgcttgtcgaaaagactcttgttcaagatcacgaatcatatcctctaagtgatctcccatttctacatcaaatgatttagattaagaccccctctgtatgtctgtcaattcactatgtcatatccacgtggtgtaattcttcttaatccca

SEQ ID NO: 18213 - DNA, 289 bp, Glycine max
agctttgactgattctcatcaccattaaaataatgtgagagacactgcagtgcatgtgagtgtgagttgacatagaatatacttttatattgatggtgtttaattggctgtatataaaagtataatgtatggactatactttaagcacattacacccttttttgtctccgtggtactcgcgagaatacacaagtatcgcattccttgtattgagaccgctggctcgaagccagttgtattgtaactgtgaggccatattataatattggacttgcaagaaacttctgag

SEQ ID NO: 18214 - DNA, 291 bp, Glycine max
agcttggggcattgaggaagggtttttgaagaaagaaggagaaaggaatggttgttttccaaggctacacgaaaaataagacttgaaacactcaagtgtttctactctcaagaaaagaagcttttctcacacaccaaaagacatattgtagatcgtaacgatcaggtcgtagaaatctgtcctatgaacctccagaccaaatttcgagaagatctaacaattaacgattgcagaagggcgcttttaccaaggtagcttcaggtagcttccttgagaagcttttctcgagag

SEQ ID NO: 18215 - DNA, 379 bp, Glycine max
actcgctagaatactcatgaagatgtacctgtatgttaagattctaggctgactgacttctctgctccttgttgaattgattcccgaatgattcctccagcttgagccttgtgtgaaattcctcccttgattgaatcccagcggtcctccttggttatagccttggaatccgtggtgattctgtactcccatgtaattcaagtccttggaaggatcttcttggactatacattgtgctgggtcgtgcactcctccatatatgtggtatccccctatctgcataactgaaaagtgataaggacttaccacttgtagttgttgtgaaagcttgttaagggtttctgttatggccttgtcagttgatgaatacgactaactt

SEQ ID NO: 18216 - DNA, 279 bp, Glycine max
agcttgccacctagcttttccaggcgagcagggttgcttcctccagaagcaacagccttctggaggaatcttctggagggcccaagtgggcttggttgctatttgcacccccattttttactaagtacacccccctgccttttttttggtgatacttttttcgtaaagttacggaaacttacgaatttcggaacgatacttgttttctttccgtaatgttacggaaccttgcggattacataatcatcccctttttgacttacggaatgttaccgaacc

SEQ ID NO: 18217 - DNA, 363 bp, Glycine max
  unsure (1)..(363): unsure at all n locations
tggttgctagtctacccttcagacaatntgtatcccttgaagccatggtaaagtctaacatttccgtctgaagcaagcactgactcaagtttattttgaggttgaaatcttgagggcaacaaccaattaattgagtctccttctggtcttctcaaatgttgattcagtttattgaaaatattagttaaaagtttaggtgttgtagcagtgtcaactttcttcttgatttccaatttgactttcattgcatcaaaaggaatagacttagtggctccatagatgctcttcagtcttgatatgtctacttctgatataggttgagcaaacatagcatcaacaacaacttcatcttttgttgtgact

SEQ ID NO: 18218 - DNA, 281 bp, Glycine max
agctttgaaaaaattcatatgctaataacttttcactcggttgtccgattcaagagtatcacatattgagacgctcgaaattgaacaacggaagctctcgagaaattgaaatggtcataacttttcactcggatgtcccattcaggtgcatcacatatcgagacgctcgaaattgaacaacgggagctctcgagaaattcaaatggtcataacttttcacacggaggtcaaattcaggcgcatcacatatcgagacgctcgaaattgaacaacggaagctc

SEQ ID NO: 18219 - DNA, 372 bp, Glycine max
ctgaagaggatgctttaatggaggaaaagatagagagaaggggggagcacgaaattgaaggaataaaagagggaaagaagtggaactttgaagtgtatctcataaaactttcattcatcaaagttacaacaagtgttacacatgcttctatttatagactaggtagcttccttgagaagctttcttgagaaaacttccttgagaagcttctttgagaaaacttccttgagaagctagaggttagctacacacacccctctcataactaagctcacctccttgagaagcttccttaagaagattcctaaagaagctagagcttagctacacatacctctctaatagctaagctcacctccttgagatgagaaa

SEQ ID NO: 18220 - DNA, 286 bp, Glycine max
agctttgagggtgcgtatttccaccatcttttcatagtagagtatcgataatgtgtctaccatcacgattatcgtctccctttccatcattgggggtaccacttgggccgccagatccctccaccttttaggcgtgttctttgaaagatccgtccccctttttgcaaatgttctataattgcatcctatccggaaccatatcaaaattgtactgatactgcctaacaaaggcaaccattacgtccttccaagaatggactcgggaagattccaagttagtgtacca

SEQ ID NO: 18221 - DNA, 293 bp, Glycine max
tctacttatgtggcagggcgggcttccttcaccttcttgtctccaacgcgaactttgaccattgttcttccttcccgcaatgcttcttttcatgtctgcctgagtgggcttatagcctaaaccatacttcccacgatttccttgagtatttatcaggctagttatgccgccgttgttttttcctaaacccatcccgggttcaaaaccggtccccaacataactcgggccatcattaccgctgcatcggacagacaaggttgcccaaagagggagtccacggaagaaatgctga

SEQ ID NO: 18222 - DNA, 272 bp, Glycine max
agcttccattgttcaatttctagcgtactcgatatattatgcgcctgaatcggtccttttagttaaaagttatgaccttttgaatttgtcgagagctttcggtgttcaatttcgagcgtctggatatattatgcgcctggatcggacctccgagtgaatagttatgaccatttgaattatgtcgagagcttccgttgttcaattttgagcgtctggatatattatgcgcctgaattggaccttcgagtgaattagtatgaccaattgtattg

SEQ ID NO: 18223 - DNA, 306 bp, Glycine max
actcagctttcagaaattaaattgtcataacttctttctcggaggttcgattcatgcgcataatatatcgacacccccgaaattgaacaatggaagctctcgagaaattcaaattgtcataacttttcactcagaggacccattcatgcggataatatatcaagacgctcgaaattgaacaacggaagctctcgataaattcaaatggtcattacttttcaactggagtttcgattcatgcgcatcacatatagagacgctcggaattgaacaacggaagctctcgagaaattcaaatggtcattg

SEQ ID NO: 18224 - DNA, 280 bp, Glycine max
agcttagctcgcctgggcgagctgggtggcaagctcctcccctattttcctataaatagggggaggagtgaaggaaaaaaatgttcagaccttctggtattacgagatcacttgaaattagtgaaaaaaattgtttccgtgaagaaaatacaagccgaggcgcttccgtaacgcttccgtgggtgatttcgctaagattttaacctattcttcgacgttcctagctcgttcttcggtctttaaccgggaagtactctaaatcgaacttttcaattcattc

SEQ ID NO: 18225 - DNA, 365 bp, Glycine max
tgaaggtgtgtaacccaccattttccatatttgaacactggtaacatgtctactatcattgtgataatctctttctctatttattgggggcgctacttgagctgccaagtctttccatctttgggcgtattcttttgaaagattcgtgccccctttttgcacatgttctgttgttgcatcctattctaagacattatgctgacactgcctaacgaaggcaaccactatgtccttccaagaatggactcgggaaggttccaagttagtgtaccaggtaacaactaccccagttagactttcttgtaaggaatgtatcaccaattcctcatcttttgcgtatgccttcatctttcgataatacatct

SEQ ID NO: 18226 - DNA, 279 bp, Glycine max
agctttgagaaaattcatacgacaataactttttactcggatgtctgattgagtcccgtaatatatcgagtcgctcgaaattgaataccgaagcgctgagcaaattcaaacgacaattactttttactcggatgtctgattgagccccgtaatatatcgaaaagctcgaaattgaatgttgaagctctgagcaaattcaaacgacaaaaactttttactcggatgtctgattgagtcccgtaatatatcgaaaagctcgaatgtgaatgtagaagctct

SEQ ID NO: 18227 - DNA, 358 bp, Glycine max
tctacattcaatttcaagtcttttcgatatattacgggactcaatcggacatccgagtaaaaagttattgtagtttgaatttgctcaaggcttcggtattccatttccagcgtctcgatatattacgggactcaatcggacatcagagtaaaaagttattgttgtttgaatttgctcagagcttccgtattccatttcgagcatctcgatatattacgggactcaatcagacatccgagtaaaaagttattgtagtttcaatttgctcaaggcttcggtattccatttcgagcgtctcgatgtattacgggactcaatcagacatccgagtaaaaagttattggcgtttgaatttgct

SEQ ID NO: 18228 - DNA, 278 bp, Glycine max
agcttttaaactataaatttgtctgagcttgcttttgaacagagtaaaatttgaacttcacagagtgatctttcagtcaaaatgttccagtcaatagtcataatatgatccaacaaaggatgagagagtcatggctgtggatgacaagtacgtgggaaaatccaagatactgaattttaatttaaatttctaagacaaatatataattttattaacgaaaaacccatataatagtggtgtattcaattaggattcataaagaatttaaaatattgtga

SEQ ID NO: 18229 - DNA, 336 bp, Glycine max
tctttttcatccattataccaaccttatatctactcttatccttaggaatgatagtcacccaaattgtttggagaaggatcggatcgatcacgattttagtttttttgtgaaaaaaacaaaatgaggggggccataaaaacttatatatcattggccaaaggtagggggaaaggatattaaaagcctgggaacttaacaaagatccataacttaagtgcctatttaccgggaggccctatgaaggctggaccggactttattggcgggcccccgttccttttaagaagcacctggttttttacagagtcactggcccttcaagacatggttttctt

SEQ ID NO: 18230 - DNA, 287 bp, Glycine max
agcttttcgattcattctatgtacccgtggtggtccacattgtgtttcgtgtatttttattctcgtttcatttactttttataccccctttggacgtgcttaagccattttatttaagtcatttctcgtttaacctaaaaataaaataaatttccaccgatcgtttgaattgtattatccgttaacttcggttaaaatgaattccgaccgttcggtcgtgccgtaaccacgttggaaatcaaaaaaggaggtaaaataataatataataatcaaaaaacatctttta

SEQ ID NO: 18231 - DNA, 287 bp, Glycine max
agcttggaagctttgcttctaccctttgtccttttatttttttggtttcatttttttctctggcgtctggttttgaatagccagatcgcttgaatgaaattagtgtcattaaaagataagtaaagaggggcaactgtcagaccctaatttcatccgggtataatgtttttatcattcagatatgatgttttgatcactgctaattgaattactatgtttggcaccggttacagctcaaggccaaggggtcacatagggttttgatagttgtttgtcagttctagaaa

SEQ ID NO: 18232 - DNA, 291 bp, Glycine max
  unsure (1)..(291): unsure at all n locations
agctttgacaatgngtcctgatcctgttgattattttttctataactacttgtggagtttacatatccttcctagtgtggctgtttttgtttggtgattatctttggataagttaccatctaagtcaaacttatgcatgcaagagacaagtaatttcgtaggagctggatacttgcatgttttgtttagaggtagaagaatcacacaatcaccttttattcaactgccatttctcagtgtggagtggttgtcttcaatggttaggggtgcaaataatgcaacactcaaatt

SEQ ID NO: 18233 - DNA, 292 bp, Glycine max
agcttcttttggaccttgtacaagctattaactcctctttcagaaccatgctatgtgctcgcgactggtccctttcttcccttcgcaacttgagttcactattgctaccccatagagctccgcgaaatttattccggccatactcttccttgcgagccctcttggtctcttgttcaagggctcttgcggtaatcgcattctcttcctgtaacccggcacactccttccgaacgtgtgtagcggccaacttgaacttctccttggcaagtttcgcctttcctaactcgctttt

SEQ ID NO: 18234 - DNA, 273 bp, Glycine max
agctttatctccttcaactgcacaaggctcttaatatttgaagagtatccttgtggaaccttcacccgacgaagacactgacaaaaacttatcttctccttcttggacaaagtatggcacgctgggggcaagtaaattttcttcccatcagaccttggatgcaactgtgatcttatacccatatcagctagatcttgacgggtattcaagccatccttcgccttgccttgaatgttaaggagcatcccaatcacactgtcacaaacatttttc

SEQ ID NO: 18235 - DNA, 364 bp, Glycine max
  unsure (1)..(364): unsure at all n locations
tcttagtctcgactgatgaagatgaattcttggccacttcatgcactcctctaatgacaatagcatcacttctggcactaaattgctgggagtttgaagccatcttctcaattaaatttttggcttcagcaggggtcatgtctcaattaaatttctgacaatcaaatcaagtccagttttaagaacatatgggacatcctcatcagggtattggatgcacaagctttcgtaggtgaaatcaggtgcagccatttcccttagagtcctctcacggngtggaggttgtgccatgttctcagaatgttcaaaatcataatgttcaaaacaataatgctcataatcaccaataacaaaatgctcatga

SEQ ID NO: 18236 - DNA, 283 bp, Glycine max
  unsure (1)..(283): unsure at all n locations
agcttgacaggttcaggttcatgtgctgntattagtggaggcactccaatttgcttgccagacctcaaggtgatggcactcacattttttggattttgcatagtttgtgaaggcaatttgtcagaattttgggactgagcttggttcaattgagtagccatctgccccctctgatttgtcagactctgaatgaaggctcttatttcttgctgaaattgcatattctggatggtcatttgtctcactaactcctctaaggaaggttgagaaggggcctcatttg

SEQ ID NO: 18237 - DNA, 375 bp, Glycine max
  unsure (1)..(375): unsure at all n locations
tagatatgtcggtggtaccgatgtccatatatgttatggtagtttctccttctgttntgtttagtaatagtatacattatgtgcctgatttcttttccttcatttgatgataaaggaacaattaatgtgttatcatggcagggtccattttgctcgtctctctaaaaagtgttcacaggaaatgcttaattataatattggtcaatgggtattaataatatctaataaatactgataaaaaaagtatctaataaatttttaaatatattaaaagataaacaacaaattttatattttaataaatacattctattaatgtatttgttttgttaactaacactctaaagaaaatggtcataatactctcttgaaaaa

SEQ ID NO: 18238 - DNA, 282 bp, Glycine max
agcttcttagtctcagatgatgcttctgagtttgtagctacctcatgcactcctctaatgactacggcatcatttctggcgctaaactgctgatagttggaagccatcttctcaattaaatttctggcttcagcaggagtcatgtctccaagggctccaccactggcatcatctatcatacttctctccatattactgagtacttcataaaaatattggagaagaagctgctccgaaatctgatggtgagggcaactggcacatagttttctaaatcgctcc

SEQ ID NO: 18239 - DNA, 322 bp, Glycine max
tcttactccacatgatgcatatggggatgttgctacacaatgcacttcgctaatgaccatggctacatgttctggcgcttaacagactagaggcggacaccattggacaatataagactgtgtgcatgatcacgaatcaagtataccacggctccgctcccggtagaaactagcatacttgcttaccctttactgaatcctctctaaacatattggaaaagaaactgatctgactactgactgcgggggcaactggcacatagattcttaaatttcagacaggactcatactggcgctctccactgaataggctaatacctg

SEQ ID NO: 18240 - DNA, 284 bp, Glycine max
agctttgagaaaattcatacgacaataactttttactcggatgtctgattgagtcccgtaatatatcgagtcgctcgaaattgaataccgaagcgctgagcaaattcaaacgacaataactttttactcggatgtctgattgagtcccgtaatatatcgaaaagctcgaaattgaatgttgaagctctaagcaaattcaaacgacaaaaactttttactcggatgtctgattgagtcccgtaatatatcgaaaagctcgaatgtgaatgcagaagctctgagca

SEQ ID NO: 18241 - DNA, 242 bp, Glycine max
  unsure (1)..(242): unsure at all n locations
tctacattcaatntcaagcttttcgatatattacgggactcaatcggacatccgagtaaaaagttattgtagtttgaatttgctcagggcttcggtattccatttcgagcgtctcgatatattacgggactcaatcggacatcagagtaaaaagttattgttgtttgaatttgctcagagcttcggtattccatttcgagcatctcgatatattacgggactcaatcagacatccgagtaaa

SEQ ID NO: 18242 - DNA, 275 bp, Glycine max
agcttaaaaattcaagatttgtattgacagtctcggatgcgaaaacttacccgttgaagaacgaagaacggttgaagaacgatgaagaacggacgaaaaccttcacggatttgcttacggaaacatttcggaagcgttacggaagcacctcggcttggattttgttcacggaaacaatttttttcacccagaacagctgaaatacatacccagggggctgagggatccttagaacagcccccttcaacctttttataggaaaaagggggaggagg

SEQ ID NO: 18243 - DNA, 326 bp, Glycine max
tccatcaacatccattgaggatctttgctttttaaaggatttttacaaggtcgacagaaatctcaaggaccacaagtcgcttgcggactggatgtaagcatgggttgatgccgaaccagtataaaaactcttgagtgtttgtatccatctttcctactcttttactttccgctgagcattttaatttctgcttttacttttggataagtttctcttctactccatattctcttaacaacatattaaaagccttagaggagtaaatttttaattattaaaggtttaagaataattaaattaaccctcccctctttttaattattctg

SEQ ID NO: 18244 - DNA, 277 bp, Glycine max
agcttatagaatatataataaaagaacaatgacaattgaagaatctatacatgtttcctttgatgagtctaatgccattcttccaaggaaggattttctaaatgatatttcacattccttaaaatatacacatattcatggaaatgactctaaagaaaaagatgaaggaagcaatgaggattctcaagataatggagttagaggaaataatgaacttccaagagaatggaaagcctcaagagatcaccccctcgacaacattattggtgatatatca

SEQ ID NO: 18245 - DNA, 370 bp, Glycine max
  unsure (1)..(370): unsure at all n locations
aagagtgccatctacattggaacatggcgttgtacttctattcggagaatatgcctgaaggacaagccaagaatcaaatggctctgggtcttgaagacttggaccttacatagaaagatgcttttgaacaaccatgctgtggtctattattgaagcatggcttcccgatcttgaggatgatatttttgaaacagactcaagtgttgaactaagttaaacaagggccgtatctgaaacaagacaaacaagccctccgttggttggactgtttgaaaaaatgggtggaaacataatcatccattttgaaagcttatatggggcctttggctttgtcaacatgaaaggaaacgcacgtccatttggaaagggn

SEQ ID NO: 18246 - DNA, 280 bp, Glycine max
agcttgccaaatgctctattggctgatgagttggtccatcctctcgaagtccaatcgtatcatgagtcatcacataaataacttcagcttcacacagtgcataaatccttatggcagctctcatgtagtcagtgaagacaaagggcatttatattttgctgaaacagatttcttgtagcatatgcagggctttctggagtgtatgtctgaatgttgaaatttaattagaagggtagtcaataatccagaaacaaatgatggaagtcaagttttatttatc

SEQ ID NO: 18247 - DNA, 357 bp, Glycine max
tcattcttagaatgaagttagtagagatatatatatcgtgaataatcatctataaaggttatgaagtatttcagactatttgcatccatgtctggacaacatatgtctgtatgtatgatttctaataaattaaaactcctctttgcaccctttttagacttgttagtttgcttacccttaatgcaatctacacaagtctcaaaatcagcgaaatccaaagtactaagtactccttcatttactaatcgcttgattctctcaataaaaatatgtcctaatctctggtgtcacaatatagaggttcttcattcacaatacatcgttttaacccaacagaaacgtgcatagaagtagcgt

SEQ ID NO: 18248 - DNA, 276 bp, Glycine max
agcttgtgtataaattgtataatgcattggaaactttaaatttctttaaactatacagagagagaagttaccgaaggtcgttcattcattcagcacgaagcgagagaagcggaatccaaagtataggcaacatagtcgcgaacgttgctcctcttccgcttcggcaccattttcgttggtttcaggtctttcctaaaagcttcagggattaggttacgggtttcgtcgaacctgttctctttttgggcctgcgacagcgagtggttcacgacgcgg

SEQ ID NO: 18249 - DNA, 338 bp, Glycine max
tctacctcgccaggggcatgaattcggtgtccacattcacgctaaccgcttcaactaaatgtctgggattggcatcacaatgttttgctcgagctaattcttcgatcgctaatgtctcctttagttcaatagcaatctcactcatgattggcctttcgctgggattttgagaaacacaagccattgctatttctaaggctttccaagctgagttaatgtcataatctccttctaaccttgagtcaactatggccctgatatcccctttctcaatcaaggacctaacccttccacttatgtgacccttttcttgattcctttccattactggttgggtt

SEQ ID NO: 18250 - DNA, 301 bp, Glycine max
  unsure (1)..(301): unsure at all n locations
agctttncgtcaatggtattacaagttctatcaagtcattaccttgtatggttttgaggaaaatgcagctgatgattgtgtatatcacacgttcaatgggagtaaatacttattcttggtattatatgtcgattatatactgcttgataggagtaatataggcttcttataggagactaaaaaaatttatgaccaaaaattttgaaatgaaaaatcttggggaagcctcttttgtgttaggtattaagatactaagagatcactcccaaggtatcctaagactgttagaagagagttatat

SEQ ID NO: 18251 - DNA, 313 bp, Glycine max
tttatgtgcaccataaattgcgttacgtttattaaatgagtaaaaaagaatgatcattctatttaatccatatcaactaacatggtatagccacttcaaaatatatataccagccaatgttaaatttctacaaaccttaaactggtaactttgaaagatagcaattgcgcatcaagcttcaattaaacaatttgttttcaacacaaaattgctttgaataatttttaagacatgcaagtgtggaagtaatgtctttcaagattattttgatgatgccaaagaatcaagagtcgaacaagtttcaagaatcaag

SEQ ID NO: 18252 - DNA, 295 bp, Glycine max
agcttgcctgggcgagctatgcggctaccacctcccccgtttgttaaaaaaaatggctttcgggactcccgtaatgctttcgtaaaattcccataaccctaaataagcatatttcacttaatacgggtgaggaggaagagaaaaaagaacaaagtcaactcaaatatgcttccgtaaggcttcagtaacttttccgtgaaataccaaagaatggaggtgaacttatcaaaatggggggtgcaaatagcagttttcaaaattttgaatttgggccttccaaagtattttcaaaaca

SEQ ID NO: 18253 - DNA, 313 bp, Glycine max
tttctttctcaatcaatctgtctactgtctaacaattctaattgcaagttcacattcttgttctttctttgtctaacatacacacttgttcaaactcatgaaaaggaacacaaactccatcacaatcatgcattcaattcaaaataaaagcatacaaccattttcacaaatcaataaaagtgcttcactgccatatcattaaaaaccaagttaaactgttcaaaatgcttcaggatgagcaaatcaactaatcataaataaaactagcaatgtatataaacataaaagagatactgtactaaaaccataatta

SEQ ID NO: 18254 - DNA, 300 bp, Glycine max
agcttgggagagatatacagatattgtggtgcccaagaaactactatcggagaagaatgcggtagtttattacactgaatttgacgagttcaaggaggaactcgacagaagacactgggatgagaagttaactaattttgctgacagtagcatagacattgctattgtgaaggaattttaggtgaacctctatgacctcgaggataaatcacctaagcaagtgagggtgagaggtcacttagtgaaatttgatgaagatactctttatacattcctgaagacccctatagtgctggaaga

SEQ ID NO: 18255 - DNA, 308 bp, Glycine max
tggagaggatgtttcaatggaggaaaataaagagggagagaaagagagaggggggagcatgaaattgaaggaagaaaaagggagagaagttgaactttgagttgtctcacaagactctcattcatcaaagttacaacaagtgttaaacatgcttctatttatagactaggtagcttccttgagaagctttcttgagaaaacttccttgagaagcttctttgagaaaacttccttgagaagctagagcttagctacacatacccctctcataactaagctcacctccttgagaagcttccttaagaaga

SEQ ID NO: 18256 - DNA, 301 bp, Glycine max
agcttggacaatcatcttatgggagtttcccagtttggccagctctagttggcgtcatagaaccccgacgcccacaaaggacattatcgaggagcagtacttaaagacatcatccttcacccattcgtaaccagcaacgaggggaggagacgagggtgctctagcactatggctacacctgttgcgaggtgaaaccataacttcaccaccatcactccttcccgtatccatcaaaaggaaagaaggaagggcggtagtgacaagaacaggctctttgtccaaatgagcaataaaaggccct

SEQ ID NO: 18257 - DNA, 307 bp, Glycine max
tgattttgggttagacatggttgatacatgatttgggacttgtaggaattgatttgggcaagattggatgagaggaagtgtgattttcgaaatctgcacttatgcagaattttgctgtcaaaataggtgcagcaggattttggctttgtgcagaaaaatgcttgtgtgtgttggctgtggaaagtctagtgcagaatgagttctggatgttttctagtagatcccaacggtcacaatgtaagcttatgtactatagacttccaataaaattttggagtcgatccaacggttaacgaattggatcgaa

SEQ ID NO: 18258 - DNA, 304 bp, Glycine max
agcttttctcctcctttcggtgttatttctcctgtatgtagcttcaatctccaaacctattggagctaaatcacttgttgaaggattaccttgcatacaagaaccaactaaatagagcaacagttaaccaagccaagagaaaaattgaattctaactattcagagaaattaatcaaataataaagaataaatgttcccaaactgaattaatcaaataaggcaaatgttgagttctgtactagaaaatctatttgaacctaaacaaaatatctaaagttgtaaaaagtgaaaactatcaagttaa

SEQ ID NO: 18259 - DNA, 312 bp, Glycine max
tcaacaaaccggatctgtgcttgaataccaacaacaatttgaatccctctccaaccgagtcaccggtctctcacccacctcccttctcaactgttttctttcgggccttcgaaaggatatccaccatgaactcagcatactcaaaccatcctccctgacccaagcaatcgatttagctaaactgattgaaaccaaaaacctagccacaaaatacccagcctcacggccaaccaaaccaccattccctccaaacaacccacaaccctctctgttaagaccgcctccgaccgttccgattcgtcgcctcacgcc

SEQ ID NO: 18260 - DNA, 297 bp, Glycine max
agcttttcatcattatctgaaggaattttcagaaaatgactgagatttcaacttttgaagccaaaaactctatttcccacacctactgcaaacaatggagactgaaaatttaatgcctcattgcatttgtaaaacgaaaaaacaaaaaaagcataagtcattcatttcacaatgaaaactggcacttttcttctatacctactttcagtcagtcccttgtacacaggttaaattcactttccttttttctgttatcccatttcagaaatttgttgtccagttgatgtggcccaattg

SEQ ID NO: 18261 - DNA, 268 bp, Glycine max
caatgtgaattcctcttcaagcgagtcaccggtctctcacccaccttccttctgaactggtatttttggggccttccaaaggatattccccatgaactcagcatactcaaaccatactccctgacccaagcaatcgatttagctaaactgattgaaaccaaaaacctagccacaaaatacccagcctcacggccgaccaaaccaccattccctccaaacaacccacaaccctgtctgttaggaccgcctacgaccgttccgattcgtc

SEQ ID NO: 18262 - DNA, 296 bp, Glycine max
agcttgtaggattatggggtacccgtcatatgtggtactaggtggctatcgggcgatggtgcaagtcgactctccacatccacaaatcacacataaatccaccatcccaagttgcccaccttcaactgagctcacgtagtcccacgtagcccttatcctgattcctctcaacaccgggtccccatcaatccctccaagcttccataacatccaagcaattcaacatccaaacatcatgaattatcagaaccaagaaaacagggcagaggcagaaaactctgcccaaaacacaaacc

SEQ ID NO: 18263 - DNA, 308 bp, Glycine max
tgctaacccatggatgctcctaatatctcccacactttttcgggtgggccattcttggatggccttgattttctcaaggtcaacttggaccccatttttaccaactacaaatcctaagaaaactatactatgtacacaaaaggtacacttctctatatttgcatagagggtgtttttcctaacgactgaaagaacttgcctaagatgtcctaagtgatcatctaagctcttactgtacactaaaatatcatcaaaataaacaactacaaatctacctattaaatcccttaagacataatgaataagcc

SEQ ID NO: 18264 - DNA, 295 bp, Glycine max
agcttggagaagatgcttcaatggaggaaaagaaagagggagagaaagagagaggggggagcacgaaattgaaggaataaaagaggtatagaagtggaactttgaagtatgtctcacaagactctcattcatcaaagttacaacaagtgttacacatgcttctatttatagactaggtagcttccttgagaagctttcttgagaaaacttccttgagaagcttctttgagaaaacttccttgagaagctagagcttagctacacacacccctctcataactaagctcacctcctt

SEQ ID NO: 18265 - DNA, 301 bp, Glycine max
tgaccaatcccgacccaacccgttcatattcggtcagtgagaacctgtgatgtacctaagcaggcgagctcctggcagtcaacagataaaaggaaaacaagaccacaaagcaaggaggcttgtggtggctggccagctgtgaattttgtgtaatatgtggattgtggcctctggtaatcgattaccaagggtgggtaatcgattacaaggcttaaaaatgaagacaggaggctaagatggtctctggtaatcgattaccacggggtgttatcgattaccaggcttgaaaacgatgtcaaga

SEQ ID NO: 18266 - DNA, 292 bp, Glycine max
agcttatctttgaagattctcacggaagcttctcaaggaggtgagcttatttattagacgggtgtgtgtagctaaactctagctgctcaaggaagctacctatgctatttatagaagtatgtgccacacttgaggtaactctgatgaatgacagtcttgcgagacacaactcacagttcaggatctctccctcgtttactcctttaattgcgtgctccccctctctctttctttttcctccattgaagaatcctctgcaaggttcttatccaagacacattcttgatggtga

SEQ ID NO: 18267 - DNA, 304 bp, Glycine max
tgtagaatggctggacatgacacatgtctgggactggtttggatcaaggataacagggatgccccacattatttccatgacacagatgccaaaatgatgatttggaatctttatgcaaaactggtcatgcatgcacctatgcggacactcaaatgtcaaatttttatggccatgtgatgctatggctcaggattcatttcctctattttaatcaacccaacgtttccaaaatatgttcttttatcaatttgggcattcacccgagtccattacgggcgtctgggaaaatcttcacagcattcac

SEQ ID NO: 18268 - DNA, 294 bp, Glycine max
agcttggctctggccattataaccatttcattcttaagttccttaacctttaaatagacattctggtcaagtaagtgcttttctgcatcaaacagatcaaacttgatcttctaatcatctatgcccatttctagtttatcctttcccatatccaccacacaaccggcggttaacataaagggatggcccaaaatcaaggggattttagcgtcctcttcaatatccatcacaacaaaatctgcagggaaactaaactgcttcaccttaaccagaacatcttcaattatgctataa

SEQ ID NO: 18269 - DNA, 308 bp, Glycine max
tgtaggattatggggtacccatcacatgtggtactaggtggcggtcgggcgatggtgcacaacaagtttttccacatccacaatgcgcgcataaacccaccatcccctgtagcccacctccaactgagctcacgtactcccacgtagcccatatcctcgtttctctcaacaccgggtccccatcaatcctcccaagcttccccaacatcaaagtaatacaacattcaaacagcacaaactatcacagccaagaaaacagagcaaaggcagaaaactctgccaaaacaccaaccaaaatcacagctttt

SEQ ID NO: 18270 - DNA, 283 bp, Glycine max
tagcttgtactataattttgaccgttctttactctctctcaaacagaataacttgtggacatgcaatcaacaaaaacttcctcagtaaactgaatacaatatgattaacggttaggacatgtttcgtttatcggatgcacaactctaaacattaattcatgtgtttcagagtaacaaacgaagatatactacactgtttgattggatatatttcaccggacaattgctaatgatgatcacaatttaaattaacagaatggataactttgcttaacgtacggga

SEQ ID NO: 18271 - DNA, 297 bp, Glycine max
tctaaaagaaaatccttaccccaaaactctagtttggttttcatgtttctgattatgttgtcccctctacaacagattctgagtgattaaggctttgagacactggctctttataaaacaatggatgactcagagaagactgatgttatagagaaacgacaagacctgtttttaaccaattctactgtattatccttgaaaccatttcagagtgtcgaatataatgtatagatgagaattgtaactgaattagtaattcattcatttgtccaaccaactaaacttctacaatagatt

SEQ ID NO: 18272 - DNA, 281 bp, Glycine max
agctttatagagtgttggttactgatggggggttatctaaatggccaaatagttcttaatttaacttgtaaagaaactactctgaccattgccctattattttgaaatctatagtatctactggggccctaaaccctttaatgtttatgatgctcggcttaatatcaaggagtaccataaggtggtgagggattgatggtctgccaatcagcccattggatggggtggatttgttttaaaaaacaagctcaagatcctcaaagctagattgaaattgtgga

SEQ ID NO: 18273 - DNA, 318 bp, Glycine max
acactattcaatcctgaagcttggatggactcacgctccttggcttccaatgctccaacgaatatactcactgcgctctttatttctttcacttacttcgccatgcctactactactaccctttatcgcccatcttgcgatgcatgcacctacggcgacactcatatggtactttgttttggctatgcgccacaaaagctgcgcatgaatacactgtatttacttcatatggctgtttgcataatgagaatctatatcaattcggggaatacctctaatccgactcaggcgatcgagaatataattgattcatactct

SEQ ID NO: 18274 - DNA, 304 bp, Glycine max
agcttagatgggaaaggagtgtccacttactatgatgccctttcattgactcactgtgtaataccatgtttatggtttacttggtttttcataccaacgttgcttctgatatttttctcttctctcaatggctagatcagaccacgtgagtttctgtggactgtgggaaaccttcaaaacaataaatttcatcggatttttgctgccaaatttcaattcacattggttagcataaatacttttttttttttttaaggcgagagactacaaatttcttcaaatattggattaaaaatattgaatt

SEQ ID NO: 18275 - DNA, 281 bp, Glycine max
gtgacacttgaatctaacttagaatcgccttcgtcgtctcttattcaggataacaagcaagacaccgcacccgatctctccatttcttctgaatctaataggtaccactttttgtttttaaacaacctttcgttgttaaaatgtgggatatcattatcggaattggaggtacttgatttgcaatatatgttttgaaatattgaaattcgaccttactagattacgcttttcatatggatggaattttctgcatcgataatgaatacagaaaatgtgattca

SEQ ID NO: 18276 - DNA, 298 bp, Glycine max
agcttctcccctattttgctataaatatgggatgaagtgaagaagaaaaaggttcagccccttaagcacttctctctctctcgaatttgctgaggaaaattatttccgtgaagaaaatccaagccgaggcgcttccgtaacgtttccgtgagtaattacgcgaagattctcgaccgtttttcaagattcatcgttcgttcttcgttttcttcagtcttcgacgggtaagtacctcaaaccaagcttttcaattcattctatgtacccgtggtggtccacattttgtttcatgtatttt

SEQ ID NO: 18277 - DNA, 311 bp, Glycine max
tggaggggatgcttcagtggaggaaaattagacagagagaaagagagaggggggagagcgaaattgaaggaagaaaaagggagagaatttgaaatttgaggtgtgtctcacaagactctcattcatcaaagttacaacaagtgttacacatgcttctatttatagactaggtagcttccttgagaagctttcttgagaaaacttccttgagaagcttctttgagaaaacttccttgagaagctagagcttagctacacacacccctctcataactaagctcacctccttgagaagcttccttaagatgatt

SEQ ID NO: 18278 - DNA, 300 bp, Glycine max
agcttgatttgtgagttgattttagtcttagtttcacttttgttattagtcaattcattcaaggaaacttccaaagaaaaacgtctgattgatttttttgattattttattcaaagatattttgattattttattattatttttccaaaatattttgattattttattattatttttctttttttggtttaaccgaggttatagcatgaacgatcggttagattttgttttaacggtgattaaatgagattacaacacaaatgatcggttgaaattcattttatcatttattaggtgaga

SEQ ID NO: 18279 - DNA, 301 bp, Glycine max
tgaagaggatgctttaatggaggaaaataaagagagaagggggagcacgaaattgaaggaataaaagagggaaagaagtggaactttgaagtgggtctcataatactttcattcatcaaaggtaccaccaggggtacccctggttctatttattgaccaaggagcctccttgaaaagctttcttgaaaaaacttccttgagaagcttctttgagaaaacttcccttgaaaacctaaacctaacctccccccccccttttattacctaacctcacctcctggaaaaccttcctggaaaaaat

SEQ ID NO: 18280 - DNA, 301 bp, Glycine max
agcttctacactatcatgttataagttggggacgaaccgaacaaaataaaggctcaatcaattacgcactcatctaactatcaaatttgttgaggaaaaacatgaccgacaaaaaaagcctatcccaggcgctctggtaacgattcctcgactaatttcgctaacattatcgaccgttattcacaagacacaacgcggtcgacgtacccttcaatcttaaacggttgagtaccgcaaaccgctcatttaaaatcattcaatgtacccgcggagggccacattgcgtctaagggctggaact

SEQ ID NO: 18281 - DNA, 311 bp, Glycine max
tggaggggatgcttctctggacgaaaatcagacacatggcatgagagaggggggatagctactatgacagataagaaagggagagaatttgatattagaggagcgcctcacatgactctcatgcatcaaacttacagctacgtgtgcacttgcatctatttataggctgggtctcttccctgagaagctatctcgagaactcctactcgcataaacttactagaaaacacgcccttgagaacctctagcttaactgcacacacccctctaatgactaacctcacctccttgagaagctcccttaatatgat

SEQ ID NO: 18282 - DNA, 300 bp, Glycine max
agcttgtagccattagattagaatgagcatgtggttggaagtatgactggaaatgttagtcagtttgtcagattgattgtgagggaatgcattaatcgtatccagtgagagtgtgatccttaaattttgagagaaacgactatcatttagtactgatttttgcgtgaatctctgaagtatggactaaatgcatgaaattgaggatgatgaagaccatgtttgattgtgatagccacttagccaaaaagctgaccatgtgcttgaatgaattatcccttgtacctagtttgagttgaatga

SEQ ID NO: 18283 - DNA, 313 bp, Glycine max
  unsure (1)..(313): unsure at all n locations
tgtgcaaatcaaatcactcctgcattttatctctagcatgcattgnatgttggtctcgtcctttgtcacgggaagccggaaggtccatatcaccttcttaattgtacacatggggcactgcacccccaaattcacaagtaagaagagataattttccgggctctcgtgtccgtaaaatgcattcatatcatgcatcgcataagcatctcttcataacatcataatggacatatcctgcatttgtccgttatcatattccagcctcacattttgcatgagtcatggcatcatcatgcatatgcgttcaacaaac

SEQ ID NO: 18284 - DNA, 294 bp, Glycine max
  unsure (1)..(294): unsure at all n locations
agctttgattattggaaccattcattggtttatgaaggagaattggacatagctctatttgagtgaataagtataaactaagtgtttctacttatctcttaagctatttggttagtatcatcttaagtttatcttgacatgctttgtcacacaagtgttcttttgaaaaacctttgtctaaatatagttttatcaatcactggacaacattgtttttgttttcaccaaaattggttttattcattgaatgacactgtcagtaacttggcttctgcatatttngttgtgaaaaac

SEQ ID NO: 18285 - DNA, 308 bp, Glycine max
tgcaaatgttgaccttcaatttgatactatgactaacgcttcttattttgctgtgggagatgtgttatctcaacagcgacatgcagaggtgttcttcagtaataaactttgtgataaaatgaaaaaggcttcatcatatgccacaaaaatgtatgcaatcatagtggtaaaaaaatcacagtggtctttattgatcagttgagtctttgccacatgctcacctaaccctttcaaaatcctaaacaacatcactaggccactaagtgatgcaatcctaccctacaagggcattggatataatactccaa

SEQ ID NO: 18286 - DNA, 298 bp, Glycine max
agcttatctctaatatcatgacaagatggaggtttatagccaaccccatatgttgcaaccatgtcacaaaattttgcaaaagctggatttttaataacattgaatggaatggcacttgtgtacctgtcgcaacctacacttcggcgggagggcgacgcgtgactcgcgggatgcgtgttccacgaaaggaatacgcgcggagtcgccaccaacgtttatttgtgagaaacgtcggaaaaaccgaaggaaaccggtcaaaaaggaaaattctaagttcgggagttgtatttacgcttga

SEQ ID NO: 18287 - DNA, 307 bp, Glycine max
tgctcggtgccattcctgcgaatgcaattatttggaaaattaattttagtgggacattactcttaaagcaaaaatggcatataacctcctcccataaatacaaacatcaatgtaaatttatagcaagcttatgcgcatgtttccttacgaacgttcacttgcggaagacattctattaaccgaaaaaatgcacccatatacaatcaaagcagctttgttacctagattatttacacgtacttccaaagtgtatttgttacttacatcacacacatctacttggctaaattcacatacatgcatactc

SEQ ID NO: 18288 - DNA, 291 bp, Glycine max
agcttgcatttccattgttctttgtgccaattgccgagttgtccctgccagcaacgtcggaactgaaacccaagcttggtgtcagatccgggtcgggtcgaaaaccaggaataaggagagtgggtttgaaagctgaaattgatacttcaccacctttagggtctgtcaaggaagcggtgagcaagagaggccttcatcaagtgggaatgtggatgcatgaatgcagttgttgggcatcctttgcttcatttgattggatagggtttcttcatatttccttcattttctaaa

SEQ ID NO: 18289 - DNA, 302 bp, Glycine max
tgtagtcgatttcgggaagctgtaattgtttatagctcatccctgcctataaaaagctgcactttcgcagaaccgtcactctcctcttctccttgacggagtccaacctactctaaactccaaatgctcataactttctcgtatcttggccaaatgacttcaaacagagctcaaacttcttcttttcttaattctccaaaaatcctacctatcacaattagctgaaacaagctccaatggcagaatcttcaaagaaacgaaagggatcctcctccaccaccactactgtaggccaccgccac

SEQ ID NO: 18290 - DNA, 120 bp, Glycine max
agcttctcgttatattatgtgcctgaatcggactttcgtttgaaaaattattaccatttgaatttctcgagagctttggctgctcaaattcgagtgtctcgatatattatgcccctgaat

SEQ ID NO: 18291 - DNA, 288 bp, Glycine max
tctcgatatattatgcgcctgaatcatactttcgtttcaaaagttatgacgatatgaatttctccactgtattccgtgtgacaagttatgaccatttgaatttctcgatagcattcgttgttcaatttcgagcgtctcgatatattatgcgcctgaatcggacttccgtgtgacaagttatgaccatttgaatttctcgagggcttccgttgctcaatttcgagcttctctatatattatgcgcctgaatcagacttccgtttgaaaagttatgaccatatgaatttc

SEQ ID NO: 18292 - DNA, 290 bp, Glycine max
tttagcttgctaagatacatggcccaataatgagcctaaagctgggacaaataaccactgttgttatgtcttcagcacaaatgcccaaataggtgcttctaaccaatggccaattcttgtcaaaccgaaccattccccaatctgtgccagttctaaactatgaacaatacaaccttgctttcatgcccatttcacctctttggagggaactcagaaaaatatgcaacacttagttatttgcccataagtctcttatgctagccaagacgttaggcgtaagatagtgcaat

SEQ ID NO: 18293 - DNA, 301 bp, Glycine max
tggtgtagagcttaattgtgttagagaaagaagtgacaatgaacaatagttataacttatgtgaagttaattagttgaatttgacagtttaccaagaattaaacgacataatttcagttgaagagatagaccaatataaaacttcttgtgcctaatctttttgtcttccttaaagttttaaacttgggcaaaagatgtgaatttgtttagatatcttgtgtttctaaaaacatttacttcatctaatagatttttcagaaaaatcatttatttgtttttaacaaagaaccatcggatgagg

SEQ ID NO: 18294 - DNA, 284 bp, Glycine max
agcttgtgaaacaacaatttatcttttccaatacgaaagatcccaaaagatacttctttttgcccaattatgccactccccatgtccttctattggtttaacaccattttttgtaactcttggcaaattccttactctatgctacacttgattaggtgtcaacctaggtggtagctcatcatattcttcttccccttttctaaaggttttttgttagtcctaaatggatgaatgctgggtaagaacctacgatgcgagtcaaataaacaatttttcctctcata

SEQ ID NO: 18295 - DNA, 299 bp, Glycine max
tgctcaagtgtgacatgttatgtgcttaagcgagctaagttagtaaggacacttagagccactagaggtccccacttaagcttaagcctaaaggcacataagcgaggcaatcaaagccaatggaaggacaagaaaaccccgcttaagcgtgacactctgtgcgcttaagcgatgagatataatagctgagttattccaattcatgagacctcgcttaagcatgacattctgggcagttaaacaagcagatacagtagctacactatcccaaatcaaaaggcctcgcttaagtgaggcaa

SEQ ID NO: 18296 - DNA, 303 bp, Glycine max
  unsure (1)..(303): unsure at all n locations
agctntgcggatttggtcttcgccagtgaaaggatcgatgtgggtccgaaaagaagcaaatttgatcatcctactaagacgactgagaaaactggggcaaatgaagaaggtgagaaagagggagaaacccatgctgtgactgccattcctatacggccaagtttcccaccaaacccaacagtgtcattactcagtcaataacaaaccttcttcttacccaccacccagttatccacaaaggccatccctaaatcaaccacaaagcctgtctaccgcacttccaatgacgaagaccacctttag

SEQ ID NO: 18297 - DNA, 311 bp, Glycine max
ttctagcttttcattggtgtattttgatctccttttggtgctctaaattgtgggaatgtgctcaaatatatggggcaattttggtttgttttcttgcttgattaggttgaattaggggtttgtatgggatggccctaggcctataatgcattttgaaacaatgggacatgccacattgtccccgttctcttgctattgttacctaaacgcgcgcccaccaagtgttcggtgaaatgcctcaatggcattagcgcgtgacttttgtaaggaaacaatccatggggcgttttggtttgtacatattttctatt

SEQ ID NO: 18298 - DNA, 305 bp, Glycine max
agctttggaaaaggctgttttcaccttctcgctaagccaatctgctggcttagcgagcatccgctaagcgcgacattcctgggctaagcacaaggaagaatccagaagaagatgagctgtacaggttcgctaagcgcaccacttcatctctctaagcgcaccgcttcagttcatctgctaagcgagaaaggtgcgctaagccaaaaatcactaacgtgcgctaagcggacgagcatgaacaaggcctgaaatcagattttgagaggggagtttggactaggattcagagctttgcatgtctaggg

SEQ ID NO: 18299 - DNA, 311 bp, Glycine max
  unsure (1)..(311): unsure at all n locations
tcggaagaaagtgatgaggtacaagtcctaaatgcagagcttgaaagagcctgngtagtcgaagagaagttcaagtccatagccatcaaagtctgaaaagagtatgatgaactaagggatgtcaatatggccaccgatgaagccttggaatgagaaaccaagaaggcccgaaaggaagaacacgaccaaatcaaatttttgaggggctttatagggcagcaatagtgagctcaaactccgaagaggtgaaaggaatcatcacgggtcaaaggcatgatctggaaggacgagctaaaggcttgccttaggtc

SEQ ID NO: 18300 - DNA, 301 bp, Glycine max
agcttcactcaaagattcatcggaaaattgatggaatgaagaaattgtagcttttccctctgttgtcttggactcaagaaaatatttcttcaaaaacttttccacaactttatcccaagtccttaagctattacctttgaatgaatgcagccacctcttggcttctctagataatgaaaatgaaaataagctgagccgaatagcatcttctggcacaccgacaatcttgacaatgttgcatatctcaatatatgttgccaagtgtgcatatgggtcttcattgggtagaccatggaacaaa

SEQ ID NO: 18301 - DNA, 308 bp, Glycine max
ttgtgtgtgcatttatttgaactgtgttaaatgtaaataactgttgtctatttcacattctttacactgcattctaagcacccacgggtttgagtaaaaaaggggccctatacccgggttcatgggaatttaaggagtgaaggtgaatctatcatcatgctaggtctccggcttgcttgataatagtgaaacctcgtctagagctttctctctttataatgtgttgtcgctggtattccataccgccacaatattattatcttgagtgatgatacctctagaaaacagtcgtgtgagttataaattgt

SEQ ID NO: 18302 - DNA, 302 bp, Glycine max
agcttggagaggatgctttaatggaggaaaagaaagagggagagaaagagagaagggggaacacgaaattgaaggaagaaaaagggagagaagttgaactttgagttgtgtctcacaacactctcattcatcaaagttacaacaagtgttacacatgcttctatttatagactaggtagcttccttgagaagctttcttaagaaaacttccttgagaagcttctttgagaaaacttccttgagaagctagagcttagctacacacacccatctaaaaactaagctcacctccttgacaaaat

SEQ ID NO: 18303 - DNA, 305 bp, Glycine max
ttcagacattttcccttttcagctttcattggtgtggcctagctgttttctcaatgagaaagccttcatctctgcaaagcgcacttttgcgctttggggttcccttgttgcttgttatcaccttctgttatgctacttctactgctgcagcaacaactcaagtttcaggtttgtgcatggtttatgcttaattttcactcctctaaagttgaccagtaatgataagaaagttaatagttaatattttaacaaaatttatgatttgttgtgcaatattgatatatgagtaattttaaattcttcta

SEQ ID NO: 18304 - DNA, 302 bp, Glycine max
agcttcatgatgaatcatcaatgattcataggtgttttgatgataacaatgatgacagccaaagatgatgacaaaagtgatgaacaaaaagctcaagtgaatcaaagaacatccatctcaagagaatcaagaacaagtcaagagttcaagaatcaagaagaattcaagactcaagaagaaagcctacaatcaagaatcaagataagtattaaaaagttttttcaaaactttgaatagcacatgagtttttgacaaaacctttaccaaagagtttttactctctggtaatcgattaccatatt

SEQ ID NO: 18305 - DNA, 313 bp, Glycine max
tgtttcaatccatatatagatcgttgctacttgcaaacttcattacaaccagccaataatgtgaatccttcaggttgtgtcatgtatacttcctctttcaactcaccattaaggaaagtttttttcacatccacttgtcatatctcataatcatagtatgctgctatggcaagtagaatccgaattgacttgagcattgccacaggagaaaatgtttcgtcataatctattccttcctgttgacgatatcctttagcaacaaggcgagctttataggtctcgacctttccatctgcttcaatcttttttcttg

SEQ ID NO: 18306 - DNA, 296 bp, Glycine max
agcatgatgtttttaccaataaaactaatgaattgagaaagacaatcaagagtactttattgttggccttttttccttgctaaaattgggaccaaattacactcctttgtccgaacccgcccttttctttgatggtctcatcgacaaattcgatttgaaaaatttcaagttggccctaccacacgcgggtgaccctttacacttttgcccccctctctatactcacgcttattgcctgccgctactctgactcttacacacgaccttttcctttttgtcacacactacactaccca

SEQ ID NO: 18307 - DNA, 307 bp, Glycine max
tgactagtttgctaaatggcattcttgtaatatatatgttggatccagcggcctcctaataattaacaaggggggggtgaattaattactgacgtgccttgactaactaaaaagctatccttcttaatgtccctagatctaattaagtttttactacaagcggctgagagtaaagaacaccgattggaacttagcctcgcgtcaagacgatcattaaaagagcacaccaaaacttacaagtgtcgggaagaagaagacacacactgtacttttatactggttcggttacaacctgcgcctacattca

SEQ ID NO: 18308 - DNA, 295 bp, Glycine max
agcttgtaatctttggtttcttgaagatatcttaacactttctttgcagctgtctagtgctctattcctgaattactttgatatctcccaagcattccaaccacaaatgcaatgtcaggtcttgtacacacctgcgcatacataaggcttcctacaatggaagcatatggaatgtttctcatttgttccctttgaagcttatttttaggacattgattcaaattgaatctatcacctttcacaataggtgtcatgttgggtgaacaatcttcatccgaaatatttctagaacttt

SEQ ID NO: 18309 - DNA, 308 bp, Glycine max
tatccttacggcctgcctccggacttcaccccccgtgccaccccgaaagatttaagccaagcccctactttcgaggggcaactcccaccttatgaagactatcccgggcaagacgatggggaaggagatacccatcttggccccctgctccacctcaaagatccgtccccccatgaactaccccaaccgaacatagtccgccatatcccggcctctcccacacccgtaaaagaatctgttcccttcgcggaagataaggggaagatggaggcgcttgaagggaggttaagagcagtcgagggccttgg

SEQ ID NO: 18310 - DNA, 289 bp, Glycine max
tttgctttcttaaaactattaatctgataaaaatagaagatgtaactattaatctgataaaaaaaagaagataaagatcttaattcagatgactttacaagtataacactattgaagataataaaaaatacctttccaagattaggtgccattccaggagttgagaagcatttgtcaactttgagcttatttttaccacctataagtgtatatagctatattagatatggataatgtacattataaactttaatattggcggcaggacaaagaaaaattatagctgtga

SEQ ID NO: 18311 - DNA, 304 bp, Glycine max
tgttttgagggctgaatccacctgttgtttttgttatttccattagcttaaacttctttggagccatagaggaatattgaatttgatcctctatccttggatatgcatcttctggcatctccatatggcgcttcctttgccaatacaagaaaaagatcgccaaccctcctatgatgataataacaatcactaatggaacagtaatataaacccacaagagacttttattatcatcatctgcaatatcaacaccactgaattcccatgatcttacacagttcagctccgtgtagttacttgttga

SEQ ID NO: 18312 - DNA, 292 bp, Glycine max
agcttaagcagtgatcaaacttgctctttggaactggctttgtaaacatattaacaggattgtgcagagtgataatcttatgaactttgattcttctttctgaccgaatgaagtgatatctaacatctatatgcttggttctatcatgatgaacctaatccttggccaagcatatagcactaaggctgtcacagtagatgttagcatattcttgattaatttcgagatcatttatcagacctctcagccaaattccttcctttgcagcttcaataagagccatatatttagc

SEQ ID NO: 18313 - DNA, 304 bp, Glycine max
ttagccgtaggttgttcaccatgttccttcccctatctctaacaaatttctgcttcgaaagaaagattgtgatagggacatcatgttgtgtccttgttgtagtgtagtcttcgataggtctgctacaagggccttcaaatcattagagatttcaagaaacatttcagcctcttaaggacctttaattcaagacaaaggaaaacaactcattcaaatgtcaatgaagcaagtttaaaatctagtcactcacttccagggaatgactacctatttgccaagtgcttgagtgcctcccaacaagtgg

SEQ ID NO: 18314 - DNA, 295 bp, Glycine max
agcttatcacaccagaataccacttttacactaggatttggacaagaaaaccaattagtttgttagagtcacacagcttgtacgacttatatagggatcacgtgttttgcatgatctcgcttgtcggtgtacatttggctgtcgggattggcaccacgaaggtgctctttaagtcggggtcaaaactttgctatggttttccttaacaaactgaaggttctttaatttcggctgtaatatgctagcgcaatatccagaactatatagtaaatagaacaaatttgaaaaaaaaaac

SEQ ID NO: 18315 - DNA, 310 bp, Glycine max
tgaaggcaaactagatgccttgtttaactctggtaacctaactggccatgaataaaaaatctgcacctgtcaccagactatgtggtttatgctcctgtgccaaccaccacacagacctttgcccttctatgcaacattatgaagaaattgaacagcctgaagcttattctgcaaacatctacaataggcctcctcaacctcagtagcaaaatcagccacaacagaacaattatgacctctccagcaacaggtacaatcccgggtggaggaatcatcccaaccttagatggtcgaatacttcacaacaaca

SEQ ID NO: 18316 - DNA, 291 bp, Glycine max
tcaagcttgtggagggtgactttgctggaactggaccatttctatgtaagtggaaattttatcttttattttaaagaacaaatttgctcatgatgctcttttgatgttttagtatgatgcttgtgataattactatttactagctatagtgcttagttaacaatgaacaataatttacggtgtacatattcagctcaatgcattgagcttttctcaagtgcagacaacctgatttgcatcaatgaattaaatattactagtttacgcatcatggagattcctatttgctta

SEQ ID NO: 18317 - DNA, 299 bp, Glycine max
  unsure (1)..(299): unsure at all n locations
tgcacaaactgtnngacatcttctttcatactttccaaaataaattggaagccaacctccgatatgtcctataaaaatccgaatgactagcctgaggagtagaatgaaattcctctagtaacttctgaatccaaggagatttctcatgcatcaccagccttcctttataaggcagcactccctgattataagagaaaccagtatgggcctctttatcctgttgcaaatcagaaataacctttttccagtgggtatcttgctgcacctcatgagtcaactgctgccaatctaaccactca

SEQ ID NO: 18318 - DNA, 305 bp, Glycine max
  unsure (1)..(305): unsure at all n locations
ttagattgacctgcagcattctagcttttacatgcaccatcttcataactatggaagtttttatgaaggacaccaccgacagggcaatatctataagaaagaaatggaaagataaaccccctggtcaacaaaggaactttgctccttcttagtttgcctcacgacaaaggtaagatccttaacatcctttatcgttacttgcgccccctcttttaatttatccattgctgaaatgaatgcttgtaaatanatatattcgcattaacaatatgcctgtacctaccttcttttttttatttatcaat

SEQ ID NO: 18319 - DNA, 447 bp, Glycine max
  unsure (1)..(447): unsure at all n locations
tcccgcatgcccgccccccccctctattttatttcgtagattcgtccatccccctttctcaccncccactcnaacgcacccagacccnncttgaatcgtagcttgacacctccgaangccacacgagacactactcaagcctcagccgtcagtagatcgaccatctttccttcccctatcacaacaaagacctgcgcccaaagaaagaatgacatagggacaccctggggcgtgcgtgatatagtggactgaaaccattagggccgcgacaaagggcctgcccatccttaaagaatgcaagacacatgtcaccctctgaaggacccctaatacaacacaaaggaaaacaactccccgctatgtgaagggagcaaggataaaatctagccgctcacttgcaaggaatgacgacccaatggcccagagcctgagtgcccccaacaaagg

SEQ ID NO: 18320 - DNA, 304 bp, Glycine max
agctttgagaaaaatcatacgacaataaatatttactcggatgtccgattgagtcccgtaatatatggagacgctcgtaattgaaaacaaaagctctgagcaaattcaaacgacaataacttttgactcgggtgtccgattgtgtctcgtagtatatcgacacgctcgtaattgaaaagggaagctctaagaaaaatcaaacgacaataacttttaactcgggtgtccgattgtgtctcgtagtatatcgagacgctcgaaattgaaaattgaagctctgagaaaaatcaaacgacaataactt

SEQ ID NO: 18321 - DNA, 311 bp, Glycine max
tctattttcaattacgagcgtctcgatttattacgggactcaatcggacaaccgagtaaaaagttattgtcgtttgaatttgcttagtgcttctgttttcaatttcgagcgtctcgatatactacgggacacaatcggacacccgagttaaaagttattgtcgtttgaatttgctcagagcttctattttcaattacgagcgtctcgatatattacgggactcaatcggacatccgagtaaaaagttattgtcgtttgaatttgcttagagcttctgttttcaattacgagcgtctcgatatactacggga

SEQ ID NO: 18322 - DNA, 302 bp, Glycine max
  unsure (1)..(302): unsure at all n locations
agctntggggctgaggacctatatttcagcaccaaggttttaatagaaggcagattgttgaaataagagaaaattttacggttttgcattttcagtttcgtgttactgttcacgtgcactattcacgtagcaatcaaattttgttttctgcttcaaattgcaatttcattttctgcttctacctttgaattcgttttcgtttctgctgattaatggaaggttgagtctccagtgttgttttctcttgaggatcaagcacatctctctttgaagttttgttattactattgaattctgattag

SEQ ID NO: 18323 - DNA, 312 bp, Glycine max
ttttcttgggtttcttcacttttgtcaactgatatcactggatgagtaagatattgttaatagaaaatatctacataaattatttatgtttcaaactattaacaaaactagagttgaaaaaaatgactcaacatatgagcaaagactctcctcaaaatagtttttcatatgcataaatttcaaaattcaacccaagactgcatacttgagatagaggtcccttctacaaagagcaacatgttaagtagttgaaattttgatttattttgaacaaagtaatattcaaatgatataattttggtttcgatacaa

SEQ ID NO: 18324 - DNA, 301 bp, Glycine max
agcttgcagtgaatcttttggtcattccctggctggttcacatgtcagtccacagggttagatcagttcacagccagtttagcatgttcagggccggcttttaatgttattcgaccttgattggactgtccagtaggctggttcatggtcaatccaatcaaactagccattctggtccagttttaaaaattatgctgtgaatcttgcatcttacatttggtgaagaaattatgtaggattaggagtagaatctttcttctagcatgactgaaatatatatttcaagctttatgattgtaat

SEQ ID NO: 18325 - DNA, 306 bp, Glycine max
tcatcttcttttcgaatttcttactttttttccttccaagtttagcctaatgaattaggcaaaagaaaatgatgatattacctatcctaaggtttctttattaatcgaattacaggactgaagtttgttttgtttggttgtggatctaaaactttacatattttttttatccgtaaaaattaatcataataccaaagtatttaaaatattcacacactttattaaattaattaagatagattgcatatatttatttataaccagattcaaatataattattcactcataaaaaattgttagtcttg

SEQ ID NO: 18326 - DNA, 301 bp, Glycine max
agcttttctttatgggttgatgggttctatcgcacaaaatgacatgatcactggctgacatattctcaattagctcagttgcttcttctggggtcttcaactttattttcccccctacagaagcatctagcagttgcatggtttgtggtctcagctcatctataaacatattcaattgaattggctcggaaaacccatgggtgggagttcttctcaataaacctctgaacctctccaatgcttcactcagagattcatcagggaattgatgaaatgaagagattgcagctttccctttcga

SEQ ID NO: 18327 - DNA, 302 bp, Glycine max
tccgtaggtgaaatcaggtgcagccatttcccttatagtcctctcacggggtggaggttgtgccatgttctcagaatgttcaaaattataatgctcaaaatcaggatgttcaaaatcaccaataacagaatgcttagactcaccaataacagaatgctcaggatgctcaaaaggtacaaaatgttcagggaaagtaggatgcacactatgcttaactaacctatgaaatgtcctatctatctcaggatcaaagggttgtaagtcagatggattgcctctagtcatacactacattcagcatg

SEQ ID NO: 18328 - DNA, 314 bp, Glycine max
tgcttctacaattaggccatcaaatcctaaccagaacaacatacattgtatgaaaatataattcctaacactattttaactatcaactatcctagcatcatgcaatcagaacaaaaatcaaagctttaaagtaataaactaagttgactaacctaaggcttaaaaaaaaaaaataaaaaataaaaacaaggttaaaggaagcttacttggtgttgaccctcttccacatttcctttttccaaaatttgtaattactctttttatgcggaagcggtttaccggaaagtgcctcggatcgccaagtaaataattaa

SEQ ID NO: 18329 - DNA, 297 bp, Glycine max
agcttgagcttatattttggtcgaacatgtatataccttgaaccattctacatgttaaaacggcaattaaagaactgaagtcaaaatgaatacgtaccgatactactactacctaactgtagaattggcatcctaagagaactctctaaaatcggttagttcttaactatgcacatattttttatgataatcaataggataaataatgaaattcatctttgaatatgcaatggtaatgaattgattctccgagatataaaatataactttcatctctaaatgtgtaagttgtatttt

SEQ ID NO: 18330 - DNA, 305 bp, Glycine max
tgcaggtacactggatgcattttttattttggtgacccacctggcctggattaaaaaataattacctgccctatgggatcgatgattgagcttatcatgttgaccaccagtaacagaacatttagaccttttcatgctaataaccctaagctgactgaacctgctggttcttatgttgcatatattttcaatacaccttctaaggctccttacttgaagctgcccctgttgaacatttattatctttacagttacaaattccactttgtatgggggaaccaccttcacgtcagagcgtccaatcc

SEQ ID NO: 18331 - DNA, 296 bp, Glycine max
agcttgagatgagtttgtgagtgattgtgagatcctagaggtgaaggagacatccacaccacttgtattttttcaatctttcatcttgttcttttctttgttgtaaagaaggctccctggttatggaaagctaaatcctctgttggatcttccctgtaggtacctgatgtaaatatatttctatccatttaatgatgttttgtgtgttctctgtgctatctgcttttcactccaatatgcctttaccttgaccatgtagatgcatgctttgttagggtcattcaacactggaaact

SEQ ID NO: 18332 - DNA, 304 bp, Glycine max
tattgggccttaaaatttctgatcttttatgaagccgcatctagagagtaaaggaggctacaactattggagttagaagaaatgagattgactgcatatgaatcttcaaggctgtataaagagagggttaaaacttaccatgataaaaatcttctaaagaagaattttcaaccaggacaacaggtgctactattcaattcaaggctgaaattgttccctgggaagctcaaatctaaatggtctagaccatttaccatcaacaaagtcaagccatatggagcagtagagctttgtgatcctcaac

SEQ ID NO: 18333 - DNA, 293 bp, Glycine max
agcttatattttacagtttatgtgaatgccaaaatatacctattaaggtcgtcgtccactactactaccacttaatgtgaggcagcccctcacagattggcaattgttttcataaaccctttatgcattagatatacttatgaggcttctctcctaaatggtaatgacaattttacaagaaacaaaatatatgcacattatttttgggatgtcaaacctctgaacaaaagcacaccaacagcaccaatggccagagtcagaagcagggggacggcgacggattcagcttcacg

SEQ ID NO: 18334 - DNA, 303 bp, Glycine max
tagccaactagatggattacctttttcttcatattctcctttttggtagtctatgccactatgttctctagagttggagaattatatccaatgatagtgtgttcctttgggtatattagttcaagtatagaaaaatatgtgctctgggtggctcatttattcatgtatgaaattaaatttgaagagtttatatttgccaacaatctctttggtctttcagatgatggcgatgggggatatgatgatgatttggaaaaactgatggataattcggtaagcatgaaataatctgtactagctatg

SEQ ID NO: 18335 - DNA, 294 bp, Glycine max
agctttgaaatttggcatctgaagtctgagagctctaggcagataagtctgctaaagctggaggtggggctaaagtaaaagatgcaaggatgccaactattggtgtaaaggaagagggaatatcagctgctctgagcttggtcttccttgtctctggaaaattaactatttggtcattcgcattccaacagttccttatgatataagctaagtcaatggccggtcttaggttttcataggaggtaagggcatcagatcccactcccctcgatctacacaaggctgttattaatg

SEQ ID NO: 18336 - DNA, 304 bp, Glycine max
ttttatgaaagggtgtgactcttcacaattgaatttgaattccaacgttcagatgcactggtaatcgattaccaatatcttgtaatcgattacaccattttgaaatcaattggaacgttgcaaattcagttgaaaacttttgaaatcaaactttgtcactggtaattgattataggaaactgggaatcgattaccagagagtaaaaactctggtaacttagaaacttttgagaaaaactcttttgaaaaacaaaactgtgctatgttgttttttgaaaaatcttttcaatacttcccttgtgaa

SEQ ID NO: 18337 - DNA, 287 bp, Glycine max
ttaagcttgttgttcaaggttgttggtcgtaacattcccgcggtcttcaaacaacaccttgtccttaaagtgatgcagctccttaagacatgcccagtcttcccacgacgtttcatccaggtgcaggccctgccactgcaccagaaccatttttttggacccctagtccgtcggaactgtcttctgacccagaatagctaatggtgtggtgataggctgattatccatagccccggaaggaaggttctcaactgctattggattgggcgagcccacgaaaggtttta

SEQ ID NO: 18338 - DNA, 296 bp, Glycine max
tgaggagacactgaattaattcatgcagatgtccatgtccaactataggagcacgaagtcctccatcaagaacctagagatacaagtagaacaattgttgaacaaatggcctcaataacttaagagggggggtgaattaagtttcaaaatttcccactaacaaacttttaacccccccccccccttttaatatgataggctcagtatgcagaataagaagcaacaatcaatttaataatgttatttaaacatgcaagacaaaattgattgcaataacataaatgagataagggaat

SEQ ID NO: 18339 - DNA, 290 bp, Glycine max
tcaagcttcaagctgttcaattgcttcaaattgttgcatagaagggcaaaggtctgtgtggtggtcaataaaagagcataaaccacagagtctggcgacaggtgcagattttttattcatggccagttgggttaccaggttaaccaaggcatctagtttaccttcaagcttcttagtctcagctgatgaacatgaattcgtggctacttcatgcattcctctaatgacaatagcatcatttctggtactaaattgctgggagtttgaagccatcttctcaattaaatttt

SEQ ID NO: 18340 - DNA, 298 bp, Glycine max
tcaatctcacttttgttatgaacacgatgggaacgacgataaaagcttacaccacacacttgcttaaggaaaacacgcttcctgttgcgaccggtgatcgaaaattatctggatcgtttgattttttaattttgaaatggacggcgatgattgcttcttttttttccaccaactttcatagggtgcgaaagtgtcatcatcatcaatcattatgattgagattttcttcaatgatgagtgtcataatttaaaatatgagtgattgaggcccaatttataatatcaagaaactacgagt

SEQ ID NO: 18341 - DNA, 302 bp, Glycine max
agcttccacaacaattattagcagttagtccttttcattcttctgttatgcaggtagggggatgccacatatgtggaggaacacacgagcctgggcaatgcgtaatgcaacaagatccttccagggaagtaaactacatgggcataccaaatcgccacggattccaagtgtaccactagggaggaccattaggattcaatcacggcccaccaagattcaaccaagggagaacttttacacaaggctcaagctggaggagtcatccttagaatcagtacaacaaagagaataagagtcagctg

SEQ ID NO: 18342 - DNA, 310 bp, Glycine max
tcactagatttgaacttgaccatgtctttagataagaaaacaacaagccaacatcatagcaagattgaggagttcctccaaaccatgaaaccaaacacttatacaggagacacttgaccaaccaagcattgctttgtcagtaaaacaaatcatgtttatgcaagccgagatggagttgtggatgggacccatcatttgctatctagataatggggatctgtctgttgacaaaaatggaggcagcaaaatgcatcaagcccattgcttgatatatgaccattgccgacaagttgtacaagagaggtttcaa

SEQ ID NO: 18343 - DNA, 302 bp, Glycine max
agcttgactcacacccaacatgacaagtttagcattctttcaacaaatttcttcacaaataactatcataaagcataaacctagtaaaactacccatcatatctcccaaacaccccatacccacgaaatttatgtgagaagaagtctacctaagcctgaaatttgaagtcccacaacgtagaggtgcgcttcacaactccgaaaatggcttcctttcgcgatttggagcagaaatggtgtgcaaaggttggagctttgatggagcttcaatggtgaggaagaagaagggaatggcaacgtga

SEQ ID NO: 18344 - DNA, 310 bp, Glycine max
tggcttagcgcgtgaagactggatgcttagcacaaggtctgcgcttagcggatagacaatttccaaaaaatttctaagactttttatgtctatctcttcacacaagcttaaaaccccttgttcattaccaaacaagctgaaattaatcataatcacaagcaagatatcctaactatatacaagagataagaatgaaaaataggaaaaggaaagaaaagctgggttccctcctagtaagcgctcttttaacgtcactagcttgacacatcgtcctgttatccaggatccaagcgaagaacaatgttcaatc

SEQ ID NO: 18345 - DNA, 302 bp, Glycine max
agcttcacagaaaatcttagcgagtctgaagagcaaaagcatttaatttacgagtagtttaacacctttcatgccatttaacagtggcaagaaggctgcctgaataaccactctatagttacattttaaaaatctccaattttcactattaaaaaacaccgactcattatattaaaggagggtaataaaaacaataccaaaaacaaatgtatcaaccttaccaaagagatccgctagacccaatacaaaaaacttggtagcgagagctagtgaaaaggttgatagggttagatattgggtgc

SEQ ID NO: 18346 - DNA, 311 bp, Glycine max
tcttatccaaggcaattcttggtggtgatagctccttcttccttggcttattccctagtagatggtgcctcccctctcctcttctcctttgccttccgccgcatctccatggtgtaaaatcaccattgaaggacctcattgaagctcaaagatccagcctccatagaagccctacaagcaagcttccatcaagtggtaatcagagcacaagagcttcaagtaggagctccttaaacctccattaatttttttgctttaccttctcttccattgttgattcttcattttttttctccatgtatttcctcaca

SEQ ID NO: 18347 - DNA, 303 bp, Glycine max
agcttatgctgcaaatatttacaatatacctcctcaacctcagcagcaaaatcaaccacagcataacaattatgacctctccagcaacagatacaaccctagatggaggaatcaccctaaattcagatggtccagccctcagcaacaacaacaacagcctgctccttccttccaaaatgctgctggcccaagcagaccatacattcctccaccaatccaacaacagcaacaaccccagaaacagccaacagttgaggcccctccacaaccttccctcgaagaacttgtgaggcaaatgactat

SEQ ID NO: 18348 - DNA, 308 bp, Glycine max
ttccacattgaattcagcacctaatgtcatattagataggaattgggtatcttaacataagagatttcagatggactttaatcctaatcccacagccgatcttttcacgagatctctacttaaccctttggttaaatgatcggccaaattatgttgagttctcacaaactccactgatatcacaccatgcatgattaactcccgaaccatgttgtgtctaacacccaagtgtctagacttcccattatacacttgactatatgccttagccaaagtagcctgactatcgcacctgatagacatgggag

SEQ ID NO: 18349 - DNA, 304 bp, Glycine max
agcttgctccagagaattatggctttttggctgccataagattaagccttctgatcgcatgttcgctggacgctagagatcggagacttatttctacttttgcggagaggtaacataacgaaactagcagtttccatcttgcagttagagaactgaccatcaccctgcatgacgtggcatcctcggtacatgtgcccattataggcgcattccatacctttgaagatttgcatgtggaagaagtaactttcctgtgcatgggaatttcctgaagccagttcataataagcttgagctgagacag

SEQ ID NO: 18350 - DNA, 231 bp, Glycine max
tgaccatgaaggacttggaggggccgattgatttattctgtggggcgcctgcggccgaaatgatgcaacaagggttgaaccataagcagagctccccttttgggcgacgtagccatggaaaagcctagcggtgggaatgagtacttccacttcacacagatgctgggaaatgctggtcgagacaccaatgccacgcccatatctatccgaacgagtaatgtatacgagcgt

SEQ ID NO: 18351 - DNA, 296 bp, Glycine max
agcttgaattctcaaaataagactcaaagtttcattggttgtgtaatgcaatgaagaagtcagcatgctcactggatgaagagaaaaaattcaagacatgatatgtaatcaacaaataaaggataagaagaatgttgcagacatgaacatctgcacaatgaacatgacatgaagaacaacattgtttcaacacttagaaaggattttcatcaacaagatgagttcattttgggcattgtatctcgagtttcaaaaatgcaattgatctattcttgatggctatggaaattttgcat

SEQ ID NO: 18352 - DNA, 303 bp, Glycine max
ttttcggagccccgtgaattacgttttttttcatgtgtcctccatcttcgagtttgttgccatgcgtagtgattgcttacggcaattctccattctcaaccctttgtcggagccccatgaattgcgttctcgttcatgtgtcttccaccttcaagtttggagccatgcgctgtgattgcttagagcaattctccactctcaacccttttttcggagccccaagaatggcgttttccttcatgtgcgctccatcttcgagtttggagacatgcgtagagattgctttgagcaattctccattct

SEQ ID NO: 18353 - DNA, 296 bp, Glycine max
agcttgtagaatggctatacataatacatggcagggtttggtttggttcaaggataaaaagggatgccccacattatttccatgacacaaatgcaaaaatgatgatttggaaattttatgcaaaactggtcatgcatgcacctatgcggacactcaagtgtcaaatttttatggtcatgtgatgctagggctcaggattcatttcctctattttaaatcaacccaatgtttccaaaatatgttcttttatcaatttgtgcattcatcctagtccattttgggtactcgggaaaatt

SEQ ID NO: 18354 - DNA, 304 bp, Glycine max
tgccacccagctcgcccaggcgagctcatgttgcccaggcgagctaggtttcttcttccagaaggtgccttttggaggaacttcttggaaggcccaagtgggccggttgctatttgcaccccctatttactaaatacaccccctgccttttttgctgattctttttcggtaacgttacggaactttatgaattccgtaacgatacttattttctttccgtaatgttacagaaccttacggattacgtaatcatcccttttttggctttcggaatgttacggaacctcacggattgtgcaagaat

SEQ ID NO: 18355 - DNA, 293 bp, Glycine max
  unsure (1)..(293): unsure at all n locations
agcttctatccaaatggtcttaccttgaattaattcctttgatagcccttttgagccttgtttccctttccttgttttgaagctcactacaagccttaagtgaaaaatcatgatatcaccatatccttaaggaattttggagctttggaattgttttgggaataagtgtggggggtttttgtttcattggacaacttgntttgttggctatgcttcatgatgtattttgggccatacttgatgtacattgtatattggttaaatgttggacatgctgaatgaaatgttgtttc

SEQ ID NO: 18356 - DNA, 303 bp, Glycine max
tcgaggctaagtcttcatgttgttccccttatctctaacatcatggacaaaaacaatgtcaccaacttcacttggaattttcttgtcaagttcacttttgatgaattggtggcgcaccatagtaggttggtcatcaaaatcaagatggcagaggctaatagtggagtcgtcatgaagttaccatcacgtgttggtatgaacttcgaggtcttgcacaagagagggaaaggtcatgttgtcaaatccaacctcaccaaatggtgatggtagagaccttcttttgggtcaatgcattagcctctt

SEQ ID NO: 18357 - DNA, 272 bp, Glycine max
agcttctggatatattatgcacccgaatcagacttccatttgaaaagttatgaccatttgaatttctcgagagcttccgttgttcaattttgagcgtctcggtatattatgcgcctgaatcgaacttccgtgtgacaagttatgaccattttaatttctcgatagcattcgttgttcaatttcgagtgtctcgatatattatgcgcctgaatcggacttccgtgtgaaaggtattaccattctgatttgtcgagaaccttccttggttcaat

SEQ ID NO: 18358 - DNA, 303 bp, Glycine max
tgaaattgaacaacggaagctctcgagtaattcaaatggtcataacttatcacacggaagtccgattcagatggataatatatcgagacgctcgaaattgaacaacgaatattctcgaaaaattaaaatggtcataacttgtcacacggaagtccaattcaggtgcataatatatcgagaagctcgaaattgaaccacgaaagctctcgagaaattcaaatggtcataacttatcaaacggaagtctgattcaggtgcgtaatatatcgagaagcttgaaattgaaccacggaagctctcgag

SEQ ID NO: 18359 - DNA, 299 bp, Glycine max
agctttgattatatggttttcaccgacgataggatcaaagtgagtctaaaaagaagcaaatttgatcatcatactttgataaatgccaaaaaaaactagggcaagtgaagaggatgaggatgaaggagaagcccgtgctgtgactgccattccaatacagccaagtttcccaccaacccaacaatgtcattactcagccaataacaaaccttctccttacccaccgcccagttatccacaaaggccatccctaaaatcaaccacaaagcctatctaccgcacttccaatgacaaacacc

SEQ ID NO: 18360 - DNA, 308 bp, Glycine max
tgtacaaaccaaagagacagagatatatagagataatccagcttgtagaaaccatagaaagaaataatttttttgaattgatttttttactgctttgagttgcttactaattataacaaaatttcacttctttcacatttgtgcatttgctgtcacatgaaggcttgtctgtttggccttattgtgaaatattatggagtacactcgttgacagcaattttgtgtgtcagctactctgctgtcatataaaaacactaaaaagaattttgcaaaataccatgaagagttaaaagatatgtttagctttc

SEQ ID NO: 18361 - DNA, 287 bp, Glycine max
agcttctcttacaaagatgaaaaagagaaaatgaaagattcggaagtacaagtggcgaggatgcctcattcacctctaaaaacctcacaatcactcaaactctcatccaatactctggatgataacttcctctttaatctctactgtgcctcaagatcttcacaccaaaagttctctccaccactcggccactcagatgaatgcttccaagaacagagaaaacgccaaaaattgagaactctcttccatttctgatttcaggctttaaatagtgatgctgatttttg

SEQ ID NO: 18362 - DNA, 299 bp, Glycine max
tcgaagggatgaaagggatgagttgatggtgaagagtatgatattagaggataagttgaaggcttgcaaaggtcaaaaaagagtttgaccgagcagttgagttagacagaagagaacatcttgacaatcattgatgggtataaagaagagctaagcctagctgccagtcataggtagagactagaggatgagcacgcgaaggtagtggctctgcaagcggaaagggaagcaagagagagcgtgatagaatcattgcacagggaagccgtgaaatggatggatagattcactctcactct

SEQ ID NO: 18363 - DNA, 285 bp, Glycine max
agcttaaggatggaatacttacttgttagtgacgaataaaagcacaaaacgaaatcaaaaaatgcgaaaaatgatgaccctaaggttgcaaactcgtaaatcccgtgggtattgcttttgaatgggggaagaagtttttgaatgcaaaaacgttcacctccctcgtttttatattttggtgcaagggttgctcgcccaggcgagctaacctgccacatttttttatttttattttttttaggggaaacataaccatggccccctctctttataggttaacatttg

SEQ ID NO: 18364 - DNA, 296 bp, Glycine max
tgcctgtccgatgcatcagttatgatggcccgagtgatgttggggagtggttaccagcccggaatgggtttaggcaaggacaacggcggcataactagcctgataaacaccaaaggaaatcgtgggaagtatgggttaggctataaacccactcaggcagatataaagagaagcattgcggaaaggaaaagcggaagtcaaggttcgcggttgagacaagaaggcaaaggaagcccaccttgccacataagtaggagctttataagcgcgggtctaggggacgaaggtcaagtcgt

SEQ ID NO: 18365 - DNA, 302 bp, Glycine max
agcttcaacatcagacctcttccagggtgctggaactacttcacatggacttgatggggcctatgcaagttgaaagccttggaggaaagaggtatgcctatgttgttgtggatgatttctccagatttacctgggtcaactttatcagagagaaatcagacacctttgaagtattcaaagagttgagtctaagacttcaaagagaaaaagactgtgttatcaagagaatcaggagtgaccatggcagagagtttgaaaacagcaagtttactgaattctgcacatctgaaggcatcactcat

SEQ ID NO: 18366 - DNA, 310 bp, Glycine max
tgtaccctatgccccacagggaatcaatatcgcatgaagtgtcaaccatagggggtgaaaagaggtggaagccgatgccaacacagtggagttaaagaaaaaggaggcggcatcataggagcactcatggtcaccacaccgacactcagcaaggatgtagcgacggtgaacgaaggagacacaataggactagccaaagcagctggcgcatcaacttcagtagtaggagtggcctcctgaacaagcacaacaagaggaggtggaggagtaggagtaacaacaacaacaacagcgaaagcaaaagcctcaa

SEQ ID NO: 18367 - DNA, 268 bp, Glycine max
aaaaactaaaggaaatgaggcaaataaattggtattaaaattttcgttcaataatagcaatgattacattattcatagtcgggataatgagaatagaatgacctaaacctagaggataaatggaatcaaatcatattctcataaatgtaatatatatgcacataaatataatatatatggaaggaaaaataaggaaaggaaagtaatgctccgctgtcaaataatttaagctaggattatatgtttcctctattatgtagcatttaag

SEQ ID NO: 18368 - DNA, 310 bp, Glycine max
tgtccaatgaggtgacaatgaaaatacctagtgttactacctgatatacagtttttgctgctcgttttattgtcaattccaactgcatcaatgcatctttaacaagcataccacgaaccagagcagcaaccaagttgaccttctttggactctaaaataccatagaaaacaaggtatgtaaaatgtgcaactagtcagatattaatcagatccttcttaaaccataaattaaggcattttccacagcaaaccagggaaggcatttcaatggctaaaaaattagatgccaacttttctgcaaaataacatg

SEQ ID NO: 18369 - DNA, 300 bp, Glycine max
agctttacgaacaatacattttttttactcaatttacgaacactacatgacgtattgagagtttgaacttttttttaaactatagatatcattttaggataattgtaatataattgtttactcaaaattactaattaagcataaataacttgtgatagttgatttatgcacagtatcctatgtacaaggtgtcttaactaagagtaagaagataaatggtttagatttggttgaattttgtctatttttcaatgcaaattacttaaaattaattagatttgattgaattggatttatgtc

SEQ ID NO: 18370 - DNA, 306 bp, Glycine max
ttaccaagggcattggttgctggctttgttaatactgacaaagaatttcagagcagaggtgtgaactttagcttttattcttgtgtttttttggggataaaatattgggagggtcgaaatacagaactggaggatctggaatttaatttttttctcttcgtattactgattatataagtcctcatctggttttgtccaggagaaacttcgggaaccacagctacattcgtaatagtggataggtggactgtgactgttgcatctgttggagattcccgttgtatactagatacccagggtggtgct

SEQ ID NO: 18371 - DNA, 301 bp, Glycine max
agctttcatcttctactcaatcatcatctggattacaattactcacttttgtttgtgtcaatgctcacttttatagtggtcttgcatcaaatttcataattgaacattccattgatcctctgccccttcacttaaatctgtgcaataaacattaggttccatttactaacaatagccaaagattgtatgtgaaaagtttctattctataagataataccaaactgatgaaatcaactaaaaagttcccatgtgaaaaataaataatgttaaaagtgtcataaatttaaaattaaaataaga

SEQ ID NO: 18372 - DNA, 309 bp, Glycine max
tgaaggcatgtaacccaccattttctcatagtatgacaccggtaatgtgtctaccatcatcgttatcaactccctctccattattgggggcactacttgagctaccatatccttccacctttgggcgtacctttgaaagatttgtgctcccttttgcacaagttctatagttgcgtcctatccggagccatatcagaattatattgatactgcctaatgaaggcaaccattaggtctttccaagaattgaatcgggaaggttcccgattagtgtaccaggtgacagctaccccagtaagactttcctgg

SEQ ID NO: 18373 - DNA, 301 bp, Glycine max
agcttgaatgacaatcatttcatggggctccgaataaaagtggagaatggaggataggcgaacagcgctaggcaatcaattcgcgggtctcccgactcgttggtggaggatgcatgaatgacaatcaactcatggggctccgaataaaagtggagaatggaggataggcgaacagcgctaggcaatcaattcgcggggctgcatactcgatggtggaggatgcatgaatgacaatcaattcatggggctccgaataaaagtggagaatggaggataggcgaacagcgctaggcaatcaatt

SEQ ID NO: 18374 - DNA, 312 bp, Glycine max
tttcgattcattctatgtactcgcagtggtccatattgtgtttcgtgcatttttattctcgttttgtttattttttataccccctgttgacgtgcttaagccattttacttaagtcatttctcgcttaacttaaaaataaaataaatttccaccgaacgtttgaattgtattatccgttaacttcggttaaaatgaatttcgaccgttcggtcgtgccgtaaccacgttggaaatcaaaaaaagaggtaaaaaataatataataatcaaaaaacatctttttagtaaaataaagcggaaaatcaatcggacg

SEQ ID NO: 18375 - DNA, 293 bp, Glycine max
agcttgcactttaaacctatctcttaaccttatctacattggtttcatagcctttaccgaccaacccattttgtgcttcaatcaacacgaaatgaagttaagtgttgcactgttatccaccataaataagataagaacaccattgagtcgggctaggaccttcattgtttggagtttttgtccaggataccccattgcagtccttaaaaacaacatgatgcactcttcctcttccatttcagtctcagattcatcattgattaccaccacgttggcctctccttgggtgtcgt

SEQ ID NO: 18376 - DNA, 278 bp, Glycine max
tggaaagatgtctctaaggattcttttgcgactcccatatatggcggcgaagaaagacaacttacgagaatatcttactccccgaagactatgattaactgcccttccaccacaaaattcaacctttggcggagcgatgaaaggaccaccccgactgagtgaaaacaaggttagccaaaaacgcagccataagccaagttgatatcgcattactcgaaccgtgacctagcatgtgaggggtccaatctgaattgggagatcaatcttcccccttacat

SEQ ID NO: 18377 - DNA, 294 bp, Glycine max
agctttgacatcaacaatatttttaatgaaatcatgaatgcatggatgaaattgatccaacatcggcatgatccttcttggaattgcttgctcggatgatgatacactacgtttgactgaagaattattattttgcacagaatgtaatgcatcaacatactcccagtaagacggatcacgctttgttgatctttgatgtttggtcatcagtttcttctgagcatattttgttttcaccttttctggaggaggacagatagagtttagatcagggtaggaaatttcccaaagttt

SEQ ID NO: 18378 - DNA, 305 bp, Glycine max
taaaggaatactatttaaataacttgggagagaggtaaaaacacatagtttatacatgttcactcaaacataactatatttaattctcctttataaaacttttgaagggtttcactaatcaacaactgattacaaataagtattctattctatcactcttgattacaatagtattctttaagccactattgacacactctagactccccctgaatctaagagttcctaagcattctttggtactaagtcactcttggctttcacaaatttttttgaatgaatataataattcattaacactctga

SEQ ID NO: 18379 - DNA, 265 bp, Glycine max
agcttgagattaggaaatgctgaagggtgaaacttcctgcttttattggtgaccaccaaatggtacctggagatatgccccgggggtcaagagaccttggggacgtcagggggggtgctattgcccaaaaccaagcttgaccaattccgacccaacccacgcctagtcggtcagtgagaacgtgtgatgtacctaaacatgcgaactcctggctgtcaacggataaaaggaacaaataccacaaagcatggaggcttgtggtggc

SEQ ID NO: 18380 - DNA, 304 bp, Glycine max
tgggtcatacagtgagaaaggacatgtttcaactcaggttaaagggacattggtgagcaacattgcacctcttgttgatttaaagcttcattcttgattaacaacaccccacccccccctacccacaagccttctcttttatacaaatagacgctctatatataatgcaatacaagtatattggttgaactttgccccaatttataaattctaatgcacgatgcatctttttaaatttgataaataaatagatagatattgtcgccatcttgtgaatttgatagagatatccatgcctagtatg

SEQ ID NO: 18381 - DNA, 295 bp, Glycine max
agcttgagatgaggaagtgttgaagggtgaaacttcctgcttttattgttgaccacagagtggtacctggagatatgtcgtgggggtcaggagaccttggggacgtcaggtggggtgctattgcccaaaaccaagcttgaccaatcccgacccaacccgggcatagtcggtcagtgagaacctgtgatgtacctaaacaggcgagctcctggcagtcaacagataaaaggaacaaagaccacaaagcaaggaggcttgtggtggctggccagctgtgaattttgtgtaatatgtg

SEQ ID NO: 18382 - DNA, 305 bp, Glycine max
tgaagtgaggaagtgtggaagggtgatacttcctacttttattcgttgaccacagagtggtacctggagatatgttgcgggggtcaagaaaccttggggacgtcaggtggggtgctattgcccaaaaccaagcttgaccaatcccgacccaatccgggcatattcagtcagtgcgaacctgtgatgtacctaaacaggcgagctcctggcagtcaaccgataaaagaacaaagaccacaaagcaaggaggcttgtgtggtggctggccaactatggatcttgagtgatatttgggatatggcctc

SEQ ID NO: 18383 - DNA, 164 bp, Glycine max
tcttacgagcgaacaacttaaagtgctaaaatttaaagaactgaaatataaaaattgaaattaaaatgaccgaacaacaatgataatataattgagaatgaacatgcatgctcaatatgcacaaatatatatgtcccgctattggggttgctcttgtgcatgct

SEQ ID NO: 18384 - DNA, 229 bp, Glycine max
taaaagggacgccccacattatttccatgacacaaatggcaaaatgatgatttggaaattttatgcaaaactggtcatgcctgcacctatgccgacactcaagtgtcaaatttttattgtcatgtgatgctagggcttaagatttatttcctctattataaatcaacccaatgtttccaaaatatggtcttttatcaaattgtgcattcattccaatccatttccggcg

SEQ ID NO: 18385 - DNA, 299 bp, Glycine max
tgaatttggtttaaacatgattgatacatgatttgggacttgtaggaattgatttgggcaagattggatgagaggaagtgtgattttcgaaatctgcacttatgcagaatttttgctgtgaaattgtgcagcagaattttgcacaagtgcagaaaaatgcttgtgtgtggttggctgcggaaagtctactgcagaaagagttctggatgtttgctagtagatcccaacggtcaaaatgtaggcttatgcactatagacttccagtaaaagtttggagtcgatccaacggttaacgaatt

SEQ ID NO: 18386 - DNA, 286 bp, Glycine max
  unsure (1)..(286): unsure at all n locations
agctttttggtcttaaataaaaggttttcctctttttctattattttattcaagctctaccacatgtccctatttgattggagcaaaaagggcccactttctctttttgactgtgacccatactcagtcacaaaagtgagaaaaatctgacctttgaaacgctaaaatcctgcctcggtttgcgtgccgtttctctggttccagtttctcgcgtttctctgcgtccgtcggggccagttttcgaaagcaagcaatatgtatatcanaacgctcagaatgaaacccc

SEQ ID NO: 18387 - DNA, 270 bp, Glycine max
tgagaatggagaatttttcttatcaattactacgcatagctccacactccaaggtggctgacacatgatcgatgacgcaattgatggcgctacgacatgattgagaatgttgaatggcactaaccaatctctacgcatagctccaaaatggaaggtggatgacacatgaacaaacacgcggttcatggggctacgacaaaggttgaaattggagaattgcactaaacaatcactacgcatagctgctaactcggggggggaggacacatg

SEQ ID NO: 18388 - DNA, 283 bp, Glycine max
agcttctaaggaggtgtttcttattatgagaggggtgtgtgtagctaagctctaccttgtcaaggacaatgttctcaagaaagcttctcatggaagctacctaccctatcaatagaaacatgtgtaacatttgttgtaactttgatgaatgagagtcttgtgagacatacttcagagatacacttatctccctcttttattccttcaattgcgtgctcccccctatctatttctctccctctttcttttcctccattgaagcattcttccaagcttcttatcc

SEQ ID NO: 18389 - DNA, 309 bp, Glycine max
tcacaaagaaaatcatattgatatgacttctttggaagtcctcttacgaggctatgctttttaagctttgagattaaccttaagctagcatgaccaagcttcttatgccatatgcaatgactctctttgactgagagtaagcacgacaccttttgactagacagatcaccaagtttaatcttatagaaatttccttgtctcttagcatagaataatgaagatttgttcttattatggacgatacacatatccttgttaaaggtgacattttatccactgtcacataattgacttatgctcagcagatta

SEQ ID NO: 18390 - DNA, 301 bp, Glycine max
agctctatgatgatgaatttgtatgattcaagtagttttgatgatgaccaaaagcccaaaagaatgatgtcaagattaagtcaacaagttcaagatcaagattaaagaaaagacatcaagaagaatcaagattcaagagaagatgaattcaagattcaagagaagatgatttcacaagggaagtattgaaaaggatttttcaaaaaccaaacatagcacagttttgttttacaaaagagtttttctcaaaattttctaagttaccagagtatttactctctggtaatcaattaccagaaat

SEQ ID NO: 18391 - DNA, 308 bp, Glycine max
tggagtctacaaaagtacatgcgagcttatcattggcgatggtagaatatgtgactcctacgaagacaatgaaaagagaaatcttaacgatggacctttgtcaagattttgtgggtcgtcagtgattgttccttcactggagcggtagtcattgtcgatttcttcctcccgagttgttgtgccatggttgcaaaacccattggtgatgactgttgagatgtgattgttggaggtgatggtagtatcagaaagtgatcaagatttttgtaatatgttatttgcagtgattgaaagatagggtggtgtgt

SEQ ID NO: 18392 - DNA, 293 bp, Glycine max
agcttggttcgaggtacttacccgttgaagatcgaagaacgatgaagaacgaatgaagaacgtcgaagaacggttgaaacctttgcgaaattcttcacggaaaacgttacggaaacgtttcggaagcgcctcggcttagattttcttcacggaaacgatttttccaagcaaattcgaaagagagagaagtgccaaaggggctgaacccttttcttcttcacttcctcccctatttatagcaaaataggggaggtggttgccgcccagctcgcccaggcgagccaagttgcttc

SEQ ID NO: 18393 - DNA, 309 bp, Glycine max
tgaccaatcccgacccaacccgggcatattcggtcagtgagaacatgtgacgtacctaagcaggcgagctcctggcagtcaacagataaaaggaaaacaagaccacagagcaaggaggcttgtggtggctggccagctgtgaattttgtgtaatatgtggattgtggcctctggtaatcgattaccaagggtgggtaatcgattacaaggcttaaaattgaagacagggggctaagatggtctctggtaatcgattaccaaggggtgtaatcgattaccaggcttgaaaacgaggtcaggaagctaggg

SEQ ID NO: 18394 - DNA, 297 bp, Glycine max
agcttgaatcggaccttttgtgaaaagttatgaccatttgaatttctcgagagctttcgttgttcaatgtcgagcatctcgacatattatgcgctcgaatcgaacatccgtgtgaaaagttatgaccatttgagtttctcgagagcttccgtggttcaattccgagtatctagacctattatgtgcccgaatctgaccttcgtgtgaaaagttatgaccatttgaatttctcgagagcttccgatgtttaatttccagcgtctcaatatattgtacgcctgaatcggacctcagtgt

SEQ ID NO: 18395 - DNA, 309 bp, Glycine max
tccatcaagtggtaatcagagcacaagagcttcaagtaggtgctccttaaacctccattaattttttttctttaccttctcttccattgttgtttcttcatttttctccatgtatctcctcacatgtcttgttctaaatgttgttaacatgattctttagagtttccaccgattaaacttgctatagaagttagatttgattttctatggttcaaatttcttgttcttgttcttgaaccatgaattgtgttgagtttaggttcctttgagttttgtcttgttattttttgtggctgaaacctaaaccat

SEQ ID NO: 18396 - DNA, 306 bp, Glycine max
agcttgatcaaaataattatctaatcattccaatccattcaaatcatacaattgctcattcaaatcattctcaaacactcatttcatgcaaaacaatccactgcatatcattttcaattaattcactgttcaaacaagctttatagtacaagcaaacaacttaaagtgctaaaatttaaagaactgaaatataaaaattgaaattaaaatgaccgaacaacaatgataaaataattgagaagtaacatgcatgctcaatatgcacaaatatataagtcccgctattgaggttgctcttgagcatgc

SEQ ID NO: 18397 - DNA, 311 bp, Glycine max
tatgctgcaaatatttacaatagaccttcccaacctcagcagcaaaatcaaccacaacagaacaattatgacctctccagcaacagatacaaccctagatggaagaatcaccctaacctcagatggtccagccctcagcaacaacaacagcctgctccttccttctgaaatgctgctggcccaagcagaccatacattcctccaccaatccaacaacagcaacaaccccagaaacagccaacagttgaggcccctccacaaccttccctcgaagaacttgtgaggcaaatgactatgcagaacatgcagtt

SEQ ID NO: 18398 - DNA, 295 bp, Glycine max
agcttctaaactttgtttaagaatgaagctctgataccacttgttagacaagtggcctcagatatcttaagaagggggggttgaattaagatattccaaacttttctcctaattaaaaatctatcttactttttacttaagttatgaattcccttaatgacaatcttcttaaatattaattcaaatgaagcaacttgaattatgaatataaagcaataataaataaaggagattaagggaagagaaaatgcaaactcagttttatactggttcggccacacccttgtgcctacgt

SEQ ID NO: 18399 - DNA, 300 bp, Glycine max
tgcctcaaagaggtccacgaattacattgcagccgtaggaactaggtccgctccggagtatgacagtcaccgctttacgagcgctgaacaccacctacgctgtaaagccatcatgggatggtatggtctacgggagcgacgcgtccagctcatggaccacgattatactgagttgcagacgaaatagggcgccggcggtgggcatcactggctactcccatggccacgtatgatccaaaaatagtacgtgagttctatgccattgcttggacaacataggagggcgatcatgatatgaaa

SEQ ID NO: 18400 - DNA, 295 bp, Glycine max
agcttcttagtttcagatgatgcagatgggtttgtagctacctcatgcactcctctaatgactatggcatcatttctggcgctaaactgctgggagttggaggccatcttctcaattaaatttctggcttcaacaggggtcatgtctccaagggctccaccactggcagcatctatcatacttctctccatattactgagtccttcataaaaatattggagaagaagctgttctgaaatctgatggtgggggcaactggcacatagtttcttaaatctctcccagtactcataca

SEQ ID NO: 18401 - DNA, 304 bp, Glycine max
taataaatcaatctatggcttgtaacatgcttcccgccaatggtatctaaagtttcatgatgtcatcacttcatttggctttgaagagaacatcatggatcaatgtatataccaaaaggtcagtgggagtaagattttttttcttgtgttatatgtggatgacattttgcttgcaactaatgataagggtttgctatatgaggtgaaacaatttctctcgatgaacttttatatgaaggatatgggagaggaatcttatgtcattgacattaagatccatagggaaagatctcgaggcattttg

SEQ ID NO: 18402 - DNA, 296 bp, Glycine max
agcttagccttagagtgttatggacctttttaggttttggagaggatcaataacaatgcctataagttggtgttggatcgagtggcctcagaataattaagaagggggggttgaattaattattcctaaaccttaactaattaaaaaattactcttttaaggcttttactaaattgttaagagaataaggagtagaagagaaacttaacagaaagtaaaagcggaaattaaatgcacaacggaaagtaaaagagtagggaagaaggaaacaaacacacaaaagtttttatactggt

SEQ ID NO: 18403 - DNA, 298 bp, Glycine max
tggcttagcgaaagagtgaaatttaacactttgccaaaattgcctatttaacctgaaattgagagaaatttattatttaacgcacaaaaaaagtataaattatctattacctatatttaacaaaaagtaattatagtattataaaacaaccataaattgggaatgtttgatacaatatacacaggttttatacacaaaagttagtcgtattcatcgactaacaatacactcgatgggagtggtaccttcgacgcttcaccaaaagctgatgtttatggtggatggacgcttggtcatt

SEQ ID NO: 18404 - DNA, 297 bp, Glycine max
agcttcatgttgttgaatccagattgattcaagttgtttttgatgataacaaagatgatgacaaaaagtccaagagaatgatttcaagattgagtctagaacaattcaagaatcaagagaaatttgatttcaagattcaagaaaagatgaattcaagattcaagagaagaaatcaagaagacttcacaagggaagtattgaaaagatttttcaaaaaacaaacatagcacaattttgtttttcaaaagaagttttcacatactcttttacaacttttgaacatctctttgaacttct

SEQ ID NO: 18405 - DNA, 305 bp, Glycine max
tgaggatcaaaatcttttctctctttttctctcaactattcttcattcttattcttttcacttttgttcttcctttttacttgcaaaaattttgaggcttttacactggtgatgattatggaaggatagacacttgatcaatccaaggattcactccaagcaaggctgaatttgagttctagattagtatttctaatctgtgtgaatgctcatctttttcttcaaacctattttttattttgatgattatgaatatgattaggatagaaaatgaattattttagggattcctttcctaatttcaa

SEQ ID NO: 18406 - DNA, 284 bp, Glycine max
agcttatagccaaatggacttaccttgaattaaatgctttgatagcccctttaagcctattttcccctttttttgttatgaaactcattacaagccttaagtgataaaccatgatatcaccttacccttaaaaaattttggagcttcggaattgttttgggaataagctgggaataagtctgggggggggggggggaccacgtttgattgagataaccagttaacccaaaagctgaccatgtgcttgaatgaattatcccttgtacctagtttgagttgaatga

SEQ ID NO: 18407 - DNA, 303 bp, Glycine max
tatccttatggcctgcctccggacttcaacccccgtgccaccccggaagatttaagccaagcccctactttcgaggggcaactcccaccttatgaagactatcctgggcaagatgatggggaaggagatacccatcttggccccctgctccacctcaaagatccgtccccgcatgaactaccccaactgaacatagtccgtcataccccggcctcacccacacccgtaaaagaatttgtttcctttgcggaagataagggaaagattgaggcgcttgaagagaggttaagggcagttgagggc

SEQ ID NO: 18408 - DNA, 283 bp, Glycine max
tctagcttgcctcaaagaaatcctggaaggataaagcggctgaaggaaccatgtccgatcccgaatatgacagccatcattttaagagtgctgagcaccagcatcgcttcgaagccattaagggatggtcatttctccgggagcgacgcgtccagcttagggacgactagtataccgacttccatgaggagatagttctctggcggtgggcatcactggctacccccatggacaagttcgacccagacatagtcctcgaattctatgccaatgcttggcctac

SEQ ID NO: 18409 - DNA, 295 bp, Glycine max
tgttgagtctgaaaatttgctgttttgattttacatgtgataaacaggacgtgggagattccgttatttatttgggtgcgaaagggaggcttattaagtttgaatgggcaattcaggaactgatgcattggcaattcaggaacgttggattgtaaactaatcgacggtctatgttcgcgatccgtggactgatgaatgggcaattcatgaacgtcaataagaaagttttaacggtcaggtattgtttcctgagccagttacggatttggactttgtttgctttttctcggctttc

SEQ ID NO: 18410 - DNA, 282 bp, Glycine max
agcttgaccaatcccgttccaacccgggcatagtcgggcagtgagaacctgtgatgtacctaagcaggcgagctcctggcagtcaacagataaaaggaacaaagaccacaaaacaaggatgcttgtggtggctggccagctgtgaattttgtgtgatatgaggattatggcctctggtaatcgattaccaagggtgggtaatcgattacaaggcttaaaaatgaagacaggaggctaagatggtctctggtaatcgattaccaaggggtgtaatcgattacc

SEQ ID NO: 18411 - DNA, 278 bp, Glycine max
aatggtgaaacttactgcttttattgttgaccacagaatgggacctggagatatgactcgggggtcacgagaccttggcgacgtcacgtggggtgctattgcccaaaaccaagcttgaccaatccctaccctacccgggcatagtcagtcagcgagaacctgtgatgtacctaaacgggcgagctcctggcagtcaacagataaaaggattacaagaccaccattctcggaagcttgtggtggctggccaccttgtaatattgagtaatatgcggatg

SEQ ID NO: 18412 - DNA, 297 bp, Glycine max
agcttgttacctctcctgtctttgacactgacaatgacctttaattttgtagtttcaaattgccttagtaggatccagtgcgccttttaattggatacacattggctagtagtgtttaaaagatgaaaacaatttattttgttgcaatgccatagttgcaagttttttgttcatcatgctttgcctgagagtagcctattctgatgttgctactctgttggtgctggtgagccacttgattggatcccaccttcctctgcacctagactgaccactgctttgacaacattggattag

SEQ ID NO: 18413 - DNA, 200 bp, Glycine max
tgaccaatcccgacccaacccgggcatattcaattagcgagaacctgtgatgtacctaaacaggtgagctcctggcagtcaacagataaaaggaacaaagaccacaaagcaaggaagattgtgtggtggctggccaactgtgaatcttgtgtgatatatgggttatggcctctggaaatcgattactaaaggggggtaat

SEQ ID NO: 18414 - DNA, 301 bp, Glycine max
agctttgagggtgcgtatcccaccatcttttcatagtagagtatcgataatgtgtctaccatcacgattatcgtctccctttccatcattgggggtaccacctgggccgccagatccctccaccttttaggcgtgttctttgaaagatctgtccccctttttgcacatgttatgtagttgcatcctatccgaaaccatatcaaaattgtactgatactgcctaacaaaggcaaccattaggtccttccaagaatggactcgggaaggttccaagttagtgtaccaggtaacagctacccca

SEQ ID NO: 18415 - DNA, 308 bp, Glycine max
tgtaaccattagaagagaatgatcatgttaatttaagtatgactgaaaatgttagtcagttgttagattgattatgaaggaatgcattgaccgtatcccggtgagagtgtgatctttaaattttgagagaaacgattatcatttactactaattttcgcatgaatctctgaagtatggactgaatgcatgaaattgaggacgatgaaggccatgtttgattgtgatagccacttagccaaaaagctgaccacgtgcttgaatgatttatcccttgcacttagtttgagctgaatgaattattgattga

SEQ ID NO: 18416 - DNA, 302 bp, Glycine max
agcttatcaacacttttatatataacaattactggatttggtttatgttgatgaaggtatatggtagcatatacttcagatcatctttcttcaagtgagtttgaaccccaaccgtaggaaaggcagtaaggcacatgttgtgagtctagaccactcacaagtattttagtcatgtgatgagcaatttatgtagtaacataataacatgcgagtcttcaactaataagttttcaagctatgattatgaatttgctctcttcctttttgtttaatgctttctaattgtggtaagtgtgtcataa

SEQ ID NO: 18417 - DNA, 81 bp, Glycine max
tgtaccacatttcattacatagagaagacaaatagcaaactacacgttagccacccatgaaaatggagaagcaacataact

SEQ ID NO: 18418 - DNA, 299 bp, Glycine max
agcttgccacccagctcgcccaggctatctaggttgcttcctccagaagcaaccgccttctggaggaattttctggaaggcccaagtgggcttggttgctatttgcacccttatttttactaaatacacccccttgctcttttttggtgattcttttttcgtaacgttgtgaaactttacgaatttcgtaacgatgcttgttttctttccgtaatgttacgaaaccttacggattacgtaatcatcctttttttgccttccggaacattacggaactttacggattgcgcactaacact

SEQ ID NO: 18419 - DNA, 312 bp, Glycine max
taaaaatataaaatcaggtatgctcactaagtattttgtaaaggtaactgtaataatctattaccattcagtacagaaattccatgacaacccaaaatccctctgtaggcttgtgatgcatcaacatagctcccaagtaaaattatgatatatgataactttactgctatcacatctaaaaccaaatatagttcgcaattttaaaaatctttgaagccactcacagcagtatccaaatcagggtaatgaataagatcatgactaactaaagacaataaaaaaaacatcctttgacctgttaagctggtttgg

SEQ ID NO: 18420 - DNA, 302 bp, Glycine max
ttgtccctgaaaccctctatgtaaatttgatagcctcgtctctcccttcctgaaaacccactaaaaattgcctaaccccccctgttgttactccataatttattctgcaataattgcttaaggcagttacatatggtcctaaatcactacagattcattttcgattaaccctttgttcctaactagggtttcgaaacatcacaacagagacagaccattgaacaatggattttcatcattaacatacaacagagacataccttcgatggaagcgcagacacgaactccacaaatgcgaactc

SEQ ID NO: 18421 - DNA, 247 bp, Glycine max
agctttgtggtcgtaactggcaccccataaaactggcagagacctgtgatcaatgtcggaaatcttactgctctgtcggacttttgtgggcccactgggtgtcttggaggcgtgatacctacaaactggtaaatggcattcgagataagctgggctacatgaacactgttatgggtccggatagtgtacaccacctgacatttatgcaacgggggatcaaaattatggtcgatgggaatgataatgc

SEQ ID NO: 18422 - DNA, 236 bp, Glycine max
tttatgaacactatccatgcgtttttatttagacagcttcatattttggccttattttaggactagaagcttttattctttgctttggcgaactgatatctatgacccttcgtttttattggttgagcacactaatgctcatactaggtactttaactaatgggtggacttcttttctatgacagggacgggatgttccaggaatacgtgagttggctcttggacccgttatgctt

SEQ ID NO: 18423 - DNA, 294 bp, Glycine max
agcttgagatgaggaagtgttgaagggtgaaacttcctgcttttattgttgaccacagagtggtacctggagatatgttgcgggggtcaggagaccttggggacgtcaggtggggtgctattgcccaaaaccaagcttgaccaatcccgacccaacccgggcatagtcggtcagtgagaacctgtgatgtacctaaacaggcgagctcctggcagtcaacagataaaaggaacaaagaccacaaagcaaggaggcttgtggtggctggccagctgtgaattttgtgtgatatgt

SEQ ID NO: 18424 - DNA, 305 bp, Glycine max
tctagtcgtccatagacctcctctgtggtacggtctagcaaacgttgcatttgtgcattcatcgcatccactaacagacgttgagcgccgtccaactgatggtactcgtcaccaccaccacctactccagccataattcaacaggaaaaaaaaatgtgcaataaaaattattaaggtttcaggacctcacaacactctactcacgtctcttagatggtagtacactcgtgtttaatgctctcaataggcttttgtgtaatgtattccctcttgccttttaccactcgtgtttcctcttaagttcc

SEQ ID NO: 18425 - DNA, 294 bp, Glycine max
agctttcttttaatcttattttattgtcacttggacttgtgctgattgcagagacccccctttgagttttccttttttatatatcaaccttaataatttaagaggtaatcttgatccttttcacaatttcacactctctcccacatgcttagttgtccacagcatgattcatgtaaaattgtatcctttttgctgttttgcatgttgggttgctcagagatagtgggaaaactgaagaaattttcttgcttgattagtgtggcttgcagcgaagatatcactgcctctgtggca

SEQ ID NO: 18426 - DNA, 300 bp, Glycine max
ttgatttaagctgacccccagtcacttagcgattcaattgtaacagtacagtcaagcgccattatatataataaaaaacttcgtaccccattgcccagaggctcttcgctatgcgaaggttaatagctgttcataaaatataagtataccaagtacacaaatacctgaatttgttccccgaagtttaaaaaatatggggcagaatcggacagctacaacagctttgcttgcacagggaagttgtatagcaggcctgtataaaaggtgcaataatagagtaacacatcacaaacacatact

SEQ ID NO: 18427 - DNA, 296 bp, Glycine max
agcttcttgagcgatcacgtgtcccttcttaagtatgcctcgcatcctaatttaagccagataacttcctagcttttatttattttaatgatgttttgttgggtgtagtatgccacaaatttgactggaggttcatttgatgaagctcgaatgcttcaaaatgtagaagcatgtgaatggttgaccagtgccttgcatggtcttggttttgcctaatctagatcctagttatgcaaacatgagagctttatgttcctttctttacttttctcttaaaaatcatctggtaaaataaa

SEQ ID NO: 18428 - DNA, 301 bp, Glycine max
tgacaggttataaaaaaccacacaatctatgaatgacagagtaaaacaacttaatagtaagtaaatgcacagaatccaggacaccgattagaaccagtgactgctttgtctttctttttttttatttcaaaacttggtgaatctttctatacagaacagagatcctttccaacaattttatccaatcattctctgttgattcttatattattttcccctcatacatgaatctgttttaaaaatgcatcaacgaaattaaacatttctaaagtttatcacaagcaaacccaactacttagca

SEQ ID NO: 18429 - DNA, 285 bp, Glycine max
agcttgctcaacgtctctgtgagggtctctatttgtttggctaagagcttgttttgggctaatagtgcgtcttatgatctgagctcaagaagactcttctttgtaggtgtgtaagctcgatcacaaaggatgacatggtcactggctgcaatgtttttaatcaactccatagcttcatcaggtgtcttcaatttgatcttccctctagcagaggcatcaagtaactgcttcgaatggggtcgcaagccatcaatgatgatattgagttgaatcggctcgctgaac

SEQ ID NO: 18430 - DNA, 303 bp, Glycine max
ttggttttaaatatgttgttacaataatgttgttaggtttaagtctagtccaacaagaaggatctgaggataaagcttaggctaaattagtctaaactttcgtaagctatttaagctaagtctattccaacaagagggatctaaggatgaagcttagtttaagttagtctaaacctaggagggctgcttaaaatgagtctagcccaacaagagggatcaggggacgaagcttggattgattcagtctaactagggatcgaggtttagtaacttaggctacaacatagaacacaaaagtatgat

SEQ ID NO: 18431 - DNA, 224 bp, Glycine max
agcttttatgggaaggttgtttccactcccttaaactgatagacccatgacatttcaccatgcctatgttggaacgtggaaaccgaaatcgatcaacatcacaagtggagtgaatattatgatgttttgagctggagaggcagctctccattctttaaggtagaaatgatactataacgaggaggctaaaggttgagctagcccgatctgatgactcacaacag

SEQ ID NO: 18432 - DNA, 108 bp, Glycine max
gtgactatacgttcattcggtataggtttaacaaacgctgcattggtgcatttatcacggccagtaaccgacgcagaacgccctcctactgatgagacatgtcaccct

SEQ ID NO: 18433 - DNA, 288 bp, Glycine max
agctttactctatagcctgttgcttgagtgctccggcatcttggaaaaacaagaagcgttctacaagcataaatctttgtgctggtacagtttattcaactaatgtatggcatcaacgaggcgggatgatctaatataaatagccccataatatgaatcgcctgcaacataaagaagcttggctgtttgatgacatgtggatcaaatacagcttatttcaacatgtgtttggcttaaaaaaagtgaatcctgaatagtacctcgtctattgtgagcccatccaaacta

SEQ ID NO: 18434 - DNA, 290 bp, Glycine max
tgacaggttataaaaaaccacattatctatgaatgacaaagcaaaacaacttaatagtgagtaaatgcacagaatccaggacaccgattataaccagtgactgctttttctttttttttttttatttcaaaacttggtgaatctttctatacagaacagagattcttttcaacaattttattcaaacattctctgttggctcttatattattttcccctcatacatgaatctgttttaaaaatgcatcaacgaaattaaacattttgtaaggttatcacaagcacaccca

SEQ ID NO: 18435 - DNA, 815 bp, Glycine max
  unsure (1)..(815): unsure at all n locations
aaggaccacaatagtttcctttactaacgcatggtatgaaacgactgctaggcacatcaacgctaatccccccaacgaaaggagagattgaaccatgagaaccggacccnaaannaaagcgcgggggctcagaaggcccgacgggcgcaaattttggccccgaacaacaggaaaccaagcgtaaagcacgcaaagcggaaaaccgacgggacaagacaccatatacgagcccaagggggggccacacagacggagggcaaagggaaaggctgaaaatctggaaggcaaagaccccgtggctcccacaaacactgtgaggggggaggggggaaaaaacaacagacgactgattggcaggaaaaagaagatggggcggtgactcccgggacacccacacgtcctggaagggggtaaaagaaaaaggggcactcacgaagaagacaaactaggaaggcccccaccgaagaaaaacctaccattctaaaaaataaacgaaggaagggagaaggccagcccactgcccctgtaggaggagggagaagaaggaagaagaatttcgccgcgggcccagaaaaaagtaaacgagaggtctgaacaccgcaaggggaggcgcagaatggcgacaagacaggcgccaaaaaacagggtggggcaaggaaaaagccacgatggtcccaaaaaaaagaaacgaggcccgggaaaaaacccagggaagaggggggcaggaacgaacacaaccacggccgaagcccggagagtccaacggaggggcgaaaaacaaagaacacccacacccgggcggcgggaagtatgac

SEQ ID NO: 18436 - DNA, 353 bp, Glycine max
tgtcatggcaatcctttggcaggaaaaattctaaaacaaaatcagcggaggcactccggagtggaatgcccagaacagcatgcaagccaaacatgttatcatgatgtgccacaggatactccgccttgctgaaagaagtaatgtcatttgcaaaacaaagtttggtggttgtgaaagctgtcccaactactccttgcccccccaaaaggtggcacttagagcaggctttcaggaaacccattagctctacatccgccacaaaactagcagcatacacagtcgacacataattcatctcatcgtttgaatgcccacatccactctttcctgcttgttggatgcagggagcccat

SEQ ID NO: 18437 - DNA, 938 bp, Glycine max
  unsure (1)..(938): unsure at all n locations
agctaccattacgacataacccaacgaatggaactcttgtctagaaacataatttancaccccacccacgaccaggnnnttgaatcatgcgtatcggaccccaagngaaggaagctgcagcttaaggaggaatgataacagggcttatatttttctcattgaggggcaaaattggaccgccaacccccgtaaaatggtaagaaccacggctaatcagccaaccttggattataaggaaaaagtgggtttgcaacgccctggtggacacaagagcgtcagaaattgtaggcccgtgatgaattgggaaacgatatctctagggcccttgcaggcaaccgaagtgggaaaacatttagcttataaaaggggtggcaatcctattgggttcataaaagaagtcctaagaagagctgaggaaccgcccttcccggggtgaacctatattttgaaaactggggaagggaatttccaatggtcacacccaatattgcaagcaaaccctctaagaaaactgtggaactaaaatagaggacatgcgaggcccctatctattggagttggggaagaacctatcattttcaaattttgggagcgaggaaaccgccaactgaaaatctgtctgtagttggaggggaaaaattggacatgctggtgaagaaaacaagactgaaccctaaaacataacggatgcccctccactcgcgaggccactgggccgaaatcggcctcgatcaaagggcctgaattcccagtcgaaagagaatctaaaatcgaattgggcgccgtgctggggggctcacccctaggaatgggaaaaaaaacaaagaaaacaacacctggtgaaggggatcaacaacactcccccatctttatgagggaatggtgaaaaagccacactcttaccacataacggacggcggccaacagaaggaacgccg

SEQ ID NO: 18438 - DNA, 304 bp, Glycine max
tataaagtattatcattgtgtcataccctaattttgtccggggactattgtttgagggcatgcaacctttggttgaccgcttcgaggtacttggcacccttcgttgcacaatacgtgaaattcccgtacgtgccggaaataaaaaggagtattgttatgcaatccgtgaagttctgtaacttttcaaaagctaaaaaggagtaattacgtgttccgtaaggtttcgtacccttctgaaagaaacagtttcgttataaattcgtaaagttcctaacattacggaaaagtataccaaaaaaagcaa

SEQ ID NO: 18439 - DNA, 595 bp, Glycine max
  unsure (1)..(595): unsure at all n locations
ccagaaaacacccacaccccctcacaacgtgaggcccccagccccnttatctcaccggcccaacacgggcgcacgactccaatctgacccctttttgggcaaaaaaaaaaccacgacaaaaatcccatacccgcacgaagcaagaggtccagtggcaacaaacgtcggaccagccaaacgagaggaagttgaaacctaaaaattctaccagcgaaatgacgcccctcaaataaaagaaacatatatcccgccaaaagtcacaacccgggactcaaaggctcgaaaaaaaaacacaggaaaaactagactgaacccgggccagcaggcatgacaaaccacccgaatgcgccggggcaaaatgcaacggaaacacaaaggggaacatgcatacccattgcacactgacggcacaaaagagaggccaattaggcccccagaactacgagggcctcaaccaacaggcgcgtcaacagcaaacgccgagagaggaaaaacaataaccacacacgggccccgacatcgaaaaaacccaaaaccccgcggaaccccagatccccaacagcgcacgaccacacaccccaaggacaacgacacc

SEQ ID NO: 18440 - DNA, 358 bp, Glycine max
  unsure (1)..(358): unsure at all n locations
atggatgccactaacaacattaacatataattggtataaaaaaacaatgacacaaaatgtttaattttcaagaaatttcttatttaatttatcttatattttaagatgttagatatattgattttttttgtatattattttctttataaagtattacaagataagattaatatgattaagccaacttatttgtagttatttttattttaatggttnttatttnttaatcttgatagctctcatgataaaagtttaaaactttatatcaaatatcaaaatataggttatccaaatgaaacttcaattctgataagagaatagtatacaaaatatttacgtaactacatatgagttttac

SEQ ID NO: 18441 - DNA, 315 bp, Glycine max
aagttatccacattcacaatgcgcgcataaaccccccatcccctgttgcccacctacatctgaggccacgtactcccacgtagcccatatcctcgattctctcaacaccaggtccccatcaatcctcccaagcttccaaaacatacaagcaaaacaacattcaaacagcacaagctatcacagtcgagctaaacagagcaaaggcagaaaactctgctgaacacatcaaccaaaagcacagcttttctcacttaaagaccacagtaacaagtccttcgatccaattccgtaaccgggggatcgactccaaaattt

SEQ ID NO: 18442 - DNA, 403 bp, Glycine max
cgccgcccagctcgcccaggcgagcaaggttgcttcctccatatatcatcttccttctggaggaatcttttggagggcccaagtgggcctggttgctatttgcacccctgtttactaaatgcacccccctttctatttttttgtaattctttttccgtaacgttacgaaactttacgaatttcgtaacgatacttattttccttccgccaggttacgaatccttacggattatgtatttactcttttttagctttcgaagaagttacggaaattcacggattgcgcaaaaacacctattttcgaattccgccacattacggaattttacgaatcacgcaagcctacttcctttcgatttctgagacgtcttgagacctcatttattgcatgtcatcaagtaat

SEQ ID NO: 18443 - DNA, 562 bp, Glycine max
  unsure (1)..(562): unsure at all n locations
agctttgagccaaaatcctaactcaccataaactcttgacttattgcgagaatgtcaatccttaccctcggaagcaaaaaaaaaaaaaaagcaaaaaaaagaaaagaaaggaaattcccaatcaaagagtgggagagagcaaaaagaaaagaaaggaaattcccaatcaaagagtgggagaaagcaaaaagaaaagaaagaaaattcccaaccaaagaatgggagaaagtaaaaaaggaagaaggaaaaggaaggagagaaagttcctgatcaaggaagcagaagaaatgtgcagaaaggtcttttgaccagacaatatctgaacaatacagaattgtcaccaaatgaacaaaaagaaggaaaggaaaccatgacctanagtggtcttctccctttgattaccaaccaaaatcctgtgcgtcggcgactttttcaccccgcactaaaccaaaacagaaaaggaaaaagccaaaaaaatcaatagccgaaaaacccaccaaaagaacccatttcaagggaagtcctattgatccatgatcacgcatgtaatctttgatttgat

SEQ ID NO: 18444 - DNA, 638 bp, Glycine max
ttgtatggtagaaggtgtaggacacccctatgttggctagaatccatagaggacctcaccttaggacctgaagtggtacaacaaaccattgagaaggtcaagttgatccaagagaggatgagaactacttagagtaggcaaaaaagttatcaggacaagaggaggaaagacttggaatttgaggttggtgatcatgtattcttgagagtcactccgtggactggggttggtcaagcattgaaatcccaaaaactcacacctcgttttattggttcttccaaattctcaaaagtgtcggtcctgtggcataccaaattgcattacccctgtctctttctaatcttcacaatgtctttcatgtgtctcatccatgacccatcttatgtgatcgaattggatgacgtacaagtgaaggagaacttgacatatgaaacattgcctttgaggatcgaggataggcatacaaagcacctaaaagggaatgagattccattggtcaaggtgatatggggaagtgcatcaaaaaaaatgccacgtgggaactagagagtcagatgcaatgagcctatccagccttgtttgagtcaggtaaatttcaggaacaaaacttctatacggtgggagagttgtacaccctg

SEQ ID NO: 18445 - DNA, 1265 bp, Glycine max
  unsure (1)..(1265): unsure at all n locations
cgacgcgcaagacaacgcgcgacaccgaaacagtcgcgtcggaacgcgaagaancgacccacacgtcnccccccgccccaaggcntttgattccatgacacccgcgcccggaacanaacagccagccggcgcgccgcaaacgcacccccaccacgggaacaagatggttatagagtccgacagaacaccaccgcgaaaccaccgcgcctcaaaacctcggaggtggggatacgacgggcgcctcaggggagaacaaactgcacagccaaccacggaggcacctaaacggaggcgccgcaataggggtgggcacagaaaaagggcacacgcacgcgggaacgaaggcccgcaaaaagaggacaacgagccaagagaacaagacacaccgagaaaacggccgacgacgcgtccaacgacgtagggggcacaccccacacacagatatagaggcgggggggcgaagaacgcgccgcgaaaacaccgaaacacaagagcagcgcgccaacaagaagcgtcaggggcaagaaaagagcggagcgacaccggccacaggcacagcacgacggctcgcgcagaaattgccacgaaaaaagaggccgcgacgcacatacggcgcggcccggtacaacggcgcaaaagacagacgcaccgaccacgaaacagccatcaggagacgaggcggcgcagacgacacgcgacctaccccacaatattcgaaacaacgcgggaagaaggacgcaccaagaacaggacacagcccgcgaggatgctctcacccgcgagaaacatagcgcacagaaggcgcacgcgccggaagagcgacgcacactaccctggtggtggcggcggagcgacgccacccacgatcaacgtaacaagcacaagagacacagagatgacaacttgacgctacgcgaggcggggacatggcaccgcgacagcaacatacgagtcggaaccgcgaggtgcatcgcgcgcgaaggcgagcggtatacgacagagagagacagagccgccgtgtcgggacacgccacgatacgcgcgngcaangcgaaacgcgaccgcaacatctcacgacgccgcgacacgacgacagacacgtcgctagagcgatgcgaaatcngaganccatgcggggccctcgcgantacatatcgggagagagantaaccagcgccgatcggaggcaagcgacagccacacacgagaagcgccacgccacaagtccgaagagagagtgtgacatcagcaatcaggacgaccgn

SEQ ID NO: 18446 - DNA, 870 bp, Glycine max
  unsure (1)..(870): unsure at all n locations
cgggatcgtgnnnaccttattatacattgcatgtaactgacgctatataatacaatagcaggctggttctcattaatggatcaaacccccgcgaataaaatatttatgtaatgcaaaaccacctcgcatgaaaacgtctaaaacatcctatgatgatgcatttaatacttgggtgcccttattactcctgtaaaccctcaaatctttgggcttgggcccactgtcatggccaaccattggagacacctgtcattcaaaaaactaagtgatgaaccaatgaaaagggaggcaagtaattaatgtatgaccttattgtggaaatcacagtaagcttcaacataatgtgttttttccactttccccataaaaagttaatatttgcatcacaaaacctaattaatgacattgatggaaagttcacaacaactagttaacgtgtgcaaaaccatgggagaacttgaaaaagcgcaatgctattgaaactcgaaattgcataaatcactttttgcatttacgttttttggcactgctggcagaaattccaagtttgaataattataaataatatgcctaccaacttgattctacatgccaccttgacaaagttatacccgaattaaagatgttatgtatctaaaacaaaaaactcgtctttttaagaaagcttcctgctaaaaagaactattttttttttacaaacaagtcccttaatgaccggaggtgtccttgacatgaacattttgagaatccccctcgttctaaaaaatttttttccattgtggtccttggacaatggaccggtagaatttgtccaaatttctaatattggaaattacaatatgtctcaatccagggaagcgttttaatgtt

SEQ ID NO: 18447 - DNA, 516 bp, Glycine max
  unsure (1)..(516): unsure at all n locations
agcttgtagaatggctagacatgatacatgtcttgttttggtttggntcaaggataaaagggatgccccacattatttccatgacacaaatgcaaaaatgatgatttggaaactttatgcaaaactggtcatgcatgcacctatgtggacactcaagtgtcaaatttttatggtcatgtgatgctagggctcaagattcatttcctctattttaaatcaacccaatatttccaaaatatgttcttttatcaatttgtgcattcatccgagtccatttcgggcgtgcggggaaatttcacagcattcacccttcaagtgtatacacattttttcaaaaactagttatgatcagtgaatttttttcaaagaaaagttggaagtcatctcttttaaaagcatgttggtttttagcttgacacttattatatttgttaattcttttctggttgtttttctttccccttttttttcatgaggattttgctacctaacatgtcatatttttggaggattttt

SEQ ID NO: 18448 - DNA, 842 bp, Glycine max
cgggaactgatgcctcgatgaacagccgcacattaatacccagcctctattcaggctaaattggggggaagctccttttttttgtttataaccaggggaggcgccctctcttttctcttctacatagtcttccgctgcatcatcatggtgggaaattacccttaaggaccctattggagcctcagaaccaaccctcatataagccccgcaagcaagctttcatccagtggtaattagaacacaagaactttaagtttgtgctcccttaaccttcattaattttatgcttaccatctcttccatcggtggttcttcatttattctcccatgttctactcacatgtcttgtgctaaatgatgttaaacatgagtctttataatttccaacgatttaacttgctttaaaagctagatttgatttatatgggacaaaattcttggcctggtcttgaaccatgaaatgtgtggatctatgttccttggagaattgtcttgtatttttttgcgcgctgaagctagaccttaaaattcttacaaacattttatattttacaaagcttccagattttaagggcttcttcacctaatgaaattatgcaaaaacatcatgctatacatgaaacttgaacaaaagaattgctttgtttggccaaatttttatcctggtatttagtccaaccaatgggtcctgattgctaaaaaattttttcccaatgtatgtttcgtcctaaactgtggtaaaaattccttggggttcaaaatacataggagtgttaacgtttctcttatgggtttattgtacaaacccatataaatatcctttggagacggattcctaaact

SEQ ID NO: 18449 - DNA, 606 bp, Glycine max
  unsure (1)..(606): unsure at all n locations
gggatcttaagcgacgcggctgcagcttggggtgcatcttccagaaaggtaacttgcagagtcgccaccaacgtttatttgaggaaaacgtcggaaaaaccggaaaagacgtgatctacgaactttaagtgaaaggttcgggagttgtatttacgcacgaggaaagtattagcaccccacacatccgtcacaagagacgacaacctttaatcaaatgtgaaaatatgacttcaatttatattcttttccctttttacgttcttatgtcttttttatgcctttttatgtttttatctttttgtggacgacaagggcgtttccctttgctcctacgtattcctcaattgtgatgagaaaatcagacctacgtagttcttttgtgaacaaagcgtttttggctaacttattntttatcctttttttgcaagatatgtttttattgaatgaaaggtcatttaaggcgttttgaccattatacaatctttcgattcttttgaaaagtgagaaaacattaaggcattggaccattaatgattctttatttttgaaagaggtacaaaagtacatattgattttagactttttagaaatctacacttagcaaat

SEQ ID NO: 18450 - DNA, 1071 bp, Glycine max
  unsure (1)..(1071): unsure at all n locations
aagctacagcgtacacggcatgacgaatccaacctacgacgtcgaccgcanacttcnactcggcaggnantaccgctactgtaactccatccaacgacgaaccacgancnattggatgcctgcacctccgacccgcgcacctctaaatcgacctgcaagcatgccagcactttgagcaaatcacagagggacataatcttttctctttggaaggccaggatcgcgcgcgaaataatgtaaggacgcacggaaataacgcagcgagaactcgcgacaaaattgacgtggccaaaacattccacacctgctagcccgatcacggacgccataaacaagcgaagaccccacggacaatagaacacaaggaagcaccgtcgaaaaacatccaagcgaggaatgcgctctagacctccggacgtcccgaggacaggccgcatcaacctatcgagcacgccgtcaaaaggaacgagggacgcccctcgacaaaactcccagggcccaaggcactacaccgcgggatggcacatcacaaggacgcaactatgaccaggcgcaccaaacatgtacgcaccagcagccgcccgaaagaatgcaacatcgtcctaactccctacacaccggaggaccgtagcatgggccaaaaacaagaagaanccacgcgcagtctcgaccaaacgacagacactaagaaagcacgnacggaccgctaactttacacgacgaagcgccgaagcgaagggcagaaccatcagacagaacccgatgaagaggacgcaaggagaagccttcgagaacatgcaaatggacacaaccacgtagcgatcgaacaacgctcagggcgccgaaaatacagcaaccgtcgaaataacatagaacagcggcacgcatgctcagaaggcatcctcaccctcctcggactgcataccaagcctcgcaacgttcgcaaaccctacaaatcgcgcgaagcacggctccggcatagaacgtaactgcaacataacacacacggcgaactcacgcgaacgccccaactacacatactctctacacctcactcgttagccacggacc

SEQ ID NO: 18451 - DNA, 569 bp, Glycine max
  unsure (1)..(569): unsure at all n locations
tcttgtggaccttgaacaagcaattnactcctctttcagaactttgcttgtgcacgcgactggtctctgtcttcccttcgcaacttgagttcactattgctaccccatagagctccgcgaaatttgttccggccatactcttccttgcgagccctcttggtctcttgttcaagggctcttgcagtaattgcattctcttcccgtagcccggcacactccttccgaacgtgtgtagcggccaacttgaacttctccttggcaagttttgcctttcctaactcgcttttgagagtttggacttcttcgtcctcttccggtgcttcaaaactctcttcgctgactgactttaacttggcgagccaatctaaacctcgtatatgaactgtcatccattcgtggtacccacaaatgatgccattacgaatgcctctaagctgctgatctttnctaacggggtttcccatgccttatggattctttgtatagtcttggaactttgtgcgccgagatccctcacaaggacaggagacatgctttcttccgtctgtgctcccctcatggggtaccct

SEQ ID NO: 18452 - DNA, 495 bp, Glycine max
agcttgttgcatcgagtctaaagtatctttgtattttattagcaggtcatccacattaaaaaatccttatgcttcattgtgataataaggttgccattctgactcccattgataatctgcagaagaatagtccctttcaaactgagttccctgctgttgcatggaatagcagtcgcctttagagctagcttggtacgtcatgaagtctgccaatacactttcaagatcaggagctctccctttctcataataattgtacatggccggttccagcctctgatcaaagttatttatagaataaaaatagcaactgtcctggtgatgctctcctccagcaaaatcacaatttattagtggaatagagataacaatcttcatgatacaacgataagagagttgtcttccttagaaataattaagccacctgtaggagattctatacatacaaaatactaacagacacaacggttatcccattcaataaaagaagataaa

SEQ ID NO: 18453 - DNA, 529 bp, Glycine max
tttgagtggaattcttggaaatctgaatcatgatatatcctttcaggccaatggacctttagctaaatgctcaatacttgggttgttcatggaaagaacatcacaggttcacccacaaatatgtataaaatatgcacttgattcttaataccaaatgtggctattatcatgtttttacagttttgaaaatgttatcattttgatgtcaaagtgtaaaagtgtttttaaaaacattttcaagacttttacactttgcaccaacatcgtctaacttgtatccattcaactgtctgtccaaatccataacaaataagactaacacagatccagaggaatggagtctatgtttcccatgtcaaatacaatgcacaaaatttgtgtgtaaaaatttgtcttgaacccaatgactgaatttctgtaatattatccacattcatctacgtgctgagactggattattattcgcacaacatgggaagatcacccttactgggaactggatgatacaacatcataatatgtctgactt

SEQ ID NO: 18454 - DNA, 253 bp, Glycine max
acaccctaattcttttctgataaaacattaaataattctatgccgtgaagagaggagagatactctgaattactcgttctgtctgcaattgattgatttgaaaccattaacctggatgcttcgaactgatctggcttattgagtaagataatggcctggaaaacacattctctatctattatgtgcgagcatgacctcatgtgatgattaattatggccacaatacatgtctctatcatgactcatgagtgac

SEQ ID NO: 18455 - DNA, 510 bp, Glycine max
  unsure (1)..(510): unsure at all n locations
aaattnaataggggagtcataaatgtgtcaagaaaataattaataggacagagaaaatattagtaagtcattcaagaaatatgtattttgtatcgacttatctatattaaatatacaagatgatcatcaagtgtatagggcgaacattctgctcgaaaaaacaaaaagcatagaataatcattggagtgatacctcctatatttttaggtgataaaaaccacttattttaataaatattctattgactaatccgttatagtaattgaatttagctttaacccactctagtgaataaaagatttgttgcatggtttgaatatatatttttttaaagatctttcaactataatctgagcactaaatattcaatttatcaaatggggttgggtcaaggataagcactagccttctgtaatatgttcaattaagggtggatctctaatgagagatatgcatattttagtttttcattgtgtctggaattccaggatactcgtcaagatgaaaag

SEQ ID NO: 18456 - DNA, 508 bp, Glycine max
agcttgaatcctagcaccattttttttttttttttgaaagaaaatgactctgaagtcagaagaagggatcgacggtaaaaagcaaaggtaagttgaaaccgaataataggaaaaaaaaatactataatttactatcattttggatttaatataatttatatttttcccaaaaaaaaatactataatactataatttgctcactggacgattagatacaacttatttagtggatttgtagtcaatttatttagtggtcttcgaaccaaaacgcccttttgtgttttttattatttgaatcttgatttacacgtgttcataactcctgtttatttatagtttaaatatgattttggcttcggcaatctctgaagaataaaaaattaaataggaattcataatatttagaaatactacataggtaaaaaaaaaaaaaaccttgcatggacttattttggtgtatcttgcatggactagactaagttctttatattctcattgactttatca

SEQ ID NO: 18457 - DNA, 570 bp, Glycine max
  unsure (1)..(570): unsure at all n locations
acactatagaaactcagcttgccacaagtttgtacaaaacgaattcagtgttttgtattgaagtactaactaacaacactaattatagagtgtagtaactaactaactcactaactacctaattaaactaattacacaacatagaagcccaaactcgcaacctaattcttcaagtgcagaggttctagcttccaagctcaatttgaccctcgagatggcaaaaatggccatttggagttctcacacgtgtcttagcatttcatggactactcacacgttccatttggagttctgtagtgtcgtctaagccctgcacaangcaaataggtcaagtaagccaaaatctaaaaatttagctacaattctcaattaagctcaatcatttgccttagaccagaacttgattaaggtgagaaaataagggtcaaagagatttcaattgagctaagaagaataaaaaaatataaaacttcaatgctcaatcgaattccccacactttatctttgcacttcanggcaaacttaaagaaagattaaaaaaattcaacttaaaaataaccacacttaaag

SEQ ID NO: 18458 - DNA, 439 bp, Glycine max
  unsure (1)..(439): unsure at all n locations
gggggtgaattaagatacaaaaattattcccaattacaatttaacttccttttggaattactcaaaagacaattcaaaaataaacttctttaaagcaaaagataaataacaataaataaaagaagtttaagggaagagagaatacaaactcaaattttatactggttcgaccacccctctgcctacgtccagtccccaagcagcccgcttgagatttccactatctttaaaaagctttttacaaactctgaaccacacaggaacatccttcccttgtgttcagatatccttacaacttaaaagaccatcggtctcttaaacagatctctttgaataagaagaataattttctctcattaagaaaaagatattacaattgaagatcgatcaagattccttattgaatttgcagtgtnttgccaaggaatattttgagagt

SEQ ID NO: 18459 - DNA, 589 bp, Glycine max
aagcttctctttagaaaagagatcagtggagtcagaggtctagagttatattttctctctcaaagaaaacttgttaatgtcattgaaagaatccaagatgatgatggcaacacctaacatgacctatttacttcctctctgactccaactaatatagaagaagttatggcttgtgtggggaagagaattaatcaagatcacttgaattggctaccccatcatttcactgaaggagactcctaaccagttgcaccctaccaatgctccaggtattgatgatgctacgcttgctctctcttcttaaaaaaaattggcatctagtaggtaaatgtgcttaatctggtgctagatgttttgaacaatggtggtgatctgagacaaattaattatactccaatagttctgatactaaaaattaaagtccctaacatgctagtgaaacgacttatgaccaataaacttgtgcaatctgttagagaaaattgctaaattcgattgcaaatatgcaaaaaaaagggtgttgccagatattggtcttatattttgatacaaagcaattcatatttttccaatggactagtataatttt

SEQ ID NO: 18460 - DNA, 448 bp, Glycine max
agcttccattgttcaatttcgagggtctcgatttattatgtttttgaatgagacctccgaaataaaagttatgaccatttgaattgctcaagagcttccattgctcaatttcgagcgtctcgatatattatgcgcctgaatccgacctccgagtgaaaaggtatgaccatttgaattgctcaagagcttccgttgttcaatttcgagcgtgtcgatatactatgcgcctgaatccgacctccgagagaaaagatatgaccatttgaattgctcaagagcttccattgttcaatttcgagcgtctcgatatattatgcgcctgaatcggacctccgagtgaaaagttatgaacatttgaattgctcaagagctttctttggtcaatttccagccgtttgatgtattatgcgccctaatccgacctccgagtgagaagttttgaacattt

SEQ ID NO: 18461 - DNA, 269 bp, Glycine max
cgattaaatggcataacttttactcggaggatttgcatgctcttaatatagcgagacgaacgaaatcgaactgtggaagctatctagccagtcgaatggtcataactgataactccgaggaacgagttatgtctgtaatgtatagagacgctcgggattgaacaggaccagctctcgatcaaagcaaatggtcataacttttaactcggaggtccgacagatgcgcattatatatcaagacgctcgaaattgaacactggagccactcg

SEQ ID NO: 18462 - DNA, 346 bp, Glycine max
  unsure (1)..(346): unsure at all n locations
tgtatcagtataaccccttcagtttcaattcagagtctccatattcgattaattggtgtttagttcttcttaagtacttaagtatggccttaaccattttccaatgttcctcactgcactagcatatggtactctactcatgcgttctctttcttcaggagttgttggacaattctccctaccaagagtaattccaacacctacaggcaaatagcctcgtttggaattatccatgatatatctctntaagatagtatcaatgtacatagattgggagagtccaagcaaccttttagatctatctctataaatctttatacttagaatatagactgcttctcccaaa

SEQ ID NO: 18463 - DNA, 1022 bp, Glycine max
  unsure (1)..(1022): unsure at all n locations
cacgcaaatgacgcgaagntaagaaactcnaacacacgaacaacagacgggaaacgaatncgctnngtacagaaaccacaccccncncccacccnnnnnnccggcgaatgatgacatccatcgccccaccggcggnaccnnaanaaacnacccggcagcangccaagcccgaaaaanaagggggaacacggaataaatatgccctcannanaacaaagaagaccagggagggggggagaggcaaaccccacccccgcggaaggcaaacgagaaagcgggaagaaggaaccaaagagaaaacgccggaggaccaccaacgcgaagcaaaaaaacacggaaaaagacgaaaaacacgaaccaccaaccccccaagcgcgaaaggggccaggagggaggaaaaaccccccggggaaggagaaacgaaccccaaccgcnccagcccaaagggacggaggacggaaaagcaaaaagccaacaacagacaaaaaccaaggcagcaccaacgagggacgagaagagaacaagaccccaccaagagcggggaacgaggcaggaagaaaaacagagcaaccacaaaacgcccaacgaagcgcccgaaggagagaagaccaaccgaaagcacgagggaaacgaccccagcaaacgagagggccacgaacgaaaaacaaaaagaaggaacaaacggaggccggcacgcaacaaccgacgaccagcccaaggcaacgaagaacgcagcgaagaaaaacaagaacgcagcgcacggaagaaccgacacngaacggaaggcacgnaacgcgcaagcacacaacgacagcgaggaaacaaggaaaagaaagaagcgaacccaagcaacacaacgaaagcaaccaagcgcagaacgcaaaggaagagaagagagagaagaacgcaacaagaaccacgcgcacgaaaccaacggaacgaacaggacagaaggaaacaacagaggacggacaggaaggcaangaaacaccaaaaanaggacaacaaagcggaagcacacg

SEQ ID NO: 18464 - DNA, 761 bp, Glycine max
  unsure (1)..(761): unsure at all n locations
gacccaacgcgcggcaaaaccaaaaccacacccgcgcccncgggaacgaaacccaagaaccccaaccgggggagcatgaaaccgaaggacnggaaaaaccagcccacgccacaaaaaagaaaccgccacagggggaaaacaaaccaaacaaaaangaaacggcaaacgggcccccaaagaaaaaagaccancncccacaggcacacaagcgaagagcggagcaacaggcccngcacaaaacacaggcaaccgggccggcccccacccaccgaaacccgggacgaccaaaaaagnaaagagacacggcggncgcagggcaacaccaaaaaggcgcgcccccaccaccgggggagcggaaaaccaccaaacaaagggcgggaanggggaggacaaaaaaccaaacaaaagcgcccggaccccccaaaaaacaacccgacccggcgaagaaaccaacacaaaggaaaacacgccggcgggggggagaaaacaaaacacaccggggggaacgaaacaccaaagacagcccaacaaaggaaaaagagcgaaaccaaggagggcgccgccccaaaaacaaggacccagagcccgccccacacaccaagggccggcccgccacaaaaggggagcggagggacagaaaccgaacacaaaacggcacggacacaaacggaacacgaggcggaacgcaaacgcagaagagaaaggaanacgccccgcaacaggcagcgcancagcacagaagaaacaacgaccaacccccg

SEQ ID NO: 18465 - DNA, 888 bp, Glycine max
  unsure (1)..(888): unsure at all n locations
cgcgcatgaaagctgagcacctcgagacnccttgagncacctgaagcatggcagctttgctatgtataacaaactcacccctatactggtgttgtttctgnggncccctcccttgccacccttctgataaaaaaggcaaatttttttcttgatgccattcactggtgcggcccctattcaaataccttgtgattacatcaatgggttcaacagtgttagatgattcctgtcaccactgctattttccggccacaactgattgtccaaacgataatgaacaaaaaactttgtgacatacctgacgcagatcaagctttattaacaccatgctctaagtagcgacttctaagactctgatcagctagtataccatcacctagcaccccagattctcattatggctggagaaatgaaacgctaatgataattctgcgcaatattgtaagggaagaagggatacaagaaataatacccaagattcatgcgcaggagaagagggtcccaaagcagaaattttcgttcataataatccatacgatcatgtgtagatggaccatgttgatagaatctccaaccgtctacgagtgtttaaagctaagctcctgcaacgaagactatatacctggtattaagacaatattcacaactgcgtattcaatagaaatgagcatgtgatttatttttcatggcaccacatgaaccaattcttcacacaacatattctacgcgaactcagaaagatatttttgatacatgcattttcaaccgctatattggtctattttataatcctcttcacgggaagccgggaccaaactcatggattggtctaagaattctcacttactggttttgacccaaaacaatttatttttcttctccgaacgg

SEQ ID NO: 18466 - DNA, 379 bp, Glycine max
tggacgaatccgaacctaagtttctgatgtgtgtccactaaattcctttctctatcctactttatctttccctgactgtctctctctctatgtctctctctctaatccaacgatcctagcctctcttccttctctttctctacccttcaccgtctatatttctactcggaacccttcttgcccttgcccttcctcctctcacctacatgacaacctcgatgacaagttgatcgccttcccctatttctttctccctacaaatctaggactccgacaatgacttactcctcatcaagtcggtccttacacctgctctattggctcaaccctgacactgtgcaccactgtctcttcctgcgatggatgcctctacatcgac

SEQ ID NO: 18467 - DNA, 813 bp, Glycine max
  unsure (1)..(813): unsure at all n locations
ccccttgatgctggcagttcgagacgctgtnagtcgaactgcacgcgtgcgagcttcaattgttttggtgttaggaaaaaacttttttttttttttaatcgagagggggaagatgggaatggttggtttcccgatttcgatgaaagccacaaaagaaaccaaccaagcttcttttggtttcaggaatcatgccatgaatggttccaccaacaacagccttgattcaaaattttcttgaaaaacagccctggctcccaaaggaagggctgcgagtactccccgcccatgtaaatccttacccataccatgcacttgaataccatgggtttgaagggtatcacccatcatatgtgagcgactacccgaaactctcaacgttgtgaattcatattcttaaagaatgggcacaactggttcagcaaaacaactgtgttatcaaattcacataatcttggatccattaccagagaggattttcataggaatatcccagccgtcacctcttatcatttggatttggatgccatcaatgccttatattgtgcgactgcgacaatttatgcaaaagtttgctggcaaaattcttatccctcaaaaccctgaagaatccaaagaacttttgtaaagcctctcaaaaaagcttgaccccgcaggaaattttaagattcttcgtgatcctatgtaatgctcttttgaaaacactcttccctctccttttcatgaattggaaaaacgttggttttgtgtaacttccaaccaggagggtttccttgggcgaacttgtaaaaaaccccaaagaggaaccaagggggc

SEQ ID NO: 18468 - DNA, 490 bp, Glycine max
  unsure (1)..(490): unsure at all n locations
agcttccattattaattttgaggggctttatattttatgggactgaattgtctcacctgagtaaaaagttattgccattggaatttgctcgggtcttcttttctaatttggagcatctcaatatatttcgggactaaatcggacatccgaaaaaaaaattattttcgtttaaattttctctgatcttccgtttttaatttcgagtgtctcgatatattacaggactcaatctgacattcgagttaaaagttattgtcttttgaatttgctcgtagcttccgattttaatttcgagcgtctcgatatactatgggacttctgagtaaatagttattgccgttataatctgctgggagtttctgtttttaatttcaagcatctcgatatattaggggactcaatnggacattcgagttaaaaagttatggtctttgaatttgctcggaactttcgcttttaatttcgagcatcttgatataattacaggact

SEQ ID NO: 18469 - DNA, 510 bp, Glycine max
  unsure (1)..(510): unsure at all n locations
tgatgttgtggctggaatcgctactgcngcatcttgttaagcctccgtctgtgatgtngagaaaatgaaagtgttgatgtttttatcttttgaaacgggaattgaaaaataatgcagacaattgataaatggtttatttttgtgattgaaataaaaaagggtgaatttaggatcctatttataagcttggttgtgagagtgtagcttggtgcctgattatttgggatcttatgcttcattcttgggtgggtttggtgtgttctgtangcacatattcttgcagtttattatagtttgttcaaatttttttcacttgttttgaatgtatgtcaattgaaattgatatattctttgctcataagtggtattgcgattttacataagcattgttgtacctatgtgttttttcttggcacattaccttgtttgttaatatggattattactaatctagataggggatctagcttttttttatcacccaagttgatatcaaatgctttcccttct

SEQ ID NO: 18470 - DNA, 378 bp, Glycine max
gatggagccaaacccaatcacttaataactaaacagttaagcatgcttggcttggagcaattatgggatgagtgaccttttgggaagttttctagaaagtgtgtgaatgaagacaaaacacgttgaaaagtctcatattagtttatgaggataatgaatgatcttgagagcagtcgagcggtgtcagagctgtttgtcaatgtttgaccaacgaggagttaagtgaagtgctatcatgtgaaatgtcatagtgtgttagtgttagttttcttatacgactaacttttgtatagaaaatttttccaaaatgtatataaatctcccaatttatggttatttttggtaggattgtaaatatttctagtttagttttcatat

SEQ ID NO: 18471 - DNA, 772 bp, Glycine max
  unsure (1)..(772): unsure at all n locations
naggactgacgactgagaacagcgaacnaanaaactcagcccgaaaagactggtatcaatgcgaagaggaattgatttaaataggaagcnatgcaccgaaaatgcgtcttaccggagaaaacaacctcctaccgttatataatgaagccacgaaggggcgcatcggtcgacccaaagacaaaaagcagcaacccgtgcaaatgccacctaataaggaagttgggcgatgtaaagacaaaacactatcatagcttggaacttcatggtgcgccccctaactcaaacatcaatcccgcacagaggtcaggcacaggacctaacaatggcccaagccccccaggcatccaaaggctaagccacaaacggggacacccaaggaggcaaggacaattggggcaagcacggcattccacccaccaggggacaacccaccccgacaagaaagccaaggaggccgggaagcccgaaaaacccacatgcctaggtggggaaacacacagattcccccaagtccataaccgttggccgccccccgaaaacagggaggaccccccaacggtgagaaaaacactggcctcagagaaaaggcaaggccaaacccgggggggggaacacgaaaggaggaaaggggggccccacaaaacgggcgcgggagggaagggacacggggggtataaaaacacaggtgccgaggccacgaaaccaaaaaatggagccgccaaaagaaaacagtcggaaaaaacccatcagatgcaaggactaaacacgagct

SEQ ID NO: 18472 - DNA, 497 bp, Glycine max
  unsure (1)..(497): unsure at all n locations
agctttaaaatttggggtcactcataatttaaagtantttttttactaagaaactaattaaaatggggagtgtcgcaacctacccttcggcgggagggcgacgcgtgactcgcgggatgcgtgttccacgaaaggaatacgcgcggagtcgccaccaacgtttattcgaggaaaacgtcggaaaaaccggaaaagacgcgatctacgaacttttaagttgaaagggtcgggagttgtatttacgcacggggaaggtattagcaccccacacgtccatcccaagggacggcagcctttaatcgaatgtgcaaacatgactttgatttttacgttccctnttatgtccttatatcctttatacccttttcatattttttttatttgtgtgagcgacaagggtgtttccctttgctcctacgtatctctcaattgggatgagaaaaccaaacctatgtagttctttcttatcaagtgattctctttactttgagagatga

SEQ ID NO: 18473 - DNA, 340 bp, Glycine max
  unsure (1)..(340): unsure at all n locations
ttaagcaataagtaaaccctaaaccacgttaaccctattcccttttaaccataaaccctttatggtttgccctttttttaatctaaatattgcacagttgatgaatacgtagaataaatattatatgagcatccatngaaacacacattaattaccacattacatgacaatcccataattatttcacaagtatgtaagttacaaacattgccttaataataactaaatgttcaatcttctcctaaatcaacaaagtgtgttgtcaacctcatcaaatttgtatactattgcattctactaatgtaaggtataggccactggcttgcatgatgatgacaat

SEQ ID NO: 18474 - DNA, 443 bp, Glycine max
agcttgaagacaagactatacgaggtgtttgtcttttttatagcaatatctctaagggctaccgtgtctacaacttgcaaactaagaaactcgtcatcaatcgagatgttgaagttgatgaatatgcttcatggaattgggatgaagaaaaagtggagaagaacgttcttatacccgctcaactacctcaagaagaagatgaggaagaagacccaggtgaagcaccttctccttcatcacaacaacaagatcaagaactatcatcaccagagtctactccaagacgagtaagatctttggtggacatatatgaaacctgtaacttggccatacttgaacctggaagctttgaagaagcgtcaaagcacgaagtatgggtcaaggccatggaagaagagatacagatgattgagaacagccacacatgggagttagtaaatcgt

SEQ ID NO: 18475 - DNA, 556 bp, Glycine max
  unsure (1)..(556): unsure at all n locations
tctggagtttgccctgattctgttgtcgtacacagatctgtctccatctttgatcgccaaccaaatggcgatggtgacccttagaaggatttaccagtctcatttccctcggtgttacaaccccaacgctacctatgcttatctggcgggtaccccggggcattcgatagaatagtgtgtggccctcaagcatgaggtccaaagtttgatcgacgcggggtggctaacattccaagaagatgacccaaatgtaaagacaaatccggtttccaatcatgggaggtcggcagttaatgcaatagaggagtgcagacttcaaaggccaaagcaaataaaagacatggtaacttctaggaggttcatatttgaggcgctgcaagaggtgggcatgatttcctttgttgggcacaagggggattcttgtttgatgtattcgggtgcgtcacatgacatggaaacatgatcaatggcagaggagctgttataaggaatgatggaccaaggccagtttgaaattgtgacgcangcaatggagagcaacatgtgtgcatgcaat

SEQ ID NO: 18476 - DNA, 262 bp, Glycine max
catactatgaatacctcaactgtgtgatcacccatcaccattttgtttatgtaaaagaggagggccttaccatacaaactaatgaaagatgcggagaagactgtcttaaagacactactattgtgctgccgatgataagatgaggtgaatagcttttagaagtggagaggataaaacttcatgtaagtattggaagtatgaaattttttggtgtatatggccaactgaaatgctaggatctataaagtccaattttattact

SEQ ID NO: 18477 - DNA, 443 bp, Glycine max
  unsure (1)..(443): unsure at all n locations
ttggaccttgctcttcagggccaagcactgttcgaccgagcttacatgggttcccccatggtatgtgcaggttgcgctagggttataccactttgggaacggagactggaagatctttcctggaatcaccatgaccaattggttggcgataagatatggtaagaggtccccatatgtcattgggatcggggtgaaattcggagcctaccttggtgaaaagttcctcgccgtgttggagcctgtgccaaggtgggcattgttggccgggtgaggccgggttggagtcagagcctgaggagcccccctctgtgggggcgtgggtgcccttggctgggcaagtgctgtgtcggaagagcccncggctcgagccgaaaaacttgggtgatgttgtgcatattggtgggtaccgtggggggtttgcggcggcttgggccacacaagtg

SEQ ID NO: 18478 - DNA, 582 bp, Glycine max
  unsure (1)..(582): unsure at all n locations
agcttatagaggtgattcagcttatctgtttgttttatcggcagntgcaaagggatgtctggggcgtattcctgggggagaaatggttggaattataaagaaattcattaacttaaatgcaggaactgattaactaagaaagttaggagttggtatgagactttttcttttctcactctaaaatcaaagtgatttcaatttcaggtacaaaaaatcaaattttgaacttttgtactaagtgtagaataagaagctttgttctcaaaataaccaatgtaagctcaattttctttatgatgggcaatttttttatgtctaagatcagaatttgtttttttgctttctatttccttcaattttctttaatggatttcttgatatttttcatatgagaaatcaaatgactttcattcaacaactagaagctgtgggtatgtggggtttcttatatcattttttttcttttcatttaactttccttcatattttttaggaaaattctttttttctcccctgcaagtctgaaggctacatgtttgactacttatttatttacaagaaataataaataaaaatgctttt

SEQ ID NO: 18479 - DNA, 344 bp, Glycine max
taagctttacctatactgataacgccacataccgatcttttctgatggatgaagaagcacccttttgagatgacctctagtgcgtgtgacacaatgtgcctgaaacgcttttggggtaaaaagtcaaacgcacactcgaaggaatggcaaaacaagaagcgtgaaacaaacaaaaggtgggtaatataagaacacgaaaaatgcatgttttgaatcagaggtgaagaaagcaatataagcgaagaagtgactatgcgaagaggaaactaaagcatagtacacacaacgttgggtttagtacaggacttactgacccggtgctggtggcttattctgtctcgtat

SEQ ID NO: 18480 - DNA, 479 bp, Glycine max
  unsure (1)..(479): unsure at all n locations
agctngnnngtttttagcttttctctggggtatttatatgatactctaacgtactatattggtttcaattaactacacgggtgtggtaaaatcatgcgttgtatatttctgaagggattgtgtgttgaattggaagattttgcagtttgtacacacaagaagctcgagatttgttttggttcttttgacttagaagttttatttatttatttttgataaatggaacttcactatggactgatttcttttggtttcactttcaatggtgatcaatgctattggaaatatgaaaaattagttagctcatataaaataccagcagagaagcaggtggtcctcttaagcatggctgcttgtattgaaaaccatacagaccctaaactttggctcatcgagatgtctaccattatatgttgaataattttttaaccaaatacatgacctaatttaaccttaagagaaagcacaattaacaactg

SEQ ID NO: 18481 - DNA, 829 bp, Glycine max
  unsure (1)..(829): unsure at all n locations
aaatgatgcgatctttgacgaacnananaatanaaagctgggctagcctctctgcgagagaagattaatagccggggaagttctcttccttaagcncgagngagccaccatcgagggagtctattttgataacacatcctggccaccctacaaaaatattgtacagtggcagaatctccatattggagcaccataaatgtgggcacacattactaacccccatggccaagggtggataataacctcacgaagcgggaaagaacaatgttttccaaccacttccactagtgccaggtcgattagaagccgcatggacaatgaacagaacacttggtcgggtaggaaacaacgatgacactaatgcgtccaccagagttgctcgagcgtgtctcattatttccacttgttcacctcgagatacaaatctgtagaaacagcctgagccactttactttggggacagcggacactttataacaatagttaatatgatgggatcagtccttcatttgcaggccttgaagggaagggtgagccttgaaagcctaaccctaagaaaataccataggactggtagggcatcaaaattgaccctccttggtaccgcaagaacgtgagccttccttgctacaaaatttggatatgaactggctttctcagggctgtgttttaaacaaacattatgggattggcacaaactttcaagtttttatctgccccaccacaatgcatggagatcccttctatggctcagcgcctatatggggcacgttagggtattcagagccaacacaatttttgttccacaccacaactcgaacaaaattcg

SEQ ID NO: 18482 - DNA, 790 bp, Glycine max
  unsure (1)..(790): unsure at all n locations
agaatgactgaatgcttgtacgagcgnaanaatnaaaagctagacggttgaaaatgancaactgtgctcccaggcgcaggtctcaatccctcagcnccagcangagtcagtgcctgtggattactttccataaactggtcaggctgagatgcagggataagagccatcagcaaattgagtacaatattaatggcacattttcgtaatcccaaactaaatgctcttgatccaatcgctcataacgcgtgttgcactggatgatacattgcatactcactctcgacaaagagtaacaaggtgactttttaccggcaggctaatgaacagcacaaaccatgccttactacgtcatctattcgtgatccgggtgacggtgctacgtgtgtagggaaccaactcaaaccactaacaccactacaattcaaagagatagtacgggtctgactcacttcatcttgccgtggggaacacacttaaatggcctaacatgaccctaccatgtccatttcaagggacccgctggagctcagggtgagccaaagcctgacctcttcctgaccctaggctatgggacagtagggcttgaaagagaactatgaggttctgcaagcagagcacttgcattacttggaaacagatatagacattggaaccaggtcgaatgctggacaataatatgtgtgggacatcttgcaagctgaaggcctgcctcagactgaatctattttcagtgttgggatcagggaaactttttgtacggggtatatacgttaaagggagagcgcaatac

SEQ ID NO: 18483 - DNA, 980 bp, Glycine max
  unsure (1)..(980): unsure at all n locations
cgaccaaagacgagaaccggagcaaggaccgcccaccggtcgcgaaaaaccttccccagcgccaagggctgtgcgagctgcgagcaccaagcgacgcagcagcggcccangagaaganaaggggaggcgagtcgnttgttgacaccaaagaggaagaccaaaagcccgaaggaatgacgccaagaacaacgcgacaagctccaagaacaaaagagaaagctcgaatcccaagattcaagagaaggatgaactccagaaggcacatggaagaataccaggacgaactccacaaggggcgtcattgaaaagatttttcaaaagacaaacatagcaaaggcgggggagacaaaagaagccgacgcaaaaggaccaagggaccagagggcgaacgcactgggaaccgaccacccagcgcccggaatcgaggaccaggagcaaagggcgatgaagaaaggccgcaaccgaaccagaacatgcgaagagagatcaaaaaggtggaaaccgaagcacaaagacaatggggaaagcgactacccagcgcaactcgaacgatgaaatccagancaaaaggagaaaaggggaacccaccgcataaaacaggccggtggaacacgagaacacggcgggaggagcacccacacccaatgaccaagggccgaaaaacaaaccaaaacgagggcaccccggccgcaagaccggccagggcgccgcacaggacgcatcgccacccaacgggggcgcaggcgcagaacaggaaagagcaaacaacgaaaagcgcgggcaggcccacgcacacgccagaccggcacaatcgagacacggacgacacacgagccggccacggcgaagaaacggcacagcaacgcccggaagggcgaactccggacgccaccaacaacaaacgcagcggacgagacggacggaacgcaccgacacgaacgcgaacgggaagcaccgcggctggaccggcgagaagcacc

SEQ ID NO: 18484 - DNA, 378 bp, Glycine max
tgagtgataatataatgttggataatgttgatgaaaaacatgtgtactcgtattcatgatgatagaagtcaagctgatggcaaatcgaatgatacacaagagcagagaaatactgattctgcttcaatggaacaggtatatggcaacattgacatttgtctgtcaaaacttttattctatatctttgtgacatcattattcctccatcatgcatttttattttgtttgtttccagaagttatctattgtgttataactatgcttttatcaaaatctgttttgaacatacaagcagatgctgctcaatgtactcaatcattcgttaaatttaactaatggataataataagttaaggtgtattcaatgataaaattatg

SEQ ID NO: 18485 - DNA, 293 bp, Glycine max
ttttttttactggaactaaataggggtcctaaaaataaccatattgaatgaaaatgtataagttaacattttccaatattaataaagtagggtttttttgggtgaatataatagtaagtagtggtgagcattacccaatccggtccattaactttttttacatgaaattgagagatgtgctaagaccaattgatgggagcaatcctaattatagattgacactacaacctttaatagccaaaataacacattccaatatgaagtgcctttgcacaacatgtgcaatatagtct

SEQ ID NO: 18486 - DNA, 359 bp, Glycine max
tggttcgaggtacttacccgttgaagatcgaagaacgatgattatcgtatgaagaacgtcggagaacggttcagctcgcccatgcgagccaggttgcttcctccagaagcaacagccttctggaggaatattctggagggcccaagtgggcctgtgtgctatatgcacccccatttatactaagtacacccactctgcttttctttggtgattcttctttcgtaaagttacggaaacttacgaatttcgtaacgatactcgttatctttccgtaatgttacagaaccttgcggattacataatcatcctctttttgacttacagaatgttacggaacctcacttaattatgcaatgatg

SEQ ID NO: 18487 - DNA, 429 bp, Glycine max
tagacacgcctatcaacagctctttaatgacgacagatgcttcataaaaattgcaccccgtcctgaagttatcaaatactgctgatttcatgacgattcggaacatggagcccttcgaacggatgacgaacttgatcagcgcggcaccacgacttgtctctttgtataaaatgggccatgggaaaaccgggccaataattgttctatggccccttctattaaactgggacctacccacgggtgctggaacaaacaattttaatacccttaggaatagcttgttttctgtaacccaatctgatatatgagcaaacttgcgagttatgtgtcatctccagatagaaacttttacttgcaggatccatcgccggtgacctataaattcatataactgttttatatgtatctgttattttgtatcgatcgacg

SEQ ID NO: 18488 - DNA, 414 bp, Glycine max
gcttgagttatccattttggtttatggagtgaaaggtttatatggagtgaaagcttgccctgctgaaggattgcttgtgactagcatgcactggtgcatgcgcgcatcatatgctttggtctgtgaaatgaaattatgggtgggccatgttggttttttgttttaggaagtgtcaaatgaaatttgctagcatttttctgctcaggggttggagcttttatgcaggctttggagcaatttctgctagcaatttcctctgcatctatacaatttccatgatagtaaggaactattgatatggactaagaccactgttaaaccttacaacagcttgtagagtttgaaaaataatcacatgatctaatgtcatgtttcttctctttctcttataatctacacattattttggagctt

SEQ ID NO: 18489 - DNA, 493 bp, Glycine max
  unsure (1)..(493): unsure at all n locations
ttacagaagtaccaaacatttgcactaagcagctttcgtctgtcttagaatactagtatgtgtggtgtctatggctttcctttcaaatagattgttgtgctgatttccagaatcagaatccatttgcagatccatctcaatttttccaccatcaaatgtacaataattacgaacaccccttgaacatgatgaaaaatctgtctttagaacagaaaacgagtttgataagttaccctcaccacaaagttccatgttgtcttcttcctgtttggtttctgaacagcacactttttcctctactaaaacacctttactatgatgcttaccagcaatatgcagcaaatgattttcattttcaccagagataacatcaagaatcaaatccagagaaccagcctgatccactttatcnttgtgtctgtgatcaaacttttatcattattattatcattatgactatctatactttcatatgctgcacttgaagtacagg

SEQ ID NO: 18490 - DNA, 435 bp, Glycine max
  unsure (1)..(435): unsure at all n locations
agcttcacaaaagtttgtatggcttgattcnatcttctatacagnggtacaagaagtttaatgagtttatgagcaactcacgattcaaaagatgtgacatggaccattggtgctatgttaaaaaatatactaatagttatgttatccttgttgggtatgttgatgacatgttgattgtaggatctagtacggcagaaattaacaggttgaagcagtagttggcagaaaactttgaaatgaaggatcttggtccagctaaacaaatccttggtatgagaattcttagaaacagatcagaaggaattttgaagctgtctcaggagaaatatatacacaagttgcttgacaggttttaccttggagattctaagaccaggaatacccctttgggatctcatttgaagttntcaaagaagtaatctttgcagacagatg

SEQ ID NO: 18491 - DNA, 439 bp, Glycine max
  unsure (1)..(439): unsure at all n locations
tgagtatatttgttgcatctagttggttgcacatngtttgctttcagatttccacacatgtgcatgtggtagtcttggacgcatttcgtgacctcaatcaatctggaagctattcatgaggagcggctacattggtccatatgtatgacaatttgaatgatgtgtcaaagaattcctccaagcaacttgcaggatatatcacactgttacaggtatttataatttcgtgtaacttcaattattagttttatagtttatatttattattgattagatttttttttaaataggtgcagtattggatctacaagcatttccatactattgcttcgtgtgttgctaatgaggattatcatgagaggaaaccccatgcttgtcgatggaagttttgggaaagcattattagtgccgatgtatcataaagtaattggatcgattg

SEQ ID NO: 18492 - DNA, 515 bp, Glycine max
ctgcagctgatttggagttgacctaccttattttcatttggttattagtcaattcatgcaaggaaatattcaaagaaaaacgtccgattgattctgtggattattttatgcacagatattatgattatttttttcaacatattttgattatcttattattattttgccttttttgatttaaccgaggttacaatgtgaacaatcagttagattttgctttaacagtgattaaacgactttacaacacagatgatcggatgaaattcattttatcatttattaggcgagataacggcttaaacgatacatcaaagctcgttaaaaatggaagtacataaaattgaaagtgaacgatataaagatgaaagccaacaaaacacaaaatgaattaaaagtctcagattcaaaaacttactggttgaagaacgaagaacgcacgattaacggactaagaatggcgaagaacgacggaaaatatttacgaaattgctcaaggaaacatctcggaagcgtta

SEQ ID NO: 18493 - DNA, 338 bp, Glycine max
tcaggctattcaattgctccagattgcagcacaaaattttaatgtctgtatggtggtccgtagaggagcataaaccatatattcttgcgacgggtaccaatttctgattcaaggccagctgggttaccaagttaaccaaggcatctaatttaccctcaagcttcttagtttcagtccgtgaagatgaattcgtggctacttcattcactcctctaatgacaatatcatcatttctggcactaaactgttgggagttggaagccatcttctcaattaaattcctcgcctcagcaggggtcatgtctccaagggcttcaccactggcagcatctatcata

SEQ ID NO: 18494 - DNA, 518 bp, Glycine max
  unsure (1)..(518): unsure at all n locations
agctttggaattcagcagaaacctttgtttttttgtatttgtccataaggttctataaattttgtttagttgcttgtccagtggaatgtagtttccatttgctacaacatcccaaaggtctatacaaatggactcaaagtgagctatcatacgttccttccagtagtgttacttgttgcctttgaataatgaaagcttgcttgtggagtacccttcttccatttctttggtttcttaagatcttcctttgtatttgctaaaaaaactcaacccaagaggctgagctctgatgccaaatgaaatataacaaatcacactagaataggggttgaatagtgagttaaataaattattataaacttttcaaatggaagttgtttgataaacaaaacagtttatgagaattctcatccagtgtcaagaacaattttcttangccaagatggattgtcatctagtgatatgtgtaaattgtgcttttagtgaaagacttgtgttcaaggatgtgtcaataatat

SEQ ID NO: 18495 - DNA, 282 bp, Glycine max
cgtagaacagctggatgtgatatatgccagggagttgttacgatcaacgatccggggataaaggagatgtccgacattattaccatgatacacatgctacaaagatgactaggaatttttatgtaaaactgacatgcatgcacctatgggacactcaagcatcaatttttatggcatgtgacactagtgctgaggattcattatccctactaaagtcaacccgatgtttccaaaatatgctcattgatcaattcatgcattcattcgagtccattttgggtg

SEQ ID NO: 18496 - DNA, 857 bp, Glycine max
  unsure (1)..(857): unsure at all n locations
aagcagggaagagaccgaacccaaacaacgcagggagggaacgtangaagcacccaacccaaccacccnnnccccgaatgaatcatgcagaccggcccgaacaaaaacgcagcggcgaccaagccgacgacaggggggccaaattagtgtaaaaaggcccgcgagccacggggcaaaaagaaacacaaacacaccggccaacgaccagaccgaggcggaaagccaggaggcacaacacccacacacccacagaacggggagccaacacggggcccacaaccgacagggtccacccacccagccaaagaccggcaaacaggacacgccaccacaggctagcaaaacacagcaaagggcaaaaacccggaaaaaaaccaaccaaaccaaggaacccccccaaagggacaaacaaaaaacccgcccgcaaagcagaacgagggaacgcccaaaaaagtacgggaagccaaaaacaaaaacccagagaagagaccgccgggaacaacgaacaaaaaccaaaaaccaacgggactggaggcccacagacaaccacaaaacattaacaggccagaacaaaaccgcgggcccaaaacgaaaaaaaaaccgccaaagcggcaaaacgaaaaaaacactccgccccgcgaacgcggccaaacagtgcccaaagaccaacaaaagacagacacgcgaacacaaaaaagggggcaggcacaaccaacaaagagggcaaccccaaaacccggcggcacgcggaaagagcgatgcaagcgacacgacgaaacaaccaccccaacaacaaacaaaaacgaaggcaggcggaacaccgaacaccccgacaaaacgacacacacaccaaagcc

SEQ ID NO: 18497 - DNA, 437 bp, Glycine max
aaactaagcttggaaaatgatgcttacatagtgatcgatgaagcgactctcttattcccccaaatatacagcgtatgcacagttctctagcacagaaagaacagctcacttgaccgtgaaagacaaagacagcggccaatcaaaagaaaatggtgtctgatccatcaaggacatcagcgatatgaactgaatatcatggaatgcttaaatcaattacttctcacaagcatgcagtgtttcaaagatcagagcacagctattagagtcatagctgaaataagcaagtaagcatgacataaatcaaggaaagatcatcaaccaaaaccacacaatcattgtttcacttaaactcaagtgtttaggcttattccatcataaacaaccaacacaagttccaacctttgcatttcatctcatatcatacaataatgaacaca

SEQ ID NO: 18498 - DNA, 410 bp, Glycine max
agcttactaaggataggagtctctatatttttctttgacgactaacataagcgtcgtgtgatttgctctcaaagtccctaccctgcctatatacattggccagcccccatcattgcaaaagctacttgttctctcaaacatggttcattcatcataaaaaacaatgaattttacctcccgtgcccatagatcttcatatgtcgaggctatcagctttgagctgatgccaaccagctgaagctccctcctatgcacagccttcacagatgagaatcgatcgacagagttcaaggtggaatatagagatgtcggatgagctcaaactgcctgtgctcgtctatcaaccagccccagagatagaactcatctgggcattaatatctggctgcgaacccatgtacacatgcaca

SEQ ID NO: 18499 - DNA, 663 bp, Glycine max
ggatataataatgtgaaatacatactgaaagcggctttcaactaataaatgtacctatggaagatgctccaagttctggctgcaatttctgaaaattattgagaagtacttttgccatcactgccacaatcatgtgaaagtgtcatcccttaaatgtttaaagccataagaggcaccaatgagctaactgccctttctctaacccgttgttaagagattgagtgattcatcaatacagcttttaatcaagctgattctttacaatcttacaattggatcatgcctcattcgagtataattgtaagatcggcaatttcatttcatatatagaaatcggaactcgaaatagaattccctaacccttgctcaagatttttgaaccagcaaggaggagactcaatatatgaccatatatatatggaaaaacaagtgctctataagaaaaagtggttatgtaaagttgaattcactagaaaacccattcacatgtgagggagagcaaatgttccctcttgcctgtcacttcaccaaaaatacaagcaagtattataagtttctctttttgtctctcatccctatcatattgaatccactagtggatccaaactcaactatatatgagtttaaatttcctggggaagaagggttagtatccctattttt

SEQ ID NO: 18500 - DNA, 184 bp, Glycine max
  unsure (1)..(184): unsure at all n locations
agcttgaagaatggctagacatgatacatgatantgtttggatagggtcaaagataaaagggatgccccacattatctccatgacgcagatgccataatgatgatctggaaactttatgctacactggtgatgcatgcacccatgcagacactcaagtgacaaatgtttatggtcatgtgatgc

SEQ ID NO: 18501 - DNA, 556 bp, Glycine max
  unsure (1)..(556): unsure at all n locations
tagacgtatggcggaaggcactagatcaaaagctctatcancttataaaaatggaagaattgtttgcgaaatttgcagcaatagtcgaggcgaagatggngaccttatcagagaggttagcacatctcgaagctaacagatataatccacaacaagcacaaccagaagcgacttcattttcggcatcaggatcacacacagcgtcgcatcggatgaagcttgatgtgccgagattcaatggctctgacgccacaggctggatcttcaagataacgcagttcttcgagtatcacacaacaccagatcatgagagactcacgatcgcatcattctatatggaaggttaggcattagcatggtttcaatggatgcaccggaatggtcaattatcgtcttgcccggcatttcttcatgctctccattcgcgattcgcatcaaccacatacgaggatcccactggactgctatgtaaactgcagcagcgaaccatggtaaacaactacctctctgaatttgaagctttagcaaatcgaatcatcagaataccctctacaat

SEQ ID NO: 18502 - DNA, 476 bp, Glycine max
  unsure (1)..(476): unsure at all n locations
agcttctcagttttatgattcataagactagtatgagtattctataacaaatcaccaagtagacatgttcattactacttcaaaacctactcacacatgatatagaatctgttaacaataatttctagttctcacttggttgcattaagtagggtttcttcttagtaataaacaattttgtaaaaaacccttgatcaaggatcaagtttaagttcaaagcaagcttttgtaaaattagatttaagttcacaacaatagtaaataataagcagtaaagagagacaacattccaaggatttatattggttcaccagggatgacaaaatgggtaagctggcttggcctgacctantccatcaggccaagcaagaaacatgggttgggtcgagttagcccatattttatacgtgactcattttttgaagtccagccaggcccggtagaccatcaggacaatccatattggccctctttac

SEQ ID NO: 18503 - DNA, 541 bp, Glycine max
  unsure (1)..(541): unsure at all n locations
tattaagatactaagattatgaacgatgaaatccaatcctatgttcctcattattatncaagncgntattattttcataatttacgtatttccgacgcactaaatttcgttatttttgtatttcccgtatttctgttatttctgtcatttccattatttttgtaaatccgttatttttacttttcttttactttaaagttgtctttagttaatcaaaccaaaaccaatgacatttgattaaatttgtacataactattaaactgataacctgtatccaaatgaattaagtaaactcaagttcttgtggagacgaactcgtttataaatgtgaaacctacaatgtcaattggtacgcttgtcaaaagtcttaacaagttcatggcgctgttgccaaggacttgagccatccacttagttctttcggaataaactttcaggttgataggctattttactctggaaattacttttaatttgtattaaattcatcttttatttcttctcacccttgacttattatttacatttgataaatttctc

SEQ ID NO: 18504 - DNA, 286 bp, Glycine max
agcttatactgttacaaaatgtaaatttaacatttctatttttacatcgattttgtgaaataataaaacgcggtggcataatcgtaaataacatgagtttgtcaacatcattttttcaacaaccgatgttaatgcacatagtttaatattggctttttgaaaatccgatgttgagaaatgataaagtaacattgattttttcaaaaaaccgatattaatgttaacatcatttagttaacatccgttttttacaaaaccgatgttggtaaaatgataagttaacatg

SEQ ID NO: 18505 - DNA, 336 bp, Glycine max
tgctcaaactcatgaaaaaaacataaattccggcacaatcatgcattcaattcaaaaccaaatcatacaccaatttttacaaagagataaaagtgttttactaccatatcatcaaaatcaagtcaaactgttccaaatgcttcagaatgagcaaaccaattacccgttaattaaactagcaatgtattataacattaaagaaatattgttctaaaactataatcattatgataatgaaccaaaaagcaaaaagcatcatcaagaatttaaaattcctgtgactagccctgggtggtctgtgactaatcatccttcttatctgtcagatgaagtcct

SEQ ID NO: 18506 - DNA, 1010 bp, Glycine max
  unsure (1)..(1010): unsure at all n locations
cagagcacactgaactgtgaggatacgtataaggcgatgcatactntacgagtacagcgttgccgcttggacaaccacannncnaccccccagancncccccagcnnttgaattcgatgctngtcanagccnccnagagnncaacagcangcacgcaagcncaaagggggaagacaagagagaggagtgaatcttattctgaacacaagacacccgcaaaccagacagaaaacaataangcgcggaggaccaggaaacacacgaaagagagaaaaaaactaagcacaccggggnaaaggccgacaccaaaacgcaaaacggaagaaaaacgggccaagacaacggaaaacacacgccaacaaaaaacagagagaccgggcaaaaccaaacgacagaagcggaaacgcaaccgccaatagcgacangggcaaggccacaaggaacccaaccccgacaaacaagaggaaccaggccacacagacccccgccaacgaaggagagcaaacnaaacaccaaccggcgaccacacaggaaagggatccaacccaagaagacgaaaaagccacaaaaggcgggagccaggggggcgacaaccaaacaaccagaaaggcggaaccgcggacaaagacccgagaggcgcccacacggggcaaagaaagccgaacgggacgaaaccaccagcggaccaccacaaaaaaacgacagccggcaacgggccggaaaacacaaaggggagacgaggaacaaatccacccaaaccgaggatacaaaagaaaccaccacaaatcaacaagagaacacacagcacacagaacccgacacccacagaggcgcagaagagaggggaacaaagaacacccgcggaaaaacaaaggaccagcaccaccaccggaaaaagcgtctcagggggcgcgggacggagagcacacacgcacaaaaaaaagcacgcagcgagagggaacacgacacacccggagacaagagaacgacgcggacacacccacaagacg

SEQ ID NO: 18507 - DNA, 902 bp, Glycine max
  unsure (1)..(902): unsure at all n locations
ctcgagacaagcacgcggcaaancagccggcaacagcgacgcgcaagcggacgacaaangtaacaacgaaatnntaataaaannaaggggaggagaacgacgcctccatgaacgacccananaaannaaagcnagacacggacgcngagcagcggagaaaccagagagggacatcatctataaagcgcggaacgcccgccacaggggcaacaagagaggagccaacacggcgacccacacagaaaggagacagcgacccaaaccgaaccacancaaaagcacaacgggggacggaggagccacaccancaccgggaaggagacacacacagccgaaggaacagccgaggcacgacgcaccgggacgaagaggaaagaaacccgcgggcaaggagccccaacaggacacaaaacgggaaaggagcacaccaagagcaggacacngagaggaaagacagncgccacaggccaangggcgaaaggaaggcgggagcaagcgaacaacagatgcacgggaaagggcgaanacacgaaggggaacgggcggccaggaagcgggaaaaacgcggaaggcaccgcagaaaacaaggaccccaccgagcggaaagaaaaccgacgcggcccccaaaggagacaacaccccacggaaaccaacccgaagaggcgcaaccccgggacggncacaagaggccgaaccgaaaaccgcgccccacaccgggaaccccacaggcacgnaacccggcagcccccggagcaacaaggaagagccaggacccggcgaaaacaaaagaccgccaaagaaggacggcacaaaaggaanccacaacagcgcaagcaccaggaaaaaaaagccacacacgggaacaaagcggggcacaaaaaacaaaggaccccaaaaccccc

SEQ ID NO: 18508 - DNA, 316 bp, Glycine max
  unsure (1)..(316): unsure at all n locations
agacatttcctaattaattggcccaaacattacacctttcaaattgatacaaacaacaggcatgtgcaaatctaccatgcacccaaatagttttaacaggtcttatcnaaatattatatntaaagttaatgtaggatgctacattaaactacaacgtagttttcacatcattatactttacataatacttgacaggtaagacaaaaaaggtattgaaagaaaaaatataaagactaagataaataattttttgtttagaggttaaaagtaaattcaaaaaatgttaggaatcaaagcacatttaactcaaatttta

SEQ ID NO: 18509 - DNA, 275 bp, Glycine max
  unsure (1)..(275): unsure at all n locations
ctaagcttaatgtgaccaccattgctggtgaaattcctggtctcattccttctctngctcagtgactttgtcgtaaagaaacctatttgtgaaatggtctgttgctacctacctaatttcaaactccatcttggccttccaacctatggaaaggtgatttgaaaccactattattcgtgtgtcttctttcaaaaccatcctttaagaaaactctagatgacatcatcctcctctagctgcacttcaacttattcctctcgttcaaagtaatatgc

SEQ ID NO: 18510 - DNA, 426 bp, Glycine max
  unsure (1)..(426): unsure at all n locations
agcttaagcctggtctatttaattaataggcttttaataatcctgagcctaaccttttaattaaataggtcagttcaggccatactttatgtaggttaggtcgtaggtccctgtaggccagtctggcctattcccacccctaatgcctacccatgttttagtatgtttcttttattttatttttcatctagcaccattcaattcagttaatttgaacatatttttacttgactaattgctttttaaaaataatattaacgtatcttttaacttgctagcattgtgctcttgatttaattaagcccccaacaaaaagagagaacattatcaagatttttttatgggtaaagtttaatttttgacaaaggtgagtaatatcaacaaattttcattaccattttattcttacattntgatagtctaatc

SEQ ID NO: 18511 - DNA, 281 bp, Glycine max
ataacaaatcaccaagtggacatgttcattgctacttaaaaaccaactcacacatgatgtacaatctgttaacgataattactagtactgagcgcggaagcattaatgtgggtttctgtatagtcatagacagattatgaaaagaccctcgatctctgatcaaggccaagatcaaagcgtgcttttggacaattagatataagtttacaccactagtgcagtctcagcagtgaacagagacaacgctccaaggatctcctttggctcaccagggatgacaa

SEQ ID NO: 18512 - DNA, 276 bp, Glycine max
  unsure (1)..(276): unsure at all n locations
tgttgacaccttgggtaacactgtatactaaagactgctccgtctgagnnagccgcagaagcatgacgcccattgctgaacctacagcatctgctctcaagttaagggttttgggatatcccgtacgcgaagaactggggcactacttacaatggatttcaatgctgggaacgcatcctgtgtttcacgtgaccattctaactgtttcgggataaacagatgaaccaaacgggctgctatctagcattttccttgatgaatcgtctactcaacccc

SEQ ID NO: 18513 - DNA, 923 bp, Glycine max
  unsure (1)..(923): unsure at all n locations
cagcacagaacgtggagtacgcgaacatcccactactangctgataaccgcacatngtatacangtatagataacagcgaacacanaacccaacnnnccccagccccncnnncgnnntttgaatcctgagcacaatcgcagccgccgnagagnnnanaagcaggcgcgcgaagggaaaccgggacagaanaggaaaaaaaaatcgctatgtgcacacccacggacgcgaggcaaaaagcccgcggcgagaaaaaagagaaaacaaacacgagaagggtcaacagcgagcgacaacaacaaaccgaacgccaaaagcccaccgaggaaaatataaggctttcccgcgagaccccacgccgagaaatgagaaatctgacgggaatccacccaaaaaccgacgggcggggagcaacaagaagccaacagccgaaacgaacaaaccgatgccggaaagggagaacgggcaggggcctccccgaaacaagacggtagacagggacccaacgagaagccaaaccacgacgaaggccctaacgcccacggccgaagcccccaccggaacaagggcacggagacccggcgaaacaaggggcggccccgcccccccggagggaacccacaaaagaagcgggccccagaaaaggaaacaaggaccacggtcagggaccaaaaacggccagaccgacaaggaggaggaacgccccgggggggcaaaggcgaacaagcggagggaacacccctgaaaggggacaaccggggagggaaccgaagcccagacgaaacgaggagcacgcagcagccgcagcgacgaaggggcgaggccgcccgaccaccgggaacacgggaagcaaacggcagaaccacggagcacgccaggaggacgaaggaacaacgacaccgggacgaaccaagacccacgcagc

SEQ ID NO: 18514 - DNA, 770 bp, Glycine max
  unsure (1)..(770): unsure at all n locations
cttttggancctgaacaagcaattaacacctccttcataacctgtctcgngcncgcgacngggtctctaacttccctacccagctcgagttcactatggctaccccataaagctccgcgaaattggttccggcctaactttgcctgcgagcccctttgggcatttggtaaagggcattggcggaaattgaatttttttccggtaaccggtgccattctttccaaactggggaagcggccaactggaccttacatggcaagttttgcctttcctaacttgcttttgagagcttggacttttttgttctttttcggggctttaaaactctcttggtggcaatcttaaactgggcgagccatntaaaacctgttatgtgaacttacacccattcggggtacccaccaatgacgccattatgaatgccttaaagctcttgatctttcttaacggtggttcccacgccttatggattctttgaatagtctgagatctttgcgccccgataccccacacgaagagaggagagctgcttttcgcccggggtgccccactgggggccccccttgtgttatatacgagcggggattgtattaaacaacccttcttcctccggaggatgtttggtttcccccaatgaaaaaggcttcttttttcctccttcatgggggaccaatgatgtctacctctttccggcaaaactggaccaattatatccttttaatcacaagaatggtcaggacgcatgatgtttgttttgtccgaacaggact

SEQ ID NO: 18515 - DNA, 92 bp, Glycine max
agcttgtgcatccaataccctgtgaggatgttcatatgttcttaaactggactgatccatttgcttccaaagtttcatggtcttgcaggtga

SEQ ID NO: 18516 - DNA, 805 bp, Glycine max
  unsure (1)..(805): unsure at all n locations
tggaccttgacatcgatggtacnagcngacactataaattactcagcctggtgcaattaaaataattctggatttcaaccgcaatcttccctccttttccttnnngaaccacttattaacgttgggtttttatggaaaaaccccattacttaaccccccaccaaggattcctttatgaccaaattccaatctaaatggagggttgaccagaagggacccaggaccgaatgaagcccaacttgtccgttttgaagaaccgattggcttcatgatggaaaaaaacgcggccaccgttgcgctgtcagttcggttgcgaagcagacccactctctggaacttgacacaatcctcctcaaacatagaggacggggaggtacacattgngcaccatgcaaccctcactgggatacacttagcggttaccttatggatgccgccaactactactacccgtctgcagacgatgcgggcattttgttcttccgtcctgaaagagaccttctcatagcccgacgaggtccacaagaccctaagaatatgctcaagggatgtcgagtttatcccccgatcccgaatgccggacccaacacgttgccttaaccaacattggacacaccaattgttttgccacggaaagacacccccggcactgaaaaaggaggagctcatctcttttggaagattanagcctggaagatttgggacattcctttcaaaactaacgatttttgttggccccatggttttttctcccaagtttaaagggcggcttttacaatataaagggccatttgcccaaaccctt

SEQ ID NO: 18517 - DNA, 394 bp, Glycine max
  unsure (1)..(394): unsure at all n locations
agcttgcatgaattacatctccctctttctcaagtaaattcttcctgagancaacaaaagcttcatgatttacagattatggtgaatcaagtgataatgaatcaaaaaaataagtttcttcctcaagaatggatgcaactgttctatcttgcagaagtttccttctcctctcgaccctgttccttctcaatgtagctctaatttctaagtccagaggaactaaattgcctgtgggagatctatgcatataaaatactaacaaacacaacgattatccaattcaataagagaagataaatatgatttgaaaacaactattcataaataatcaaagaataacgaataatagaatagacaccctaaaaacgaactaacttttcaaataaaaagaaat

SEQ ID NO: 18518 - DNA, 289 bp, Glycine max
ttgatgataatgatatcaaaacaaaaacaaaacaatgtttcatcattagcaagctgcaacgataatacgttgaataccatcgactgagaaccctcaagaaaaaaatgcctgattgaagaataaggcagaaccggtcgactgaaagcttgtttgacatggtcccgattgaagtcttcagtatacatgagactcgtgatggcaacaacggacacaagccttcaatgatctgatatatcctgaagaaatttggtgcttatataacaaatgttaggtctagatgaccactcgt

SEQ ID NO: 18519 - DNA, 463 bp, Glycine max
  unsure (1)..(463): unsure at all n locations
agcttgtagaatggctagacatgaacatgntttgttttggtttggttcaaggataaaagggatgccccacattatttccatgacacaaatgcaaaaatgatgatttggaaattttatgcaaaactggtcatgcatgcacctatgtggacactcaagtgtcaaattttttatggtcatgtgatgctagggctcaggattcatttcctctatgtttagtcaacccaacgtttccaaaatatgttcttttatccatttgtgcattcatccgagtccatttcgggcgtccgggaaaattttcacagcattcacccttcaggtgtatacacatttttcaaaaactagttatgatcagtgaattttttcaaagaaaagttggaagtcatctcttttcaaaagcatgttggtttttcaactagacaacttatttttcttttttctctttgtttccattaatgacatagtt

SEQ ID NO: 18520 - DNA, 588 bp, Glycine max
  unsure (1)..(588): unsure at all n locations
tatcttagaaagttcagaaagaaggcagcgacattggtatacttctcagaatcttccttatctcatcctcttacaatcctccccaagcacattttgcctaaccgcttcactcggggtcatcaaatctcgattaccagccttttggtggtcgtggaggtttcaatagaggccgtagtggccacattgcagggcattctgtagcccgtggtgggagaatgtatgttcagtgtgaggtgtagcataaatttggccacaatgtgtcgatttgctttcattgtttcgagtgtgacttcattccacatgttcttgtgaattcgcaaccttaatacagggactaactgttagtctggtaacagtttgctagttttttttgccagaaagctcctggcaacatttcgtatatatatcagaaacctattagaaagctcctggccatataattgatatcacaatatttttgttgactttatggcccttcacttcaaaatttggagtatattttgcttgaatgaagaaaatgntgtttgttcattagatgctggattaatattcacctgctttacttgtgcacagtttgatattggttct

SEQ ID NO: 18521 - DNA, 557 bp, Glycine max
agctttttagtaaaaaaataaatatttaaatatttatagagcaaataataggctgagtaccctaggtataaatagttatattaagtcagctgcctccttttggcctcattttcgtttttccccttctcctctcaaaaccctttctttttcccgcagcccaccaaaccagtctcagaaaaatgacgatcttgaacccgttcaccgttggatcgtcgtgaaatttgagtatcatgttcgcaacagaattccgagcattctcaccgttgggaatttcgatatcatgtctgaactgagagaaacacccttcgcattgtagcctttttctttcccgcagaaacccagagctgtcttggtaaaactatgatcccggtttcgttaaccgttggattattgtgaaatttggatatgttgttcgaaattcaattccgcacgcttccaccgttgggatttgcgagataatattcgtggagggagaaaaaggaatcgcatgaagacagtataagtggagggttcaatctcttctccgtctctctgacgtttgggaattctatcggagc

SEQ ID NO: 18522 - DNA, 567 bp, Glycine max
  unsure (1)..(567): unsure at all n locations
tcttcattagctaatgcacaagctaaaaaaaatcagttttcgtacacgttaatatgagaaatcttctacaaattaatttgtgcattggctgtttcatgttgtctggattgaagtcaaggctccactgcaagagcctaaggaggccaggttggaggttccaacaccccacagtccaaacgcttctaagattgaaggtaaaggaaaactcaaattggctggagtgtcattagattcttattgtctatgctttttgagagtgaatctattgtcccgtggaggcttaaaaccaggtagagacattgtataactttgactaaaactatgaattttttggtagatcatatttaccgtgagggaaatacctgtgcagatttgttagcctctcaaggggtaaattgatggaggtgcaaccaagtctgtctaatgatcttttacaggaaatnggaggtcttatgaacaggtccaagactaaaaggatggaacanacattngcaggcctaattctaagatcaaagaaaaagaaaaccaatgggaattaagggctgcacctaattgggtcattctcct

SEQ ID NO: 18523 - DNA, 486 bp, Glycine max
agcttctatagaaggtttgttcctaatttctctattattgcgtcacctctcaatgagctagtgaagaagaatgtggcatttacctggggtgaaaaacaagagcaagcctttgttttgctaaaagaaaagcttactaaggcacctgttctagctcttcctgacttttctaaaacttttgagctagaatgtgatgcctctggagtgggagttggagctgtattgttacaaggtgggcaccctattgcttattttagtgaaaaacttcatagtgccaccctcaactaccccacatatgataaagagctttatgccttaataagagccctccaaacttgggaacattaccttgtttccaaggaatttgtcattcatagtgatcatcaatcacttaagtacattagagggaaaagcaagttaaacaagaggcatgcaaaatgggtagagtacctagattcaattccatatgttatcaaatataaaaaggga

SEQ ID NO: 18524 - DNA, 395 bp, Glycine max
  unsure (1)..(395): unsure at all n locations
tcaaaccacagcaacacagaatctaagtgtccaacactttcnctaatcaatgggttttctaggtttgaaaagtgaaatctataatgaggtaaatttgaagcaaactctcaccttacacgagttcatagcatcaatctaaacttgctcaaactgaatttacacctaaaattccgccgaatcaaaatttgactcttcaaaccccaatttttgcctaaaaatggctcttggttcactttggtcattagttcttctctctagcacagtccaagctttctcccaagtcctaaatgacatttcacgctaggattaactcactttaacctccatttaccacagaattcagacttaacctttcaactctaaagccttactctttttcactcattacaccacat

SEQ ID NO: 18525 - DNA, 565 bp, Glycine max
agcttttatgaaatctcttctttggtaatcgttttctctttttataattcaaataagttcatgcctttatgtcaccaattcaaaatttcaaaatgccatcttcatggtctctttggtaatcgattaccaattcaaaaatatcttacttttgaactgattaaactttgataaaggcattttgataaaagattttgaggccaaaatattgcaaataaaaatgagattcttttaacaatttgactaagtccttatctgcgattttcttgatcttgtgtgttgacttgaatcaatctgtgcttttatcaagtaaattcttttggcatcatcaaaacctgcatgattcatattctccccctttttgatgatgacaaccatctttacgtaacgagtaaaagaatatgcatttgtgtcattcactcccccttgattgttcaatgattgcttatatgaaaaagtttaagattttatatatatacaattttttttcgacaaataaataatctcccctaccatcttatctatctctcccctttgtcaacatctaaaacaatcatgagcagagaga

SEQ ID NO: 18526 - DNA, 235 bp, Glycine max
  unsure (1)..(235): unsure at all n locations
ngaaagagcccgggtngtcaaagagaagttcaagtccatagctcttccatgnctgtagagagtatgatgaactaagggacgtctatttggcctccgatgaagccttggaatgagaaaccaagaaggccctaaaggaataacaccaccaagacaagttttgaggggcattatagggcagcattagtgagctcaagcttcgaagaggtgaaaggattcatcaccggtcaaaggcatg

SEQ ID NO: 18527 - DNA, 578 bp, Glycine max
  unsure (1)..(578): unsure at all n locations
agcttcaagaatcaagatcaagattcaagatttaagatttttgagaagacttaatcaagataagtatgaaaaggatttttcaaaaactgagtagcacaaggatttttcacaaaacatgtttaccaaagagtttttactctctggtaatcgattaccagattgctgtaatcgattaccagtagcaaaattgtttcgaaatagttttcaaattgaatttacaacgttctaattaatttcaaaaagctgtaatcgattacaatgtttttggtaatcgattaccagtgcctttgaacattgaaattcaaatttaaatatgaagagtcacatgctttcacacaaaagctttgtgtaatcgattacactcaattggtaatcgattaccagtgattgtttctgaataaaatcaaaagatgtaactcttcaaatagtttttgactttgtcaaattggtttttaagtttttttaanaagtcataactcttctaatggttgtcttgaccagacatgaagagtctataaaagccaggctttgtttgcattcccagtatncttgacacttattcaatcatcttttacaag

SEQ ID NO: 18528 - DNA, 271 bp, Glycine max
tccatcaagtggtaatcagagcacaagagcttcaagtaggtgctcctttatcctccattaattgttttgcttgaccttctcttccattgttgtttcttcattattatctccatgtatctcctcacaatgtcttgtgctaaatgtttttaacatgattctttagagttttcaccgaataaacttgctatagaagctagatttgattttctatggttcaaatttcttgttcttgctcttgaccatgaattgtgttgagttcaggttcctttga

SEQ ID NO: 18529 - DNA, 321 bp, Glycine max
agcttagccatgatggatgtgacccagccagttttgtgttatacgacatgagagatgtgtagttgattattattcgatgagcctactgacatcaactagaaggaggcactccattcctcacataaaggcatcctatcatattccgcggaatcactggcattgtaaccctaatgaacttgacagttatcagcactggaagacatgtatcaatggttatggagaccagaagtctctacacactgaacgacagggccatggctgagatggtatgctactactcatacgagcactacggattatgagttgaaatcattcaagaat

SEQ ID NO: 18530 - DNA, 165 bp, Glycine max
ttgctatactcaatagagagtggatatcgaaaggactcggaatatgttttctatcgtgagatcttcgtatcttcaatgcttgtggtatttatctgcctcttgcggcgaactttcgttgactctatgcatactgatctcctttacttggcttgactctaaaaactg

SEQ ID NO: 18531 - DNA, 551 bp, Glycine max
  unsure (1)..(551): unsure at all n locations
agctttgctatgatgcaggtgttactgataatgcgtgttgtgtgtgataangatagcaatataggtgatactctttcatttagcatactgtcatctcattgagtgttgcatccccgccaaacaagaattccttactatcatcgttcgaggtatgtatgtgattctcacacttatgtgcttaagtatataggcaatggttgaccatgtactattctttagtagtacattgtaattcattgagtgacccatagttccctgtttgagattgaatacaacgattaatacggacagtctggattaattgttgtattccatctttgaattgcccgtttggacaaatttgagaagacaaattagttttacttcattttgacttataagttaagtatgttgtggtattttttactaaatttcaaacaatgcatcttgctttgttctcttggtgcatacatgataggcgtgaattgatgtcacccgtttcatgttggtacttggagaccaaagcgaaatgctgccgaaattttgtcaaataacataactggcttaacttg

SEQ ID NO: 18532 - DNA, 441 bp, Glycine max
ttgtttaactcattatttactggatattgttttttcagggatttaggtattaaagctcaagagattcaaaaattcaatgattgcccccatttactgtcccatggggggtacaatcttctagaaaatgaagactaaactccatcaagctgagtttaccgaaaattcaggtatgattgtagacccttcatccccgattgcaagacatgtcaaatggaagatggcctgaacaaagcgatatggccaaatgacatctatagcggcacaagaaatctctgacaaaattgtgagttcattctaattagaactgttggaatgaaaaacataacctaagaagattgtgtaactccttttttcgtgttgttgcaaaatgatttacatgaacaaacgacacaaggctattttgtgccacatggttgacagtacatactgaataatgcgctt

SEQ ID NO: 18533 - DNA, 507 bp, Glycine max
agcttgcagtagtggggacgcacggagagttgtttatattgtttgagacgaacatataccaaatcgcctagctggaaatggacgtcccgacggtggcgatcagcatggttcttcatagtcatttgtgctttcaataggcaattttgcagtttggtgtgcagagcttgtcaggtggtaaaaatggagtctgcagcctcgacgggagatgtgccggtagtatacggggccaatgttagaggtggtttgccatacgtgatctcgtatggagaaatgccggcagcagagtgggttgacgtgttgtaactccactcaatcaatgaaagagaagagtgccacagggcaagcctgtcatggacgaacgagcggaggtgttgctcgagagttcgattaaaaaccttggtttgtccgtctgactcagggtggtacgctgtgctataccggagtttggtgccactaatgcagaataattcgcgccagaatgagctgagaaagatggggtcttgattg

SEQ ID NO: 18534 - DNA, 934 bp, Glycine max
  unsure (1)..(934): unsure at all n locations
gcacccgggganaacgtccgcatcgatagaacnancnnatannatacaacagcctggcaaagaagctggaggaanacancaaggaacgaagccgcgggcggcgttatccctcctcttcgtgnactgaancacacactcacacaacggggcagaaagcttgaatgaaggagctaatgaacgcgctatacaccgcatacggtgggcgcgaccaataagatgggtcaagaaaaacacagcaatgaggccgccaatgggcaagggctggaatggaatgctgcgcctggacctatccagtgaaggacaccacaatatgccactgtgtggaaaacatgagacgtgaactgacgacgcaatatcatagcatgtggcgctatacgcaccaaactcagccttcaaaagcttactcgcgcacaatggtggccacatgggaaagaaaacgccaaccctactccagaggacacccgtacaacttgcccccggccccacacacaattcgaggcaaagggcggcccgagattcacaacggacaaaaaaagacaagaaatggggacaaccactccgaccaccgaacagaagcaatataggggatccgaggggcgaacaaacgtcactgccaagggatccgagcggggaagagaacaaaaccttgaacatagaaggctgggaagaaactgaccgcgtacacgcgcgcagatggaaaagacccctgaggccaaagaaataataacttaaaaaacatcgcatcacgacccggaaaaatgagggggcccacgggacaccgaggtgtgtaccacaagaaagagccctgaccatagcacctacagatagacaccaccgcgggaacagaagacctagccactagcacaaacgccgacgcctaaaccgaaccatgcacacacataagataacgggtcgaaaaaacgagaccaaaccg

SEQ ID NO: 18535 - DNA, 474 bp, Glycine max
  unsure (1)..(474): unsure at all n locations
agcttctcttaccttgggttagagatgttgcttgttaaaaaagaaaaaggaaaaaaaaagagaaaagaaaaagagagagaaaaaaaaagaaagaatcaatctaagattgaagagagacaaaagaaaattgaaaaaaagaaaaaaaaaagggttctttggaccagacaacatctgaacaatgtgcataattgccaaaagagaaaaatataaaagagaaccaataataacttggttgaaacctgtggggtgtaaagcgatcacctgctttagttacaaactgaatctttgtgtcctctcttgttccacaccgaaccaaagagaaaaggaaacagaaaaggggaaaggccagaacaaccaaagccaaatttcctaccaaaatccaaccctataaagtcctattgatccatgatgattgcgcatattatctttgattngatggaaacgacttgcaaaatcaatctacgatatatctat

SEQ ID NO: 18536 - DNA, 585 bp, Glycine max
  unsure (1)..(585): unsure at all n locations
tgtcgaaaaggcgaagccattttacaagttgctcaagataactgagcccttcctatgagacaagacttatgaacaagctttcttggcttttaagaataccatacgcatactcctatatctctcagtagctgatgaagccgttagctcaacccacgtacaagaggaagggaaacattagtttcctaaaactttcaccagcaacatactctataacgccgagaagtgctaccatagccacaccatactctataatgtcgggaaacattagttcctggctttcaagaataccatagccacaccaccaatagcactcattacctcggctcgacgacttaagccctactttcagagtcatcaagtggtggtcaaaacaaactacagttagagataggggagcaacatgaagacttagccttgaagcttgaagaagttttgttttttacatgcccaaatctctttagtggaacttgtattgagtgttatattgtgtattgctcatattaacatggatcatctnaataggtaatttcaaaagatctagttattgggatgcctagattaaatctaaaatattgtttcaccact

SEQ ID NO: 18537 - DNA, 830 bp, Glycine max
  unsure (1)..(830): unsure at all n locations
cgcacgttttatctgagactcacnnccaannnaanngaggggcaggcaacagctggacgagagcagaatttaattcttatagacgcagcaggacggcacaggggaggttaggactgacaacccgagaactaccagaacaggccaacgagatgtgggatcccaggaataggatacacccaccggtgaccataattaccagcagccaaatcggaaggaaagcgccttctaataagaattcacgccataacaaaaaagggcaaaaagccgccctcgaacacaaagttgatcgtaataaacacccagggcgtgtaagcatggaaagtcggctctaaatacgaagaagcacatgcctgcacacagaagctttgagaaccaaaccaccactgatgtcggaatcggaaaaccagcgagtgttataaaaccacagcaaaagagcgaacaccttaaagagatcctgaaccgttcaaaaaggggtttaagacgcgctaaaaaggaaaaccgctgctaagcggcgcctcgacgcacctgaagagcaacaaaatccagggttggttacgatcccgagttatcacaaacaaccaattaataagtcatgtacagacccaaatgtccttaaacaaggaccatgcctgtgaccacacacttccacactaaaagggtgaaaaacatcaaacctgggcatcatagaatgtgacctttatcctttcaaaggatgacgacttaatcgtttatgaaaccttctcgcctgcaaacaacaaagagcacctccagaatctaaaggcaccctattctgaacgaaatgcaaccacactcccaatcccccctaaacg

SEQ ID NO: 18538 - DNA, 310 bp, Glycine max
tgagatgaggaagtgttgaagggtgaaacttcctgcttttatctagaccacagagtggtacctggagatatgtcgcgggggtcaagagaccttggggacgtcaggtggggtgctattgcccaaaaccaagcttgaccaatcccgacccaacccgggcatagtccgtcagtgagaacctgtgatgtacctaagcaggcgagctcctggcagtcaacagataaaaggaaaacaagaccacaaagcaaggaggcttgtggtggctggccagctgtgaatttgcataatatgtggattgtggcctctggtaatc

SEQ ID NO: 18539 - DNA, 538 bp, Glycine max
  unsure (1)..(538): unsure at all n locations
agcttaatagagttcaaatagaatctctttaagttcttaagcacttaactaactactctaacatgaatattctgtgttgcgtttctcttttggaatttaatttattgtatatgtaattagtacagttttttttatcaatataactgatgtgagagttgagaattgaaacaaaatgggcataatttgcagtaacagctaaagagtaaacaagttttgaaaaagtggagaccaaacatcagagagagaggatgtcaagagtttgaatggtagagtggggagttacaaatgaagcagctaaaggataaatttggtaataaaatgtcgctcaatgtcgcgtactccaccaccgaatggctctttggactcttcaccggttgcgtaagtcagattcagcgcttcattttcattacaacgataattttacttttcagaattgtttgctttggatgattgngttaaaatgaactatttcatattgaatctctgcttttggcgttttcaagtttggtgcttgatgccgttcacttgacttttggat

SEQ ID NO: 18540 - DNA, 569 bp, Glycine max
tcagcttaggcagagagattgaaacgagcaaagatgtttgcagtctcgtcataaaagtggtgttggagcaagtgaactggcacgagctttatcagtcgagccaccaggctctggagtttcaggttcagatgctgagactgggaatcttgtgggttaagaaagggaacgaagttctggtacctttgatgttgataattccgatgaaagtcaaaagtctgaagacaagctttctattgataataattcatatcaaagtcagaaatctgaggagaaacttactgatgataatgaacgccggtcaaaaagaaggtgccgttcaagatctagcttacatgaagaggatgaagaataatacaaagattggacggatcactaaagatccaggaacaaacatcactctcatcgcgcttcacaccacaatcgggacaggcattagcacgagagaagacatttcttctccaaagacaaatattcgtacatggggaccaagcacgattgcttctctgatgatgaacatcatcgctcaaggcatcatcgtcattaatatgatagctcctcctctgatgatg

SEQ ID NO: 18541 - DNA, 510 bp, Glycine max
agcttagcctgtgataatatgaacagtgtattttttttccgacctctatacattaatgctgagtaaaatacatctgggaaagtaaagctcaaacactatatcaaacaattcttagacaaaatatagtgctgcaatttcatttaacaataaatagataccaaatataagttgataactatgtcatggattcttgatattcaaacttagttatattcagatttgaaataaagaggttatgaaacttaattatattcatgctgccaatctcttcgttgaaatctttacgctaacattagagcaatcaggtgagctcttcctttttcttcattattcaaatcaatattataaaaaaaggtagcaaacatatgtgcataacttcatataaaataaagtcaagcttggacagcatgaataacttagattgacagtatacattatagaattgctgaagttcaagtgaacgggaaatgagagaaaaaggacagataactgagacagtctgaaatgctc

SEQ ID NO: 18542 - DNA, 352 bp, Glycine max
  unsure (1)..(352): unsure at all n locations
ttggaacatgataaacattggtgagtgttctaacaatttcatttttcattntgattnggatataacttattccaactatcttgaaaggaacattgttatccatcaaaacattaccattatatttctttgcacaggttacgaaccattttttgtgtggacacatattataaaaacaacctgagtcccataccccatgttcagaaagatgttgtagttgatcaacaaccaataataccaaatcattctctgacgaggagtcattatgaacaacgactgctacaaattctttctagattttattgggacaatcttatctccaacggttaagtcccttgcagaaatacaaatatgc

SEQ ID NO: 18543 - DNA, 634 bp, Glycine max
  unsure (1)..(634): unsure at all n locations
agcttccatgagtcaggcaaaggagatgtgtttgtttctgtcctttgagatggtcatgatggttccatcgttcaagattgctatgatgagaaccatgaagggagagaagtcgaacttccagatcagagcaacgagcatgaagccaaacacgatacggattgtgatagaaacagcataaattgtgtagttcttcatcctctggaagatagccctgcttgtcaacacagcactcacaatcacactgagtccgggctccgtcaagacaatgtcagaggcactccttgctgcgtcggttgcatcatccactgcaatgccaatgtctgctttcttcaatgctggtgcatcgttcacaccatctccggtcattccaacaatgtgatttctatcctgcaacctcttcacaatctcatacttatgctctgcacatgtagaaaatctcatcagtttttcttattaaccttattcatttctctcttaatttgtggcatcaaggttttacattgtcaattaattttgataggatcatactattgttaattaattagaaatcttagtcaaatactataaaagtcaataattttatcatatatgacaatctatgatcagatgacagntgagatatcaatgtttttaa

SEQ ID NO: 18544 - DNA, 581 bp, Glycine max
  unsure (1)..(581): unsure at all n locations
ttggaaattgatttctatacaaaagttagtcgtataaagcgtccatctaactcccccaaatttacatttttgcttgtccttaagcaaagaaagaatagttcacttgtcctcaagtgacaaagacaatggccaatcaaaagaaaatggtgtttgattcatcaaggacatcaaccatatgaactgaataccatcgaatgcttaaatcaattacttctcacaagcatgtagcttttcaaagataagagcacaagtattagagtcatagctgaaataagctagtcagcatgacagaaatcaatgaaggatcatcaaccaaaacctcacagtcattgtttcactcaaactcaagtgtttaggcttattccataataaacaaccaacacaagttccaacctttgcatttcatctcatatcatacagcaatgaacacacaaaattgaatccgaaggactttctaggcttgtaatggggttgggctgccaacaattcatggttnttctaggattcaaaagcttaggttctaggagagcattcatccatagaataaccttcatntttttttcattcattccttccccata

SEQ ID NO: 18545 - DNA, 532 bp, Glycine max
agcttgttcttgattttttcgaagttctttaatatacttagaacaatatacttgtccttcatttaattgtctttggacttggcgaccatgatcaacaaagtactttcgacacctactatatgttgattttaccaacgctgttatcggttgtcatgtgaccatatcttcgtccttctttatcataagccatgctccatttttcctttgaaatgcgatcaatccatgttgttatggctggactcaattgacgaaatttttctaagttttgatcaaagacatgcttgcaaggagtgtaggttgcataaaattagttaccaacaacaattgtaagtacatatcaaacttaaattaacttcatgttagaaattaaatcttacccaatttctcaaacatttctttttgtttcgcgttgttgaatttgcgattgaaattgcttgctatgtgtcggacgcaatgaacatgataaccgtggggaggttgccaaccaagtgcttcgttagcaacaacaggctttatactcgcgtgacgatca

SEQ ID NO: 18546 - DNA, 347 bp, Glycine max
gctgactggcagttgtttagccttagttcctttattttattcaatccaattaagaatgagaaatcccaaagagaaaacgtccaattgattttttcgcttcattttactaaaagatatttttttattattatattattattttatctcttttttgatttccaacatggttacggcacgaccgaacggtcggaattcattttaaccgaaattaacggatgatacaattcaaatgatcggtggaaatttattttattttttgattaggcgagaaatgacttaaataaatgactgaagcacgtcaaaagggggtatagaaagcgagaataaaaatacatgaaacaaaatgt

SEQ ID NO: 18547 - DNA, 434 bp, Glycine max
cccaactggccatgaagaaaaaatctgcacttgtgggcaaactctgtggtttaagcttctctggcgaccaccacacaaaactttgtccttctgtgcgacaatctgaagcaattgaacaacctgaagcttatgctcgaaacatgtacaacaggaccttctcaaccttaacaacaaaatcagccacaacagaatgactgtgacctcttcagcaacaggtacgatcccggatggaggaatcatcccaaccttagatggtagaattcgtcacaacaacaaccttattttcaaaatgttgttggcccaaacagaccatatgttcctccaccattgcagcaacaacaacaacaacaacatccccatagacagaaacagttgatgccactgcgcaccttccttgaagaacttggaggcaaatgactatgcaaaacatgcag

SEQ ID NO: 18548 - DNA, 584 bp, Glycine max
  unsure (1)..(584): unsure at all n locations
ttttagctaagtggctatcttcaatcaaaacatggccttcattatcttcaatttcacgcattcattccatactcagagattcatgcaaaaatcattactcaatgttagtcgttctctcacaattaaagatcacactctcactaggttgcggctaatgcgttccttcacaatcaacctgacaaaccgactaacattttcagtcatgatcctaattctatgttctttctcttctaatgactgcatgctcattcaaggcatatgatctacgcatttcaattcactcacatcatacaattgatcaattcaaaccaatcacaaacactgaattccaaaatcaagtatcaaccactggataatataaatgcactattcaatcaagctntgtacaagatatcaaccaaaataaaaactataaactaaaatttaaaagttgaaacataaacatatatctaagactgaaacataaacatnaatctaaattataaaatgtactaaggacatgataataataaaactgttcaaaaagtntggaaataaaaatcctgatcctgtaatgatcctgtgcagagtccatggcatgctca

SEQ ID NO: 18549 - DNA, 343 bp, Glycine max
  unsure (1)..(343): unsure at all n locations
agctntaagcaaattcaaacgacaatcacgttttactcggatgtccgaangagncccggaatatatcgagacgctcgtaattgaaaacagaagctctgagcaaattcaaacgaccataacgttttactcggatgtccgattgagtcccgtaatctatcgagacgctcgtaattgaaaacagaagctctgagcaaattgaaacgacaataactttttactcggatgtccgattgtgtcccgtagtatatcgagacgctcgtaattgaaaacagaagctctgagaaaaatcaaacgacaataactttttactcggatgtccgattgagtcccgatatatatcgag

SEQ ID NO: 18550 - DNA, 366 bp, Glycine max
gaatactaagctatgcgctatatgcttacaaatgttctcttgcacaagacattttactactcgaaaaatgcacccatatacaatcaaggcagctccgttacctagattatttacacgtactttcaaggtgtatttgttacttacatcacacacatctacttggctaaattcacatacatgcatactcaaagcattatggggtaccaaaaattgcacatgtacacctcctggtatgtctaatacctatgcatacacaagctttatgatgaatcttgactatctacacaatgaggtgctacatatgatgctcttttcaagtttttgctacctaaagccgcgtgccaagtccagtatattttcctttgc

SEQ ID NO: 18551 - DNA, 620 bp, Glycine max
  unsure (1)..(620): unsure at all n locations
agcttgtaatcgattacatcatttatgtaatctattaccagacacaaaaaattcaaatttcaagtctgaagagtcacaactcttcagaaactaactgtgtaatcgattaccacatttatgtaattgattaccagtaaggaattttcaaaaataactcctaagagtcacaactgttcaagaagtttttgaatggccatcaaaggcctataaataggtgacttgggatatgaaattccttagagtttttttgaacaacatagtcttatcctctcaaaaccaaattgtcttatcactctcaaaatattccttggtcaaaatacttgcaaattcaataaggaatcttgatcgatcttcaattgtaatatccttctcttaaatagagaaaattcttcttcttcttattcaaagagatctgtttaagagatcgagggtctcttaagttgtaaggatatctgaacacaagggaagggtgtccctgtgtggttcanagtttngtaaaagaattctacaagatagttgatatctcaagtgggttgcttggggactgaatgtangcatangacgtggccgaactagtataaaatctgagtttgcattncttaaatccctatctatcttct

SEQ ID NO: 18552 - DNA, 897 bp, Glycine max
  unsure (1)..(897): unsure at all n locations
acgcaaaggacaagagaaccaatgacagcgcaacgaacggcgaaaaatcaggagacaaantaanaaaaaacgaaggaaagggatgcgacacactganaccgaananaaaaccagcagcgaacaggaaaaaaggggggacgggggggaaaccccgacaccaggaaaccgagacaaggcgagaccggggggagccaaccacggccgaaacaggagaaaaaccaaacaagagacccgagagcccgaaacaaaaagaggacggcacacagcncacaaaaaaagcgaagagagaaaaccagagaccccaggaaacaaacaaccggcgccccccgaaaaggagggcaacgcgggcgcaaaggacaaaggggaagaaacgggaagaacggaaggaaaaacaggaaggagcccgcaccaagcaaacaacgaggagacagcaagccaacaaaaagggaacccggcaagaaaaacacaaaaaacccccgacagggggaaccgaagcaagacaaggccacgccaaacaccgcaaaaggggagaaaccaaaagaacgggaacacaccaaacaagcgacaggaaaccaagaaaacacgacaaggtgcaaaaagaaacgccaaaaacacaaaacaccgcattgccccgcaaaggaccaaagggagcaaaaaagaagaaaaaaccgggaccgcgaaaaccaagaaatcacccacaccacgacagaacagaaacaagggggcaaaaatgggccacaatgaccaaaaaaccccgcaaggggagcgcgcccccccacaaaaaagaaaacgcggggacaaaacaaaaaaaaacgagtgcgcgaccagggaaaaaaaaaggagacaagacaaaaaggaaagggacaccaaaaccaaagtccacaagaaaaacagcct

SEQ ID NO: 18553 - DNA, 544 bp, Glycine max
agcttgatgttattaaaggctttgcacctacctctggctgtttcagtgacaaagatgatcataagtacgtttacaacttgacatgaaattttacttgagattttatagtttctgatacttggtttacttggacataacagtggggatcaattgatggaagatgaatctcaaattgctctaaggagaatgaagaaacttgttcttgatggtgatttggaaagacaaatcaaagatctccatgagaagtatgtttgagcagatcaaacttttgtctgaactttggagcatgatttaaattagagccttgtcaaaaagaaattcagtcttttttattttattttttttacatcattggtacaaacattcttaaaaggagtgagcaagatagatcaattcatagcttttcaatattttgttgaatttcattatttgtactgtatttcaattcatagctgtgcttgtactaatttaacctgagtttataaatttccaaaaattaaaaaaaaatcagcatattctacatcggttcaattatatacgatgt

SEQ ID NO: 18554 - DNA, 956 bp, Glycine max
  unsure (1)..(956): unsure at all n locations
acacgaactgaggcgacaagcagaaaacatgcacaacagaagcgcaaacggaaatgcaggacccntaacaataaaaaanaaantaannggggacannnnagggnaatgatgacctcgatagaacgaccganannanannnaagcnggacgcgnaaacccaccagcatcacataggagaacaccgatcatgtgttcaccaacaccggcaaaagaccacaccaacagaggaggcgcaacgcgagccgccagaatgctccatcactgggacgaaacgatgaacgactcactatggcgcgggcaaagggacccacaactacacggccaaacgaggccacaacagaagagaaccgagaccgcgcgaggaaggcgaccatcaagcaatgacaggaacagacctgggagagaaccagcaacacataccaggcgacgacagcaccacaaagaccaacccagacgaaacgcaacaaccagaagccaaattcaacgcatgcccacaggacactgtaaacaccctcagcagacaaccggggcaaggagaccacccggactgaaagaaatccagcaccgcggacaacggacgacagacccagggggggaactagcaaaacccaagcaaaacaacaaggagccaaaacgggccggcggacacgagggcacggaaactcgccaaaaaaggggcgaaaaaaaccgcagacccgcgcgaagaacggagcgcaaccactggaaaaagccagggtgccgatgaaaaccacaccgaacgccaaccccgcgagagcgcagaaaggggaccccacaaaaaggcggcccccaggagaaactcgaggggagcaaaaacgccgaaacaggcggaacaacaaaaccccaggaggagggcgcggatggaacaggacccgggcaaacaccgacggggatgaagccacaaagggcaagggacggggttgcaggcaccaagngct

SEQ ID NO: 18555 - DNA, 893 bp, Glycine max
  unsure (1)..(893): unsure at all n locations
nataatgagtcttttganagccncnaancatnaaaatagangcccgcgagcgcgaacttnctcagattagagggcgcacatttccatganattngcncacgcgcnccactagcgacagtggattatttgggagtgtacccttatagaacttagctaaaattgtaatccattaataagaggtccctatacatagaaagtcaaccaaggcctggacccacttgaaataaataacgcggactgtctttcacttaggttatgcgagcgccaagaaccaagatgtgtaagaatttaactctaagaacacttagccaatgcatgtagctcatatttgcataaaattatgtatatgacttatgcccagtgactccaggagaattgaataataactggcatattgcattttgtgagttgtgctcacactcactcaggaaaaagtttaataataattctgtcccaacggcttctccacaaggtgaggacaaagaagctcacctgaacgtcctgtcctcaggattttcatctaatgaaggaagaaaagggccacatacctttcagtatattgaccatgtgaaaggtcattgtccttaccacgactgcaaagttgttgaaagaaaaaagggtcttgacccgtgacgccttgaacctttgtaactaaacaatctagcacgatgttaaaacaattgcggccttcataacttggttttgggtgcgcgtcgtctgaagtgaaataggacacgacctcttccctaaaacctttccaagggggcggcgtggtcttgtcccaagagtgcatagctctatttcctatagaacgaaggtctcaatatgatgagtacccatcagaatgtgcatattctgcaaaaccactgattgtaagaattaaccgcatttcg

SEQ ID NO: 18556 - DNA, 840 bp, Glycine max
  unsure (1)..(840): unsure at all n locations
nacctcgacctcatgaacgacctatgaatctcagcctcccaataatagttataagaaagaaaaatagagagaagggcttacactcgaagttaaaattaagttatgccgtgaagttatgtgagtgctcttgaaaaactgatatatatatatatatatatatatatatatatatatatatatatatatatatatatatatatatatatatatatatatatatatatgttaatgtcacacctctcagaggaatccgagtgatctcacctcaatatagtccattgctctctttttccactattgagaaatatcgccacgctggttatatatntctatgactcatacacttcaattataaagcatcacacacacacatatatagttatatataataaacaccaaaaatgggatggatatatatatatataatgaatcctgacaccacctttcacangttattctaagaataaatttaatatcaccacactcccactccaccgggtcaacctcatggaaacatatatccacgcgcccctgagttgaatctcacgacaccaccgtccacccaaaaaaacactctaccactcctccctctaattctcatttaaacataacgtcgctgcgacgaactcaacatttattgttcgaccaaaaaacagggaaagcgagcacgcccacaacttctcctaaattggagaaccccccgatccctgtccccacccactttttttttaattcaatcaaaaccacctccctccccccccccaaaatatctccccattcaaacgccccctactccctattacaaacaaaaccccctcccaacaaacaccccccaccccg

SEQ ID NO: 18557 - DNA, 307 bp, Glycine max
aagagacgctaacggctaccgggtcttccacttgcacactaagcaactcctctttacgcgaaatgttgaacttgatgaatccgcttcatgggagtgggatgaaacaaaaagcggagaagaacggacgtatacccgctcgactacctcgctaatatgatgaggaataccacccctgtgaacccacttctcctacattaccatgacttcgggctccagcatcacaatcagagtctacctccacacgaggaagatccctgggggacctataacaaacctgtaacttggccatactggaacctggaagctt

SEQ ID NO: 18558 - DNA, 354 bp, Glycine max
atccttttcctgtggtccttgttcacaagtttcttactaagtctttagctaccggtgatattgatggccaatgtgaatgatcaaagctaggatttgctcttaagacagatcggaaaattcctgattccgtgcgtgcgcagaatggtctacttccacataacaatatgtatgagataaccccaatactccataagtctccttcaacactatgagatctatggagcacttcaagtgccacatagtaagcactgccaacaatatcattgaggcgttgatctgcatgtttattagaagtcagagctggtagtgaaaaaaccaacaagaggatatcaccgattacaagagaatgaatga

SEQ ID NO: 18559 - DNA, 836 bp, Glycine max
  unsure (1)..(836): unsure at all n locations
acgtnatanctctgtatgttccaaanagagnccaagnancgaggagcgagtagagcgtacaacttgtaaaacacactaccctggggcaaaccacaaacgacatataacgtaattgatcaccatgtacggtagtgtccaaaattacatcgagaagcttcaactggtaaacaaaagctcgaatggcaatcaaacgactataactacgtacccggagatctgaaagtgcttcgagttatattgagacacttaggcttactctctcaacaccaaattgtattatcaactatcaaaattttccatggagaagaaccatggaattcaataaagaatcttggtcgaacttcaagaagacatacgctttaattaaatagagacagatactactttttttattggaagaaaaattgtttaacagatcgaaggacacctgatgtgtgaggaaacttgaactcaaaggacaggtggccccgagtgcttataactctggatagaaattaacaccatatagatttcccaacgggagcctaaagacatgccctcaggaaaggaacgcaaccataaactgttcaaaccacggacggacagcttatgtactaaaccaactatttagaaaggtagcaatgacctctgcttaacaaactaacaattgtaagtttggctcgggacatgcgaaggcaccgatgcagagaacagacgccagcaatgtaacaaatcactcgttaacatttgcacgcaactaaacacactcccactcgaacctaaactatggcaccggaacgacaggtaccatcttcctatagtctacgatatgtcgtcataacacatgaaactgcacc

SEQ ID NO: 18560 - DNA, 488 bp, Glycine max
tgctaacaaaaatattcatgtaggtggaccttcttcttcttatcatgactcacagcagcctcctatccctcttccattcccacctagagcaatttcaaacaaaaagatggaagaagcagaaaaagagatcttggagaccttcagaaaaagtagaggtgaacatacctctactagatgccatcaagcagattccaagatatgctaagtttctaaacgagctgtgcacccacaaaaggaagttcaagggcaatgaaaggattagcatgggcagaaacgtgtcagcattgataggtaaatctgttcctcatattcctgagaaatgtaaggacccaagtactttctgtataacttgcattattgggaacagtaaatttgagaatgccatgctagatcttggagcatcagttagtgtcatgcctctgtccattttcaattctttatttcttggacctttggaatctacagatgtggtgattcatttggcaaat

SEQ ID NO: 18561 - DNA, 925 bp, Glycine max
  unsure (1)..(925): unsure at all n locations
acgacgcagcgatacccgcatggttattctagtgctactcatacacactgcntatggcttggactactcccacatcnccccccagccacacccactggtttgatgcatacaacntcggaancgcgatacantatagacgaaccgcaggcaagcaagcatctattgaacaacatacacggtttgtttcttttgtctattgcaattaacatcagactgcacatgggccaccagacgagcccgccaagcattaaagacagaccctgagaacaaaagcggacaatagtatgtcgacatcccgaccagttctgagaaaaataaactgtcttaccccactaaaggcacgaaacatcagatgactaaacgattacgatagggacttcccataaactctctaaaaggatgagcagagaatttgcgcggagtattaacttccagagagattaaccattttgctcgagaggtagcacagcaaagctgagcgatcatgtaacttttagacccaacactggacttgtaaagcgaaatgagcagacactactacgaaataatcgtctatgcaacgggatttaagaacttcagcaacggtattaaccaagggtgaagtcccgatgtgaaagtaaatcggaacagtagttttaaaaccgatgtgacaagaaatacaccacggtttgtaacaacgatgtatatgatataatttgagaaagaaagtataattccatatacctcgggttttaaaaatggaattacgggaccaaaccaccgtattgaaaaaccaattaccgggcactacaacaccgcgactaggagcctgcgacgctacatgaagcgaaccgaaccccgaacaacttgaacgcccgaacaccattaacaaacgaccgtgacatacaatagaggcagacacactctctcgcagaccgaaatcgcc

SEQ ID NO: 18562 - DNA, 601 bp, Glycine max
tgctcaagctggattaagatttgggttttgactggggataaatcgtagactactatcaatattgtgtataatacaatgattgtgtcgttttaacattggcttaagcatgataaatacttctcaagatgtctgacatcaatatacaatagtaggtttgcttatagtttactaagaaaaggaatgaagaaaattatcattcattttggaaactctaaatattacagcattggagaaggttggcaacaagggtgctattgacaaggtaaaataaatttctatattttgtttttatctaagatgatgtagtttgcactttgcatactacgtgtagtttgcatgcaaacaaaatggttacttgttatgataaaccaatacaaacttcttacatggtgacttgatgcatgcattgtacttgctttacattgcaaatggtttgaacttatatttcttggattcttccatccaagttttgaaacaaggaatcttgacatagtgatattaataattcccaatttccaataacttcatttgcaccgcattgttcaaaggatgcaagaaggagatgaattgggtttgtaattctatttctttccttttcttt

SEQ ID NO: 18563 - DNA, 521 bp, Glycine max
  unsure (1)..(521): unsure at all n locations
agcttagagaaggtttttctctcatgttcaantttgattattnattctttaaaataaatttagtagttgatgatgtccaatgacacgaattgaactgcgatggcgtttttcacggcttccgcaatgccatcgcaattgtgtttttgctgaaaaccacggcctgatagcgttatacgctgcaatgcgcgctatttgacttgttgggtacggcagatcttttttgtcattcttgattggagatgttattttctctgtgaatttgtagctgaaggattaacttttggcaacagagtctattgggtgcgttttgatgaagaattttctgataaggtaattttgttttcctgatcctgctgcttcatcatttctttgttaatgtgtggaacctcgataattttggaaatgattttgtgaattctacttacctggatttctccttgtctctttcagaaatttaaatcttccagcccttttggaataaagtacacgttccatttggaggtagaatttctttttaacct

SEQ ID NO: 18564 - DNA, 595 bp, Glycine max
  unsure (1)..(595): unsure at all n locations
tgagttatctattttggtttatgatgtgaaagctttatatggtgctaacgcttgccctgctaaaggattgcttgtaactagcatgcaatggtgcatgtgcgcatatggtctgtgaaatgaaattatattttcccttctttctttattgttattgatgtgatttatgatatgcgggtgaaggacccatatcacatgcaacaccatataccacgccttcaataacagtatttactatttacagaaaaataaatatgatatgactagtgactttatgcgaaatctgctatgactgaaaacagaattagaaataatgatgtaaattctgaagagaaattttccaatttgaaataaaaataatgtcaaattcattttaatctcatcacaattcacaacttatctaacataggaaattatttttaaaatgctcttattggtcactcccaatatggtagttactagagataacaaactttaaacatagggtttagttaggcctgctctcactgttagatgtacactactagaaattaggctttctacaccggttatttggccctttctacatncgttatgaaccgatgttgtagcgggagtc

SEQ ID NO: 18565 - DNA, 435 bp, Glycine max
  unsure (1)..(435): unsure at all n locations
gcaagcttcttagtctcagatgatgcaccttttntttagctacctcatgcactcctctaatgactatggcattatttctggcactaaactgctgagagttggaagccatcttctcaaataaatttctggcttcaacaagagtcatgtctccaagggctccaccactggtagcatctatcatacttctctccatattactgagtccttcataaaaatattggagaagaagttgttctgaaatctgatggtgggggcaactggcacataatttcttaaatctctcccagtactcatacaggctctctccactgagttgtctaatacctgagatatccttcctgatggctgtggtcctggaagcacggaaaattttttctaagaatactctcttaaggtcatcccaactcgtgatggaccttggagcaaggtaataca

SEQ ID NO: 18566 - DNA, 477 bp, Glycine max
tgcattatgttgagagatagcgtgtggaaattaggtgtttcattgtaaatgttatcttgcatggcaggaaagtagtgtaggagaaactaattgctgcaaaccggtgagttgtatgaatcttaattgtgagagaatgactagtatcaactactaatttttgcatgaatctatgaatgctgaatggatgcatgatgtggaaatgatgaaggccatgttgaatttatttttttgttacagagccaaatagccaccttgtatgagtaattaaagtaaacctttgcacccagtaagccaagcatgattgaatattgtcctgaaccctagccaaagtaaataattttatcacaccttgctccaggttttaggaaagcattatcttgatggaaattgtctcgttcaatattgagagggggtggttttagtaaatcatgtaaatgggcataccatgcttctatgcttaaaaaaaaagtaaagcat

SEQ ID NO: 18567 - DNA, 497 bp, Glycine max
agcttaatacacacttaacctcacacacacacttttacagccttttacctacacaattgtctacacaatacaactgtctacaatatatatttaacactcccccttaagatggagcatataaattaaatgctctaagcttggaacatgagctgaagcataagaaagattcttcttctaagttagatgttgtggtgaagcttgattgcttgattgaaacccatgactgaaactcagttgactgccaaactggaaagggctccctcctgatggagttgatgcttccaaatacaaaacttgattgaactgaggcaggttgcaaacttgtgtggacgtagaggctgctgctgccagagtgaatgaaatgaggagttgatgcattggtagaagcttgacatcaatgcttaacgaccatggatagaaacttaatgacttgttttttaataatagaggtttttgaccaaattgaaccccaaggacaacaattgcttcaggacaaa

SEQ ID NO: 18568 - DNA, 563 bp, Glycine max
  unsure (1)..(563): unsure at all n locations
tgcacgaggagacttggagaagataaagaaaagggtgttatctctttgagagtaagtggaggaattagtagaaccagttttagcttcttcaaagccatctacctttgtcacaaccttagcttatttgtgtgtctgcattgctaaagccattcatgaagcccaaaatgtaaagaaggttttatacgtaaaaccatttttgttttcaatacacctaattataagaatgctaccgagacacattcaatagtaaaaaactattttcatttccctaattacaaaaatgtcatcgcgttatattctacaaaatcgtcttagaatcaccgtcataaaacagcacctttgtagtggtgacgatatgatgacatacctgaccggcgagtttgcacgacctaagtagtttgtggaggaacaaacatattangctcgtgaggttgctggggtggggtatgagcaccacagcctcttccatatcaaggatcaaatggctggtgataggtttcagtatatcgaattccagagacaccatgctgcaatgggtaanggaatggctcctaaatgacaaa

SEQ ID NO: 18569 - DNA, 452 bp, Glycine max
agcttataggtatttgggaagtatgttgtatgttttttcccaattaacatatacctgctcaagggcccattgttttgccagccatgctttactgtcataccctaatttcgtctggggacaattgtttgtcgacatacgggttttttctggtcacgttgagctgcttatagccaatttatgcacgatccgtaagatttcacgatgtttcagaaggaaataagccaaaaactcaaaatagggatgaactgatcaatttagggggtgttcttcagccctgcacccatcaggaagcttctacatgaagcaaccagctcgcctgggtgagcatgttacttcaggcttaagccactagctcggctaggcgagctgagcagcaagctcctcccctattttggctataaaaagggcgtgagaggctgaaagaaggggttcatcacccatggaaagcatat

SEQ ID NO: 18570 - DNA, 502 bp, Glycine max
  unsure (1)..(502): unsure at all n locations
ttaaaaattttggatttctaagcttggggttgcatctaagcttctattttgactttcctatgctgtctctacatacataaaacagccccaccatcccaattgtgcaaaatcatattcatatatcattggggcatttcaccgagcacttggtgggcgcacgtttagacatgaattgcaagagaatgggagcaatgtggcatgccccattgcttcagaatacaacctaggcctaaggccttttcattcaaattctcaattcaagaaacaagcaccaaagcaaaccaaaactgcctcacaaatataagcatgttctcacaatttaaggcaccaaaagatgaagaaagcacatcaatgggaagcaaaaacatcaaggacggaatacttacttgttggagtgaattgaaacaccaaaaacgaaagcgaaatacgatcaanagtggcttatgggagcaagaaaccacaagctntcgtgttctntatcntttgaatgaggggggggggg

SEQ ID NO: 18571 - DNA, 413 bp, Glycine max
agcttgaaggcatgtaatccaccatcttttctttgtataacaccactaacgtgtccactatcattgttatcatctccctctccatcattgggggtgttacttgagctgccaaatcccttcacctttgggcgtattctttgaaagattcatgctccctcttacatgtgttctgtagctgcattctatccagagctatatcacaattgtactgatattgcctaacgaaggtaaccattacgtccttctaagaatggactcgagaaggttccaaattagtatactaggcgacggctgccccagtaagactttctttgaagaaatgcatcaacaatttctcattgctcgagtatgcccccatttttctattgtacatcttcaggcgattcttgaggcaagccgtccatttgtactta

SEQ ID NO: 18572 - DNA, 517 bp, Glycine max
  unsure (1)..(517): unsure at all n locations
ttgaacaatatatttgtccttcatttaactgtctnttttcacggctgccacgctcaacaaagtattttcgacacctactgtacgttgatttgaccaacgctgttatgggaatgttgcgacaatccttcaaaaccttattgatacattctgagaggttggttgtcatgtggccataccgacgtccttctctatcataagccatcgtccatttttcttttgaaatgcgatcaatccatgttgctatggctggactcagttcacgaaatttttctagattttgatcaaaaatgtgctcgcaaggagtataggctgcatcaaattagttatgaataagaattttaagtatatatcaaagttaaataaacttgaccatgaaatatgaaatcttacccaatttctttaacatttcttnttgtttggcattattgaatttccgattgaaagtgctcgctatgtgtcgcacgcagtagacatgatagccgtggggaggttaccaaccaagtgcttcgttagcgac

SEQ ID NO: 18573 - DNA, 570 bp, Glycine max
  unsure (1)..(570): unsure at all n locations
agcttggttcccaacgctctgttaagctctctaatttttataggtaaatctaggatctttgtcagatactatgctagatggcacaccatgtaacttgacaacctcacttatatacaaggtggtcaacttctccaaggaaaatctgatattaatgggaatgaagcgagtacacttagtcaatctgtcaacaataacccagatagaatctaaacctctaggggttctaggttgtcttaccacaaaatccatggaaatactgtcccacttccactggggtatctctaagggttagaacttcccttaaggactctgatgttctatcttagccttctgacagactaggcatgcatacacaaactcactaacgtgtctctgtatgttgggccaccaaaacatcatctttaaatcttgatacatcttggtagcaccaggatggatgctcaaattactgctatgtccttcctctaagatcatcttnctaagttcaagcacattgagaacacaaatcttatcttgaagtctcgaaacttcatctgatccaacattgaaactagtgtcccttcctgactc

SEQ ID NO: 18574 - DNA, 490 bp, Glycine max
tgtaggattatggggtacccatcacatgtggtactaggtggctgtcgtgctatggtgcacaacaagttttccacatccacaaagcgcgcataaacccaccatcccctgttgcccacctccaactgagctcacgtactcccacgtagcccataacctcgtttctctcaacaccgggtccccatcaatcctcccaagcttccccaacatcaaagtaaatcaacattcaaacagcacaaattaccacagccaagaaaacagggcaaaggcagaaaactctgcccaaaacaccaaccaaaatcacagcttttctcacttaaagaccccagtaacaattccttcgatccaattcgttaaccgttggatcgacttcaaaaatttactggaagtctatagtacataagcctacattttgaccgttgggatctactagtaaacatccagaaactattctgcactactcttttcacaggcaaacacacacaagcatttt

SEQ ID NO: 18575 - DNA, 536 bp, Glycine max
  unsure (1)..(536): unsure at all n locations
agcttatccgattacaatatttaactaacacttattgtacgtggataaagtcttcaagatttgttataattaagtttaaatgctctttatactaaccaaatagtaatcaatgtcaaaacaaataaaaataataattcaaaccaatatgcatttatttctcaagagtatgatgcatatacaattatactaaaatctatttgtatgacagaatattaattacaaacatgattagagattaaacaaacttcctacttgcacccacccttcaatgttacaatagccacaattttttttctactgaaataaaaggtaaacaacacataaatggtgatggtcatataattgaacctacttggcaagtctactaaagttggaaattngggaataaatgacccangtgatatcaagcccatanaggctttcaaaaatagtttctctaatctgcaagagtatacaaaaaatagttagtcaatatcctctgtctattagctaggtagatggctacaaaaaaatatgagaaaacactccaccacatg

SEQ ID NO: 18576 - DNA, 430 bp, Glycine max
agcttttcctcttttcttctcgagcaatagcctctgggggtctatataactgagctactgcacctaatgtgcagatctgggcatggtgattttctagttcaagcttgatttgtgacatggtatcagagctcttcaaagagctctgctgcgcaatcaagagaagtttccgaagcaatttatgatttcttcacctctggtttgagtttcatctggctttgatcttcgattgtggcaatgagtgaaagagatacacatatcccagccatagacagcttcctttacttgcatccaagcgagaatcccgcggtttcgcttgtatctccagttcttgattccacaaattatcactcatggagcagatcaatgatgattgctttgagtgccaaaaataaaactgagtttggtgatggaggagcagctgacccattga

SEQ ID NO: 18577 - DNA, 635 bp, Glycine max
  unsure (1)..(635): unsure at all n locations
agcttttaactcataatataccagaattatattattttctattagttaatagttgaagatgaactttataaaatatccatagaggaattacaaccaccatgtatccaaatatgacttttttaaaatgcatagagtttgataatagttaataaaacaaatgaaaaggtaaaagtagaaccgaacaggacatgaagagaaaaataaggttactgataattaagacatttgtattactttttttatctgcgtttataagtattatttattaatatagaataaatacataaacagaataacttttctagcattaactaattggatgagtgcaactaaacgttgttggttggttgcgcgcaacttaagtaaactttacttacaatagaaagtttaaatcttctaaatctaaagattagtctcataattatatagaaacattcggttaaaatcttgctataaccccactccgtttaattattagggtaccacggaaaataacaatccaagagttgggcaaagtttaatggatagaanaggaagaaaaaaaaatatatagacatgatgtaacctggaccaaaaagtcttacataagataatatcannttgtatcttattcttcagtgatcataagtccttat

SEQ ID NO: 18578 - DNA, 539 bp, Glycine max
ggaatcttggaagaagatagagaaagcttacctgctctaagatttctagaaatatctgttatggccgatgtattttcagcatgcctagctatattgcattatgtcaaaacgtattttcaacaccttacagcttcctagaggtatgagagatatagagtagcttacttggttactagttattagtttagctagttacaagttagtttaattaggcacatattagttacaagtatagttatataagacttaatgtatttatgtaaaaatgatttgttcatttaagcgttatgcaaagtaatatttaagaatctcttatctatactattttctattctatccatctctctaccttgaactttatcatggtatcagagcacacgaaaatacatcttcttttctctctgtctgacacacacgcaccactcatcattttcttgcttatgaaagatcaaacgtgttagtcgatgactcttgcgatgaccaatggcaggcataatcggttgacatcggtctctttcgtcacttgcaactcaacacaa

SEQ ID NO: 18579 - DNA, 431 bp, Glycine max
  unsure (1)..(431): unsure at all n locations
ataaaacaaagagtttggcggtaggtgcagatttttgattcatggccagttgggttaccaagttaaccaaggcatctagtttaccttcaagcttcttagtctcacctgatgaagaagaattacgggctacttcatgcactcctctaatgacaatagcatcaattttggcactgaattgctgggagttggaagccatcttctcaattaaatttctggcttcaacaggggttatgtcttcaagggctccaccatgggcagcatatatcatacttctctgcatgttgctgagtccttcataaaatattggaaagaagctgcccttgaatcttgtggtgagggcaactggcacataattctntaaatctcttccaatattcatataagctctctccactgaagtgtctaatgcctgaaatatcttttctgatgac

SEQ ID NO: 18580 - DNA, 490 bp, Glycine max
  unsure (1)..(490): unsure at all n locations
ttcaacccttttctttcgtagtttctctgaggtaaccttaacttcttcgcctttcccctagttagtttaagcttctcttagtatctcatantttttgcgtaccttaataggatgtttttagacttcacttgaaaacccttaaaactgagatngttgcaaaagttaccttttataaaattgatgttgttttcgtgaccttcattgaaccccagccacattggcgtaatcagaatttcaaaatgacgtctccttgaagtagaaaccaaaaacaccattttcgtcccttttaaaactgaatgggtatttgacccaaatgttaatatcaaccttgcccttgaaatatatatgttagtgcttagctntactgagttttaaaagattggctaanattttgttaaaacataagcacttagacaatgaaggaaagcttgagttactgcacatgatgtctaacattatgtcaaggaatcagattgggctgcacaatgca

SEQ ID NO: 18581 - DNA, 618 bp, Glycine max
agcttaagctccttcaactgcacaaggctcttaatatttttagagatccttgtggaaccttcacccgacgaagacactgacaaaaaattatcttctccttcttggacaaagtatggcatgctgggggcaagtaaattttcttcccatcagaccttggatgcaactgtgatcttatacccatatcagctagatcttgacgggtattcaagccatccttcgtcttgccttgaatgttaaggagcgtcccaatcacactgtcacaaacatttttctccacatgcataacatcaatacaatgcctaacgtcaagatcacaccagtacggaagatcaaagaaaatggacctcttcttccatatgcaactctgacttttatccttcttttgggtcttcctaaatacagtgttcaggtgttgaacctgctaatatacctgctcaccagtgaacggtatcggtgcaatatcatgctcttgacttccattaaaagcttttctcagtcgtttgtaaagatgattgggtgttagaaagcggcgatgcctactgtagactgtttttcttccatgtttcagtggtatgtaacttgtattttcttcacagatggggcatgcatgatgaccct

SEQ ID NO: 18582 - DNA, 418 bp, Glycine max
ttggaaaatgatttctatacaaaagttagtcgtataaagcgtttgtcttactcccccaaatttacagttttgcttgtcctcgagcaaagaaagaacagttcacttgtcctcaagtgacaaagacagtggccaatcaaaagaaaatggtgtttgattcatcaaggacatcaacgatatgaactgaatatcatggaatgcttaaatcaattacttctcacaagcatgcagtttttcaaagataagagcacaactattagagtcatagctgaaataagcaagtaagcatgacataaatcaaggaaagatcatcaaccaaaaccacacaatcattgtttcacttaaactcaagtgtttaggcttattccatcataaacaaccaacacaagttccaacctttgcatttcatctcatatcatac

SEQ ID NO: 18583 - DNA, 508 bp, Glycine max
  unsure (1)..(508): unsure at all n locations
agcttaaagtgataatataaatttattttatgttttataaaagtaacagacaaagaaaaagctttttaatatctctcattgctagagtttttcccttgtatgtgagatgcttctctctccttgctagacgtgtttacatatcgttttgtgtggggtcgataccaacacttaacatggaactgaagaactttgaacgagttacgattactggcgacgatgatgatcttgtcatccccattgagaaccaagcggatgatactcctaacctgagtttgtgccttgtagggagattcttgactgatagaaccattcggattcctatcgtgagggtgaggatggcggaaatctggtagccaaagaaaggtgtctcgataaaggaggttgacaaaggaatctttntgttccaattctttcatcctattaacgtgaagaatgttctcaaaggaggcccttggtcctctgacaaacactttttgttgcttagcgtgatcagaggaaaggaaaaccc

SEQ ID NO: 18584 - DNA, 422 bp, Glycine max
tcgatcacaggaaactggtcatcgactcccagagagcataacctctgcgtactcagaaaaccttgagaaaactctcttgaaaaacaaaaatgtgctctgtttgtttttttgaaaaatcttttcaatacttcccttgtgaagtcttcttgaatccatcttctcttgaatcctgaaatcaaacttctcttgaatcttgaatcttcctgatttcttctcatgaaacttgaaattaatcttgatcttgaacttgttgactcaatcttgaaatcattctttgggcttcttcgcatcatctttgtcatcatcgaaactacttgaatcaactcgagtcatcatcatgaagcttgcttctacactattcgatgcgagaatacgctagatatgcaaaacagatgatggaactcaatttaccaagacggggg

SEQ ID NO: 18585 - DNA, 577 bp, Glycine max
  unsure (1)..(577): unsure at all n locations
ccttgtattaatcttgaaacaatacttaacttttgaatgtttgttgaagtaatcttgaaagcaacattgttggattattctttggcatcatcaaaatcatgtattcatacattcacaacaatattaggaaaaatcctttgaaatgactttcttttaataatcattggtttatttattttaagaaaccctcaaatattaatatttaaacttaatatatacaacttttatatataaatggtgtttatatttctttttatataaaaacattcttcatttattttaatttaaaagtataaaaattatatttttaaataataatatgttttatttatgttggtgccatccatatttatattcacctgtcaaatacagtgattggacaaatcatttgaaatgattttctttntataattattgattttttatcttanaagactcttagatatttaaatttaaattaatatatataactttatatgaaaggtgttaaattcattttatatcaaatattttatttttatttgataaagatatttcttaacattttgaatcttttatgcacaataacatattatat

SEQ ID NO: 18586 - DNA, 124 bp, Glycine max
attggaaatttttcctaaaattccaactggtggcaatttaatcctcctaattttttaaacccccaatttggattccctcctaaaaataagaattttattttcatttttcaaaatccagaacctt

SEQ ID NO: 18587 - DNA, 545 bp, Glycine max
agctttcttgagaaaacttccttgagattcttttttgagaaaacttccttgagaagctagagcttagctacacacacccctctcataactaagctcacctccttgagaagcttccttaagatgattcctaaagaagctagagcttagctacacatacctctttaatagctaagctcagctccttgagatgagaagctagagcttagctacacaccccctataatagctaagctcacccccatgagaaaatacatgaaaatacaaaaaaaatccctactacaaagactactcaaaatgccttgaaatacaaggctaaaaccctatactactagaatagccaaaatacaaggctcaaacgaaggaaaaacctattctaatatttacaaagattagcgggctcatacttagcccatgggctcgaaatctatcctaaggctcatgagaaccctagggccttcccttggatctctggcccaatctactaggagtcttctatccaatgcccttgcggagtaggattgcatcaagcagtgtcatccacgtct

SEQ ID NO: 18588 - DNA, 304 bp, Glycine max
acacttgaaactcagcttcgcatgagctcataaataaacaccaatgacttggtcttgaacaagccttcctaataggctaacttataggactaatccacaagagaccaaggagattgaatcccaagttaaggaattggtggacaacggttgcgtacaatagagccttagtacttgtgttttgactgggtggttggtgcccgaccatgattgaaccggagacacattggcgtattgagggccatcaacagacatactgttgaagtatagcccaccaacactatgcttgatgatatgcttgacgagt

SEQ ID NO: 18589 - DNA, 515 bp, Glycine max
agcttctcgcctcttccacctacattcgggaacttgcagccatcacaatggccgttaagaagtggcgccattatttgttaggccacccctttgtgattctcactgatcaccagagcttaagggacctaatgactcaggcagtgcagacaccggagcagcactagtatctcattcggttattgggattcgaatatagtatccagtatcggccaagacgcgagaatggggtagcagacgtgttatcgagggttgccggagaagaagctaaggcctccttgtacctactttcagtacctcaattctcctttattggtgaccttaagcatgagctagccacacacccagaatttttgacgttgctggagaaaatctgctaagacttagcagtagtctctgagtataaaattgagaatggattaattcttcacaagcagtgcatttggctttccatgggatctttcatcattcgcgtactcatggaggaatttcacagcacaccaacacgaggtcattat

SEQ ID NO: 18590 - DNA, 341 bp, Glycine max
tcattaatttaagcgctttaccttctcttacattgttgtgcctaccttaatatgatgcatgtatactctaacatgtcacgcgctaaacggatataacacgaatcgttccagtttacaccgattaaacttgctataggaccttgattggaccccctacggttcagagttcttggacgtgctcattgaccatgaattgaggtgaaatccagttcctccgagatctgccctgttaaaactgaggggtgatacctccaccatgaaattcttaccatgatcttgagtataatagaacctgcttaatcttacgtgacttgaacaaatattgtaaaattgtcataaaa

SEQ ID NO: 18591 - DNA, 553 bp, Glycine max
  unsure (1)..(553): unsure at all n locations
gagcttgctcgagaagcaccnatagtttttcttctattggtatgncnagccatggagatgcagcggaagataaaggagaacatgtgaaaggaggcgtcgtccactagggaataagtcatggaagaagaagcttcaccaccaagagagtgtcttgagtaaaaagcttacagaggaagcttcaatgaaggaagagaatgagagagagagagagagagagagaaagagagagagtggcgtgagaatgaacgaaagatacggagagaacttgaactctgaagtgtgtctcagaagactctcatttatcaaagttatcacaagtgttacacatgcttctatttatagcctagggagctttcttgagaagcttccttgatggaagctttcttaagaagctagtgttatacgcctccaatagctaagctcacccccatgacaaaatacatgaaggaagaaagctttcttgagaagctttcttgggagcaagtgtacacccctcctatagctaaactcacccncctaaaatacatgaagataaaaaaaagccctactacaa

SEQ ID NO: 18592 - DNA, 514 bp, Glycine max
tattgtacatcaattataaacatgggcgaaataaaactagactacttctggattgggaaactcgaagacaagtagcatgctaggttcaaaagcctgtgtttcacaaaaagatatccatcctgctccaattttagttgccttcctccaatgattgtaaacaatgcggcattccgcaacatcttccaaattcaaatgctcgaatcctttgtctttcatgaaataatacatgttgttgggtacatcctggtattaacaaaaattaatgtgagaaattagcaatttgataggtaaaggataattgaataattgaattttgtgttaagtcacttaccaagctgctgcgactaattttgtattcattgagaagcaccgcgaaagtcaccgagttcgacacttgatgatataatgagtgccactttgggaacgattttagagggctactggtgttgtatatggtgatcaaaaagacactttgaccattgtgggttaacgtgacttgatgatctccagtcaa

SEQ ID NO: 18593 - DNA, 289 bp, Glycine max
aaacctttatttctagaacgaaacgtggcagacaaaagtgggcagctaacttgaatgaccattattgtgcatgcagaaaagtttctgctcttcactatccatgctcacacatcattgctgcttggggatacgtgagcatgaattacctctgatatgtagatgttggaacacaaatgagcacatcctaaaagcttaatctgcgcaatggtggcctctagggaatgaaacggctatttctccttctgatgagccattgacacttatccctgatccaactacaattcgtgtg

SEQ ID NO: 18594 - DNA, 197 bp, Glycine max
ccctccttccttaataattcgggggccactcgatccagcagactagacactcctttcatctcaaattcactattaagtagtgacttcatcttttgaataaccaacaagttttgaactgctacgagcatgtcatctgcatagaagagtagataaatgtgggaaccatcctccacccttgctatgataaacacatgagt

SEQ ID NO: 18595 - DNA, 424 bp, Glycine max
agctttgcggatttggtcttcgcctttgtatgtatcgatgtgggtccgaaaagaggcaaatttgatcatactactatgaccactgagaaaactggggcaaatgaagacggtgagaaagagggagaaacccatgctgtgactgccattcctatacagccaagtttcccaccaacccaacagtgttattactcagccaataacaaacctcctccttacccaccacccagttatccacaaaggccatccctatatcaaccacaaagtctgtgtaccgcacgtccaatgacgaagaccacctttagcacaaaccagaaaaaaaaaaacaccaacaaaaaggaattttgcagcataaagcctgtatggttcaccccaaattccgctgtcatatgctaaacttgatcccatatctacttgataattcaat

SEQ ID NO: 18596 - DNA, 663 bp, Glycine max
  unsure (1)..(663): unsure at all n locations
gacctataaatctaagcttaggcagcgaacttcaataaatttgggaatatttcatttngtgattatagaggactctgaagcatgccttcatgtaatttggtagctggttaattgctgtaatatcccatctacattattaaaaaattagtaatcattgtttttaatttcttttcatctttccatataaaaaagatattttcatctaagaaaactcttaactaataattagtgattggcatatttacctgcaaatagcttttgtgaaaagatttaatttaatggccacctgaattagaagagatacaagaaacagttgttttaatttaatgatcacctgcaaacaaagacccatgtactccctgaaattaagcatgtactaagtgcattatttgtctgtcactttccatagaagtatatgcaaaggttaaataataaaaatagattgatcacatgcatcctcttagattattttttaagtaaattattagaggaaaaggtacataatgtggctttaccaatgaagagagagaacatgaatatcagtgggaagacaagctaggaaattgtcctctgcatccgtactgcggtttccaacaaaatactcaacaaaagaaagggaatgtgattacaaattgtccctttcttttacttatttattgatgc

SEQ ID NO: 18597 - DNA, 364 bp, Glycine max
agcttctcccccaattttctataaatagggggagaaggtagtgaaaaagggttcagccccttaggcacttctctctctttcgaatttgcttggaaaaattgtttccatgaagaaaatctaagccgaggtgcttccgaaacgtttccgtaacgtttccgtaaggaatttcgcgaaggtttcaaccgttcttcgacattctgcattcgatcttcatcgttcttcgatcttcaacgggtaagtaccttgaaccaagcttttcgattcattctatgtacccgtggtgcgccacattgtgtttcgtgtatttttagtctccgtgtatgtactttttatacccactttttacgtgcttaagccattttat

SEQ ID NO: 18598 - DNA, 400 bp, Glycine max
ctcaaaatctaggtatccaaaacccctctattaatacggattttcaaggtttgagaagtgaaaatgaaaatggggtaaatttggagcaaactctcacctcacacaagtctataacatcaatctaaacttgctcaaactggttttacgcctaaaattctgccgaatcaaaatttgactcctcaacacccaattttaccctagaaatggctcttgccttcactttggtcatatgtttttctctcttgcacagccctaactgtctcataagtcctaaatgacatttaaactacgattaactccctttaacctccaaataccactaaattcatagttggccttccaactctcaaagtctgactctttttccactcataacactacattcttactttctaaccct

SEQ ID NO: 18599 - DNA, 618 bp, Glycine max
cgcgagcttcatatgtctaggcttctgcactcaaagcaataattgtcattgctcccctctttgattttttctttgaatctagaattttttcttctggatgagtgttggaaatttcctttcttcttcatgatttatttgaacttcctgtacatgagggctacatcatcatttgtggatcgattagagttgactaatccatcaaattcccgcatatgcactttaagagttttagacaagcttgtttttccttctcttttgaagcttgtttcttcaaacttgaaggcagtggaattcttcttttgcatatgaacttcatggattctcagaacgcccaacatcttatcccatgcaaatttaaagatctcttaatgtttgaattgatgggtcttcggatcccacaccttgggaaaattttccaacaccttcatgtttacctgggccttagtgtacatatctgcaagagcttccatattgtgtagaagaacacgaagtcttccagacatatcatccacatactctctatccttcatggtgaagcttccataatgtttgggcagagtaatgactatcctcagtctgacatcctcagtgccttcatagcttatgcttaatgagtcc

SEQ ID NO: 18600 - DNA, 488 bp, Glycine max
tgctcgattgctccaggttgctacatggaagggcaaatgactgaatggtgggcagcaaaagaacccaaaccacaaacccctgcaacaggtaccgatttctgaatcaaggtcagctgggttaccaaggtaaccaatgcatccaagttgcccttcaagcttttaatctcaaatgatgcagctgagtttgtagctaccttatgcactcctctaatgactatggcatcatttctggcgctaaactgctgagagttggaggccatcttctcaattaaatttctggcttcagcaggagtcatgtcttcagggctccaccactggcagcatctatcatacttctctctatattactgagtccttcataaaaatattggagaagaagttgttctgaaatctgatggtgggggcaactggcacatagtttcttaaatctctcccagtactcatacatgctctctacactgagttgtctaatacctgagatatccttc

SEQ ID NO: 18601 - DNA, 537 bp, Glycine max
agctttggggctgaaaaaaaaaactatataacttcactcttgttctagtttagggccccccctctctccctcgcgggagactctctctctctctcctctctctcttctatttttcgtttttagttttagtctctcttctctttctcttttattttcgttttttttcaattccagttcagacttttagttttatcaataaaatttcattctctatttgattaatggaaggctaagtccgcagcgttgttttcccttgaggatcaagcacagttctctttgaggttctattattactgttaaattctgtttagtttttcctcttcactaattactttgaatttgttgcttttaattcatgcatgcttagtgcttgattaattgtctctgcgcttaatttacgttcatgcttaatgatcgtttatgagtaattggtgtatgtgatgcttaatcacataatgaatgccttatgttgaatttcgcttagtaatttaatttagggttggattaagtggttaaactgataaaggataaactctc

SEQ ID NO: 18602 - DNA, 538 bp, Glycine max
tgcttctacagaaggaagtaaggagagaggataaaaaattgaaagattttataggattgagcaaactgaggcaagaatggccgattgagcaatggtgagtgagaggttcagcaacggcgagcaatggtgagtcagacgaaaggcgatatcgaggttcaccgagggagcagctgaggtgcgcgcaatagccaactacgctaatatatttttggaaatttagggaaaaatgtaaacaacggtcctttagacgagacgtcgttgtctactttaatgttaattacaaaaatgccacattcctacattctaagacgggtgaacaagatcatctaagaatttgcgtcgttaaaattgcatatttttagttttaaagtcgttgtttaggaaaccgcctttaaaaagctatcattatttacaaaaatgccaccgcatcgcaatctacattagtccttgtataaccgtcgtaaagcagtgtctaaaaggccttttttctagtagtgcaagaaagaaggttgaccttacattcatgaacaatatcttg

SEQ ID NO: 18603 - DNA, 648 bp, Glycine max
  unsure (1)..(648): unsure at all n locations
agcttagaccttgcgctaagcgctcagtcttcttgctttattccgagcctgctcgctctaagtgcattgacccctgattggttggctgaatagttcagctaagcgcacatcactgcgttaagcccaacatcttcactgtaattgaatcttaatcagtgggcttagcgtggatgatgcgctaagcgccacttcttctttggaaaaattttattgtagtagcactaagcgcactatcctgaactaagccccaaatccattttggaatttgagctttcaagctgggcttagcggggcaagatgtgctaagcgccaatctcttactgtttttgatttcttggaagtgcgcttagcgcgctgttgtgcttaacctgaactactctctgtaagttgaagcttgatggtacactaagcctcacatctcaagctaagctcatattgcaaaaaattttgtgttgcagaaagtgcgcagcttgctgcgctaagcccctaatgctcactggactttacaancttaagttgggcttaatgcgaggttaggctaagcgcttgggtttttaaactcatacgccacgtgggcacactatgcgcagctgttcattaagtgcgccatacaaatttagtttttaaaaaacaaaggcaaggcacttt

SEQ ID NO: 18604 - DNA, 518 bp, Glycine max
  unsure (1)..(518): unsure at all n locations
ttgaaaattgttcctagcctttctctacaaaaaattcctaaagaacctanttgtgttcccactgaggttatcactacttcccctagagtgaggtagacatgtttgtcttatgatatgtagaaattcataaggatttactttctaaatgtaggttgggatatcaatggagtaaaagttttgcagcatgatctcttcaccaatgatgtcctttagactgaaatagtattcaacaagaaatcattgaagcaagagcttcttccattgatgccactgttttggtaactataaagcctctggaagatgttttacattttgtttccattcatctctagttcctaatattagggaagcttgggtggaaaaggttgtggagacaccatatatgacacctactacttctncacttttctttactcctcaattcactacttctatcagtgcctataaccagtgtggattcaatcctctatttgaaacatcaactgatgctgagttcaacagattaaagtctcaccttc

SEQ ID NO: 18605 - DNA, 455 bp, Glycine max
  unsure (1)..(455): unsure at all n locations
agcttgtgagattttatcattggtttttcnttantacaccagaatagatagttggaatcatcaagcttttctgaaatcgaaggaaaagattgatgtgaatgatgagaggaagcggacacagcaaaattgttttctgccattgatgaatccttctaagagattggacattatatcctccaggttctgagtctgtacgaaatgctgttggagttcttcaagagattggggcattgtcagttgatgaacaactcactcagctagggcagaagcttggctgtcttcctattcatccatcaacaggcagaatgcttattttttccatattgatgatatgtcttgatccagctttaactcttgcttgtgcattcgagtttaatgatccatttgtgcatcccattttacctgatgaaaagaagagagcttcagctgctagatctgagcttggttcttgtatg

SEQ ID NO: 18606 - DNA, 514 bp, Glycine max
agcttgcatttggaattgcgaaagccccacttcttctttaggattagtacctgacatctcaaacaaacaaatcaaacgtaacaagacaattatagttgctggttgaatacctcacccactcaagtgtatcacacaattatggcttttctctaatgaaacactcttgccttttaccactctaattccccttgagttcttaggcaattcaagagattatggccacaacaaagaacaattcaccaatatgtgtaaggtaaggctagacaaggaaaaggttaaccaagaaaaaggctaacaatgtttttaggcacaaatgaaggaaataaaattcagaatttaggaattcaagtaacaatccttcatgcaaccaatatattaccttaaagagattttttttttaaaagttcttcaagcatgaaccattcagcccaatttttttttttttttttaattttgcttatacgaaattctgcttctttttttttttataacaaagagatcaaaaggcttaact

SEQ ID NO: 18607 - DNA, 255 bp, Glycine max
aacaaacttaatggctgagtgtaactgaaattgttggccaccaaaagtcacccccaacagccaacaagtcagccaccatttggtctcccaaaaggctgatgcctaagttgccaattgggcccttattacaacttgaactaaagcccttttaattgattaacccaaaacatatatttggtcagccaactttacaaggattgggccattatttagacaaactaaacactctaaaattgaaataaagtggtgtcattt

SEQ ID NO: 18608 - DNA, 517 bp, Glycine max
  unsure (1)..(517): unsure at all n locations
agcttgtgcattcaatatcctgatgaggatgttcatatgttctcaagactggactaatacatttgttgcccaagtttcatgatcttgcaggtgaagatcctcataagcattttaaggagttccatattgttttttccaccatgaaaccccccgatgtccaggaagatcatatctttctaaaggcttttcctcattctttggagggagtggcgaaagattgactgtactaccttgctcccaggtccattaccagctgggatgaccttaagagggtgttcttggagaaattcttccctgcatctaggaccattgtcatcagaaaagatatttcacgcatcangcaagtggagagagcttgtatgagtactgggaaaaattcaagaaattgtgtgcaagttgtcctcaccaccagatttctgagtaactccttctacaatatttctatgagggacttagcaacatggagaagagtatgattgatgctgncagtggtggagctcttggtgatatgactctt

SEQ ID NO: 18609 - DNA, 352 bp, Glycine max
  unsure (1)..(352): unsure at all n locations
gagatgaggaagtgttgaagggtgaaaactnctgcttttacctttgaccacagagtggtacctggaaatatgtcgcgggggtcaggaaaccttggggacgtcaagtggggtgctattgcccaaaaccaagcttgaccaatcccgacccaacccgggcatagtcggtcagtgagaacctgtgatgtacctaaacaagcgagcctctggcagtcaacagataaaaggaaaacaagaccacaaagcaaggaggcttgtggtggctggccaactgtgaattttgtgtaatatgtggatggtggcctctggtaatcgattaccaagggggggtaatcgattacaaggcttaaaattg

SEQ ID NO: 18610 - DNA, 571 bp, Glycine max
  unsure (1)..(571): unsure at all n locations
agcttcttctccaccacccacgaccatttgtgttcactgcgagccgctgttgtttgccattgaacccccacaccaagaggaacactttaatcagagtggaatcttcaaaacttatctcgaggattcggtagagaacgaaacctccaatcttaccttcgcggttttctttaaggtaaccatgattctaagcccgctccttgttagtttgagcctctctttgggtctcttttgacttgggaaccattattggatgtttttatgcttcctttgaaaaaccatagagaatgagacattgtaaaagttatctttttaaaaacattgatgttattttcgtgaccttcactaaaccccggtcacattggcgttatcggaatttcaaaatgatggttcctttttgtagaatccgaaacacccctcagctctttatgtttgacagggagtattgactccgaatgtttgtcattactttgtttctgaaatctatattagatttccttcaatttggtatatanaaacttgcatttggactggacagggtgaatgagagagagacctctgagtgaccgaaaga

SEQ ID NO: 18611 - DNA, 560 bp, Glycine max
  unsure (1)..(560): unsure at all n locations
tcaagagatcatcccctcgacaatattattggtgatatctaatatgggtgacaactagacattctcttaaagatttatgcaataatatggcttttgtatctatgattgaacctaaaaatataaaagaagccataatagatgataactggatcattgccatgcaagaagaactgaatcaatttgaaagaaacaatgtgtagaaattagtagaaaaacctgaaaattatcctgtcataggaacaaaatgggtttttagaaataaattagatgaacatggtataattattggaaataaagctatgttagtagcaaaaaggtataatcaagaaaaggaatagactatgaagaaacatatgctcttgttgcaagattagaagccattagaatgctcttagcatatgcatccataatggattttaaactttatcaaatggatgttaagagtgctttttctaaatggcttaattcaagaagaggtatatgttgaacaacccnctggttttgaaattccggatacaccaaatcatgtttattaattacaaaatggctcttatggtttg

SEQ ID NO: 18612 - DNA, 497 bp, Glycine max
agcttagaccttgcgctaagcgctcaggcttattcttgatgtctagcctgctcgctctaagtgcattgacccctgattggttggctgaatagttcagctaagcgcacatcactgcgttaagcccaacatcttcactgtaattgaatcttaatcagtgggcttagcgtggatgatgcgctaagcgccacttcttctttggaaaaattttattgtagtagcactaagcgcactatcctgaactaagccccaaatccattttggaatttgagctttcaagctgggcttagcggggcaggatgtgctaagcgccaatctcttactgtttttgatttcttggaagtgcgcttagcgcgctgttgtgcttagcctgaactactctctggtagttgaagcttgatggtacactaagcctcacatcttaagctaagctcatattgcaaaaaaatttgtgttgcagaaagtgcgcaatttgctgcgctaaccctaaatgctcactg

SEQ ID NO: 18613 - DNA, 381 bp, Glycine max
ttttgttcccactgaggatatcactacttcccctatagtgacgtatacatgtttgtcttatgatatgtacaaattcataaggatttactttctaaatgtacgctgggatatcaatggagtaaaagttatgcagcatgatctcttcaccaatgatgtcctttagactgaaatagtactcaacaagaaatcattgaagcaagagcttcttccattgatgccactgctttggtaactataaagcctctggaagatgtttcacattttgtttccattcatctctagttcctaatattagggaagcttgggtggcaaacgttgtggatacaccatatatgacacctactacttctccactcttctttactcctcaattcactactc

SEQ ID NO: 18614 - DNA, 597 bp, Glycine max
agcttcatacatcagacccacttccaggtttgcgtgattctacttcacatggatttgatggggcctatgcatgttgaaagccttggaggaaagaggtttgcctatgttgttgtggatgatttctccagatttacctgggtcaactttatcagagagaaatcagaaacctttgaagtattcaaagagttgagtctaagacttcaaagagaaaaggattgtgtcatcaagagaatcaggagtgaccatggcagagaatttgaaaacagcaggttcactgaattctgcacatctgaaggcatcactcatgagttctctgcagccattacaccacaacagaatggcatagttgaaaggaaaaacaggactctgcaagaggctgctagggtcatgcttcatgccaaagaacttccctataatctctgggctgaagccatgaacacagcatgctacatccacaatagagtcacacttagaagaggcactccaaccatactgtatgaaatctggaaagggaggaagccaactgtcaagcactttcacatttttggaagtcatgttacatcttggcagatagagagcaaaggagaaagatggatc

SEQ ID NO: 18615 - DNA, 555 bp, Glycine max
aaactaagctttcgattattctatgtacccgtagtggtcccattttgttcttgcatgtttattctcgttttgtttactttttataccccctcttggcatgcttaagtcattttacttaagtcatttctcgcttaacctaaaaataaaataaatttccaccgatcgtttgaattgtattatccgttaacttcggttaaaatgaattccgaccgttcggtcgtgccgtaaccacgttggaaataagaaaaaaaagggtaaaataataatataataatcaaaaaaacgtcttttagtaaaataaagcggaaaataaatcggacgttttctctgtgggatttctcattcttaatcgaatcgactaataactaaagtgaaattaaggctaaaatcaactcgcctagtcaagctcgtccataaaaataggtttttgaagtttatcatttcaatttctcactaagtaaaatggatcattctcaaggtccaacgccttaaaatgatcaccttttaagtaaaaaaatcatcacttgataagcaagaactacgtatgtctgagtt

SEQ ID NO: 18616 - DNA, 267 bp, Glycine max
ttgaagagaatccttgtggaaccttcacccgacaaagacactgacaaaaacttatcttatcctttttggacaaagaatggcaagctgggggcaagttaatttttttcccatcacaccttggatgcaactgtgatcgtatgcccatatcaacttgatcttgacggggattctagccatccttcgccgtgccttgaatgttaaagagccgcccaatgacactgtcaccaacatttgtctgcacatgcataacatcaatacaatgtctaa

SEQ ID NO: 18617 - DNA, 786 bp, Glycine max
  unsure (1)..(786): unsure at all n locations
gaagtctnnnnntttattgaatcgatggacaacctgacactataaataccagcttcgctgcatgattcaagtggcaatgcggactctttcttancgtaggccacggctgggaccaataactttgttgtggggcaaaatgaagttatggatgtcggagaactttaggcacctgaaccgtgaccagacaattgtggctttggtgcaattttacaacagctaatctgaattaaaaaaaaaactttaaatcatgctcatgcgcccggcgggccggacagtctttggctcctctcaagcacttgtagatcaactcagacctaccttgtgctataaactacactcaccatccatgtgagagtcgctatcctcaggacccactctgacaaagacggttaatccaactgaacgtgggagatggatcgctacctataaaaaaacctgctcggtgttggatagcactggttaaatggtggaccagggcttcaacaacgcatgaacctgcccatacaagaacagtgatcatttatatttgtcagcagctgtgtggtgaatattcttccactgtcttgtttgcaaccatagccttgtgttgcttcgaaagacacaacctagtttttatttatatttaacaaacttataaagcgacctttaatgattagatgcttgaggtggaactactttgaagtgccgggtactggggacataggtaaaggccctgtcttaactcaatggtccttagggggtataacctgaagggcaccccatagagctctaaaggtaggggtgtgc

SEQ ID NO: 18618 - DNA, 412 bp, Glycine max
agcttctccctcttttccctataaatagggggtgagggaagaacaaaaacgttcaaccctcctggtatctgaggatcacttgaaattagtgaaaaaaatcatttccgtgaagaaaatccaagtcgaggtgcttccataacgcgtccgaaacgtttccgtgggtgatttcgtgaagattttccgccgtctttcgttcgttcttcgtcgttcttcggtcttcaaccggtaagttcccgaaatcgaacttttcaattcattctatgtacccttggtggtccccacttgtttcgcgtacttttattttcatttcgtctactttccgtatccacttttgacgtgctatagtcatttatttaagtcattctctcgcctattcaacaaataaaataaattcccactgtgcatttgaatt

SEQ ID NO: 18619 - DNA, 498 bp, Glycine max
cctttaatctaagctagttggtaaaggtagacacccttgagggtgtatccctgatgacctaaccttaggacctgaagtggtacaacaaaccattgagaaggtcaagttgatccaagagaggatgagaactacttagagtaggcaaaaaagttatcatgacaagaggaggaaagacttggaatttgaggttggtgatcatgtattcttgagagtcactccgtggactggggttggtcaagcattgaaatcccaaaaactcacacctcgttttattggttcttcctaattctcaaaagtgtcggtcctgtggcataccatattgcattacccctgtctctttctaatcttcacaatgtctttcatgtgattgatccatgacccatcttatgttatcgatttagtgacgtacaattgaaggataacttgacatatgaaaactttgcctttgatgatcgatgattggcaaacaatagctccttaaagggaaggagatttcat

SEQ ID NO: 18620 - DNA, 380 bp, Glycine max
agctttgattctatatgtgtgcattaatttaatggcttacgctgtcatcctatggctaacattgatttccttatgaaataggttctttttgcttttttagaagttatcctctctcgagcgcctaacccctaaaactgatttatgcatattttctttagatttttattaagagttaccctctgttgagcatctaacccgtattgtaaagatgagtattgcatgaaatataaataagaaaagacaataggatagaaaacaccttttacatttataaatatggagtacatcatacatctttttggctttttaggcctgtcagaccctaactaggggtttagcctctcatggacattgagcgtgttacattgaaatgggggtat

SEQ ID NO: 18621 - DNA, 281 bp, Glycine max
atcatgaatcatcaatatggcatttggtgattttggtaaaaaaatttaagaattatttataaaatttattatttagaacttaattgaaaaattaaaaaaatgagtacaaaggaatatggatatatttggtgtcaccaactcttggagctgcggctggcacttgggcctataatttcatcaggtacacaaataagttttgattctatatgtttcgacccttgatgggccatgatgttcttctagttgctaaaccctttttgcaccatttttaaatactgagt

SEQ ID NO: 18622 - DNA, 260 bp, Glycine max
agcttaggctaaattgggcttaaattcttttatgctgcttaagccgagtctagtcttacaagaaggatatgcggaataaacttagtttaagttagtctaaacctaagagggcccgtctaaatagggcctaatccaacaacagggatctgaagacgaagcttggattgattctgtctgacgagggatcgaagtttacttgtttgggctaccacatataacacatgagcttgattggctagagaaatatgtctatatgcata

SEQ ID NO: 18623 - DNA, 454 bp, Glycine max
catgcctggctcttactgcttgaccgggttagcctgtctatgactacaatgatgatctttgtattggtctacatatcatgcataattgctataaaagagggtgtcataacccacatcctaacattttatttctggtagccagactctatttggaggaatatggaaattgtggttaagttgaaatcattttcaaccatttggatttaacatgtgagataaaaagtcaatatttaatgacctcttaaacgaggattgatgatgcatttgaaatattaagtggtatagagagttacaggcggccccatctctactccagcggaaaacctgctgcgttaaaagttttgctaccattacccgaggaatcctgcacctttcttccgcttgctcaaaacgagctcgccacttgcggaattttattgtaacgaaaataacacgaggggtaacgtttgttacg

SEQ ID NO: 18624 - DNA, 225 bp, Glycine max
agctttataagcgcatgttggggagacgtaattatgtggtcgcgatatacgaagatgatgttccgagtacattggatttggtacgaccatgccctcctgatttccagctgggaaattggcgagtggaggaacgccccggcatttacgcaacgagcataatgtatacctttacggatgtaaaagctctatagccgggcctaggctttagagattttactttttgta

SEQ ID NO: 18625 - DNA, 622 bp, Glycine max
  unsure (1)..(622): unsure at all n locations
cgatgcctccttacgtgcacttgantctaagctntcatctctttacantaccnantnccaaaatcaatagtgtctttgaaatatctcaacacttttttgcctanaccanagtgtgtaaactnggtgcatgcatgaacctngaaagcaaattagtagagaatatcaaatttggtctaggttagtgccatcaaatacagaaggctaccaatcaaacttctatattaaagtatattagcctctgcctcaccatcatttcttgatagctctttcattaccagtgggctcgtaatgattacaattcttcaatctgaaatttttcagcaaatcaacaacatactttctncatangagaaagatngcatcattcaagctgatcacttncattctcanagatacttcatctcttcagatctgtcatttcaaaacttgcgcatgcactcttaaatttcaattcataacatctcacatgtacagagatatcacatagtgaacatgattctttcttgcacaccttaacnagagatgctcattgctctctgaatcatttangaggtgataatattgtcaactctaactgttcaccactaggttatatgcttacttgttatactgacatatctat

SEQ ID NO: 18626 - DNA, 315 bp, Glycine max
agctttggggtcgatggccccaatgacattttttcttttcatggaaaaaggccaaggggtggacatgactttcaaaagatgtggcggaacattgacattgtccgtgtacgcttgacatttatggcatttccttacatgggcgcagcaatcgctttccatagtgatcttcctggccatagcatgcccattggcatgtgtcccaaatgaacccccggggacttcctcaatcatgtagtttgcctccttggcatctacgcatcgcaagaaggtcatgttcgggtttcgttggtacaggaaggtaccactcacaaagaa

SEQ ID NO: 18627 - DNA, 456 bp, Glycine max
  unsure (1)..(456): unsure at all n locations
natatactcatgcttcacctagctctctatgaagtctaagaaagtcagtcaaagtgtaatattatgtgtaaatctgttaaccnagctgtagaagaactgtcttgatgtatacaatggctcattatctaagaagggggttgataagatacagaacattcccaataaattactcttttttaataacatcccctacataatactaaaacattaaataatttttagccaaatatacataataagagttacgaaaagaagcacttatatactgtcgcattctgtgctactcatctagcaccattaatttcctttttaatctttcagttaacccagcatctcttttcaatcttcacaaacctgcttatcttcaataagaagaaacatcatctatattcatgtgcagattttagtaactcataaaacttattttagtactttgctaacctacattttcaactt

SEQ ID NO: 18628 - DNA, 143 bp, Glycine max
agcttctaacttatacaagaagtaactctgataccacttgtagacagcgggctgagatatcttaaaaaagggggggtgaattaatatattccaaactgtttcccctaattaaaaatctatgtcactttgtactcaaattatga

SEQ ID NO: 18629 - DNA, 80 bp, Glycine max
gattcgtcctgagatcgaaaaaaaaataatgatagtagtgttagagcactcccaaaaagcctgtcacaaataatagctct

SEQ ID NO: 18630 - DNA, 729 bp, Glycine max
  unsure (1)..(729): unsure at all n locations
aaaattagacttgtagancngcgatgcttatagaagacctgccgcatgcatgctatctacatggtctcactggagcaggttgctttgtataaacgatcaaataggatagatgcccggtctacattattattactattgcgacgaaggtntgatgacaatcacctcctcatgaaaccacggtcgtttgtttgggtaaaagattgcaataattcttgataacatttctcaatgggaacttcattgaaataaccctcaccccgggacgcnagaagttggatctgtttcctgtgacaccctctagagggtgggggagtcacttccacctatactcacatggggtgcacgaaatagtttagaatgaataaagaacgacccttgatgggtaatgaggaagcgtaaggaggtagtcgcttctcccacagtttatttacatgggaggtcttttttgcaacaaaactaaccttcattattctctcctcgtaaacaaccatcacatcctcttatttgtaaaacgaccagttgtcgcccctccccccttcttgcgctctgggtttccccatctaactgactcttcgtctcgcgttttctctcatccctctcaatcttcgcctcccatccttctccatatgctacctccctctttcttctcctttcctctccctatcctctctcccccctacccttcaactctccttttctctcctttctcttccgctactacctagctgc

SEQ ID NO: 18631 - DNA, 464 bp, Glycine max
  unsure (1)..(464): unsure at all n locations
agccacgcgtttacgtagactttagaacacaanactagcttgcaacacgattcaacgtgacatcatatgttanggcataatgatgttatcctaacaagacaggcactgaggatatgaatttgacttcttgacgaggcgaccatcaactggatcgcaaactggactatcatcatattctttagtatctatatctgtttttcctggactacatattgcttcaaatatgtcatggatgactccatcgtattgccatgtagtattaccgttgctatgcgactcttcagattgttaaacaaagttatctggttttgtaacctttttataaagtactgttacctccagtgagcgttatttgaatgcaataaaaacaacaaaattttgttaagccccttgaaaactccttttaaaatattatacattgaaaatttgccagtagttaatttcaccaagctgtacgtattaaa

SEQ ID NO: 18632 - DNA, 545 bp, Glycine max
agcttgatcttttaagttactaccattatttacaaaaatcacatctcataaaaatgagataatagttgtactatagtaatatattgaagtttcttccaaacatcataacaagttgataattcactcgtttccattcatctctctcaataacaataatatcctctaccttgttagagagatgctcaaaaagaccttgactgacaaaccagacatcaatagtagtatatcaatccaagtaatatttgccattcaccataggggaatcaaccaattttttagccattgaaacaagtcactcaaaaaacagaaccaaagtgcaacagtaggctctaacagaggatgtatagcttccataatgcctaacaaggatgtctcctggaaatcgtttggttagtttgctcgttttaacactcttattaacactattgtcatcaaccaactacaacaaaatcaatcatttttttttacaaaaaaaaataaacatcaatttagtaacatgtgcaggcatagaaaccagcaagaatgaaaattaatttacctgtgca

SEQ ID NO: 18633 - DNA, 287 bp, Glycine max
  unsure (1)..(287): unsure at all n locations
ttaaaaataacactatctatcttcaatgtagctgaacanaatgattgtcatagacatgaccgatacaaattatgtgatgcacagaagaatctgttggtgggtgacttctaagaggaaataatgtcatgctttattgtcnggacatctgatacagggatagcatataccttgatgcaatgacatatnnccatctcggtatatccatncacttattcacagtaacatgaatgaaacanatatacacgtcaaagtaattncttaaaagcnaacatanatacataccttgg

SEQ ID NO: 18634 - DNA, 491 bp, Glycine max
  unsure (1)..(491): unsure at all n locations
agcttgtaggattatgggatacccatcatangtggtactaggtggcggtcgggcgatggtgcacaacaagttttccacgtccacaaatcgcgcataaacccaccatcccctgttgcccacctccaactgagctcacgtactcccacgtagctcatatcctcgtttctctcaacaccgggtccccatcaatcctcccaagcttccccaacatccaagtaactcaacattcaaacagcaaaaattatcacagccaaacaaaacagggcaaaggcataaaactctgcccaaaacaccaaccaaaatcacagcttttctcatttaaagaccccagtaataattccttcgttccacttcgttaaccgttggatcgactcgaaaagtttactggaagtctctagtacttaagcctacattgtgaccgttgggatctactagaanacatccagaactcattctgtactactctttccacagcccaccacacacaagca

SEQ ID NO: 18635 - DNA, 278 bp, Glycine max
agcttgctctaaatttacattgatgttattatttatgggaggaggatgtacgccgtttgtgctttaagagtaaaggcccagtggaaaaaataccttgtccaaggtttgcctacgcaagaggggccccgtagaagggcgcctcaataggttcccataaggaacggcctggccatagcctgcccattggctctgggtcccaaaagaacccccgtgggacgcctgatcatgggggaagcctccatggcctcttcgcatagcaagaagggcatgtctacgtt

SEQ ID NO: 18636 - DNA, 170 bp, Glycine max
taccccccaaggaagcaaggcacattttgttggggagagaatggcaacatgacaagaaagcaatccacaacgggctcacccatgaaaaaaccttcacccatggaagcaaaaagataaaacttgttcccttgacaccctcaaaagcggtcggggatcaagtacaaataaaa

SEQ ID NO: 18637 - DNA, 166 bp, Glycine max
agcacgccgcacacaaaatgaagttaatgtagtatgttattagacactaaggcatgagacagccaataggaacaaattattgtaaattaaactgagaaaccagacgagcttgttcacacattgcacattaaaacaatctatctaccatgacaaataaaactaacgc

SEQ ID NO: 18638 - DNA, 403 bp, Glycine max
aacattaaatagcaccgttcacctaactgagaccaaaaacaaaattcgacccgttggcttcaccacggtccctactacatatccgtcatgtcaaacttaataattttcggggggacatccttcaattttcagcagtaccaccatacagcctctcagaagatttaacgaagatcattgcaaacggctttgggttctccatggctaacctcaccaacaagaaaccttcagcttcctggctcacccctctgtactcatctatctccatcatccaccaaaagcaccatcaaaccaaggaacgacctgagatcaatatccagcccatacagatgattcctggtcaagaccctgttcctgaaaaactggatcccaaacgaacaccgggtgggaaagaccctgaaaaccc

SEQ ID NO: 18639 - DNA, 61 bp, Glycine max
tgccactgctataaagaataccggtttgatggcatcatattttgtttccctagatgctaag

SEQ ID NO: 18640 - DNA, 697 bp, Glycine max
ctattttttctttaaacattaagaaatgcaactctgaatggagatttcccaaccgaaaaccggggattaggtttcttttaaagttataacctcctcaaaagggtctcctgggttcacctcgcagcaggcccattaatgcccctgctctggatcggttttcaatacaacctttaccctttttcaaacccaccctttccaggttttggaaactctttgaaccttctttctcttcttttgacccaaaagccttttcaaggtttccggtttttctaaaccctcgaaacattggcgtatccatcctttccgtcttctcctcccttcgcacaaaaaaatccgccccgggctccccgcctgaatctcctctgggctgacgcatcaaccctttttccacacccaaaacggcgtccacgcgcctcgatttttctagcgcccccctctacccctggcctacaatcctccatcccctcttcgtccaaaactcgtcttcgtcgcgagccatctattccttccttcaacgcacctgcggtctcgtcctgcccactcctattaatcccttgtttctctccttacactccgacctagcctccgattccccctctgtcacacgaacagacgcggccctactaccgcacctctctcacgctactcgcctgtcctatgtgcaccacgccctcccctctgtactctcgtcatcgcc

SEQ ID NO: 18641 - DNA, 438 bp, Glycine max
ctaatacgtttcaaaatttttttatttaacacacaagaagatccgactccagtgtatacaaaataatcttattaaactaaagtattacctgttgagaattgcagatgatttggcccagagaaaatgaatgacaatgaggaagaggagaacattaggaacaagagacagaagagtataaccagatctttcaaacacaacccaaacagctagtgtgaccaacaatatccccacagtaaggttctttcgcctccacagtattaaatctgcaactgcgttgaagcatggcattgattcagcatagattcaaagatcatgatcaattaccaattcattattttcttctgagtctgacccatttcccattggtactaaatgcaaataaataactaaaacaaacaagcacaggcgcagcccatatagctatttcacagttaaaaa

SEQ ID NO: 18642 - DNA, 467 bp, Glycine max
  unsure (1)..(467): unsure at all n locations
agcttgagatgaggaagtgtgaaagggttatcagtttgaaaaactgaggggcaagctgggcatttgtctgctagaagaattatagcagctactggtatctgaacgtgctcaaacgtctcacttaacattaatagcacgttcactactgagccaaaacaaattcgaccgttgcttcacacgttcctctacattcctcattcaaacttatattttcgtggtaatctcattttcagcataccccaacagctctcagagatttacgaaatcattccaaacgctctgcttctccatggctacctcaccaaaagaaacttcagctcctggttcaccctctgtaccatcatctncatcatccaccaaagcaccatcaaaccaggaacgacctgaattcaatatccagcccatacagatgattcctggtcaagcccctgttcctgaaaaactggttcccaaacgacaacagggag

SEQ ID NO: 18643 - DNA, 213 bp, Glycine max
catcggaagaatggtcctgattcccttccatttcatttttctttggggaaccttgactattaaccccagggaataaagatatagatgtatatatatatacatatctatatatatctatatatatattccctacgtacaaacatatattaacgccttttattatagtactaaatgagaaaggcttatgctctatattttctgagaatcatgcgc

SEQ ID NO: 18644 - DNA, 361 bp, Glycine max
agcttcacagtcaagcactaagctttcgtatttattctgatttagccagtttggataaatttttgaataattacttatagtagaagaaaataaaatgaattgaacttcacttctcttgtaagttaaaatcaacttaagcacttcgacttctataaaagttctctcatctgacttctccgaaaagctgagatatattatgttttctcttacatgctataagggcttattgagaactttatctaaattgatccatagtatttaattaagttgttgatgcaatcctaccccgcaagggcattggctagaagactccaagtagatttggctacagatccaaggaatggctcttagggagacggcc

SEQ ID NO: 18645 - DNA, 442 bp, Glycine max
  unsure (1)..(442): unsure at all n locations
ngtctctcgtcatcaccagctgtagtctacctgaacaacataaacagaactttttgttaacttcaatctacgaacgtttgagccctactggatgtttacgaacattttcagcaattttaagaagagaaggctaaggctgaccctttacttactttccctattattaaatgtgggagctgctccactccccagcagcaggtgttctcaaacacagtttggagatctatgggccaatggctgtgtattacccctttacagacaccctgctttttgtatcttttgaagtacgactacaatttacatctgtttttccgagttagaccttgatatatatcctttatacgatgtcgaccctattcacagctctttatcgggtcagactctgatgctatattttttctcatcttatacatgaattggcaccttctactataatttttcg

SEQ ID NO: 18646 - DNA, 172 bp, Glycine max
ttgactttttcaaattggatttaaacctttctaaaagttataactcttctaaacggtcctcttggctaaacatgaagaagctataaacgccaggctctggtttgcttttcaatacacttttacacttattcaatccaccctttacaagtgttgaaactctttgaacttcttc

SEQ ID NO: 18647 - DNA, 406 bp, Glycine max
agtattacctggtgagaaatgcagatgatttgggccagagaaaaagaatgatcgtggggaggaggagaacattggaaacaagagacagaagagtataaccagatcttttaaacacaagccaaacagttagtgtgaccaacaatatccccacagtaaggttcttccgcctccacagtattaaatctgcaactgcgttgaagcatggcattgattcaacatagattcaaagatcatgatcaattaccaattcattattttcttctgattctgaccccatttccattggtactaaatgcaacataataactaaaacaaacaagcacaggcgcagcccatatagctattccacagttaaaaacaggtcccaaatggacataaacaacacaccaagggaaataaaagaaaa

SEQ ID NO: 18648 - DNA, 283 bp, Glycine max
tttctctcaaggggtgaggtgctgaggcttaacatcatggctttatgcattgtgacactggccatgaacaaggtttaatacacctctctcacttgtttcggcccttcacgtgatgttgagactttgcacaatgctcttgttattgcaactacggagcacaatgcttcatccgtctgaaaagtattacctattacgcagtgtcaaaatgtgtgttgtgttgttctatatgtacatgagagtctcctgtccataaatcctccttcactagaatatctcttctgtg

SEQ ID NO: 18649 - DNA, 756 bp, Glycine max
  unsure (1)..(756): unsure at all n locations
atcattatntcttgtagnaacnncncgacgctctagagaagaccagccggcatgccagcctggnattatgaattggacccagcctttttttttcttaaaccttagggcacggctgtggtttccccaaaacaccaacccatcactgaacggcaatcgctacgcgcacaatcccgtcacggaacgtcccaaaacctgcactattgattgctatgcacttgcttccggaggtgaaccggacttttaccatcaccattacgcccaagggtatggaggaaattgccgctgagcctaccccgatcgtgtttaacagaatagcgaaggggtaccaaagggtctgttgcacaatggttaccttcacaaaagaatcccttgctcccgggtgcccctttggaccaatatttcccttcaccccccaaagcccctttaaaccagaacgaccctggatttaaattcccccccattccaaagattcctgggccaaccccctgttcccaaaaactggtccccaaaccaccacgggaggtgagaatttctggaacccctaccctgtccacaggccttagtggactgacccctccatagggttcataacccccctcttcctttgacccactcacaagaaagcgtcccagcccccgtaccgaccaacaagaactccaaccatcccataccccactatgcagatctcactctttctcccaacggactagtccctcctcgtatccaatggtcccctccttcacggcacccccttcc

SEQ ID NO: 18650 - DNA, 172 bp, Glycine max
  unsure (1)..(172): unsure at all n locations
tatagtagtattatatataatatgaagatcagtacaagtggtattgttatatatacaacccagcacaatactntgcanagctatggtgacctaatactagcaatacatcaagaatatgtgaccataggttngatcgcaagctatgcacccaaacacagaaaggctatatgct

SEQ ID NO: 18651 - DNA, 561 bp, Glycine max
  unsure (1)..(561): unsure at all n locations
agcttgcaatgaaagatattgngtatgttttatgtctggtgncaatctagacacacaaaccaaggccataattcaaaataggtaagatagaaatgatgatagtcattggcacaaacattgacttctgcaactgctactaagcttgcaatcaaagatattgtatatatagtaattaactttccattcagcaacacaaatttgntttatttgtacgcttaaatttgttagattgcctattcaatttgaaatgtcaaatttctatcttacatcttttatttggacaatatgtaacaaaagatgcaacaaagaagtttactaaaccttatattagagatggacatcagttctttatatattgcttgtctggcgcaccacaaattattttttgatttcttttgtccaaagattagacttgttttatatagttctcgcttgctcaagttaaaatccgtattatacttgcgtaagccatcaatgaacttaaaaatgacaattgaaatacaacacatgattttaggcaagcagtgatagctgaaaaaaatgaagatgtgagaatgattg

SEQ ID NO: 18652 - DNA, 658 bp, Glycine max
  unsure (1)..(658): unsure at all n locations
cgctagtgctaccttacgtgactctcanactaagctgccatcgtgttgataaagaagagaggatggtagcctnggttttcaatatttatctatacatcaaggacanngaatacccgcttgaggcctctaacaatgacaagangatattactgcggttggcngccaagttctatctgaagtgggatgttctatataaaagaaaacatgatatggtatcgctctggtgtgtgaatgtagatgaggccgagcagatactacagangtgcatgaacgattcttntgcacccatgccaatgggcatgccatggctcgaatgaatctaagagcctggtgttactgtatcaccatcgagaaatattgttgtgttcacgtcagganatgccattagtgccaaacctttgcagataactgttatgctccncctgacccatgaatgtgttgtcaatgccatgcttgtctcgatgtggatgataacatntattgggctatcanacgctacgctcctaatggccttctttcatctaangtacattgtgtactcaccactcggtgcggttccatctatctataccaactcgatggtgctgtgctatcatacatacgncatacttactcatnttgatgtctgtaaaattcctcctatcatctacctgcttcg

SEQ ID NO: 18653 - DNA, 281 bp, Glycine max
agaccacctgcatggctgcaagctagttgattgaggattgttacggattcttcggagaggcacgcacgcgacaagctgctgctgctgctactgctactatactctgctattctaggaagggaactcagttcacttatgctttatacaaaattattttgtgcttaaaattaaaaatatttttttattcggtttaggcgaaatcatatatttttaaacatttatcttaattttctatgctgtctgatccttagctttataaaaattatccctttattttaaaa

SEQ ID NO: 18654 - DNA, 525 bp, Glycine max
  unsure (1)..(525): unsure at all n locations
naataattgcatacngttcngcancntctgcantctcgagctatagatgatcntccatntatngagacatctattagtaagcacaataatttagatgtcattatatatgtatatgatgacagaaagctaaagtcatagattattaattctcacatgggtggtgtcaatgtgatggagagacacgtttgaaaatacaaggagctaagtgggacatcatatatacatacctctgtgtaagtctggacttgctgtcaaaaaactaagatataagtggtgagaagcattttctcttgtgtatatgtaaaaaagctttgctctaatgtggattacaaatgggttgcacggcctttttacttctctttttagatagcctcatttttcataaatgttttgtctatgccgatattacctaattcgatcgtcactcgccctaacaagttcggtgcttcttgcgactcttacccctgtatcatctgtcatttgtcttccacaaattacctctggcttactttagaaaacacaatc

SEQ ID NO: 18655 - DNA, 157 bp, Glycine max
aaaaggatgccccacatttatttcatgacacaaatggcaaaatgatgatttggaaaccttatgccaaaatgggcatgcctgcacctatgcggacacttaagtggcaaaattttatgggcatgggatgcctaggctcaagaatcaatttcctcatttt

SEQ ID NO: 18656 - DNA, 485 bp, Glycine max
  unsure (1)..(485): unsure at all n locations
accccgttgtgaattaagctttganggaccaacanactaagctctctatgtgcgggcggcttcttacatctgtctcaaccgactttatatgtcttcttccgcagctcttttatgttgctgatggctatacctaaccaattccacgatacttggtttatagtcagtatccgcgtgtttttctaaccatccggctataccgtcccaacatactggccatattccctgatcgacaattgctgccaaaggattcacgtgaatgctacactaaagctgaagcattctacatctttcgttcaatagctgagaggcactacaaaattcttgctaacaaacaggcccttctcaattactttgtgacgtaagacactcattgtgtcatgcctcaagcgtttgggataatcatttgaagactaaggaggctttctggaacacttctactatcggctcagtaacaatactgatattgattatatctcaacgtttct

SEQ ID NO: 18657 - DNA, 754 bp, Glycine max
  unsure (1)..(754): unsure at all n locations
nggtggacgtactttgaccaccccggganncgaaaagccggccggcaggcatggcaagccctggcctcattagagagtattttttgtttttngngcgccacgccaccacacccaaagggcaggtggcccttanaaccaatccccccgagccaccaaaagaagggggagagagagcccccattatacttaagaagtccgcgtcaagacactcttctatgcgcatgaatagggttagaatgggagaaaagcccccccacccctactcatggtgggttgaaccgcccgctaacaattggtggaacgcctattcactttgaaaggtccaattactatccgacatcctttatttggacaaaatgtaccaaaagaagccacaaagaagtgtactcaaccttatattagagacgggcatcgatccttaaatattgcttggctggcgccccaccaattattttttcgatcctttcgtcccaagaataaacctggtttatatagtcctcgcttgctccagttaaaaacgggattatacctgcggaagccccccatggacctaaaaacgacacttgaaataccccacacgattttaggcaagcaccggtaacccgaaaaaaggggcttggaataagaatgccctctaattcaaacggaatttttcctgtacccatgataaatgcgtgctcacccctctctaacaacaaacatgaccccactctacaaagcggattctctacaaccccaccggtccatacccccg

SEQ ID NO: 18658 - DNA, 608 bp, Glycine max
  unsure (1)..(608): unsure at all n locations
ngcctcaaatgatgacatttcangtgancntcagnatactgaagcatgagtacacagttttcccatctggagggcttaacatcacactaacatatgatanattttnctacagatgcatcagcttagctaaaatatgctacacaatatgaaaataagagagntagaagccgcaggtttcacacgacctcacttacctgatgcancatgagtattatattatacaaatcattcaactctactactctntaatcagacagcggtacatggtcgcattcactaaaggaagtgttcttgaaatctaagataatttctaccgatgagattataaagtctccagattgatgcacccttatttncatacataaatgcattntcagcattggatggatgatatgtcttaacaggaacacacacattatccagcctattatatgtacaataaatgacgctgtgtggatataaatgtctaatgagtggacatagaactctaaacgcatgctacactcacatatcgacatcagctggtagaaatttattttatcacacagtgatcattccggagatgtactaacaagatgtcgattagataacactatgaatgatgctcc

SEQ ID NO: 18659 - DNA, 164 bp, Glycine max
  unsure (1)..(164): unsure at all n locations
agcttgtgcaaaatcaaaacactcctaacaactanctttaacatgccgtttctttctttacccactcctcacgtttggtnttttanggaaaaacaccataactaaacgcgccggaagggatccctatcgcaccagatcccaatatagaacgatgggggatcaag

SEQ ID NO: 18660 - DNA, 555 bp, Glycine max
agcttatgaatgatatgagtccaaactcatttgttattttcatttctaaatataaattattatccatactttatttatttatttattttataaaaaaacatttaatgtgaatttaattaattaaaacacatcacttaataaatcattaaaatttatacctgaattatatttttgtattaaattaaataatctaataatgaaggaaaaatccctcgagaaaaacataatttgtagaaatgaaccactcctctcacattaaagttctaccaacacatgtatggggcgtgtacagatattgtttttatcaagcgtatgagaatggttctatagtacccttttgagatcctatccattgttatccatattgatgatccatttttgtgttcaagagctactcatattttttatactaataataggtataattttatttgaataaaatactcatacaatgtttaatggtttttaaaatactttttaatgtataatataaaattataaaaggaccttcggcttgttggattttataaaaaatattttattcttctttttaaa

SEQ ID NO: 18661 - DNA, 654 bp, Glycine max
agcttatttttgtggacgagcttgactatgtttgttgattttagccttagtttcactttaggtattaatcaattcgattaagaatgagaaatcccaaagagaaaacgtccgattgattttccgctttattttactaaaagatgtttttttgattattatattatttttttacctcttttttgatttccaacgtggttacggcacgaccgaacggtcggaatttattttaaccgaagtttacggataatacaattcaaacgttcggtggaaatttattttatttttaagttaagtgagaaatgacttaagtaaaatggcttaagcacgtcaagagggggtataaaaagttaacaaaacgagaataaaaatgcacgaaacacaatgtggaccactacgggtacatagaatgaatcgaaaagcttggttcgaggtccttacccgttgaagatcgaagaacgatgaagaacgattgaagaacgtcgaaaaccggttgaattttttcgaaattccttagggaaaacgttcccgaacgtttcggaaccccttggttagattttttcaccggaacaattttccaagcaattccaaaaagaagaaatgcctaagggctccacccttccttttgctttcttccctttttaaccaagaaggggg

SEQ ID NO: 18662 - DNA, 451 bp, Glycine max
  unsure (1)..(451): unsure at all n locations
ccctgctcatgaggctagaactcgctgtgacagggaccataatgggctggggcgcngcaggtattttttttactccaaggcctaaccactcctttgccactcattgagtacgtcttcactgcctatatctgtttctcacaccggtccctcatcctccagcttccacatcaagtatcacattaaacgtcagctttcagcagcaaacaagcaagagaaacttgctaaaccaccaatacagttttactgagaccatacattttcatcattgtacgtgatgactcaattctgagcttgtcatacctctggacgtggacttagaaatcaactattgctatttccagcaccccagattttgcaagtaaccgtgccattgcaaaattgtagtgcgatgaacacttcttatcactgcaatatcacagcgaatgtatattaccaacacctaactacctag

SEQ ID NO: 18663 - DNA, 311 bp, Glycine max
agctttgctgcaaccagatttgttgaataaattatacaaaatatgatctattaatataacaaacatgacagcaaaaataaatatgaaaagaaatggtgaaacaaataataatgtacctaaaagtaatatcttaagaagttccaacactagtagtccaaacacatgcaattccaacacttggagtcccagtattagcattatttaaagctaaaccaagcaattctaaaacttttgatcggttggattcgattttagcccaaatgcataaatgacccaattcaaactgttcggattggattgagtcaatttgg

SEQ ID NO: 18664 - DNA, 459 bp, Glycine max
catgctctcgtgcaagcactaactcctggctgatgatatcctgccctttgactgagatgatgtttttgttctgacctatcagttatctcttctccttgtctatgttgatagagcatctcattaagaaatttgttcaaaaattctcaattggggatatcggtgaagctgtatggtagaaagagcactcacacatcatttataacagcagtatgttttttttaaaaacttcgtaaaaaatggtggctcataaaaaaaaactatgcgaagcagtataactgataaataaatgtatcttgtaagctttaaacaaattgctctaaaactaattgtgaccccctattcaactagaagctaaattgtgggtctgttgtaataataccatataacttatgtcttgaagaccaacactttataacaccgagatccagtctcttgtttccctacatcatttctctcccc

SEQ ID NO: 18665 - DNA, 348 bp, Glycine max
  unsure (1)..(348): unsure at all n locations
agcttctcccccaattttctataaanagtggngtagaagcgaagcgaaaaagggttcatccccttaggcacttttctctctttcgaattggcttggaaaaattatttccgtgaagaaaatctaagccgaggcgcttccgaaacgtttccgtaaggaatttcgcgaaggtttcgaccgttcttcgacgttcttctttcgttcttcgatcttcaacgggtaagcacctcgaaccaagattttcgattcattctatgtacccgtggtggcccacattgcgtggcgcgtatacttattctggttcatttactttttatacccccttttgacgcgccccagccattatactaa

SEQ ID NO: 18666 - DNA, 752 bp, Glycine max
  unsure (1)..(752): unsure at all n locations
cgttgggactgtagatngcaaagcgccccnaagagaccacccgcccgcaagccagccgagggacatgaagaagacgcatttttntttttgaaccccccgggagccagggggagggggaggactagggangcacccaccccccccacagcaacccgcaacgaggaaccaacnaagcaacgcgcgggaccggaacaaaggcaggaacaagcanacgcggacccacaccgaggcacgaacaaagaggaacccaggaaagaaggaaaaaagcccccgagaaacacaaacggggaagaaaagaaccactccgcgcacaagaacgcccaaccacacgagaacggggggcgcccacaaagcgaccccaccaagcggacgaaaaaggctcaagagcaccccggcgagaaccgagacaagggaaaccctagagacgacccaccgccggcgccacgagccacccacaccgcccagaccgagaaaaggcgccaatcgaccccggacaaccacccgcccaccgcgaaacggccgcacacaaaaccgagccacgggcagaaagaaccacggaacacagcgcccaaccgcacgggcggccacccagcccaacaacacgggcgaaggcacgcccagcagacacaagcggcgaccccccacccaaccggaccaccgaccggcaacgaacgcagcgcccacaccccccaacccgaccaccccgacggcgcgccaggcaagcgccgcccacagccaccgcgaccccacgc

SEQ ID NO: 18667 - DNA, 324 bp, Glycine max
  unsure (1)..(324): unsure at all n locations
agctttaattagcgaaacaaaaaatgggtangattctaaacagaaacaaagtaaatatataacagagtgctttttgatacttaattaacatgggaaatattcgtgtatctgaccaagagaaggaagagattacatttatgcattagtcaaaagggaaggagatgaaatgacaaaagcaagggaaaaaaatatagagactttgtttaattatcatataaatcagtaattgtacttctagtttctgtttaaccatatataggtggtctatatcattcacatcaaattttgcgttaaaggaaattatcatgactataaggatatata

SEQ ID NO: 18668 - DNA, 479 bp, Glycine max
agcttgcacgaaaattctcaaaggatctttgtttttatatcttgatgtctcaagcttcaaggaatgaaaaagaaatttggaacaaaaaatgagagctttgcacaaaatgatgaggaaacaagaagaggaagaaaattaagagtctcttaccaaagctttgagggaagaaacctcaagaacgcttgtatgaaatttggaagaagaaaaaaaaatggagtcctttctctcccttgaagaactcgtgcaaatgatggagaacgaagattccaagtttgacttttttgaaaaaatgaagatataagaattaaggctagtgagaaaatcaattggacaacaagaatgacccttgcctaggccatgctcaacgtgcccaaggctaccataaatgggtattttagcttttgaattttttaccagaaatggctaaagtagacttaagcaaaaaatggtaaaagttattttttgctaaacgggtaaat

SEQ ID NO: 18669 - DNA, 187 bp, Glycine max
ttgtcggtgggttgattgaagtaacgtggttacttttgaacaagaacaaggcaggatgtgtgtgtgatgacttaaatatgtttgtgcacgtcttgaaggttgaccattatttaataaacaagctcctttctcttggtgttatgaaattaaattttgatttctcaatatgagaattataataattttt

SEQ ID NO: 18670 - DNA, 666 bp, Glycine max
acttctttaacctcagaaccaaaaccacccccaccgtacctttacccacctctccacacacaaaccaacccgggggggggaaaacaccctaatctaaaagggtaaaccctcaaaacaaaaaaaaaaaaccgcgccttttcttcaaaaaggggtggtgcccaaaacacacaatacattcctccaccaatccaacaacaacaatagccctagaaacacccaacaggtgaaggtcctccacaaccttctctagaagaacttgtgaggaaaatgattatgcacaccacgctttttaaccaaaacaaacatctcctccattcagaagctcaaccaattagaggccaccattcggttccacaactgaaacaaacaccctcccaaaattttgacaagctgtccttccaagctggccaaacacaaaaaatgctactccctcttatctcagctcaaaataacaaggtaaagacctcatcccaaaacatccttcctcttttctaaccgacccacccatctatctttcaatcaaacacatgtctcccgcctcaacctcctcaccacctcagcacctcttcactccactcctctttctcctcacccgctatctattacctccccctctatctccatataccaaccacctcacctcccacaaccaaccctacccacctc

SEQ ID NO: 18671 - DNA, 221 bp, Glycine max
agctggaaactgacaaaggatttttttctaagttacgagggaggcacctgagagaacggatttatcgttgacaaacaaaccatatgtaaaatgttaatatctccaatttctacagcgtgagttagtgcacttatgatgaaccttcacttagtaactcacaagagtgatgacctatgtggtcaacttgggtatttatgcatcatagctttttattttaatgg

SEQ ID NO: 18672 - DNA, 290 bp, Glycine max
  unsure (1)..(290): unsure at all n locations
ctgcaagcttcactattactttgattttgttttttgttgcgggnttcattagtataataaaagcttctatattttgcatctaagatcacacaagatttctgccggccgtctgaatgagaactttatagaacacccttttcgaattttaacgaggcaaccgtgtgagaaactcgcctgccggaatatgcagattgtgctaatagactgaaaaacagcttcattggcccacgtatcccggtttagcttcccaaagccaaccaaatattataagttggccttccacaaaaaaa

SEQ ID NO: 18673 - DNA, 281 bp, Glycine max
agctggtctcgaccagtttcactggcattgcttattttatttattacaagcctggaatgagctgatcagtaatgaatctgctcagaccccccatagagaacttcttatgtggcacaattgaaggagatttggattattcattagagtcatatggttggaaaccttcagcgatggtctgttccatgttgcttattactccctcatctgtgcacagctcttggactggaagttaatagattttgattatggggtcactctactcttcgtaatgtatgtttata

SEQ ID NO: 18674 - DNA, 246 bp, Glycine max
  unsure (1)..(246): unsure at all n locations
agcttgagaatggaggattgccttgaggtttttcttttttgcaagcaaggaacacaacgccaaactcaaaaatggaggaacacaagaaagacaacgccactnaatcatggggctccgaaaaaaggtaagaatggaggaattgcttgacggtccactcttatgccgccatggaacgccggggccatactcaaaagtggaggaccccacgaacacgcctaagcaatagcactcacgcggccccaaaaa

SEQ ID NO: 18675 - DNA, 329 bp, Glycine max
aacgctggttctacctcaaaaccccttgaactacttcacattgaattatttaatccctctagaactatgaatttaagcgtaaattactatggcttagcaatagtggatgattactcaaggttcacatggactttgtttttgaaaacaaaaaatgaagcttttgaggcttttcgcaaacttgccaagatgattcaaaatgaaaaaggtcttaacattgtttcacttggaagtgatcatggaggtgaatttcaaaatgagtccttttaaaacttttgagaagaaaatggaattcaccacaatttttctgcccaagaacacctcaacagaat

SEQ ID NO: 18676 - DNA, 434 bp, Glycine max
  unsure (1)..(434): unsure at all n locations
cttagagcacctgcagctgcagctaacgtacaagtgccattngagatttgttttaaataataaatacaatttttttaagaaagtgaataattctgcaaatatatctactgttataagtgaccatgccaataaaattttgaaaatagaaaataactaaccaccagtattcaagtcaaccgagtaagaaactgacctgccagaatatgcaggttgtactaatagtctgagaaacagcttcattggcccacgtatcccggttaagcttcacaaagcaaacaaaatattataagtgtgcattccacanaaaaaaaaaaaatattataagtgctaatgcttaagcaaatcaagagaaatgtaaatagagcaccaagaatataataccatatgcgagctgaattccttggtagattgtatgttcaccaacaaccatttgt

SEQ ID NO: 18677 - DNA, 929 bp, Glycine max
  unsure (1)..(929): unsure at all n locations
ggcaaaaagacgaggaagtagagaacgagaagtagcttagatgagcaaacaacatacagaannnnnnnnanaagagcgaaaaaananaagactagcctccgaagaccggcaannnanaaaaacccgggggaaggaagaaaaaggggtaaaagaggaaanaanattttttgaagtgaggaggagaaaaaggggggggggagaggaaaagggaagcaccccccacagaaacaaacccagggaggggggggaaaaaccgacaagggaaaaaggggaaaccgacggacaaaacaagaacgaggaaacgaacccgcggaaggaaacaaagcgcgaggggcggaggaaggagagcggagacaaacgcaacaaggaaagtgaaagagccggcaggaagaaaacaaggacagcagagaagaaagaggggaaaaaaagaaagcgggacacgaccaccacacaagggagacaaagaagaccaaaaacaaaccgcaccatagaacggaaaaacaaggggaaaagaagaacgcgaagggacggaaaaaaaggaaccggagggggagaagggaagacaagaagcgaccgaccagcgggcggcgaagaaacagaggggccggaaaagaaacagacaggcaaaggcgaaaagaggaaagaagaggaggaaaacgagcaagcggaaggaagcgacacgacgggaggcgaagaaagcaaggaacaacgagagaaaaggaagaacacaggagggagaccgacagaaaaacaaagacggaaagaaaaggcgggaagaaacacaagagagaccagcgacacgagaaacgaaacgagacgaaacagaaagcaagcaaagcaagaaacgcaccagggcgcaaaacaaaaaacagacgcagacaggaacaaaaacgaagctaaaatggaaagagaagggacaaacacaaaag

SEQ ID NO: 18678 - DNA, 209 bp, Glycine max
  unsure (1)..(209): unsure at all n locations
agctttgccgatttagttctagccgacgatgngatcgaaataggcctaaaaaggaggcaaatttgattacgctgcttcgatgaattctggttataggagacctaaggcgaatgatgggaataagaaggagggagaaacccatgttgtggttgccgttcttgcatgggtgaattttccatttacccaccaatatccttactcgggccata

SEQ ID NO: 18679 - DNA, 658 bp, Glycine max
agaccccttttgagcctcgactgcctctccttggaaagaaacacactactagcctttcacgaaaaaccccgatatcaacgcatactataaggagactcgagctattgaacagttctggcaataaaagaggggggtgtttattaaaactcactcggatgccccagaggcgaacatcaaacatcgcgacgctcgaaaataaaaaacggagcctatcaggaaatccctagggacatatcatggaggacggaaatcccatgcaagccattacatatggagacgcacgaaattgaaccacggaagatctcgacacaatcacacgggcataaattttaccccggaagaccgattcaaggcccatgaaatatacggacccctcaaaattgaaccaaccgaagcgcgtcaacaaaattaaaaggggccaaaattttcactcgggagggccaatcccgcgcatcatataatccagaccccgcaaaatagaacaacgaaacctcccaaaaatactaaagagtataactttttcccccggagggcccattcaagcgcaatatcatttggcaccccccaaattgaaccaccggtctcctccggaaaaatcaatggcacttaaccttatcaagaggggccccctcttggacacacataccgagacccttgc

SEQ ID NO: 18680 - DNA, 271 bp, Glycine max
  unsure (1)..(271): unsure at all n locations
agcttatcagaaggggaatggtaatacatcccttcaagctganactaagaaggtggcacagagcctcttgaactacatcacattgatctatttaaaccctgtaaaactatgagctaatgcgtaaattactatggcttaacaatagtggatgattactccaggttcacatggactctctttttgaaaacaaaaaacgaatcttttgaggcttttcgcacacttgccaagatgattcaaaatgaaaaaggacttaacattgcttcacttggaa

SEQ ID NO: 18681 - DNA, 113 bp, Glycine max
acttcgacaacattgcgtagggatgaacgaattgggaatacgcatgctatggacgggacatgtaattttagaaagagatgcccgaagagacatccttttgttaaccacccatt

SEQ ID NO: 18682 - DNA, 206 bp, Glycine max
  unsure (1)..(206): unsure at all n locations
agcttcttatccaaggcactctcttttggtgaattttcttcnaccatggcttattccctaatggatggcgcctcctctcaccccttctcctttatctttcgctgcatctccatagtggaaaatcaccattaaaggacctcattgaagctcaaagatccagagatgtaactccatgtggagcttggaagccttggatcttcttcatc

SEQ ID NO: 18683 - DNA, 541 bp, Glycine max
  unsure (1)..(541): unsure at all n locations
cccgtagtgactacatgacgtacacatcanactaagctgtctagcgttatgcagacnagacctcatgtagctatcatcgccacgtactattattagttgggtctagccacggcccacgagcatagaatctcggattagtatgctcaagtatatgccgaacaagacgctagacgaanggtgatcgactctttacaccaagacgcaaccatgtggatggatcggttgctcttaccttgaccggagtcagaacttccctattgttaccaggccaagcatgcagaacctactccacccgaaagattcatggttctggctttgtcgctatataactaatgccacatatagaatctttgaacttgatgctttagccttctaattacttctttgaataatgatgtgcctgtctctcaaaaactgtcaataatactctctttatttacagcttcttttaccctctacgtgttttggaacactacaaccccatgatcttctcatccaattacatgtgcaaggacagacataacccttgtttagacaggcg

SEQ ID NO: 18684 - DNA, 97 bp, Glycine max
agcttattgctatattgactatgggtagttatttgatatgaatatattgaggcgaagccttcaaagaaaatagttgtctcccaactgccaaagggga

SEQ ID NO: 18685 - DNA, 434 bp, Glycine max
agcttttgcaagctggaatcatttattctattttcgatagccaatgggtgagtcctgtccaggtagttctgaaaaaaaccggcctcaccgtcatcaaaaatgagaaggaagagttgattcctaatcgggtgcagaacagttggagagtctgcatcgactataggaggctgaaccaggttaccaaaaaggaccattttcccctgccattcattgaccagatgcttgaacgcctggcaggtaaatctcactactatttccttgatggtttttctggttatatgcaaatcattattgcttctgaggatcaggaaaagaccacattcacctgccccttcggcacttttacctataggaggatgcctttcggcctgtgcaatgcccctggtacctttcagcagtgcatgatcaatatttttagtgattttttaaaaaaa

SEQ ID NO: 18686 - DNA, 514 bp, Glycine max
  unsure (1)..(514): unsure at all n locations
ctggtganactagcacatcgaggactatgatctaagctgtggatatgggaccatacatgggactaggtgcgcttgtcatgtttcacagttntcacatcacaagccgcatgaccatcatccctgttcccacctcaactgagctacgtactccacgtagccatatctcattctttcacaacgggtcccatcatcctctaagcttcacaacatcaagcaaacacatcaacagccaagcttccaacagcaaacatacaatgcgaaacttgttaacaccacaaatacacttctactaagaccatacattcttcatcaatcgtaccgtggtaactcaaatttctggagctatttcatagcctcatggacggtgattatacaaatcacactattgactctttcacaagcaaaaacatttatcctgtcaaactgtgcattactaaaatgtcaatcaattgaatccttcttatcattgccatatctcatcaactgtatttgtacagtactagcacccaaattg

SEQ ID NO: 18687 - DNA, 429 bp, Glycine max
agcttctctagaaacacttcttattaaatattttgaagaaaaaaaatgaaatgagctttctccatgagctaaaatgagtttttcattagttaaatttgaaatgtcatctcatttttagagaaactatattggtgagcttctaaaaattaactcatgaaaaacttatttttacttataaaaaagctcatctcattttttttcttcttatttttttcttttagaagtgcttctaaagaaacttacccaaacagacaaggtaaggggctcagttttagtgtttaccgtgagtccttccaactccaagaagaagggtcccacctcccaccccctctcaaggcattgtttggctcccctagtttgattgtggaagctctaccttatttaagcctctaaaataaattaattttgccatgtgatacttataattta

SEQ ID NO: 18688 - DNA, 72 bp, Glycine max
gtgctgtcatcacttacacatcttatcattgatattattgggctttttttattgttacctattatactatgt

SEQ ID NO: 18689 - DNA, 489 bp, Glycine max
agcttttatgatccgcgaagactttaaatgttttttctagcaagtatcggcaccaatgttgaacggccagcactaatgccatgacttccttttcatatactaacttcgaaggattataagaaaacaatgccttgctgaaataagctactggttcactatctacattagaacaatctctaaaccattaaccatggcttgatgcatcactctcaatggtcaacttcttagaaaaattaaacgaagccaacaacagggaggatgtgatatgtgtctccaaggtctcaggctacttgagcatgcttttattgcaagaaaatccctcttttatagtattatcagagcttaacagaaaacaaaacaagaacttttattaaatgtattgtaaccgagataaggtaccacgaagaacctctatatataggtagagagtccgatggaaaaactacaagcctaagagaaaaaagagagaaaaaaagcccacagaaaata

SEQ ID NO: 18690 - DNA, 534 bp, Glycine max
agcttaataaaaatgttagtaggttgatgttttttttaccccaatttcttataaacagagtaaggcatcaaattaatgttagcacctaagttataaaatgctctatcaaaggacaagttgccaatggcataatctcctttaaaaatttggcatacttcggcatttcagcaattgcctcaacaaaaggaatgttaacatgcaatttcttaaacatttcaacaaacttatcatcctatttagacctctgatcatgatactgaaggcttatgcaaatgttttgattttgattttaattttgcaggtgatgagacttgtacacattttggttctgactctaaccttgcctttgatctctttgctttttccaagagaagtttaggtaatgtctcgacccttggttgtaggtattaaagtagggctataaataatacttcttccaccaacatagttaacttccctagggccctgatgtattggcagcctacaaatcacattttcttattccccacacttcctaaaaaacaaaagggtggg

SEQ ID NO: 18691 - DNA, 240 bp, Glycine max
agctttgctatgatgcaggagttactgtttttgcgttagtcggctgaaaaggatagcaagatagttgatactctttcatttagcatactgtcatctcaatgagggatgcatccccgccaacaaagattaccttactatcgtcgttcgaggtatgtatgtgatcctcacacatatgtgcttaaggataataggcaatggttgacatgctactaatttttagcagtacaatggcattcattg

SEQ ID NO: 18692 - DNA, 563 bp, Glycine max
  unsure (1)..(563): unsure at all n locations
atccttaagtcacctgcagctgcaagctgttgaaaagaaaattnnttaaataattatattcaaaattaatattttttaattttccattattcacagtcttctttgtactggttcctcttttcatattcttactctctaaaaattaggtattaaaaattattttataaaataaatttaaaaaaccaaaaacaaaatcaaacttggaattaattttttttatacaatataaagacttgctgaataattaaactagtgacatactcgctaaattgaaaattttaaattaggttaatgaagtcttaacaaaaatgtatttaaggactcaattaaaaagatttaaaactttaagggcctaattacaaactttcaaagtacaaagatttacttaaaaaattctcaaatagtttaggaacctacaaattaatttaatcttaatggtctagcttacaaaaaagttgaacttaaaaacagccaagacaaaacagcagcaatcagcaaacatataactatactaataactacactaagcttccaggcagtcactgataatctataactatctt

SEQ ID NO: 18693 - DNA, 504 bp, Glycine max
catggtgctcgtgcttgctctaactatggtcccatctacatcttggtaattattacaaatactgattgacatgagtggaggaactaactattactcacatgatttaagatttacataaataaattcaattacagtccaaaaactacgctcttataactcaagtaaactatagccctgccaatgcaatgtagatgcacctatgctaaatgataaaccatcaactaaagtgagaacctacattagttagcattgtggtgtgcagagctgtctatatcgtgcacaacatactcagtacacttcactgataatatagcagagcatcagtagggtggttccacactggctcaactgggacatgtaacaatctggacgatatgacgatggaacactttctacctgtgtaactcgacaaacgaatcagattgtacgatacaggtgccatcataaaattattgacaattgcttcagatgtccttgggtctaaaagcgtttggatgacaagct

SEQ ID NO: 18694 - DNA, 451 bp, Glycine max
agcttgttcacataggtaaaagaataggttttttctacatgttgaataatgaacatgcatcatttcatgaacttagttgcttggtaagtaagattgatgattcttggttatgacatcgtagggttgcacaataaacatgcatcatcttaatcatctagttaaaaaggacttagtaattggtattttgaaactcaagtttgagaaaaataaattgtgtgaagcatgtcaaaaagggaaacaagttaaaaattattttcaaagtaaaaacgttgtttctacttcaaaaccccttgaactacttcatatagatttatttggaccttcaagaactataagttcaagtggcaactactatggtttagtaattatagatgattattcaaggttcacttggactttgtttttgaaacccaaaaatgaagctttggatgcttttcgaaaacttgccaaa

SEQ ID NO: 18695 - DNA, 601 bp, Glycine max
  unsure (1)..(601): unsure at all n locations
naatagtcatccgtacatacaactaagctgccactcatggacgctctatatctccacactnttggggtggctattcttgtatggtcttattntctcacggtccacttgacctcatttctaccaactacaaaccctaagaaaactatattatctacacataaagtacacttctctatatntgcatagagggtgttttcctaaggactgaaagaacttgtctgagatgttctaagtgatcatctaaggctctactgtcacttaaatatcatcaaaataacaactacatattacctatgaaatccctaagacatgatccatagcctcataatgtgcttgtgcattagtgagccacaggcatcacttccattatacaaccaactggtcttgaagctgtttcactcatacccttttatcttatttgtgaaccactttagacaatcttganagatatgatcatgcactatcagcaatatcagttaggatggggctatactacgtatgtgtgatggctgcattgtcaatctccgacatctttggcacacacatgccagaatggctagttttgccacctctacatcttactgactattctattctagat

SEQ ID NO: 18696 - DNA, 464 bp, Glycine max
agcttcacgcacaaatcataaaagctggtcttaaccaacacgaacccatccccaacactctcttaaacgcatacggcaaatgcggtcttatccaagacgcactccaactgttcgacgcattgccccgccgagaccccgtcgcatgggcctccctcctcaccgcctgcaacctctccaaccgccctcaccgcgccctctccatctcccgctcccttctctccaccggcttccaccccgaccacttcgtcttcgcctccctcgtcaaggcttgtgctaacttgggtgttcttcacgtcaaacaagggaaacaagtccatgctcgcttcttcctatcacccttctccgatgacgacgttgtcaagtcttctttgattgatatgtacgcgaaattcgggttgcccgaataccgacgtgccgttttcgactccttttcttccttgaatttaatttcttggactaccatg

SEQ ID NO: 18697 - DNA, 158 bp, Glycine max
agctattactttgagtataagtaatgtaatatgaaaaagagatgtgagcaatgcactgccatatgaaggcctgctctagagcgagggagcgacgaagacggactcgaagccaaggcccatatgccgacgagcactgtgactgcactccctaacactct

SEQ ID NO: 18698 - DNA, 136 bp, Glycine max
tacttaaataagctgtaaatataaagtaactttccttttttcttaatttggctccccttttttttcctcttctttctcatgaagcttctttcaacttttatcaagctaattggtgtgagctcatttcatggttatc

SEQ ID NO: 18699 - DNA, 425 bp, Glycine max
  unsure (1)..(425): unsure at all n locations
cagctctgtcctcagctattcatgntttaattatctttccttaaagcttggataggaactttgaggggaagagagttcattggctagaagtcacacaagagatacgtacgctgttggctcagggatgtaaattttgaaattggttaatacgactttaccacggaagatggatgctagtggaaaatcagtctatgtggcacagggttctacgctgtgaagaagcattctaatgccttgcgcgctccatggtgacctgtaaattatggtaatcaactctttaacaccgacgggtttggggactcaattaaaaagattttgaactgtaccggcctaactacagactatcaaacgccgctgatccacttaaaaaattctcaaatagtttaggaacctaccaattaatttaatctttatcgttctacctt

SEQ ID NO: 18700 - DNA, 552 bp, Glycine max
  unsure (1)..(552): unsure at all n locations
ccttattgcgtcttgacgtacntatgantctaagctctagcacatgactaccttgaataatcttgatagcccttgttcttgtttcccttctctgttgaagctcactacaagccttaaatgaaaaccatgatataccatatcttaaggaatntggagctttggaatgttttggaatagtgtgcggggtttggtcattgatactgtttgtgcttgctatgagtattggcatactagtcatgatatggtaatgtgaatctggtaatgtgtcttaagcttaagtaaaaaattgaaaatgaaagaaacaataagttggtgatagatcttatgaccagaatgatagactctgtcctactttatgttaaattatcttactttctgtattgcttattagtcttaaatgccttatacgccatgtctctatccttggattagacactattcaattntcctacctttctgggctcttcaactataaacctttgttctatgtcttgttcgggatatgtaaatatcattcgcacatatgtgtgtgttcatgctcattatggaacg

SEQ ID NO: 18701 - DNA, 465 bp, Glycine max
agcttgagaattaccaaagtttgtttgttgatttttaggcttcagggaaatgggcagcagagatcaaacacacatcaaagaagattaggctacaactattagtttgtgttaaaagcaattcaaatgatggcattttgatattctttgctaaactagtagcttgaaaaatacaatagaaacatgggcaccgagagacatttatcaaaatagtatataagtataccttgaatgattaacaattttcttgacttttacttaaataacatactcaatttgcatgatccacttcttcaatccttttaattagcattaacaattatagttttagaatcattaacaattttcttgacttttacttaaatgacattattcgtaaactaaatgacactcgtagcacacatccaaggatatttttcattgttctgtcatagagttaaacactcatctctataaggtgacgtaaat

SEQ ID NO: 18702 - DNA, 554 bp, Glycine max
  unsure (1)..(554): unsure at all n locations
ctgtattgaccactttanggactatcanactaagctatagaccacantgcctaatcattccaatatgctgtgaataggaagcatatcatgaatcaagccaaggctattgtgcangcaatcaatgtggcanaacacaccannatgatatgatgatggatggctcannatctcacananngtaactcatcacttttcaaatgagctntcaaaactatcatgtaggtagaggaaaacaggattcaatacaaatgtcagagctctttttcaaacaatacccattcttgacatatctatattanagaaaacatctagtttacatgccacaaatgaccaaatataaactgaacccatgaactacacataacaataacacactacaataacaaccgcttactccaaacaagaccctcctcccccatctaacaccatatctcatgtctcataagataaacattaccatcatgatcacagtgttaaacagacggttgaagagactctatttgtgagagatgagggaggagtttcacctctccaaaagtttggaggtagcggct

SEQ ID NO: 18703 - DNA, 218 bp, Glycine max
tgcctggaattttcatttaatttactatccccggaattgctttgctcaactaagtaaattaatggaattcttgtcctgttttttgatggttgaaggcaattcagcatggaaaagctcttgtgcgggtagcaattagggaagatttcctaataatcgaatatattctacctgaaaaattgaagctctaaattaacccattacttgatatatataaaatt

SEQ ID NO: 18704 - DNA, 674 bp, Glycine max
  unsure (1)..(674): unsure at all n locations
ccgtcattgatacatttgagaacanacanactaagcntctctcgttcgagcgtatctctacctctnaatcatatctagttctaacgctagtattntcatcgtacattcttcttcaaaatgggttcttcttgctgagggttcaccaaccttcactggaatcacgacatcagtatcataagtcaatatgaaaggagtntcctctgtgtcgactgtgagcacaatggtatgcccataatacactaggcaactgtacatcctagagaccatttgctttgcctactctattcttcatcattngtagaatgacttcgtttgttgcttttgcttgccccattaattatcgatgttccataaaagacaccaagtgcttgatgccgagcagccttangaactgttcatcatctttcttcatgaaacgtatgccactatatgtgactatggcatatgggagaccatgcctacacatcaatgatctccactgtaatatnttcacttataccagngagatggcaagcggntnctctaaatcaattagtgatgtatctatcggcaccaatcataantcactntgccttctgcatatgaagggacacgaatgccaagcctatatgatcgacangagattaatctatgtctcttcgcggcgtgtgaagcgtgacnacgctctatatccg

SEQ ID NO: 18705 - DNA, 237 bp, Glycine max
cacaccagtttgattaaccctgacttgcagtgggaaccatcacttcgtggccttgctaaatatatctccccatgggaaaaaccggggcttaaaatttctctttaacccctccccttttaataaacgaggtgaaccttcccgggctattgcttgatcccaaaaaacttttttcatttttccattctgtgaaatctgtcccgttttttacgtacaaccaatattctttgcatttactcc

SEQ ID NO: 18706 - DNA, 484 bp, Glycine max
  unsure (1)..(484): unsure at all n locations
agcttgtcttgattaaatntttttcttttagtctgacaacttcattatgagcttatgactagtctaattgctcccaatcttaaaaggttagattgtactcaagtgcctccaaatcaatgtcatcaatctaaaaggtctctacagacgtagtgtgatcccaaggaagaacaacattgagggcacaaataagacccatgaattcttgaagatccaaggaagtatagaagggcaactcaaagggttaagcttcctacatttgtagacagtagcgctaggaggatatacctttcctgctattggcctatgctcaaatatatgatcgttcaaattggtagcacaaattttttgatggggagctcttgaaaaaatgggtcattctccccataacatcttagagcatcgacttgctaatcaagatgtacttccctatagtaactatagggataattgaaaggatttatcctaaggaaagccttattttctt

SEQ ID NO: 18707 - DNA, 187 bp, Glycine max
  unsure (1)..(187): unsure at all n locations
ctgagctccgttgaaattggatcgtggacattaatgtttgcatcatgcacatatgatagtgcccattaagttatntctggattaactgtagcacttatccttaatgtaaaggtgtctttaactaccttaaactagttgaactattatgtcattactatatattgctaatatgaagatcatcctaatt

SEQ ID NO: 18708 - DNA, 291 bp, Glycine max
tgcaagcatacccctatggcttgcctccgaacttcatattttgtgccgccccagaagaaccaagccaagcccctactttagaggggcaagcccgcccatatgaccactatacaggacacgaggacgaagaatgacatacccatctaggtcacgagctgcacctaagagatacagacgcccatgatatactccacccaaacatagaccgacatattccggcttcacccacacacgtaaaagaagatgagaccttcgtggaacatgctggaaagattgaggcgcttgaggaga

SEQ ID NO: 18709 - DNA, 371 bp, Glycine max
  unsure (1)..(371): unsure at all n locations
agcttgaagcacttcgaatntaccaatcaaatccttatggctccacctggggtgaaaagaattattaccttaaagaaaaggaatgtccaggctctttgaagaatatgtgagtgtaagtcaaggtcatctactgcatcaagttctcaacaacctaccgttgaagaagatttcagtatagaagaaaatcaagagatggatgatccatataatgttagtcttttgtttaatcatttaattgttttattattcaatttattctatttaatttttctcttatattgtcataggaatatatcaattatgtgagccaaaatgttaacgtcaatgcaagtctgaattagatctatattnggctgagacaccgcttgagc

SEQ ID NO: 18710 - DNA, 388 bp, Glycine max
  unsure (1)..(388): unsure at all n locations
agcttttgcttctgttcaatatataattactgaatcnttactttggnnggggaatccgagccgttcattgatggtcggcaagtatgatggtcttaatgaagatcctacacgtatttcgggtgtatctcacaggcggttttaaaaaacctcgcgaattaacttggggtacgggtgtagttttggctgtattgactgcatcttttggtgtaaccgggtattccttaccttgggatcaaaatggctatggggcaggtttaattgtagcagacgatcccgactctaagtttgtcctctgatgctattggcctttgctctactttatgatctttcaactgggtaaccccaattttttgatggggagcttttgaaaaaatgtgttattttcccc

SEQ ID NO: 18711 - DNA, 356 bp, Glycine max
  unsure (1)..(356): unsure at all n locations
agcttataaaaacaaaaaggccctaatcaatttcttatatgcccgggaaanaagacgcatcaacaagaatcaagccaaagctattgggcaagcaatcaatggggcaaaacacacccaatgaatattatgatggatggctcaaattctcacaaaggtaaaatcatcactttcaaattgagctttcaaaactaatatgacatggagaagaagaatcaaggatttcaagtcacaaaatgtcaagaacttttattttcaaaacaattacccatttcttgaacatatcctataattcaaagaaaaacatgcaaagtcgtacgtgcacacaaaattgacccaaaatattaaactgaaaatcc

SEQ ID NO: 18712 - DNA, 343 bp, Glycine max
  unsure (1)..(343): unsure at all n locations
agcttggagcacacaatttatatgctcngcttgatggggagtgttaaagttgttgtttaataatgttttatatttctagctcgctgtagaagctcatagaagctgtcctgtaatctgtctccataagctaggctgtagtcttcatcatgaactattttntgtactatctgttaattctctctctctctctctctcacacacacacatatatacatctctcagcaaactaaggctgaggatcctttttgtgtgcatattttcatactcaaacatttctagtgtaactacagcacaaaactttatttcattggttgggagaggggcccagataaagggaagaccc

SEQ ID NO: 18713 - DNA, 161 bp, Glycine max
cgcggcgtgtgtctacgctaactgtgtcccagaacactctctctgtcacggaagcagctgcgaaatccctttcccaaagccaagttaatattcactttttccaagtctattacgtgctgctatacgtctaagcctcttgacacttcatctgggccatgaaa

SEQ ID NO: 18714 - DNA, 538 bp, Glycine max
  unsure (1)..(538): unsure at all n locations
agctttctcggagcccattcctgtgtagtcaatcttttggaaagntagattacaagaaaatgcttattttaaagcaaaaatggcatgctaatctttccgatttagaacaaacttgggcacacatttccttaatgtaaaatatttatgaacgcgcgtatgcgtaaaatatcctactatttatatcaacataccaggatattcaaaacattctagttaccacacatatatattttttgaaaagaatacatatacgcatgcttaaggtattgtgtcatatttgtttatatatgcacattggagagccaaactcatgtcatgcacacacttgcagtttttgagaaggaacgttcatgtcatttatctacacttgaaaggcaattccacatcatacgttcatttgngaagcattccccgtgccatttttgacatgagtacatttttttgaaaggctccttatgctaactgcccccaaatatacatattttgaaagggcatttttacgctacctatcctacatttacagatttttgaaaggcat

SEQ ID NO: 18715 - DNA, 499 bp, Glycine max
  unsure (1)..(499): unsure at all n locations
tgcgcctatttgcttacatatgttctttttgtcaagacagngaaccgaagaaatgcacccatatacaatcgaggcaccttcgctacctagattatttacacgtacctccaaggcgtatttgtgacttacatcacacacatctccttggctaaactcacatacatgcatactcaagcatttaggggcaccaaacattgcacaggtgcacatcgtggcatttctaatacctacatacgcaaacttcatgatgaatcttgactatctacacaagaaggtgctacatttcatgctctttttttttcaagtttttgctacctaaagccgcatgcaaattcaagcatattttcctttgctgactaaaattgcattcaaatttaaaaggtatattttttgtaatatgttttcttcacataacatgcaacatatttatatatatatttttttgtgagacatttttgactacccaaaattatatatacatacattcaggtttttgcta

SEQ ID NO: 18716 - DNA, 463 bp, Glycine max
  unsure (1)..(463): unsure at all n locations
gcctttgtactgaggctatatctgctggcataatactctcttatttgctgcttttttatttctacgtnngtttaggaaacactatactaacgcccgcagggatcctatcgaccagatcaaattataacatggtgatcaaagaacacagacaatgaaccgcatgttgctctgaaaacaatggctcatgatgaggcatgtatgttgagcactctatagagaacgcgcaccgcgccgtgtagtcggtgcgagcaaccgctccttgaactccaccatctcctaacattagacggaaggccatggcacatgcagctactggtcaccgacgttaccttgatgcgcactttacaccttgagagagcgccatgtttctcataaaactctacgccacagtcaaacctaatcctgagtgtatttatcctctcagcgacggcttgtacaatgaacgctatttttgagccccgac

SEQ ID NO: 18717 - DNA, 326 bp, Glycine max
  unsure (1)..(326): unsure at all n locations
agcttaaagttgagccgccttacttaatatcagttttgnggggttgagctaggccccaagtccaaattctaagttagtttcagagcctatcctagactcattgttgggccacttgcattgcgatgctcttggttggtagccttgggcatgagggggagtgttggaaagccaccttaattgctgtcacccctagcccaccttaattgtggcttctttagggactaccttaattgccagcctcaagggttgcgattacctctatatcgtctatagatatgacataaatagaggctttctagcgtcggacattcctcaccttactaccc

SEQ ID NO: 18718 - DNA, 53 bp, Glycine max
cttctcttccactgagtacttgtaccatgactccgaattgtccgctactttct

SEQ ID NO: 18719 - DNA, 544 bp, Glycine max
  unsure (1)..(544): unsure at all n locations
agcttagagaggaagcttcaatggtggataatttatagagagaaagagagaggggggagcatgaaattgaaggaagaaaagagggagagaagttgaactttgaagtgtgtctcacaagactctcattcatcaaagttacaacaagtgttaaatatgcttctatttatagcctaggtagcttccttgagaagcttccttgagaaacttccttgagaagcttcattgagaagattcctagagaagctagagcttagctacacacacccctctaatagctaagctcacctccttaagatgagaagctagatcttagctacacataccactctaataactaagctcacatccttgagaagctttcttgagaaacttccttgagaagcttcattgagaagattcctagagaaactagagcttagatacacacacccctctaatagctaagctcacctncttgagatgagaagctagagcttagctacacacacaccttatagtagctaagctcaccccccagccaaaatacatgaaaatacaaaaaagt

SEQ ID NO: 18720 - DNA, 215 bp, Glycine max
  unsure (1)..(215): unsure at all n locations
ccacccgccggcatgcaagcttcattctacacttgaaaaataggttgtttttcttngccaaaaaagaaagcttcctgatcatgagggagttaacaaaaattttcatgcgggnggaccttcttctaataaatctgacttacaatagcctcttatccctcttctattgccacctagagcaattccaaacaaaaagatggaagaagtggtcaaggaga

SEQ ID NO: 18721 - DNA, 176 bp, Glycine max
cacacttgtgcaaatatcaaacacacctccctgagaagaaaactagaacttaacctctcacaccccctataataagctagcccacccccatgccgaaatacgtgaaaatacaaaaaagggcctactacaaaaactacttaaaatgccacgaaataccaagctaaaaccctatacta

SEQ ID NO: 18722 - DNA, 351 bp, Glycine max
  unsure (1)..(351): unsure at all n locations
agctttcgagaaattcaaatgttcattattttttcacacgnaagcncgaggcggaggcataactcagctggacgcccgagagcgcacaaccgaagctcgagaggaactccacagcacacaaagtcatacacgggacaaccatctgtcgaacatgccttatttatagcctaggtagcggccctgggaagctgactagaaaaactaccgtgagaagcgtcgatgagaagattcctagagaagctagagcttagctacacacacccctctaataactaagctcacctccttaagatgagaagctagatcttagctacccataccactctaataactaagctcacatccttgaga

SEQ ID NO: 18723 - DNA, 161 bp, Glycine max
atgcaagaactaaaagcagccaagactattatttcgaccatccatgaaaaatgttgacaatgaagtgcaatgcaacaaaatgaagcttgacatcagctctataaaaggatcgagttgtcttgaaccggtgatgatttggactatgaggacatatgtttctc

SEQ ID NO: 18724 - DNA, 487 bp, Glycine max
agcttccttgagaaactaccttgcgaaatttctttttttatctgccttgagaagctagagcttagctacgcacacgcctgtaataattaagctcacctgcttgagtagcttccttgaaaagcttccttgagaatattcctagagaagctagagcttagctacacacacttctctagtatctaaacacacctccttgagatgaaaactagaacttagctacacacaccccctataatagctaagctcacccccatgccaaaatacatgaaaatacaaaaaagtccctactacaaagactactcaaaatgccctgaaatacaaggctaaaaccctatactactagtatggccaaaatacaaggcccaaaagaaggaaaaacctattctaatatttacaaagaagagtggacccaaccttggccgatggtcgcagaaatctaccctgagcttcatgagaatcctagggccttttttagtagctctagctc

SEQ ID NO: 18725 - DNA, 453 bp, Glycine max
ccagtgcacttgaggactccaactcagcttgacgcttcgtattactgaaggttagtaagtacatctatatagtatctacctgagatagcatgaatctgatgcagctcacataggaaatcatatccaaagaagagacactcaacatatatctcaataacaatcccaatcatttgtaccgattcaacataacaatcttaatatattcgtgctgacttatgctgactagtggaaatgttgatgagatctaacatttctttatcagcacaactctaacgttctagtcctacggtagagcatcattaggtgcttgtgtcctagcctataactggatcctagcaatgtatcttacacactatgcttactgtattgaaagtcttagctaggccggtaaatcttcggaaattttttgccgtatgcttgtaaatgtatagtgggaactgtctctctaggtcg

SEQ ID NO: 18726 - DNA, 86 bp, Glycine max
gccccgattcaaggcgggctgcaacaccggctccgcttccctaactggactggaggcgggtgcggaggctttatcctctatggttt

SEQ ID NO: 18727 - DNA, 275 bp, Glycine max
  unsure (1)..(275): unsure at all n locations
agcttatgttcatcaatttatggncaaaannnttttnatatggctttctactagnattgagggtttttccagttgtgttgacttgaatccattcacaaagtttgtcttgaactcttctaatgaattatcttttctctgagtttactctttcaaatctgacttcataattacatagcttttgggtctagtgttttgattacttattttagtgttgntaaagttgttgtttgattatgttctattaatgttttatatttctaacttgctgtaaaagc

SEQ ID NO: 18728 - DNA, 376 bp, Glycine max
  unsure (1)..(376): unsure at all n locations
agcttgggtcagtgactctcgggnatttacctgggttttgccggggcgaattttaccttcaatccgtcactactttggggctcatcgactctactcatcaccgtctgtgctcggaagaatgtcctcctccgacgggtcttgttctaagattacaccttcgatcgccatttgcggtcctatttcactctcactatcgtgaaaaattattttctccaacgagcctatgaagccttttccccaacatttgcatctatccagattgtaacctgtgtcttcagccatatgcatagcgtattccacccccattaatccatgcggagaccttgggctgtattaatgggagcaacggcgttttcactattatccgcgccctggc

SEQ ID NO: 18729 - DNA, 208 bp, Glycine max
agtctaaagtcctactttcttatttctcgatatacgtgacattaattttttgagtctagacactgccactgtggtgctttcactacattggtgaaataatttacaacaaaaatgggtgagcttaaactcacacgaaaacctttattttttcttaactccaccccacttttcacaccacacgtgacgagtgcggtggtgctccacaaga

SEQ ID NO: 18730 - DNA, 210 bp, Glycine max
ttctttatcagcgaggccaaaagatggttgcattcattcaagggcaatagtttaaagacctgggatgaggttgttgagaactttctaaaaaaatatttcccccagtctaaaactgcaaaaggaaaagctgcaatttcttcattccatgaaaacacctgacaaagccatggacttaattgaaaatatggttgccagagaccaccaattttg

SEQ ID NO: 18731 - DNA, 407 bp, Glycine max
  unsure (1)..(407): unsure at all n locations
agcttcaactggtgaaaagncnanggatanntgcctcctgcngagcactntttaacttaaaatttgataaagcgtgattatctttacaaaactaacgaacatgttctcaattgatttgcagcttctttattgttcatggcattctaaaaaatcatgaacaagtatgacaaggtctcatttggctctaaaagattatatatggctgcaatcttttcagttattttctttagtactaactattaataactgttaactaatgaatgaatttgtactaccataattttctctcttaagatgggtaataccctggctaccacattatggccccttctagtaaaactgccaaaatcccccgcccaaaataaagaaaaacctattctaatatttacaaagaagagtggacccca

SEQ ID NO: 18732 - DNA, 562 bp, Glycine max
  unsure (1)..(562): unsure at all n locations
cacatgactacttgcanntgacggaacactnanactaagctattgcatgtgtacctgtcgtgaaaactctccgtgctangtttcatatctgacaacccacctgtagtaagcctctactagtaatcaaggagacataggcatgttgtaaagctcacattggttacataactaagaacatcaacttgtgaccccagggctacactcgaagagactataggcctttccttctgaataggtctacctacaaacatttacacacagacttattataactgtcaaacacanacttctaagtgtcttaaataacttaactcgtccctacaacgcttatcattatcatccgcttaaacggattacataactcgttgcctaaagaaactatcataactctctgccttaatggattatcttacactgcgcctaacggatcacattacttcttccttaaggactattaactggatgcacatatactttatctacgctatgattcaaccgtatatacagtatcatacactcatgtaacaatgcgtaactcaatactgtatacctctcatattcg

SEQ ID NO: 18733 - DNA, 776 bp, Glycine max
  unsure (1)..(776): unsure at all n locations
gttttgagtctcttgcacanacnannagagnngaacagcacgcacgcaagcaggcgaaactataccttagacccgatttttttttttttttatgcccagggccgcgaaccaaggcaggcttgctncagcaggttaccataccctaacccgaacagcatgccaggtgctgtgttctttatacggggaagaatctcaagaggtttacctccaaggtttaaagaacgaatcaatgacgggtattcaaaacttccaaaatcttaatatcccagaaaaattgcagggcagtgccgctgcagaccggtatttaaaaactatacctcccaggaaatgacgcgggccccacttaagcaacgggggtaaccctataatactgggggcgccaatgtacactgcacccccaatgtgggggttggccatccattgtactaacctccctctgtatccccatacaacctcccactccccaaacctcctaccgcacaaaccctatcacactcgaccctatcccaccatcacacctaccccactccccaaaccaccgacgttaccctcctacctacgatcctacgcctccatcgcccctctcatccatattttatctttctccacaaaaaccaatgcccagacactactcacacacaatcattcaccttcaaacctcgctccatcctcgactccatcctcacctactcacactcaccgaatccccctcaatctccacataccatacctctccactcttcattcgacgcacgacatcgccgaacaccgcaccg

SEQ ID NO: 18734 - DNA, 269 bp, Glycine max
tatctgcttatctaaaatagacatagtagagaacactactgctcagttacttcacaactgcacactctcttcctgtggacgtctctcaatgacccttcctagcctactgccccatgttatatcttttatccactaaacactcatttgatgcccaccacaatcttaagcaaaccataatgtccctacaagcctatttatatacggactagtgatatcaccttcatcatacaagtgacaatttatttgagaattaacatttgtctattagt

SEQ ID NO: 18735 - DNA, 577 bp, Glycine max
  unsure (1)..(577): unsure at all n locations
cccccccagcatgtgattgcnttgcnttgacgcgactatagagatcagctccctcngacatntnnccnccttttntctcntctctcttcctctttttttttctntcngctngaccttctcttcgactacgccggctctatcaagctctgccgtttcggcttgtacctcatcactgtctatcaaagctataacctcatcgtctctcacagtctttagattttggagccaatccaatccttgtgttctgactctcagccacttacgagttcctctgtttataccattactgcttcctaagctctctgtctttcttacgccgcatccatgcctgcgactccttgggtccctcccttgtggcactgaagctctgcgagaaagcgtgagctattctgaggcctccttctggacatcttcctgagaataactgttttcttcttacgaggacattacaacccctctgtactaagtgtgcaaaacatatgccgcttttattctgtgacgtatctgcaatgcactcggtttttatataagcagaagtttttgatgccatcctccttccaaggattcatataattcg

SEQ ID NO: 18736 - DNA, 251 bp, Glycine max
cgcttaaaaatcaataccacaagatttcttgtgttcatgagctaacccccacatctaatcaaaatcccacaaaaacatattaaacctattcatccctcagaggacgatatttttaaacgccactcacgaccttcacgcttactaacactaagggctctatacccatattaataaggatcacacctctcactcactggaaaccacacactccaaccatgattttatgcgccgtaacacataatggtacacca

SEQ ID NO: 18737 - DNA, 657 bp, Glycine max
  unsure (1)..(657): unsure at all n locations
ccgttgagtgacgtaccttgacgcaccctctnnanactcaagccttgtcgcctcaataanttgtactcgtgaagctggcacatgcatgaatagttaatgtatagttctgtnagaaacatgcacatgctactcacagttcttatatcgtcaagcatacttatangcgacatgaaatgatgtatgataccgtggaaacttgccacttacaaatacctatctcgtgatacacacttatacgcgtctgtacatgaaaagatgtatgatacatcggaacttgtcctaaataaatctggtcataatcacttatgttgccagaaattaagctgattaatactaacttgtgttcaaacctctaaaacatatatatgtagtgtgtataggacttcagctgatgcctgcatattaccaagctgcgatatcaaaggaaatcgttcgcatgatagcatgcttgtgcaaccatacgctacaccacccacttcatcgtgttcatttagttcaacttcatactgtgtatggtatattgcaacaacgcatatctgcactctaccaattgtgttcattgtgcgttcttgacaacatgtctatctagtggtgagacacgatagggatcatctcggatatgtctcttggctttcacattgatcggtgcataggccg

SEQ ID NO: 18738 - DNA, 872 bp, Glycine max
  unsure (1)..(872): unsure at all n locations
aaagaagacaggtatcagagcgacgctntcactctgaatacaacctacacaatntaaacggcaanccggaagaccggnntctccgaacacnnannnnatcacagcnccacccagccaaacggagtgtgtgtcgacgccatagcgaccnacccnnnanaccctagaggccagccgcgcggccgcacacgcaaccaaccacccaccctatttttccttcatgagaaaaacccgcagccccggccggtgcatggcccagcgccacaaaaaccaaagggggaccagccccaccccgctacagaggcgccaccatcgcccccacaagagacacccacccagggggccaactccggccactcgcggaagataaaaaccccgaagcccccacacacgcgccatgtggccagcccgcaagcgactaaccacaggggccaggggcaacaaaaagagacatgccaccggcacaaacgcaccgggcagaggaggaccccaaaccgtgccctggccccccccacagagagcgggggccacaacccccaaccccaacccagagaacggaagcaccacacaaccagcccaaccggcccagccccagccaacaacgaagcccaccaccaccacccccaagcgccaccacagctccacgccccagtacaacccgaccccacgcccgcgatacccctgccacccgcgcataccagacgcaccaaccacccccccaccacgccacacgagacgaccacgcacccacgcgcaccccaccccacaccgcccacacccagcgcgcactacgacacaccagtcagccaaccagcagaacggcccccaaaacaccacagccccacacgcaccgaccagaaccaacccgccccccg

SEQ ID NO: 18739 - DNA, 246 bp, Glycine max
ttacaattcatctggggatggtaataacacttgccaacacacttgccatgggccttttcattaatgggggaaattcctacgagattccctcaagggtataaaatacatttagtgacggttatacagaactccaaaatcttaatatcccaaaaaattgcaggcaagtgcagttgcagactgttatttaaaactatcactcccaagaaatgacgcgggccccacttaagttactggggttcatctctt

SEQ ID NO: 18740 - DNA, 327 bp, Glycine max
acatcacttctcacatcatatcaactgttaataatataagtcattcactcaagaggtctctagtctctacattatataaacctttctatgtcacatctatagagcggggttccgtgtctctacatgaggtcttatagtcatcacctattatctgctccgcggacacatagtcaagatcattacatgatccaaacacagaccagcaaccgtgagtgagttatacatttcttactactagagagagacaacacaacatatagtatccaaactcacattacttagcatatcttacattatttcatcactttgtattcatcaatcacactt

SEQ ID NO: 18741 - DNA, 450 bp, Glycine max
  unsure (1)..(450): unsure at all n locations
agctttcccacagncctaaatgacattnctaactaggattaactccctttaacctcccattaccaccaaatccagaattaacctttcaaactctcaaagcatcactttttttcactcatagcactacattctcactttctaaccctaagttaactctacccttcatctctagcaggtttccataagcaatttcagcacacaaacctcacaagcattatcataaaaaccctaaaacagaacgggtaagcttgagtcacaccaaacatgacaagtttaacatgctttcatcaaatttcttcacaaataaccatcacaatgcataaacctagtaaaactacccatcatatctcccaaaacccaatacccatgaggtgcgcttcacgactccgggaatggctttcttttgcgaattggagcagaaaaggtgtgcaaagggtggagctttgatgg

SEQ ID NO: 18742 - DNA, 52 bp, Glycine max
agagacatgactctgtgaccaaattatgaaaatgctcactccacattatgca

SEQ ID NO: 18743 - DNA, 731 bp, Glycine max
  unsure (1)..(731): unsure at all n locations
gtatacacgttcgtagcacgccccnntaagtcgaacagccggcctgcaagcttgcaacctatactataacgccaagctttttgttcttaacccagccgtgccagccattttaaatttgagcgggatgctgataccccacagagcccacttgaactgggccttgccataaacgggcgatcagaccaccagtgttcctccgggctattacattacattgaggggaggttgatatgattcagcaaatcacactctttcatgaccctactgactggcgccgttgactactgttatacaatactagcactgccattaaaggatgcactccctcactttgctcaagaatgtcagcctcttttctacttaaactttttagctttgggagccaaggtatgcctagtgttctagacatcaaccacttgtgatagccggtgtgacgccatcgctacttcccctaagctccttatgttttctttccactctattccaggctctagaaaatttccggagtatattggaataaccttcctagaaccctcttgtgaagaaaaggggagaagcattcttccagaggggccccttcataaggcagcctcaacagtctatggacacctcgtgcatctactataaccaactctacttccccacgaaggcaaaggtggaactctcacacgcatctaaaaatctagcttttaatttcaaccagagaaccatacaagggtccatccgcaccg

SEQ ID NO: 18744 - DNA, 488 bp, Glycine max
  unsure (1)..(488): unsure at all n locations
gcatgcacttgacatcttnatctagctgatctgtttagtttgttgcaattgcatgttacatgaattataccttctttgtaataagaaagttctatggatttataatgatacccactgatattgatcttcgtcgcctaaacgacataaatttcagatgaaccattatcaatatccttgttaattattaccagttctagaagcaaacaaggagattcgacaattatgatactgatttataatcatatatgtgtttactgtgaaattttaaaatcctatggtgtcttatgaagattctaatcattagtttgagaaaattttaagagttctaaaaatacattgtttgttgagataagtatcaagacatcattccttctattattctgtagaaatgaataagactccttctggttcatctatttatcttaatggtctgtagataaagggtcatgtattcattatttcttggcttgaactttttaaagtcgcac

SEQ ID NO: 18745 - DNA, 305 bp, Glycine max
cttctggggggacatcttgacttgctttcctaactgacattcaccacagattctggcttcttctattttcagattgggaatgcctctaacagcacctttgtcaatgattttcttcatgcctcttaagtgcaaatgtccaaatctttgatgccatattgtgacttcatcttctttggaggatagacatgtggaggagtaactggattcttgaagtgtccataggtaacagctgaactttgataagctgccctttcttagaacttcggtccttccatttgtcacctagcattctgaatttggaagtt

SEQ ID NO: 18746 - DNA, 221 bp, Glycine max
ttaatttgttcaacggctaaccaagcagctttaacacacaccaaattagtgtcaaaccctcattaatgatttttgcttgaaggaatgtaatggacaattgaacaacttcacttcacagtcttacatcataaactgttaacggtttccctaaattccgataaattgctttacaccaattaccagaaggctttgtccttggaatgctacctctccaaccacct

SEQ ID NO: 18747 - DNA, 215 bp, Glycine max
aactctaccctccatctgtagcacttatccctaaagaatttcaggacacaaacctcacgagcattgctataaacaccctctaacagaacgggtaagctagagtcacaccatacacgaccagcgcacaggcgtgatcagatttcttcacaataaccatcacggagcataaacctaggaaaactacccatcatatgtcccaaacccaaaacccatga

SEQ ID NO: 18748 - DNA, 108 bp, Glycine max
  unsure (1)..(108): unsure at all n locations
agctttgaagtacataagcaatagggtnataattattctgtgacgatgaatggcaatcccatatttaagttattccctttatggaacctacttttgggacacaatact

SEQ ID NO: 18749 - DNA, 520 bp, Glycine max
  unsure (1)..(520): unsure at all n locations
aaatattgcttgcgtgacactncnactaagctctattaagctgacactntatcantaacacacgtgagtgtatcagaattatagttatctctctatctagtgagaggatctctaattctgagtgttcaagaacaccctgctgtataaaggacttcacaaccttgtgtgtgccctcctgaaaaggatcttcttcttatttacctggtttcaaccacatcagaaatcactctgccaaatatctcggacatactccatttacacactaaagtatgatcttgacctaattgattcaaacgagactttacctgtttggatactcattgagcctgagcttcgtttgcatttatttctgcaccccataaccatgttacctcattatcattttgcgaacactattaaccacaataccactattccatctcctatcattcgatttctcaggtatctgacactagtacctggctgggtattactggcatggaacgtttttcacgtgatggcagtgactacctaacatgtt

SEQ ID NO: 18750 - DNA, 407 bp, Glycine max
agcttgtgtcacgattcactgttttattttttagcgccactcacttaacgaatcaccgaatgtaccatgagaggacaaagcacatagatgcgaaactacactctatgaaagatgtgattgaatctgagaaggtgaaggtcgataatgtttcaacagaagaaaacccggctgatatgtttacaaaatccctctctagtgtcaagttcaagcactgcttggacttgataaattttgaggatgcctaaagcagattggtagaagtgcatccctgaatcgcaagataagcacttgttgatttggagtcaaggtggagatttgtggtgtgtgactcaaaatcacaaatggcacaagtgggaagactttaagaggtgctattctaactaaattcagttatgataaccgaattg

SEQ ID NO: 18751 - DNA, 460 bp, Glycine max
  unsure (1)..(460): unsure at all n locations
agcttcgcttaatttacgaaggcagttgatantttgttttattnnncactcccaaaatgttctatggcttcttataattgagattttgattctggaagaatatgtcgaatatggggttcaaaacttgatcaaatagttgttgttggtgtgaatcactgagattccagaccattgtggtggtgctattgccaaagtatcagaatcaaatatcacttttgtctagtagtaatcagaacctattaaagcatgcaattccactgagattggtcatcgcagctcatttctttctctagtttatttggctttttaatcaatttataatttatgtcacctattgtaagaagaacttgaaagagaaataaccagggacttttattgcctcagtcacccgtattttaggcggaaactagtatacgttagatttataccttttttaacctccctaaactgacttttcata

SEQ ID NO: 18752 - DNA, 373 bp, Glycine max
agcttagatgcattttctgatatgcttgttttttattcgattggcgatgcattttgtgcaaaatttattgtacctcatgaaacacccttagcgatgggtctttcaaaaaatggaatggttctggcctatctttagtgatattatctgcacaaaaattggagtgatgttaatttaacaattatttgttaaaaaaggaagaattacgagagaaaattataactttctatataatttgaccccaaaatatactcataattggaagttatcacttagacacatctcctgttatgcatgatgataattggattagtattgcgttttgtgcaacattcatggtgccttatgaaatactcctaacgatgggtttttcaaa

SEQ ID NO: 18753 - DNA, 90 bp, Glycine max
gaaaatttagcaacacctgcttttgcctattcaacatgacagcctcagtaaccatttaacacattctgtgtattatatcagatggtctaa

SEQ ID NO: 18754 - DNA, 377 bp, Glycine max
agcttcttatccaaggctcatcttttgttgatttctctttctaccatggcttattccttaatggatggcgcctcctctcacctcttctcctttgtcttccgctgcatcttcatggtgaaaaatcaccattgaaggacctcattgaagctcaaagatccagcctccatagaagctccacaagcaagcttccatcaagtggtaatcagagcacaagagcttcaagtaggtgctccttaaacctccattaattttatttcttttccttctcttccattggtgattcttaatttttctccatgtatctcctcacatgtcttggtctaaatggtgttaacatgattctttaaagtttccccccgattaaacttgctatagaa

SEQ ID NO: 18755 - DNA, 277 bp, Glycine max
ttatgaactctacgaactcctattataatgaacatggaacacttgtgtacttgagatgaagtctggatcacactaagtaactctctcctgtttcctaattcggccccctcttttcttcctctctttctcatgaacatcttcaactctaccacgtatttgagcaactctttttggtattctatggtggctcttaccattcttaatcgtgcctatggaagacataaggctttggctaaccctcatgacccgcactctattgatagccaactcagggcct

SEQ ID NO: 18756 - DNA, 581 bp, Glycine max
agctttgagccaaaatcctgacttatcattatcttgacaccaggtgagaatgtcaattcttaccctcggaagcaaaaaaaaaggggagagggaaaatctccaatcaaagaggaagcaaaaaaggagagaaggaaaatttccaatcaaaggaaaaaaagagaggaaagggaattcccaatctaagagtgggagaaagcaaaaagaaaagaaagaaaattcccaatcaaagaatgggagaaagaaaaaagagaagaagaaagggaagaaagttcccgatcaaaaaaaaataatatgcagaaaggtctttggaccggacaatatctgaacaatacagaattgtcaccaaatgaataaaaagaaggaaagggaaccatgacctaaaatggtcttccccctttagttgccaggcaaaatcttgtgcgctagcaaccttttttcccccgactaaaccagaacagaaaaggaaaaagccagaaaaatcaaaagccaaaaacacacaaaagccgaaaaaaaaaacccccaaaagaacccattcccaagggaagtcctattgatccatgaacccccatgtaatttttgat

SEQ ID NO: 18757 - DNA, 589 bp, Glycine max
  unsure (1)..(589): unsure at all n locations
ntgtggaatanaccattacngacntactgantactaagcttatgcgcatacntctntacgaacgtncacttgaacaagacnatcgtatactaagatttatgcacccatatacaataaggcaccttcgtacctagattantacatgtactttcaaggtgttntgtacctacatacacgacatttcttgctaaattacatacatgatactcaaagactttggtatcataaattgcgtacggcacttctggggttctatacctatcttacacaactttgtgatgaatttggctatctcaccataggtgatacatttatgctgactcaagttttggtacctaaggcgatgcaaatcaagtataattcattgctgctcaattgtctatacttaaatgttattggtagtatctcttcatacatgcacaactattataagttgtggactgtgacataaaattcaacatctgatttgcacacaccaaacgtaacgcaaggttttgtaccctctacctacatttggtgaaaactaacattgcgtgaatatagatcgctatctatatgtcaaagtatactacagatctctggtctgctt

SEQ ID NO: 18758 - DNA, 302 bp, Glycine max
  unsure (1)..(302): unsure at all n locations
agcttccgtaaacgcaaaatgcttttanattatttaaaaaaacactaataagcatgaaaaataatgaaaataagtgcttgtcttttgtttaaaaaattaagaggaagagatcggtgacaccctaattcaaaacagaaaaaaatatctaagttcaaaacttgaaaaaaatgactaagaatttgcaacatgtcatgttcaaattcattctccttggattttgtcaaaagcacacattgtttgtctaagggtatattgctttgtacaactcggccaactagtcttttttaaaatatcgntattct

SEQ ID NO: 18759 - DNA, 194 bp, Glycine max
actatcacttgcaattttaaagattaatgtttttactattggcccgtccatttaattcttcactttttgataattaaattgtttgcaaagagaaatattatttgatttaatatgatcaagattacgctaatgatatagtagacgctataattaattttgattcaactaataaacgattttttatctaaaaaatc

SEQ ID NO: 18760 - DNA, 399 bp, Glycine max
agcttagtaaagctaagcactatcaatctccccctttggcaaattttgtctaaaacatacttagacacttcctgagcaggtacgagcagttatgccagtgggatcagcaactttcattatcaaagcaaacaaccacaacgggatgtgtaagggcgacaggaaaattctgcaagttgcaagtcggtttccggatgtcaagacatctcacgtgacatcagctttttgctccccctgactccatgctcttactgctgtgaagcaggtcactgcagcatcttctatcagctactagtcttttccaggatgtcaagacatctcatgtgacatcagctttttgcttcccctgtcttcatgctcgtactggattttctatcagctactagtttcaatagcttacat

SEQ ID NO: 18761 - DNA, 609 bp, Glycine max
  unsure (1)..(609): unsure at all n locations
cacgctgaagatgatcccgttttgangtancntatagantactcaagcttgggatatggtcttcgaccgcaaaaggatcgaagtgngctngcaaagaggcannatttggtcatctgcatcgataaaaactgnngcanatgaagaggatgagaatganggagaaacccatgctgtgacagccattcctatatggtcaagttccaccagcccaacaatgtcatttactcaccaataacanaccttctncttacccaccactcagttaatcacaaaggccattccntaaatcaaccacaaagcccacctaccgcactttcaatgacgaacaccacctttagcacanaccanaacaccaaccaagaaatgaattttgcagcgaaaagctgcagaatcaccccaattccgtgtctatgctacttgctccatattacttataagcaatgtnctatacccctgtnggttctcacatcatntctaggatcactcacacactgtctatatgagacccaggcttcatgacgtgatacctcaactagccaggtcatgactgctgtgaattagaaatctgtatctgcattataaatcactggcattgagcgttaagtttat

SEQ ID NO: 18762 - DNA, 467 bp, Glycine max
agcttcaccttctggtcctcctcatagttgttgcatgagaaaacatgctctattttcatctcccactcaacgtaggcctccggatcattctttcctttaaatggaggaatgttgagtttaataccatcaattcggttttgtctaggaacaccatcattccctcttctcctcctttcttcttcattatgatctctattctccatttgatccaacctctcatggagcgcatcatctcgttgtttcattaacctctccaaatgttgcatcaaagcttgcatttggaattgcgaaagccccactccatcattaggattagtacctgacatctcaaacaaacaaatcaaacgtaacaagacaattatagttgctgtttgaatacctcacccactcaagtgtatcacacaaatatggctcttctctaatgaaacactcttgcctttaacactctaaattcccttgagttctta

SEQ ID NO: 18763 - DNA, 577 bp, Glycine max
  unsure (1)..(577): unsure at all n locations
ntgttggattcgatcaccctgnanngcaccctatgnantctcaagcatgtctcagcgtntatgcgagacngagaccaacatgctagctatcatctcttttactcttaagagtcgggtctagccacggcccacgagcatagaatctctgacgagtatgctcaagtgtacgcggtataagaggctagaggaatggtgatcgactcattacacccagaggccaccatgtggatggacctggttgctcttaccttgacgggagtcaagacttacccgcttgtaaccaagccaatgcgatgtgaacctctacaccctcnagatcatgggccttngctatgtcacattgaagactaatgccacataatagaatcgttcgaacctgatggctctagacctgatagaacactcctttgaataatgaatggtctagtttactacaaactggcaataaaactcacatgacttgctgcatcttttcccatctactcgagtttgaaacatttttaacgctatgttctactccaacaatctacttgtacaagaactcgagaaatcctttttctataaatggcttttggtg

SEQ ID NO: 18764 - DNA, 300 bp, Glycine max
tatgactctgggggcaatctaaacacacaaaccaaggccatgatggaaaataggtaaggtagaaatgatcatagttattggcggaaatattgacttctgtaactgctactaagcttgcaatggaagacattgtatatatgttgatgaattttccattcactaatacaaatttgtttaatttgtacgctcaaatctattagctcatgtgttcaatttgaaatatgaaatttctattttacatcttttatttggcattatgtaaccttgaccagcacatcacaaatttttctttgatttctc

SEQ ID NO: 18765 - DNA, 292 bp, Glycine max
tctcaagaaggtgagcttagttatgagaggggtgtgtgtagctaagctctagcttctcaaggaagttttctcaagaaagcttctcaaggaagttacctagtctataaatagaagcatgtgtaacacttgttgtaactttgatgaataagagtcttgtgagacacaacttaaagttcaacttctctcccttttttcttccttcaatttcgtgctcccccctctctctttctctccttctttattttcctccattgaagcatcctctacaagcttcttatccaaggctcatctt

SEQ ID NO: 18766 - DNA, 336 bp, Glycine max
aataaaataaaatctgggccagattagatgagaggcgatcaaattaaatctagatgaaataaaatctagataagaacaaatctagatgaaataatatctagattgagatataaatctggtattagatgaggatgtgatcaaactgtctgctctcttcaaggccacgcccgattccagattcaagcgcaatttcttacaattctcttgagattaaattataaacacaaaattagtccagttcgcccaaatgactaaactgcataattaatttgacaattaaggctaatcagtaattaatatggtgacaaccagggttaagagatatgaataaatgat

SEQ ID NO: 18767 - DNA, 291 bp, Glycine max
tatgaacacatcgtcggtttcttgaggaatgaatgaaaaagatgatgctgacgccatttggattttggaaggttatgagaaggatgagaggatttatagaaggggtaaactcttgatgtgggcttgcaaatatgatcttgttctctctatatgtagggttgtgcagtgacattgtcctaatatatagcattgggaaatgacgaaaacagaaaaaaaataataatttaaagtcgttagttactctccgcaaagtttaagtatcaaaatcataaatattaaaaaattaaagaa

SEQ ID NO: 18768 - DNA, 352 bp, Glycine max
actgtagcatttttaactatgaactatttgaggaatgcagactctcttttttttttaacttaagaaaaataattgctgggttgacaccatttattataaaaatactttaagttttaatttgccaaaattcttttaataatattttattgacatgtgaagggttatggtaaaaatatgtttgtcttcaaaatattttttgctctctccctcgcaacactcatcagtgttaattttttgctaattttgcattcttggccgcgtcaaccatcaaagtagtacagctagatacgatagatatttaattgctgtagaaaataaatgtggcaaagtctcctatgtgcctaaatttctg

SEQ ID NO: 18769 - DNA, 286 bp, Glycine max
tgtgataaaaaaagaggggcagacatgaaaaggtcacagtcacacccataggaggcggaggggtattgaaatgaagtccatacataatgagggcagcgcctttgaatctaataggttttttaatcgtttcctttttaaatgattgatttgattcaatttatgtgtaatatatctttcattgtcaatggttcaagactttaagttgggaaattcttaattagttgtttgacttttatactcttagacctcacctaggtaaaaaaactgaacttcatttcgtgtactc

SEQ ID NO: 18770 - DNA, 323 bp, Glycine max
agagcgtctctgtatattacctgactcaatcagacatacaagtaaaaagttattatcgtttgaaaatcctcagaacttcggtattcaatttcgagcgtctcgatatattacgggactcaatcagacatccgagtaaaaagttattgtcgtttgaattagctctgaggttcagaattcaatttcgagcgtctcaatagattacgggactcaatcagacatccgagcaaaaagttattgtcgtttgaattagctcagagcttcagaattcaatttcgatcgtctcaatatattacaggactcaatcagacatctgagtaaaaacg

SEQ ID NO: 18771 - DNA, 284 bp, Glycine max
ttgagcaaattcaaacgacaataactttttacacggatttctgattgagtcccgtaatatatcgagacgcttgaaattgaataccgaagctctgaggattttcaaacgacaataactttttactcgaatgtctgattgagtcccgtaatatatcgagacgctcgaaattgaatgttgaagctctcagcaaattcaaacgacaataactttatactcgaatgtctgattaagtcccgtaatacatcgagacgctcaaaattgaatgttgaagctctcagcaaatt

SEQ ID NO: 18772 - DNA, 360 bp, Glycine max
agctagtaagtattattacgaataatattgcataagcaagtttcaaaatcatacaaatgcacagtactaaaaattcccttttttactatgcatattctacgacagtcacccaaaaaccgtctcaatatataagccggttgcaattttgtaaatataagaattttttttagcaaagatggttttacaaaaccgtgatagaagtgagtgtattttataatgtctctccctctactttctcctattcatgtttctatcactctccctctcacttctcagaatccctgcctccctctgccctgctactccccaatgaaacctttgccatcatcgactcctatcgcaacaagtggtactccctct

SEQ ID NO: 18773 - DNA, 289 bp, Glycine max
tgttaaacactatttgtttctcatgattggacaacaaaccacaaaagagttatagctttagtagtaagagtatttgcatattagtctggagatggaacgcgacacactaacatgcttttatttaggacctttttgctcataaaaaagtgcccaatttcatatgctttgtcctggagtgccaaacaagattgtgtgacagattgtactaaggttgtaatagtagatctttggagtctgaaaaaactcagaagagattgaatccataggatttcagatgcagtactcagcc

SEQ ID NO: 18774 - DNA, 359 bp, Glycine max
agcttgcccccctagccacacccaacagaatacactgacctgtcaattttcaaggaaggacaacataatgaacattcaaatattatcacactaagaatgaagctagatataagaatcaacaatgtttgaccattatcatgaatgttgaagttgaggatccagacttctggtccacatacatgtaacaaatgaaaattaaaaaaaagggaagatttctttattagttaaagaatacatcataatgaaaagaaattgtcttttcccttcagtacctttgtatgcttaaagaatgagcatgcaaaacttccttaatttgtataatataactaccaattagagttgctctttataaaaaaaat

SEQ ID NO: 18775 - DNA, 281 bp, Glycine max
tctacttatgtggcagggcgggcttccctcactttcttgtctccaacgcgagctttgaccactgctcttccttcccgcgatgcttcttttcatatccgcctgagtgggcttatagcctaaaccatacttcccacgatttcctttggcatttatcaggctagttatgccgccgctgtctttgcctaaacccattccgggttcgtaaccgttccccaacataactcgggccatcattactgctgcatcggacaggcaaggctgcccagagaatgggtccacag

SEQ ID NO: 18776 - DNA, 356 bp, Glycine max
agcttatcgagtgtggaaatttagtactaccacctctcactgtgacaactgtgtaagttttatcttgttctacttggagactaccttgaacattttattgcaatttgagctgtaatttctgatggctaagatgttgtcatattgaatactaaatttctatccaacaacaggttagtaccgcttgtcatcctgcagaaaaaggtctacatgtcaatattgaggaaggaacttcataagctacttgcactatcttttggaacttcaaatcatgagtcactacagaatattgtcagtcaagcccttgttctctctctctctctcttgaagtgatttcttagaatgtgtgtttgggccta

SEQ ID NO: 18777 - DNA, 280 bp, Glycine max
taatacaccaattattaatttttttttaatagattgtaggtattttatatgaaagataatcttatttaaactggataaataagataattataagtgataaaactctgtctccaaatatttaacgtaattatatatgtaagactaattaatctaaaataactttgcatgattaacatactcagtgctataacactaatagtttggtaataactaattcattgataaatattataaaatcatcaatatttgagagtattagaataaattttacttcgtatta

SEQ ID NO: 18778 - DNA, 282 bp, Glycine max
agcttgtaatctgttatatttttcttcaacatctctgcactgttcagctctaccttgtaaaatcacgaatgcttctggatgagatgaatgtgatgcgaaggtgtatcgtctttctgcgatgaatgagctggtacaaatggatcattttttgaggtatattccttgatatatcattgggataggctatatatacatattccatactgatggatttattaaatagactgctgaggtatgaactgtatttatgctccttgtgaggaatctattaatatgaacttt

SEQ ID NO: 18779 - DNA, 275 bp, Glycine max
tagcattctcatcaatggctttatacttgaattcttcacgctaaacgcccacttgcatgacccacatcgagtgaaacgcctcaacaaccatgcccatagtttttatcaaccttggcccctgtctattgatggagtgacccttctgcaccatactgtcaaacaactttacaccgttgctcaactccatgaccagaagcacggccgagaaatcctcgttcttcacttacatgcagacaatgttggcgagatccgacaaagagcgcattatatgaatc

SEQ ID NO: 18780 - DNA, 350 bp, Glycine max
agcttgaaaggatacaccacatttgttgtgaacaatggatccatttggaaaataaaacctaatgtggagttcacaactgtctgactgcttgtctctcccaagaatgccatatttttttgtaagacttgggttgatactgaaacttgtgctttcttacagggttaggttatgccatatatatagatgacttttaatatcagtgctacattttttaaagattaaaaatactcatgcacatgctttctgtatgtgttgtcaactagaccaatgacgtgacatgctttagcttacatcaaatctgcatgtgtagtcatgctgcgcagggttctttcacacgccttatgttaatg

SEQ ID NO: 18781 - DNA, 282 bp, Glycine max
ttaagctttaagcacccacgagtgttttatcaccctagtagcaacagtgtatgtagggttttcttcgagcgaggacaatgtgggttctatggggttcgagtgaggacaatgtgggttttccgacagtgtaaggggttctgtgggttccagcgaggacaatgtgggttttccggcagtgtaaggggttttatgggttcaagcgaggacaatgtgggtgtcgagggagcaatttccggcagatttcaggcgggaggagaaagataagagcgatttcacgaagga

SEQ ID NO: 18782 - DNA, 355 bp, Glycine max
agctttaaaagttactatcatatgttaaaatttcagggagaactctattttctataatttttgagacttgaaacttgcgtactggattctaacaaaaaaaaatgctttcggacttgtttagtactagaatcataacaaaggatctacaaccattgaatttttgcaaggttgaaatttttagaaacatgaaagaatcctcttaaacatgctaaaaagagtttataaagaataagtacttttgtgggttaaaactaagagatgagtagactagtcctcttgtagggacagtcgacctctcagtcttttttattttatttaaatttttgtagatttttaattgagagataagttagta

SEQ ID NO: 18783 - DNA, 286 bp, Glycine max
ttgaatgctctattcaatggagttgacaagaatatcttcagactgatcaacacatgcacagtggccaaggatgcatgggagatcctgaaaaccactcatgaaggaacctccaaagtgaagatgtccagattgcaactattggccacaaaattcgaaaatctgaagatgaaggaggaagagtgtattcatgacttccacatgaacattcttgaaattgccaatgcttgcactgccttgggagaaagaatgacagatgaaaagctggtgagaaagatcctcagatctt

SEQ ID NO: 18784 - DNA, 331 bp, Glycine max
  unsure (1)..(331): unsure at all n locations
actttgattatccttctgatacaatgctgtcaagaatgaagattggatgaaacctcaaaagaaatcttattattcaccttacagcttggaagaatgctgattatccatttttgtttttttnttttttcttgaagcagtagttctaggtcgtctcacttttttcaaaatgtttttcattattaagaaaaggtaacgaagatcaaattcgagcttgttttatagtccaggagacttcacttggggtattattctgcacccttatcctgagatctatataatgaagggaaccaaaaagtaccacagagttggaccatggaatggtttgtgtttc

SEQ ID NO: 18785 - DNA, 284 bp, Glycine max
tgtgccttttcacgtcttttatatgaatgtagcatatagatccaaagacccttaggtgctttgttgatggcttcttcccgatccaagcttcaattggagtcttgtcttttacagacttagttggacatctgttgagtatgtaaacagcagtgtagactgcttcagcccagaatgtgttaggtagtcccttctccttgagcatcgatctagccatctccataactgtgcgattctttctctcggacactccattatgttgagaagaatatgcgactgtaagttgt

SEQ ID NO: 18786 - DNA, 347 bp, Glycine max
tcaagctttgatccaaaatcctaactcaccataaaccttgacccagggtgagaatgtcaatccttacccttggaagcaaaaaagaagagaaggaaaatttccaatcaaagaaaaaaaaaagagaaggaaaatttccaatcaaagagaaagtgaaaaaaaaagagagaaggaaaatttccaatcaaaggaaaaaagagaggaaaggaaattcccaatcaaagagtgggagaaagcgaaaagaaaagaaagaaaattcccaaccaaagagtgggagaaagtaaaaggaaggaaagaaagctcctgatcaaggatcaaaacaattcagaagaaatgtgcagaaaggtctt

SEQ ID NO: 18787 - DNA, 281 bp, Glycine max
tgtaatcgattacacacatactgttatcgattatcagaggagtttttccagaaaacattctcaacagtcacatctttttatctgtttcttaaatggccatcaaaggcttatatatatgtgacttgagacacaaattgaacaagattttttcagaacaaaaaggtcttatcctcttaaaaagcaaaattgtttcatcctcttaaaaattccttggccaaaacacttgtgattcaataaggaattatttgagtgcgcaaattgttcaatctatctctttcaag

SEQ ID NO: 18788 - DNA, 362 bp, Glycine max
agctttggaaatgatttctatacaaaagttagtcgtataaagcgactaacaaatcttcagtaatatcccgccaaacccagaaaactcctaatctcaaacacagacttaagactctcccacttaagtacaacttctatcttagaaggatctatatctatactgccttaggatatcacatgtcctagaaaactaactttatctaaccagaactcacacttggacaacttagcataaagttgtcggttcctaagggtttgcaacacaatcctcaagtgctcttcatgctcctttctagtctttgagtataccaaaatatcatctatgaaaactaccacaaaactatcaagataggggtgaaagat

SEQ ID NO: 18789 - DNA, 290 bp, Glycine max
tgccacccagctcgccaaggcgagctctgttgcttcctccagaaggcactgccttctggagaacttcctggaaggcccaagtgggcctggttgctatttgcatcccccttttttactaaatacaccccttgcccttttttttgctgattctttttccgtaacgttacggaaacttatgaattacgtaacgatacttgttttccttccgtaatgttatggaaccttacggattacgtaatcatcccttttttgccttccggaatgttacggaactttacggattgtgcact

SEQ ID NO: 18790 - DNA, 364 bp, Glycine max
  unsure (1)..(364): unsure at all n locations
agcttaaagtatgcccgagttattcatccttatgagatgttgntgaagtattggtgatcagaattgccattccttggattatagggttgaaccaagctcatgcttttacaaaaaggttcatcaagtcaagttgaaatatggaagtaattgtcttgcaaaattggggcaaaagatgaatcgagtcacatcactgcttcgtctactgccaaacatatttaggattattgatgtccttgttacttccagtttcaccttgacaaagatgtcatggaccatgttgaaaatctaaattgattcaaccccatatcctgcgtaaaaattcgcaatcttcaactgtacatcattcgcatacatccatgctttt

SEQ ID NO: 18791 - DNA, 291 bp, Glycine max
ttcttcaccccaatatcttcccccacattcaataaatgcagcagctacggaaaagcttggttctagcagccccaaggctccattgttgagttttttctttccttttcatgttttggttcatccctacaagtaagtgcattgtcccttgattctttggctctccattgatgtattttggtgctctaaattgtctctgtttggaaaattttgtgaagcaattcatgcttgaattcatgtttgatttgttaaattggggggttatagggaatggccataggcctatctttgatt

SEQ ID NO: 18792 - DNA, 361 bp, Glycine max
agcttcccaggatctttcatttttgaaatttttaggtagaaaatcttctgggtctcctgtaagaagcctatatctctgttagcaagcagtatatcatcggcatataatactaagaatatgtatttactcccactgaacttatgatatacataatcatcaactacatttgcctcgaaaccatatgaggtaatgacttgatggaacttgtaataccattgacggaaagcctgtttgagaccatagatggatttctttagtttgcataccatggactttgagtcacctaacacaaagttttctggttgcaccatataaatcgtttcttcaatgtcaccatttagaaacgcaatcttgacatcca

SEQ ID NO: 18793 - DNA, 284 bp, Glycine max
ttaggttggcgcacgatataactatcccatgctcaaccaaacacagggttaagtcttcaatgcaatcactttggatatatttttcctaatataacatcctatcattcatgaatggtattcaaccaaaaaacgcaaagagaaaattgactgttgctaatgagtaacagaagcacacctgatatatatttcttgtgtccaacatccctccagtactctcactatctgaaactggcttttccagctgcactatttgcataccctccattgccttcacctgtggcttc

SEQ ID NO: 18794 - DNA, 327 bp, Glycine max
agcttacacaagctcccgatctgaactacttgatgaacatacacccttgagaatcttgacacatctaagaaatggagctatgattattatactgcaaaggatatgtacaaaggtatgcgatggtttaagaacattttaccattaagatgttctgttgatactatattacttgttctccgatgttatactgaaaacagggaaaacagtgtattattgctgtagggggcatttactcgcgcttttatttgttgattctatttttacattacaaaaaacacattttgctttctaagatttatgtgaaatgactagaacaactttgttttt

SEQ ID NO: 18795 - DNA, 284 bp, Glycine max
tggccggtctttactatctaagccggttgtgtggttgatgtaggccttacgcgaaaattttaagatgatataagagtttatcctagattcattgctggaccacctgcataaccttacgtcgtaggaaggcgttggaaagtcgtcttaattttagtcacccctatgccaaaaaaggctacctacgggcttcaaatttcatagagactaggcctaagtcttgattataacgtttgggtcattctcaccttgccagcacgttttacaggattgagtctgagcttaaa

SEQ ID NO: 18796 - DNA, 359 bp, Glycine max
agcttaatagcatgcagtgactagcgtcatcatcttcaccttccccggagatgtcagcctcttccggccgagaatgcgaaaattcttatttgctatttgtaagactcaaagcccaatagaatgcagtgtttgacgccatcatcttcaccttccccagagatgtcagtgtcttccggccgagaatgtgaaaagtcttatttgctatccgtaagactcaaagccccataacatgcagtgactaacttcatcatcttcaccttccccgaagatgtcagtgtctttcggccaagattacgaaaatgtctcatttgctatccgtaagactcaaagcccaatagcatgcagtgactaacgtcatc

SEQ ID NO: 18797 - DNA, 288 bp, Glycine max
taccaagatgtcttcctcgcctgacacgatgaccaagtgcccctccactacgaatttcagcttttggtggagtgtataaggcacaactcccactgagtggatccatgggtgccctaacaggcaagctataaggggggttaatatccattatttggaaggtgacttgacaggtgtgagggcctatttgtactaggagatcgatctctcccctaacctctcggcgagtgccgtcgaaggcacgaaccaccattgaacttggttttaagtgggaagcattgaatggtaact

SEQ ID NO: 18798 - DNA, 253 bp, Glycine max
agcttgaacgatttacttttctcgctcagctggcttacagcatgtgtattgcaatatgggttatggtgcgatatcttttgtcggttgatattactggctgtgttgaccgattgcatggaactctcatgtcctggtgcctgcgctctcctgtggatatggtacgagatgcatgaagatgcatgtgctgagtcccatgcacgtaatctgcagagtccaaatatgttttttttggttgatttagcacgggactgga

SEQ ID NO: 18799 - DNA, 213 bp, Glycine max
ttaccaatgttcattgcaatttttcttttcagcatgagcctggccgagatatactatggtgactggtgactatagctctactagtaaagatatacaggtgcagatatgcgcaaatataatccatttgactacccatttcaaatatttcaccatgagagcttgcatgagtgcgagcgccgacagcctctgatgaggagacactctttataacag

SEQ ID NO: 18800 - DNA, 333 bp, Glycine max
cctgtaatctgtcaccataggcgaggttgtagccttcatcatgaactattttttgtactatctgttaattctcatgtatatatatatacagagatcagcggaataagagcaaacggacagataggaagtaagaatgcagtatgataaatgaaagcgaaatataaactgtaaagcagatatcaagggcacaccgaaacggcttacaaacccatgtttttgaaaataaagaaaccgaagcggcggcagagccacacaggatcagtgaggggagaagggagatatgaaaaacagaacttgaaatttattgaaaccgaaagaaaagcttacaaagag

SEQ ID NO: 18801 - DNA, 287 bp, Glycine max
tgtgcttgttttatttagattcctaggatcatgagcaactaggtgtgtcctactatgacttgagaaacaaaggtgatcaaataacaaacagaaatttaaaaggtactaggttgtctccaagtagcgcttctttaacgtcttgagctatacgcgtgatgacttgtcggtcacgaacctagtacttttgcttacctttggctttggacttggtcgcctgctggtcggccacaggtcgtaggcaacgctccaacctttgtagatgagctaaagggctctggaggtggcgg

SEQ ID NO: 18802 - DNA, 356 bp, Glycine max
agcttagagccataatcctgactcaccataaaccttgacccagggtgagaatgtcaatccttaccctcggaagcaaaaaaggaagagaaggaaaatttccaatcaaaggaaaaaagagaggaaaggaaattcccaatcaaagagtgggagaaagcaaaaagaaaagaaagaaaattcccaatcaaagaatgggagaaagaaaaaaaaaagagaaggagaagaaggaaagaaagctcctggtcaaagatcgaaagaaaacagaagatatatgcagagaggtctttggaccagacaatatctgaacaatacggaattgtcaccaaatgaacaaaagaaagaaaaggaaaccataacct

SEQ ID NO: 18803 - DNA, 282 bp, Glycine max
tcgaacctctgttggagttgtcggttgttgccactccataaccgactccaccttgttcggatccaccgcaaccccgtccttagaaatcacgtgccctaagaactgcactttctccaaccaaaagtcacatttcgacaatttggcgaacaacttcctgtccctcaggatatgcaatacaatcctcaagtgcttctcatgctcctccttattccttgaatacactaggatatcatcaataaacacaaccacaaactggtccaagtaatcatggaatatacggtt

SEQ ID NO: 18804 - DNA, 353 bp, Glycine max
agcttcggaagattgtgatgttgtacaagccctaaaggcagagcttgaaagagcccgggtagtcgaagagaagttcaagtccatagccatcaaagtctgaaaagagtatgatgaactaagggacgtcaatatggccaccgctgaagccttggaacgagaaaccaagaaggcccgaaaggaagaacacgaccaaagcaaagttttgaggggctttatagggcagcaatagtgagctcaagctccaaagaggtgaaaggaatcatcacgggtcaaaggcatgatcttgaaggacgagctaaaggcttgccttaagtcgaaaagaaatttgtcccaacagttaagcaagactgaag

SEQ ID NO: 18805 - DNA, 283 bp, Glycine max
tttccattctgcagtagcagatctgtaaactttgaatttccctaggaatttagttactcgcataaagtctattgttattcctcaaccaaggttctccccacgcacagagattagcaccagacccagttgaccgtctcagctcttccttcaacaatatttgagaagcgtagatgctacaccacacataggatggaatgtgacctacaacaacgtccaaaaaatccctcctagggaaatatttatctttgaaaatcctataaaccatagttttggtgttggatac

SEQ ID NO: 18806 - DNA, 353 bp, Glycine max
agctttggtaacatctttttattttagtataatacatttacaccacaaggtgatcaacaaagtaagatgtaacattaaagggttacaattgtgttttaatgttcataaagttgaactacatttaccaattcatacaatgcaactacaaaattgtaaatattagaatcttttagaggagtcaacaattaagtcaatatgacatgtaacgactaaagcagtcatttcaacaacaataataacttaattaggacatttcaaaattcaaattttaacatatgaaaatgaacagactattaagagccaaatcttaaaacaccaaaaatcatgaattattttgttcataattatttttt

SEQ ID NO: 18807 - DNA, 286 bp, Glycine max
tgtcactggtaattgattaccataatcatgtaatcgagtacacaatgcattttatgaaaagatgtgactcttcacacttgaatttgaatttcaacgttcagatacactggtaatcgattaccaatatattgtaatcgattacaccatttaaaaaacatttggaacgttgcaaattcagttaaaagcttttgaaatcaaactttatcactggtaatcgattacaggaaactggtaatcgaataccagagagtaaatactctggtaacttagaaaattttgagaaaac

SEQ ID NO: 18808 - DNA, 344 bp, Glycine max
agcttccaatcaaatgacatgattgtccaggaattttataaattgttggaccttttcctttgggcacactcgtatctatcttggctctaagagagctaaatgcaaacatcatattataagccatgatactatgttggtaatttatgctttcgcgtgattcctaatcacataatagttgttgcaaaagcattggaggattcttgagaaaaggaagttgtacccttcccatgatgcaacaaatactatatttggcattagcgtgatttctattttttcttgttctttcttcataccacatagcagcttggcaatatgcacatgtttcagaaggatctcctagatca

SEQ ID NO: 18809 - DNA, 285 bp, Glycine max
ttttaatcggcggtacattttggacgtgaaacaacattgataagtgtgttgtgaatgcgtttccaaacacgtgctttgaaaatcacatctaaaatgtagaaaattacattcaagactggaaccaaagatggtattaaggttgttttaacttaaaattaatttctcctcataaaatcaaatatattcatgtttggttgtatatcaaattcaacttatcaatccatgtttgtggaaagcaacaataaatgtgtttttagtttcacgttacattctacaaaattatgt

SEQ ID NO: 18810 - DNA, 337 bp, Glycine max
agcttgtagcaaagatgacgtttctctgcaactttgcccacaaattgagtgaaactcataattatagacaatctattaataaaagctttgatggtaaattttagattccaccttagagatattgttgtgatatattcaatatgaaaaatcattatttggaaagacccaaaccatttgggagttatgtcatcataatcgctattgacataggcaagacccaagaaggtgcccttgatggcaaagtaagcttttctctaaaattgaagggtgtccatttttcatctctaagatttctctctctaatgtatggtgggtgttgatcaagagagaaaaagtg

SEQ ID NO: 18811 - DNA, 279 bp, Glycine max
tatgctggcaaaggtctaaaccagttgttgttgatgaaagaaattgctctgcagagactgctcttgtgggagatacagttgaagattcaatactaatgcctgatcctttaccttctgcaacttcatcaaacaattctctttctacatcagtgtcaagtactaggaactctggtcggctgggtgcctcctttgatggttcttcacttacggcatctggcagtggttttacatccaacatactaaatgtatctactgccgaagaaactccacaacgaaacc

SEQ ID NO: 18812 - DNA, 364 bp, Glycine max
  unsure (1)..(364): unsure at all n locations
agcttagacagaaccatcatatttaagttgtatccaatcaaaggaagggaccacccatttgatccccgttggacagaaccaacagatttgtagcaaccaaagcttctcaactgacaaggcatcacattaacagcaactaaacaaatatcgaattcagctttttcttatcaatacaactgaaaaggagaatttagtatctaaatcaacttagtgcgattcaaattattagaatttgcagtcccataggttcagagttgataaaattaattttataccaataaaggaagttaaaatacatatctaaattaaatctcaagcatgcactttntatttgattttattagaaattacaattattaaattc

SEQ ID NO: 18813 - DNA, 291 bp, Glycine max
tcgggctgttcaattgctccaggttgctgcatagaagggcaaaggtatgtatggtggtcagtagaggagcacaaaccgcagacccttgtgacaggtacaaatttttggttcaaggccagctgggttaccaagttaaccaatgcgtccagtttgccttcaagcttcttagtttcagatgatgcagctgagtttgtagctaccttatgcactcctctaatgactatcgcatcatttctggcgctaaactgctgggagttggaagccatcttctcaattaaatttctggcttca

SEQ ID NO: 18814 - DNA, 318 bp, Glycine max
aattatgtcctaaatccaaattcttagatggtgtaccacatcatgatacaccataccaatttaatatccacttattctgagattctattcctctttttctccttccttacctacacccagtaatatcaacaatccccactctgcatcaatggatttatttattcattggctttcaactaattggttaaacttgtgggtgaattgttatctacaatagtaaacatgtgtctgatgtaaaacacatggatgcagcaaaaaaaaattcccctttgttatcataaaattaaggtataacatttttttgttggtatatggcac

SEQ ID NO: 18815 - DNA, 290 bp, Glycine max
tgtcaaggcacagatttgggacactgctggtcaagaaaggtccaacattttctactatgcattcagtttcttcaaaatgaattgctttttattattatgtgttttatgtgccacaatgtcactatgcttgtgttgagctataattatcatttttctattgatcatgattgagaatgcaaccaagatctgagaagtagtggttaagatctgaatagatattttcagaatcgagataaaataaagcagcatggttttttactataattaagccaaaagttgcatgtgggtga

SEQ ID NO: 18816 - DNA, 287 bp, Glycine max
tgcttctacaggatgaaattagtgtccatatctttacttgtcttttcattttcaataaaagataaataaggaggggcaactgtcagaccctaatttcgtccggggatgatcatttgctaacgttttgattcctactaaccgaattgacctacttgacaccagctgccatgcaattcgaaaggtttttcaacgtttcagaagagaatgtggaaaatacccaaaagggagggtgaaagggtcatttggaagccttttctgacccctagctcgcccacaaaacttaggag

SEQ ID NO: 18817 - DNA, 358 bp, Glycine max
agctttacactggttgcagtttatgaggcgcttcaaatctcctttatcaccacatattagacatatattttgtctgtcaagttcattgaaacaattatggacacattctaatattaggcaatgaaacaagctataagttgaaatattcttaaaataaagagaaagcattgttatcagtaataatcatagataaattctaactcgagtgaatatttacagcgaactgcacacacagtcaacacaacaatcatgagatctagtatttattattgcttacatatccactattgaaacatactaagaaaatgggggcaacacaacaatcagctaaatgtaaaattagatattcctaagcata

SEQ ID NO: 18818 - DNA, 286 bp, Glycine max
tgagggatttttttaactatgagatgctatattattttttagtgatgtgtaatatctattgtattcttaagaaattcagatggaaatttgtttagcttatgtctcccctgtgttactttacttcatgcaactgttatggggaaaactttgcttgtttgacatcaatataattattaatatagttgctttactgatgatggaaatgtgaatttcagaatcacatgaaatttattacacgttaaaagcttgcagatgcaaagaaagctctcaatagtcttctttacaa

SEQ ID NO: 18819 - DNA, 359 bp, Glycine max
agcttgtaagattatggggtttccatcacatgtggtactaggtggcggtcggccgatggtgcacaacaagttttccacattcacaaagcgcgcataaacccaccatcccctgttgcccacctccaactgagctcacgtactcccacgtagcccatatcctcgtttctctcaacatcgggtccccatcaatcctgccaagctttcccaacatccaagtaatacaacattcaaacagcacaaattatcacagccaagcaaaacagggcaaaggcagaaaactctgcccaaaacaccaaccaaaatcacagcttttctcacttaaagaccccagtaacaattccttcgttccaattcgttaa

SEQ ID NO: 18820 - DNA, 286 bp, Glycine max
tgtatttaaaaatgttttaaagatacttttaattaatattagaattttgattcctttattaatacatatgtgaggggtatagggtgtcacaagtctgcttattcttaatgcactccacacaagtcttaaggtctttaaactctacaggattgaatacctcatgattcactacccttttattgctctcaatggagatatgctctaatccttgatgccatatcataaaggaattttcattaatattaccccttgtaaactattttgaacatgcattaaactattactg

SEQ ID NO: 18821 - DNA, 349 bp, Glycine max
agctttttattctaattcagttttccatgagagtaccctaatgtctgaagtttatgggattaagaaggtcattgaccaatccttattttatgatttaacaaaattacctagtgaaggtgtgccttttgagggtgcactaattgatgattggaaattcgatttttctgtgcatgatgcccgccggttggttttcaacaaccaagcggatatgaccgaaaggcttcttgccggatcattggcttttgaaagccacatcctccattaccttattgttcgcatcttactccctagatcttcaaaccttgctcaggtttctaaagaagatctcattgtcatgtggacctttcat

SEQ ID NO: 18822 - DNA, 287 bp, Glycine max
tgcatcattaattttttctttttcaaatggagtagttggcttttaagttgtattttttatttgacatgcggcttttagtagttaagtagtgttgttttaacaaaattctctaatatgtaagtcaatattttaaaaatcgattttgattttatgaaatcaatatttagatattttagtgttaaaaaatttgtgacattcttttttattgtattatcgtaattagaatatttagttatccagtagaactataagatatttttacaaattttgatcctttgggttaatta

SEQ ID NO: 18823 - DNA, 354 bp, Glycine max
agcttgttaaagaacttatgataaatcaagaacaagcttgttcgcacatcgttcgcgtgtatgatatccactcgacaaggtttaaagtagaggagaccttcaatcctataacgcaacgtggcagacaaaagtgggcagttaacttgaatggccattattgtcaatgcggaaggtattctgcgcttcactatccatgttcacacattattgcagcttgtggttacatgagcatgaactactaccaatatatagatgttgtttacacaaatgagcacatcttaaaagcatactccgcacagtggtggcctcttgggaatgaagcggcaattcctccttctgatgatgcatggacac

SEQ ID NO: 18824 - DNA, 283 bp, Glycine max
tagaatgaatgcatccacccttctgagggtgtggaagttgttgaagctcataaccccaagggttctgcacctacacaggaagatctcaatgttgagattattgatgatgtgttggccaagctcaagacagatgattagcttagagaaggaaagaacataaaaagaagaagaagttttctcataaggcaaaaaaggttggtgttactactacaattgtcataatgcaccaaaagtagaagttggtgagaggacccatgttgggtttgtgaaggattcagtgttt

SEQ ID NO: 18825 - DNA, 349 bp, Glycine max
agctttataagctcggtctgtgagacaaaggtcaagtggtcgcgatatacgaagatgatgttccgagtacattagattcggtacgaccatgccctcctgatttccagctgggaaattggcaagtggaggaacgccccggcatttacgcaacgagcataatgtaaacctttacggttttaaaagctctatagttgggcctaggctttagagtttttccttttgttaaggctttgtgtcttttgttgttgattttataatacaaggatctttcttcatctgttcctacgtctctacccattctcattcatttgcatgtttacttctttttcttgaacggcggatccgatga

SEQ ID NO: 18826 - DNA, 282 bp, Glycine max
ttgcagatttggtcttcgccagtgaaatgatcaatgtgggtccgaaaaaaggcaaatttgatcatcctactaggacgactgagaaaactggggcaaataaagagggtgagaaagagggagaaacccatgttgtgactgccattcctgtacggccaaatttcccaccaacccaacaatatctttactcagccaataacaaactttctccttacccaccacccagttatccacaaaggccatccctaaatctaccacaaagtctgtctaccgcacttccaatga

SEQ ID NO: 18827 - DNA, 365 bp, Glycine max
ttaagcacctgagctgcaagcttttgctatttggcttataaagccaccacatgtgagggatctaatgcagccccgcaagcagaaattgagtttgatggacaccatttccgaagcaacgagcattagtgccgcttcaaaacgattaaagattaatctttcctcaaagaatgacggggccagctagcagaaggagagtacacagaattccaagcggaggtttctataaggcattagacccaactgatagagcccatggctaagtatcaccctgaaatagccatggagttctacgtaaatgcctgaccaattgaagaagagttatggataagcattcctaagtgcggggcccatggatcccatatgat

SEQ ID NO: 18828 - DNA, 282 bp, Glycine max
ttctcccaagtcctaaatgacatttcaagctagtattaactcactttaacctccatttaccacagaattcagacttaaccttccaaccctcaaagcctcactctttttccactcataacatcacattctcactttctaaccctaggttagttctacccttcatctctaacagttttccatcagcaatttcagcatataaacatcacaaacatcatcacaaaaaccctaaaacagaatggggatgtttaactcatccaaacatggcaatttcaacaagctttc

SEQ ID NO: 18829 - DNA, 345 bp, Glycine max
agcttgagcctttcccacatttttggagcattcttgcaaaacagcgagaccccaactggtctctctatgattttacctagtgagagtgacctaacttactagtgtatggtttgacttgttatgtactcctaggcgcccgacgaggtttttcaatgaaacggtaccacattgcatataggattgagtcttagtgtatttgttgcataacgctggggtattgatagatattgattgatttaataatattgtgttttgatccttgagtacgtgaatgttgtgaaaatgaacgagacatgggttgtgatgtgatgttacacgacaaagtggtggaatgacgcgaactat

SEQ ID NO: 18830 - DNA, 285 bp, Glycine max
ttgagtttctttgagcagatgttgaattatggttgcattccaaattcaaatacatgggagattctttctgagggccacattgcagataagaggatttctgaagccatgtcctgcttgaaagaagcttttatggctgctggtggttcaaagagttggagaccaaagccctcatacttgtctgcattccttgagctttgtcaagagcaagatgacatggaaagtgctgaggttttaattggacttctgaggcagtcaaaatttaataaaagtaaagtttatgcatct

SEQ ID NO: 18831 - DNA, 328 bp, Glycine max
atgagctgtgtttagcggcactaagctgtgccaaaatttcactaaattatgggagcttagtgagtgaagctcgcttagctcagcggatgccgcagccaattgcgcttggcttaagaatgctcagcttagcacgtggctatcaccaaaaaaatggttaagttacctgggcttagcgattcagcctcgcttggccataggtagttcagcaagaggatgaatgttcatcctcaaaggatgaactcgcttagcgcagtaagtgcgcttggcgagttcttcagataaagcttatatacaatgagtattgatgaactcgcttagcgcagccttc

SEQ ID NO: 18832 - DNA, 283 bp, Glycine max
tcttatccaaggcactctgttggtggtgaagcttctctttccatggcttattctctagtggatgatgcctcctctaacctcttctcctttatcttccgctacaactccatgactgaaaatcactattgaaggaccttattaaagctcaaagatccagcctccatagaagcttctcaagcaagcttccatcagatctcaactcatctaatatcctatacaaggggtccgtacgagtagaaccctcaccattaacactagatgaagaacgaagactcatgttggt

SEQ ID NO: 18833 - DNA, 331 bp, Glycine max
agcttgtcgatatgatcgcattttgagcataacccaatcacctggggggtactctacttctcttcttttagcatctgcgatggtcttcattttctcctgagctttgagaagctttttcctaattgtttgaaatattccctccctgtctgtcagcatttcatcaacgacattgagtttggatgatcctgcgagatattccgaaaaattgaatggcttgcggccaaatgtgatttcatatggagtcatccctcttcctgcgttccatgaggtgttgtgagaccactccacccagagaaggaattttccccattgtttaggtctgccatggacg

SEQ ID NO: 18834 - DNA, 276 bp, Glycine max
ttgtcatactgacagattaactacttttccggattaaaaaaattacaagtttcattaacttgaacttgaatcataatatcgtgcaatcacatacatattcaagcaaaagccccgagattatagactgtgaatgatgcttgaaagattaattgcacaagataattttcaaagattcaataaagagcatcaattgtaaatatgttttaatcttcaaaaggttcttgttaacaagcggagggcttgacattgagatatctacagaaaaagaaagaccga

SEQ ID NO: 18835 - DNA, 350 bp, Glycine max
aactagatgcatgggttacttgggaacccagctggccttgaatcaaaaatctgtacctatcgcaaaggtttgtggtttgtgctcctttgctgaccaccatacagacctttgcccttccatgcagcaacctggagcaattgagcagcctgaagcttatgctgcaaatatttacaatagacctcctcaacctcagcagcaaaatcaaccatagcagaacaattatgacctctccagcaacagatataaccctggatggaggaatcaccctaacctcagatggtccagccctcagcaagagaccagagcctccattcagagcttaaccaatcagatgggacaattggctaccc

SEQ ID NO: 18836 - DNA, 286 bp, Glycine max
tgaaggcgtgtaacccaccatcttctcacagtagaacaccagtaatgtgtctactatcattgttatcatctccctctccatcatttggggcgctacttgagctgccagatccctccatctttgggtgtattctttgaaagattcatgctccatcttgcacatgttttgcagctggattctattcggagccatatcagaattgtactgatactgcctaatgaaggcaaccattaggtccttccgagaattgactcaggaaggttccagattaatataccagctgacg

SEQ ID NO: 18837 - DNA, 361 bp, Glycine max
  unsure (1)..(361): unsure at all n locations
agcttgaagaggaagccatctttcagagctttggatgagattttgaaaaattgtgaggtttctagaggtggaagagacatccccactacttgtatttcttctatctttcatcttctcttctcattgttgtaaaagaagcttccctactatggagagctaaatcctcagttggttcttcctatggggtacttgatgtaaatactttcatatctatttaatgatgttttatgtgttcactatgctatcagtacttaattctagtgtgcctttgccttgatcatgcacttgcatgcttagttagggtcactcaacattgggaaattgtttgatccttanaacctgataggacagggctagctta

SEQ ID NO: 18838 - DNA, 289 bp, Glycine max
tccgttgttcaattttgaggtactcgatatattatgcgccagaatcgaacatccgagtgaaaagttatgaccatttgaatttctcgagagcttccgttgttcaatttcgagcgtctcgatatattgtgcgcctgaatctgacctccgagttaaaagttatgaatatttgaatttcacgagagcttccgttgttcaatttcgagcgtctcgatatattatgcgcttgaatctgaccaccgagtgaaaagttatgaccatttgaaattctcgagagcttccgttgttcaat

SEQ ID NO: 18839 - DNA, 351 bp, Glycine max
agctatacctccattcaatgcttgtaatgtcaaatgctttatctaaagtgactagcaaaattttaatgaaaaaagaagacacttaagagtaagacataagtctataagaaatttgatttctcatgttgtcatttctcttgactgtgtcaggtcagaaaataatattgcggatccgcttacaaaagggttgacgcgtcaacaagtacttgagtcatcgaggggaatgggattaaagcccattatttagttacaacaatggacacccgtctccgtgtgattggtgatcccatgaatggagttcaacgggtaacaacgaaattgtttgttgactaaagtacaccaaaatgaaat

SEQ ID NO: 18840 - DNA, 266 bp, Glycine max
tgtatgagttaggttatggtagttattatttgagggaaagacaattagatagttaagtagttataactagctgagtttgatgttgtaagctccctccatgtatgaaaactattcattgtaaatcattctgaggtgatcaataattccaaatttgatactcgattctttattaattgccctctaaatagaaacactgggtgggtaaaccacccttgctccaataaatttggtataaaaagccttgtgcgatcaagggagcttttgtt

SEQ ID NO: 18841 - DNA, 356 bp, Glycine max
agcttatgcatggaaaatgcttttatgaaattgagatgcccgaagaaacaccatttcctagttaaccatgcattaggtatcatgttcaattattttttaaagtgaaacgggtttatgatcccaacatggttggctcgtggtgcctaacacatgaaactaagaatgtagtgtgaagtttcacgcttccccctttttttgtttttgttttgtagaggaaaacgcaaggatgagcaaacatgaaaacaaatggtatgcaattttgcagatcaaaaagtttgttgaacgcatacgcatgatgatgccatgactcatgcaaaatgtgaggctagaatatgataacggacaaatgcaggata

SEQ ID NO: 18842 - DNA, 245 bp, Glycine max
tcgaaaaatagtctggaagacccaatttaaaatttgaaaattgctatttgcacccccattttgataagttcatccccttctttcgtaatttacgaaaagttacggaagcctataggacttgattttcttcttttttctcttccttctcacccatgttaagtgaaatatgcttatttagtgttatgcgaattttacggaagcattgcgggtgtctccgaagcccattttttaacaaaataggggag

SEQ ID NO: 18843 - DNA, 358 bp, Glycine max
agcttagtgatctaaggagtttttcagtcccttgtactattggcaacttacaaattaataaagctttatgtgatttaggagctagcattaatctaatgacttattttgtctataagaagttggggttacaagaaccccaacccaccaatatttctctttgagccatgagaaggaagtgtttaaagtggttgagccgacaattaactcctcctccttccctccattttgtgcaagccaccaacaagatgaaaactattctggctaaacctcacccaagtgtggggaaggaagaccctccaaagaagacagtaattccaaaagaccctggatggagttagaaaaagggatatagcatcat

SEQ ID NO: 18844 - DNA, 290 bp, Glycine max
ttctaaagttttctggttttctaaaccttgaaaacttgtgttattcattctttttatctcttctccctttgccaaaaagaattcgccaaggactaaccgcctgaattctttttgtgtctctcttctcccttttccaaaagaacaaaggactaacagcctgaatttttttgtgtctcccttctcccttgtcaaggaattcaaaatgacacagtctgagaactcttttgattcttccctttcccatatacaaaagatttcaagggactaaccgcttgagaattcttttgtat

SEQ ID NO: 18845 - DNA, 357 bp, Glycine max
agctttttggatttttaaacatttgaccaactcattttatttcaaaaaggaagtcgtatctagtcaaggtctgagataccatacaagtttcctaacgatttctaattatgtgggccattaagtctatcatatgctgacaatagccgagaagcccatgaatctcttcgggggtggagtaggtgtctgccatcgccttggccttggctaacaagcggggaagttcttgactcccgttcaaggtaagagcaaaccggtccatccacatcgttgcctcttggtgtaaagagtcgatcacccttcctctagcctctttttccgcatatacttgagcatactcatccgcgattctatgctcgt

SEQ ID NO: 18846 - DNA, 284 bp, Glycine max
tgttgacacgtggagatttatgttatcttccacgctcacaagatctgtcatactgacttttgcttcacgctgacggccggaaatacccgagtggttatccgtataaactttttgcattctgtaagacgaaaagcctgataacacgcagagactaacatcgtcttctgcgaccttcgtcaatcgcggccgacaagcccgttgacacgtggagatttacgtcatcttccgcgctcacaagatctgtcatactgacttttgagtcacgctgacggccggaaataccc

SEQ ID NO: 18847 - DNA, 354 bp, Glycine max
agctagtaagattatggggttcccatcacatgtggtactaaggggcggtcgggcgatggtgcacaacaagttttccacatccacaaagcgcgcataaacccatcatcccctgttgcccacctccaactgagctcacgtactcccacatagcccatatcctcgtttctctcaacaccgggtccccatcaatcctcccaagcttccccaacatcaaagtaatacaacattcaaacagcacaaactaccacagccaagaaaacagggcaaaggcagaaaactctgctcaaaacaccaaccaaaatcacagcttttctcacttaaagatcccagtaacaattccttcgatccaattcg

SEQ ID NO: 18848 - DNA, 284 bp, Glycine max
tcttatccaaggctcatcttggtggtgaagctccttcttccatggcttattccctagtggatggcgcctcctctcacctattctcctttgtcttccgttgcatctccatggtggaaaaccaccattaaaggacctcattgaagctcaaagatccagcctccatagaagccccacaagcaagcttccatcacatatggaactataaaaaaaatcattagtaaaaaaaacataaagttattgtgatagtaattcgttgaaaaatgaaatagttatttgttagaaat

SEQ ID NO: 18849 - DNA, 350 bp, Glycine max
agctagagtaactcttgttgtaactttgatgaatgagagtcttgtgagacacaactaaaagttcaacttctctccctttttcttccttcaattttgagctcccccccccccccccgtctctctttctctccctctttcttttcctccattgaagcatcctctccaagctttttatccaaggctcatcttggtggtgaagctccttcttccatggcttattccctagtggatggcgcctcctctcacctattctcctttgtcttccgctgcatctccatggtggaaaataaccattgaaggacctcattgaagctaaaagatccagcctccatagaagccccacaagcaag

SEQ ID NO: 18850 - DNA, 281 bp, Glycine max
tggaaggacatgtagtaacaattccatatgattccattagtacactctcaccgagacgagactgttggccgtgcatctgagttaccccgacttgcaaggatactccaaccgatagggacaacatgagccatacaaaaacttctcactcgagacccgtgtgatggacacgtggcctgaataacttaatatagggagggggaggaattgacttcaaaacctattttttaacaagatatgggaggcggcttttaaatctatatgttaagaatattgaagatgaa

SEQ ID NO: 18851 - DNA, 344 bp, Glycine max
agctttgctagatccttgctatttggcatccctccttcagttggcaacttcattccttctttacaaatttaaattaatttgttatttgttcttgtgaaaggaatagttaatacaaggaaaatatatttcaataaaaaatgaccacatggaaaagttgaataatatttcttctgtcatgctcttaagaacttaataactgtctcttatgcaggtccctggtttaagtttatcgcttgctgatactgggtatgcatgtgtttctaccatcatatctgtcttcatgcatgaattgggtcatgcagttgctgccacaaggtcagttgtctttgcatttattgcctctt

SEQ ID NO: 18852 - DNA, 231 bp, Glycine max
tatacttatggagagccacctgtactttaccccccgtgccactccggaagatttaagccaagcccctacttttgaggggcaactcccaccttatgaagactatccccgacaagacgatggggaaggagatacccatcttggcttcctgctccacctcaaagatcaatccccgcatgaactaccccagccgaacataagtttccttatcccggcctcacccacacccgtaaa

SEQ ID NO: 18853 - DNA, 352 bp, Glycine max
agcttaagggtgtccttaccgtgaatcctttgtagtcatgagctggatagattagcgtactcttcgacagtgttaaaatctatttccgaagaagatgagagtgatttagtattaatacccaaatttaataaaccagaaacatcttatctcttttacttcttggcctacttttctaagtttaacataatacacaatcactgtcaaggtcatgcctatgaatggattgatttataaagctgctctgaactcccaccctgcataataattaatggaattagccaattaggcaccaatgaataaatttgagatgatattggaaataactggtaagaccaaaacctaagcctaatgt

SEQ ID NO: 18854 - DNA, 284 bp, Glycine max
tgatatatggctttcagaattaagttaatcctttcatcccatatcagcatttccttcttgtgtggctaagtggttcaatatttcactttgtcgctttcttaggccctgttcagggtggttgtgagtttttgacttacggtttttcaatgtaattttcaaaacaaaatgtttgacaaaaatggagctgaattggtattcaactcaatttcaaaactgttttgcattcatcttcaaaatcaagaaaaaagattatgtaaatttgaattttaattttaaaaacacat

SEQ ID NO: 18855 - DNA, 281 bp, Glycine max
tatagagctttgtagtggactgtaaatggaataatgatttaaacagttgaattaatatattcttaactgaaagagattaaaatagtgcatatttattgaaatgccgaactcgacaaatatgacataatttattaacgaaaaaataattattttatttaaaaaacttgttttattcaaatataatattttatcaaaacaagaaattttgaaaagtaagtaattcaatttctttatccaagcataaaattctaaaaatgaagcaatttaatttatttatccaa

SEQ ID NO: 18856 - DNA, 342 bp, Glycine max
  unsure (1)..(342): unsure at all n locations
tcaagcttggcatgttgccgnttatgttctgttggttttgtggaggaaattataaaaaaaaacagaggagaaaagagagacaatacgtatacggaggaaatataattattctattctaatttaaattgttctcagcagcgatacaataaatagcaaaagataaattaattagataacaagatattagcaaaatagaatattaaaactaacttgttccttaaagataagaatcatttattgactaagctaatccattaaaactgacttactcctaaaatataggaaattaacttatttactaaatcctattttaaaaactgaaaaataaaatatcatgtagtt

SEQ ID NO: 18857 - DNA, 280 bp, Glycine max
taggagaggatgtaaccgaagtcacaaaaggagatgtggttgttccaattttcttacctgattgtggggagtgtatagattgcaaatcaagcaagagcaacctttgttcaaagtttccttttgaggtgtctccttggatgcctagacatgccacctctagattcacggatttaaaaggagatatcatacaccatttcttgtttgtgtctagttttagcgagtataccgtggttgacattgctcatctaaccaagattgatccagcaataccacccaacag

SEQ ID NO: 18858 - DNA, 345 bp, Glycine max
tggtgtgttatatatgcaccattggggcatattcatacgttaagggtgtttggtgaactctcaacctaatgctaggagttattgtggtaatgagccaatagaatagacaagtaggtggatccctatatatataaggtctagcaaccctataagagactaattgaatggtcaaagagggagactattttaaggagttatatgaatctatatgttgtttatgtatacgtatctacatgttgaagtgccataaggcacatagttttattaagttgtttatgttatacatgatgtattatcttaaggtttaagttttagcttttagattttgaaatgtgaaaataaaat

SEQ ID NO: 18859 - DNA, 289 bp, Glycine max
tataaatagatagtctctctaattaatatatcatcaataaccttttacatttttttaataaacttgtacaatttcttctaaccattttacttttgggaatttaatatataataataaattattttgagctgtataagttataattttacattctattttttatgtcatatcttaaaatcacatatgtgatacaatctatattaattttaaaacgttaaattattctctttattctgactttgttaatcacattttttgcaggcaacaacgctattgaattattttcttt

SEQ ID NO: 18860 - DNA, 364 bp, Glycine max
agcttcatggtgaatcaagagtgattcaaagatgttttgatgataacaaagatgataacaaaagatgatgacaaaggtgatgacaaaaagctcaaaggtcaatcaaagaatgagttcaagatattcaagatagaatcaagaatacttcaagattcaagaggaaagttgaattcaagattcaagagatcaagattcaagagatcaagattcaagagatcaagattcaagaatcaagagaaggcttaatcaagataagtatgaaaaggtttttctcaaaaattgaatagcacatggtttttctcaaaacatgtttaccaaagagtttttactctctggtaatcgattaccagattattgtaatcga

SEQ ID NO: 18861 - DNA, 289 bp, Glycine max
tgtctcagcgtttatgcgagacggagaccaacatgctagctatcatcgccaagtaccatgaagagttgggtctagccacggcccacgagcatagaatcacggatgagtatgcccaagtatatgcggaaaaagaggctagaggaagggtgatcgactctttacaccaagaggcaaccatgtggatggatcggtttgctcttaccttgaacgagagtcaagaacttccccgattgttagccaaggccaaggcgatggctgacacctactccgcccccgaagagattcatgg

SEQ ID NO: 18862 - DNA, 357 bp, Glycine max
  unsure (1)..(357): unsure at all n locations
agcttggtgtcgcaacctactcttcggcgggagggcgacgcgtgactcgcgggatgcgtgttccacgaaaggaatacgcgcggagtcgccaccaacgtttatttgaggaaaacgtcggaaaaaccggaaaagacgcgatctacgaacttttaagtgaaaggttcgggagttgtatttacgcacggggaaggtattagcaccccacacgtccgccctaagggacggcagcctttaatcgaatgtgcaaacatgactttgattttttatgttccctttttatgtctctatatcctttataccctttttatattttctctttttgaggncgacaagggtgtttccctttgctcctacgta

SEQ ID NO: 18863 - DNA, 286 bp, Glycine max
tcaagaaaaagatggcctcagcaaattccttatttccagaagggaattctatcaatagacctccaatctttaatggagagggttaccactactggaaaacccgaatgcaaatttttatcgaggcaatagatctaaatatctgggaagccattgaaatagggccttatatacccaccacagtagaaagagtttcaatagatggtagttcatcaagtgaaagcataaccatagaaaaacctagagatagatggtctgaagaggatagaaaacgagtacaatacaacct

SEQ ID NO: 18864 - DNA, 337 bp, Glycine max
agcttcttcctcagaaagaatcaacaccaaaaatttagccttccataatttcaaccaaaaacagaaaacgcaattaaagataaaggcagaaacgtaaatgaaactaaagcagaaacgtaaatgaaactaaaggtagcagaagaaataaaaatgaaattgcaattagaagtagagaatggaaaagtgcattacgtaagcagtaacaataagctcagaaaaacgtaaaaccctaaaccctatgctctgaataatagtctaacagaatagccctgcacgaatcccaaggctgctatttataaaggtcactcaaagtcactgggccctattacaatattct

SEQ ID NO: 18865 - DNA, 287 bp, Glycine max
tgtaaaggattgtatgaaaatatgtgtttaagattttttaaatgtaaaacaaagccttgcttttatagactctccatgtctggtcaagaagaccattcagaagagttataacttttagaaaaacttaaaacccatttgaaaaagtcaaaacctttttgaagagttacatcttttgattttttcagaaacagtcactggtaatcgatcaccaaataagtgtaatcgattacacaaagcttttgagtgaaaggatgtgactcttcacatttaaatttgaatttcaacgt

SEQ ID NO: 18866 - DNA, 360 bp, Glycine max
agctttcaatttccagatgtatagatgcctttgcacactttcttctctagtttctttttccctatgcatgcttaattagtgtttttattaacttatttgttgctaactcctatattaataaattttaatctctcgtgaaggactacaaatacataacttttgtaattttaaaaacactaaaaataaattaaaagaaataagaagcattgaaaatctaacaaaacacataacagcataatgactaatgaggatctccaacaaacccagaacagcattatgatgatcttacggtccctccacaaattatttttctacattttatcatctcaatagaaaaattgataaattcagattaatgta

SEQ ID NO: 18867 - DNA, 288 bp, Glycine max
tttcatccaaaaaaatcctattcttacacggcatggatctcgtggccactctgttttagtttaatcagaagcaaaatccacaaaactaacagtgtattaaaatttctgaacctgaaaaattgttattattttgatagggtttataggaaaagcagcatacccgagttcacaaacactgaacgccgctgctccgtagtttcgatcgacgcattcttcacttgaagatatcacaatgtctataacgcacagcctcactactccactctcttcttcttcctctgctttctt

SEQ ID NO: 18868 - DNA, 348 bp, Glycine max
agcttggcccatttgctccaaccaattatgcattggaaggatcagttgctatcgccggagctgcagtgcagtggcttaaaaacagccttggcatcatttctagtgcttcagaaatagaagagatggcattacaggttgaatccactgttggggtttggattgtttgctccatggtggcgtgaggatgctcgcggggtttgtattggaataacaaggtttacaagcaaagctcacattgctcgagctgtgctcgagagcatgtgtttccaagtgaaagatgtcttggattcaatgcataaagattcacgagaaagtgaatcccaaaagaagtttgtgcttagagtggat

SEQ ID NO: 18869 - DNA, 285 bp, Glycine max
tccatcatgggctaagtttgatttatgtagggctgctgtctattggaaaaccatgaatggcctccctccttcttcagtaagtataaaagtattgagttaactcctagcttgttacttaatcaattaccttttagtaaaaaaatttacaaattttggcagggagaaaagctaaaacttttctataatccagctgcaactcaacttgtccctaatgaagaatttggaattgcttttaatggtaatttttgcaatgtcacttggttgcccaaaaatgtcattttccat

SEQ ID NO: 18870 - DNA, 224 bp, Glycine max
agcttacgttacttaacgaaggtgcgggcaatatttttcaagatcccacactacgtatacgtttctctctgatactcgagtgcgctaagataaattaaggggtgaggtgatcatctcgaacaggatgtactcgataccctatatcttaatggaaataatgagttattatgtgagattcatactgaacattaagtcttttacgaagcttgagtcatctatgaaat

SEQ ID NO: 18871 - DNA, 223 bp, Glycine max
tgtggtcggaggatcaagattttaaatttattggtacttttcccgtaacacacacctcacccatcgtctggccaaatataacgtccactctaggggattatcaaaccatcgtcaaagactcctctatattattggcaccaacattgagccatttgcttccctaaaagacaatctttgtgttagactattaatttgttattgcaatcgctaacagctagattta

SEQ ID NO: 18872 - DNA, 349 bp, Glycine max
agcttattgatttttgtatctaacattttagtctttaaaggcttatccatccttcccttgacctctgggaagtgtttgagtcttaagcagctaccaaaacaaaggtattcgagagatgacaaatagattgtcggcacaaaactttggagttgagtgcagtttttagcacttacgacaacaaggttagtgagatgcccaacttatttatgaatgctaaccagattctcgcatccattaagtgccaattctcttaaattcatggcactagacacataaggaaatttagtaaccatacgacaataagataaattcatgtaagtcaaacttttgcaatgatgtataaagaaaa

SEQ ID NO: 18873 - DNA, 282 bp, Glycine max
tatacttaaatcataataatacaaaatactaatccattaaatgaggtaatccgatggcttaaaaactattattaagcttcttactcttattctataagtcttatatttgagtagaataaaaaacttatgatgtgatacttttaagtcttgaaatttttttatatctgacagacggtcttttgagttaaattttgctctcgtgcttaattcataaaattggtcctcatttgagttaaataaataagttaagatgtatttatgcttcacttaatttacagtata

SEQ ID NO: 18874 - DNA, 349 bp, Glycine max
agcttagttctctctcagttgctctacaactaaaaactcccaaaaaaactcaacaacccttcagaaatcgtgattttagcttaaataggcaatccagtcggtggacgcgcggttagcgcacgtaagtgacttctggcttagcgccagtcacacttgctcagcctgaaggtgaagacggtgcgcttagagttggccttcgctcagcgcctctatacaactcatccttcttctagaattgtccatgcgcttagccattagatggggcgcttaacagatgatgtgcttagccagaagataagtggcttagcgagttcatgaaatttgcacttcaccaatcttgcctatttta

SEQ ID NO: 18875 - DNA, 284 bp, Glycine max
ttgagccaaaatcccaacttaccataaaccttgaaccagggtgagaatatcaatccttgccctcggaagaaaacacaaaaagaagggaacttcccaatcaaaagagtggaagaaaacaaaaagagaaaattcccaatcgaagagtgggagaaagcaaaaaaaaggaaagaaaattcccaatcaaagatcggaggaaaacagaagaaatatacagaaaggtctttggaccagacaatatctgaacaatacagaattgtcaccaagaaaatatgaaaagaaaggaa

SEQ ID NO: 18876 - DNA, 355 bp, Glycine max
agcttcatggtgaatcaaaggtgattcaaaggtgttttgatgataacaatgatgataacaaaagataatgacaaaggtgatgacaaaaagctcaaagatcaatcaagaacaattcaagagttcaagataagaatcaagaagaattcaagactcaagaagaaagtctagagacaagaatcaagattcaaggttcaagatctcaagaatcaagatcaagattcaaggctcaagattcaagaatgaagagaagactcaatcaagataagtattaaaaagttttttttcaaaactttgaatagcacatgagtttttgacaaaaccttttaccaaaaagtttttactctatggtaatcga

SEQ ID NO: 18877 - DNA, 286 bp, Glycine max
tgggttgtaagagccagaaatggcagtgaacaatacttgtaactattgaagttagtggaacttgaaggttttccaagaactagacgtagtcttggtgttgagacgaacaagtacaaattcttatgtcttatatttctatctctttatgtataagtggtctagggtttgaatttgatttgaaaaacacgtttttgataaatctattaatcattgtctgatcgtgtttgttgcaaaaatatgttatctattttcaaagttgttttagacgatagctttgtgtttatga

SEQ ID NO: 18878 - DNA, 346 bp, Glycine max
agcttcatgatgttgaatctttttgattcaagaagttttgataatgacaaagatgatgacaaaaagcccaaagaatgatttcaagattaaatcaagaacaattcaagaatcaagagaagtttgatttcaagattcaagaaaagatgaatccaagtttcaagagaagaattcaagaagacttcacaaggggaagtattgaaaagatttttcaaaaaacaagtatagcacaattttgtttttcaaaaagagttttcacaaaattttctaagttaccagagtttttactctctggtaatcgattaccagtttcctgtaatcgattaccagtggcaaagtttgttttaaa

SEQ ID NO: 18879 - DNA, 280 bp, Glycine max
tgtgcattcaatatccttatgagggtgttccatatgttctcaagactggactaatagattttctgcccaagtttcatggtcttgcaggtgaagatcctcataagcatcttaaggagttccatattatttgttccaccatgaagccttctgatgtccaagaagatcatatctttctaaaggcttttcctcattctttggagggagtggcaaaagattggctatactaccttgctcccaggtccattttcagttgggatgaccttaagagggtgttcttgga

SEQ ID NO: 18880 - DNA, 328 bp, Glycine max
tcaagctttgcggatttgggctttttcagtgaaaggatcgatgtgggtcccaaaagaggcaaatttgatcatcctactacgacgactgaaaaaactggggcaaatgaagaaggtgagaaagagggagaaacccatgctgtgactgccattcctatacggccaagtttcccaccaaacccaacaatgtcattactcaatcaatagcaaacctcctccttacccaccacccagttatccacaaaagccatccctaaatcaaccacaaagcctgtctaccgcacttccaatgacgaagaccacctttagcacaaaccaaataaacaccaac

SEQ ID NO: 18881 - DNA, 278 bp, Glycine max
tctgatgaataagctcctcaacctgctttttgaaaaataaatttttggataattatttccatttgtctcgtcataactagaaaagaaaaccaaaagaataaacacagcctcatacactaaaaagttatcacacttttatggctatgtggtgaaatttaagatctaagttagttccattaatggtttgaaggtagacaattataaagagaatgtgatagaaaataactggttttgtaatagcaagtctattagaaagcatttctggtttaaaaactgca

SEQ ID NO: 18882 - DNA, 286 bp, Glycine max
ttacaacagattttagtaatgatccactaacctagaattaaaataacttaatgccattaacctagggaattaaaacaaacttaatggctgagtgtaactgaaattgttggcaaccaaaagtcacccccaacagccaacaagtcagccaccatttggtctcccaaaaggctgatgcctaggttgccaattgggcccttattccaacttgaactaaagcccttttagttgattaacccaaaacatatttttggtcagccaactttacaaggattgggccattatttag

SEQ ID NO: 18883 - DNA, 306 bp, Glycine max
agcttataatatatcgatacgctcgaaatttaacatccgaaactctcgggaaattcaaatagtcataacttttcacatggatgtccgattcgggcgaataatatgtcgagaggctcgaaattgaataacgcaagctcttgagaaattagacaggtcttacttttcacaccgaagctctcgtgaaagtcatatggtcataacttttcacactgaggtccgattcaggtttataatatatcgatacgcgcgaaatttaacatacgcaactctctataaattcaaatggacataacgtttcacacggat

SEQ ID NO: 18884 - DNA, 286 bp, Glycine max
tgaatcggacatccgtgtgaaaagttatgaccatttgaatttgtcaagagctaccgttggtcaatttcgagcctctcgacatattatgcacctgaatcggacatccgggtgaaaagttatgagcatttgaatgtctcgagagttttcgatgattaatttccagcgtatagatatattataagcttgaatcggacatccgtgtgaaaaggtatgaccatgtggatttcacaagagctttcgctgttcaatttcgagcgtttcaacataagatgcgcccgaatcggac

SEQ ID NO: 18885 - DNA, 357 bp, Glycine max
agctttggaaaatgctattttcaccttctcgctaagccaatatgctggcttagcgagcatccactaagcacaacactcttgggctaagcgcgaggaagaatccagaagaagataagatgtacaagttcgctaagcgcaccgcttcatctctctaagcgcaccgcttcagttcatccgctaagcgagaaaggcacgctaagccaaaaatcactaacgtgcgctaagcgtacgagcacgaacaaggccatctatttaagagtttggactggattcagagctttgcatgtctagggtttctaaagagagaaaggtccaagttccaagagttttgagagattttgctgtgtgaagatctgc

SEQ ID NO: 18886 - DNA, 286 bp, Glycine max
tgcttctacatatatatatatatatatacatacatatatatatatatatatatatatatatatatatgcatgtttaggtagcaagataccttggatatgcatgtatatagcaaaaatacctcacaaaatatatatatgtatatgtttacgtagcaagatacctttgatacgcatgtatatagcaaaaatacctcaccaaaatatatatatgcttaggtatcaaaatacctcatgaaaaaaaaacagaaaaaagtaaaataaaaataaaattggttagctaaaaagc

SEQ ID NO: 18887 - DNA, 326 bp, Glycine max
agctagggtgatgttgcgcgtactgatggttaccatgaggtgtttgctggggtttgacccatgcgggtgttgaagagatggcatgggcatctccttccttcctttttgcccctgttgccccgattcttttggcgtttacgtttgtggaggaaacgtaatcaaactttcctctcttcaatccaacctcgattctttccctggcaaacaccagatccgcaaagctggacggcatgtaacccactagcttctcatagtagaacactggcagagtgtctaccatcatggtgatcatctctctctcaaccatgggaggagctacttgtgcc

SEQ ID NO: 18888 - DNA, 286 bp, Glycine max
tctatggaggctggatctttgagcttcaatgaggtccttcaatggtgatttccaatcatggagatgtagtggaagataaaggagaagaggtgagaggaggcgtcatccactagggaataagccatggaaggaggagcttcactaccaagagagtgtcttggataagaaacttagagaggaatcttcaatggaggaaaataatgagagagagagaggggaaggggggcacgaaattgaaggagaaaaagagggagaagcaagagcttaactatgcacacccctctaa

SEQ ID NO: 18889 - DNA, 344 bp, Glycine max
agctttgaggaaattcaaacgtctataccttttgacacggatgtcggattgagtcacgtaatatctcgagacgcttgaaattgaataccgaaactctgagcaaattcaaacgacaataactttttactcggatgtcggattgagtcacgtaatatgtcaagacgctcgaaatagaataccgaagctctgagcaaattcaaacgacaatacctattgactcggatgtcggattgagtcacgtaatatctcgagacgctcgaaattgaataccgaagctctgagcgaattcaaacgacaataactttttactcggatgtgcgattgagtcccataatatgacgaga

SEQ ID NO: 18890 - DNA, 290 bp, Glycine max
tcaacattcaattacgagcgtctcgatatataacgagactcaatcagacatccgagtaaaaagttattgtcggttgactttgctcataactttatcattcaatttcgagcgtctttatatattacgggactcaatcagaaatccgagtaaaaatttattgtcgtttgaagttgctctgagcttcaacattcaatttcgagcgtcttgatagattacatgactcaatccgacatccgagtcaaaagttattgtcgtttgacttggctcagaactttaacattcaatttcaa

SEQ ID NO: 18891 - DNA, 356 bp, Glycine max
agctttcataagtgaaatcatgtgcagccatctccctaagagtcccctcacgaggtggaggttaagccatgttctcagtatgaaaaatagtagtcgaatgctcaaaatcagaatattcagaatcaccagcaacagaatactcagaatgcttaaaatgctcaaaatgcacagaatgatcaggatgcacactatacctaactaatctatgaaaggttctatctattttaggatcaaagggttgtaaatcacctggattacccctagtcatgcactatatgaagcaaataatgtgttctcaaacaagcaccaagggagggttaaaactacaactatagtcaaatgatatccaaatgagc

SEQ ID NO: 18892 - DNA, 284 bp, Glycine max
tagccctaaaggggatggatctttttttgttttggagaggatcaataacaatgcctataggttggacctctcagaagagtatggagtcagcaccacttttaacatttctgatttacttccttttgtaggtgaagctaatattgaggagaaggtgatcgaggccgtacccgaatcaaataaacatgaaaatgcagtaactaggaagtgatcctaggtcgtttcccaacgagcagtgacaagccaaatgttcataatatacttgcagtaacagtaacgatgggggg

SEQ ID NO: 18893 - DNA, 354 bp, Glycine max
agcttcttatccaaggcaattcttggtggtgaagctccttcttccttggcttattccctagtggatggtgcctcccctatcctcttctcctttgccttccgctgcatctccatggtgaaaaatcaccattgaaggacctcattgaagctcaaagatccagcctccatagaagctccacaagcaagcttccatcatatggtcactgggcagaatgttgctaagtagcaacatcatccatatctgtgtaagagtggtcatgttggtgcgcatgatccgcactcgtctctttgcagtgacacaggtgaaatcttgccccggtatgcatagtagttgtgtgatagccaccccctctgg

SEQ ID NO: 18894 - DNA, 284 bp, Glycine max
tgaaaaaatagtgggcatcatgcaagatggtctacttaagaagtttaaactcacatcctctattagcacaaacaacatgcatctatttgacacagaagggaaaattaagaaatatgagaatccagaacaaagtacaacctttatcatgttaagttttgaataagatcaattaacaataatgtttcacacgctcactattttatgtgatttcttatgcagttcttgaagagttcttcctccttcggctgaagtattatgagagaaggaaggtgagttttgtgttt

SEQ ID NO: 18895 - DNA, 352 bp, Glycine max
  unsure (1)..(352): unsure at all n locations
agcttgttaaagatcttanattaaatcaagaacaagcttgttcgcacatcgttcgcgtgtatgacatccactccacaaggtttgaagtagaggagaccttcaatcctattacgcaacgtggcggacaaaaatgggcagttaatttaatggtcattattgtcaatgcggaaggtattttgcgcttcactatccatgttcacatattattgcagcttgtggttacgtgagcctgaactactaccaatatatagatgttgtttatacaaatgagcacatcttaaaagcttactccccacaatggtggcctcttgggaatgaagtggctattcctccttctaatgacgcatggaca

SEQ ID NO: 18896 - DNA, 281 bp, Glycine max
tggagaatcgtctcttcaacaatatgatttgaagacaattgaagtaattcaaagaaaactctttctcatgaaattgagattaattcattttatttgttgtgtttttgtgcaggaaaaccactttcttggaacactcggcttaaaatggctatcagtgcagctcggggattagctttcttacacagctccaacaaccatgtcatattcagagatttcaagcccttaaatatactacttgatgaggttagttattttttgttagttgatttctcacgatggaa

SEQ ID NO: 18897 - DNA, 353 bp, Glycine max
agcttctcccccaattttcatttaatagggggagaagtgaagtgaaaaagggttcagccccttaagcacttctctctctttcgaatttgcttagaaaaattgtttccgtgaagaaaatccaagccgaggcacttccgtaacgtttccgtgagtgatttcgcgaaggttttcgaccgttcttcgacgttcttcattcgttcttcatcgttcttcggtcttcaacgggtaagtacctcgaaccaagcttttcgattcattctatgtacccgtggtggtccacattgtgtttcgtgtattttccttctcgttttcatttactttccgtaccccttttgacgtgcttaagccatttt

SEQ ID NO: 18898 - DNA, 279 bp, Glycine max
taaaggaagtaaacgaattagcatgggcagaaatgtctccgcactgattggtaaatctgttccccaaattcctgaaaaatgtaaagatccaggtacattcagcataacttgtattatagggaatagtaagtttgacaatgccatgctagatttaggagcttctgttagtgttatgcctctgtctatttttaattctctatctctaggtcccttgcagtcaactgatgtggtaattcatttagctaatagaagtgttgcctaccctgttggtttcataga

SEQ ID NO: 18899 - DNA, 356 bp, Glycine max
  unsure (1)..(356): unsure at all n locations
agcttaaacattctcacctatttatctattnattaaaaaacatgtattttaaaatttaaacaaagtcgcctatattcagtttgaaaaaaaggaaatgttcaatgtacatccattttttcccatatcctgttgactttcccacttcattttatttttgacaaactagatgaagtggagagaaagatataaaataactatgtcaaggttcgttgttgatgtaatatgccacacaagtgagataaaaagaaaccacaacaacaaactttgagggtgatactgtcattaatcattatttagtttaatagaactaagattttcggtacattcaccttgagttggattttgacctctaaaaa

SEQ ID NO: 18900 - DNA, 289 bp, Glycine max
ccttgagagaggtcctatagagcctcccttgtcgtcggaggcaaagtattgaccaattggtgagagagcatagagtctctctctcacaccatcttcagtggtgcgaatggagcaattgagaagagagtaacttgccaacaccggcaatatgcgttcaagcctattagccaattgagggtgtggatttggaagcaaagaagcaatctcagaggctgacaaagtcgaactctctgccttgtctatgatatcaaacaaattcagatcaacagcagcgttcaagattgccgga

SEQ ID NO: 18901 - DNA, 343 bp, Glycine max
agcttggagccattgtttcttaaccttatttaacaatgaagtttccctcatccataagggaaattgtcactataaagacttaaaactgattaaacaaatgctcgggaatgctatgtaaatagttgcaagattgaaccatacaatatggtgaaaaagaataaaagcaaaaaggaaccaatctccaatatcaacattttcgtcaccatattggaggatcttgatcctctatcagaatatgaagatcagtgaccaaccctatagaggacatcgagcctttccaaatcggaagggagtcacatcaatgcaccaaaatcgacaaacaaatagaggatgtcgtgtgaaa

SEQ ID NO: 18902 - DNA, 279 bp, Glycine max
tctccagaggatgactcagttggaaacatcgcagaccaatcctcagggtccttcgccttcgttcgttcctgtaccaacaaccaacatgagtacggttcatcgcctaaagctcgaggtccttcggtttgatggctctgacccaactaggtggatattcaagatctcacaattctttaaatatcacgcaaagcctgatcatgaacgcctcacaatcgcgtcattctacatggaagggacggcattagcctggttctggtggatgtatcgcaatgggcagtt

SEQ ID NO: 18903 - DNA, 217 bp, Glycine max
  unsure (1)..(217): unsure at all n locations
agcttcttgtgttggcgaatttcnagccaaagttgatggaagggggtgtcgcgggggtggctgctttgttcgaggagggggtgatgattttggaaagagtggtgaagaggggtgggttggtggtgatgcttgccgcagtctactctccaaactatgggtaatggctctcgctctactcaagtctgtttttccagattccaagccctttcccttgtat

SEQ ID NO: 18904 - DNA, 278 bp, Glycine max
tctaaggtacttctggatgtgtctgcttaacatttcttgtatttaatatccatagtaccgtatattttctgaaggtatttctgtcataattatgtgtgtctgtaatttgtctgtatttatctgcttgcaatttctgtttttcttttaaattgaccttttcatcttactatgttaaatgaagaaaggcactagggagtattttctccataaagtacctaccaacttcaaagtgaacttttacatactgttacacaaccagttatacttcatgatagaga

SEQ ID NO: 18905 - DNA, 360 bp, Glycine max
agctttggaaaatgatttctatacaaaagttagtcgtataaagtgactaacgacgatatgcacttcttgcattgtatatttgtttgattattgtacaactattgacattgtgctcattcaacgttagtagaatgtttcttggtttcaccgttgactttgtcatatcaaaaataattattttctcatccttaatcaatcgatcagtgtatgaatgtccaactaatgatttgtccaattcatgattgtgactcccacacatcaacttcaccattcaaccttgcccttcaaccactggtttccgatgaaacttgaagggacacccacatttcttacggccaatatctcttctaacaaaatctt

SEQ ID NO: 18906 - DNA, 287 bp, Glycine max
tgctctaaatttacattgatgtttgtatttatgggaggaggttatatgccatttttgctttaagagtaatgtcccactaaaactaactttccaaatgtttgccttcgtaggaatggccccgaggaagcttgcctcaaagaggtccaggaaggacaaggcggccgaaggaactagttccgccccggagtacgacagtcaccgctttaggagcgctgtacaccagcagcgcttcgaagccatcaagggatggtcgtttctccgggagcgacgcgtccagctcagggacg

SEQ ID NO: 18907 - DNA, 350 bp, Glycine max
  unsure (1)..(350): unsure at all n locations
agcttatagtagntgaaatcactagattttttatcacatcaagacaaacattctttaaattaaagtggcaaccatgtcctattttgcatcacacacaatggttgattggttgcatacttgtccaaggctacatgacttccaactttagcaagaataagtgtttcataatatttataatatttcacactagcattggctttcacatcatgcaacaagtatgtaggttgtggatttttcaacatgatgcaaagattggataaaagttgtcatgcattggctgacaaagaagacatcatatgtgcaactctcaaagatatattgtggtttactttctattttggataaaacat

SEQ ID NO: 18908 - DNA, 288 bp, Glycine max
ttagtaaaaaaattgacaacatcatcacacatgtatttaatttataaatagtgagatctaattaatttacaagatcaataagattaaaactacatatattttaaatcaaagaaactaaaaatgtgattaaattcaaatttagttcaaaagtaattatgtgtaaatgttttaatttcttttatgttaatttactttgaaaaatcagatttaatttttttaaaaataaataagattaaaaatgaattttaatttacagctttgcaataaatacttttattgctgtaatat

SEQ ID NO: 18909 - DNA, 355 bp, Glycine max
agcttttaatttcaatacatagaagcatgacttacgcctaagaatctaagttttggttttaaatgaaaaaaggcatgaatattaggacatgtttgagaggttgttattaagatttaaatttggctgccccatgaggaataccttgcacctatgtagcatggaaaatacctttcaacggtatgtatatatgtgaatatatatagcatggaaatgccttgcaaaatgttgaattttatgccttgcaaaatatgaatagcatgaaaatgccttgcataatatgaatatatatagcatgaagtgccttacaaagtgttggatgggtagcgtaaaagtgtttttcaaaatatgtgtattt

SEQ ID NO: 18910 - DNA, 285 bp, Glycine max
tttgggttattctttttcaactaagaatgtatactatgacccccatgaagtacattccacattttatacaatattagtatatgttgtttgtagctttctttgatattcttatatataattgtttatgatgtgttaaccttttaaataagattcatatatccacataactataagagtgacaccttgcaatatcccaggttaaatgctagttacttgtcgtttgattatagctcttacctaactctttggattattctattttattctctctctatatactttaat

SEQ ID NO: 18911 - DNA, 349 bp, Glycine max
agcttataattttttgtagggttgagttctgcccaaagcccaaatgctaagagtaccatttttctagctttagatgacagatttatttactgtaactttattgtttgactgttgcagtaccacatatttccctctgtccttctcgagaacatcaacttgtgttctttctggtttgagcgcaccttgacatgtaatttcacctttttccttcattttcttttttcagatttcccactttttctatttttaatttgaattaatttatgaaacatatataatcatatcatttcaaaagacaaaattgcatgaatttgtcttatatttcctttgggcaagtgagagcgagaag

SEQ ID NO: 18912 - DNA, 285 bp, Glycine max
ttttcttcttagaatgtttgcttttattctttctgtggtatgatatgtatcaatgtcgttgtatgctttttcagtctgtttttgttttgtctttcgataggatacgatatgatgtttcttcaactgattccgctctaagattcactgtcaataactttctttcaattaggatccaattcatgcccctctaggcacataaacagtttttttttattttttatttttaggatttttttcaatgagataaacctaagcatatgcagagcagtagttcacctgtgcatc

SEQ ID NO: 18913 - DNA, 352 bp, Glycine max
agcttctcccccattttgctattaatagggtgagaagtgaagaagaaaagggttcagcctcttatgcacttctctctctctcaaaattgttgaggaaaattatttccgtgaagaaaatccaagtcgaggcgcttctgtaacgtttccgtgagaaactacacgaagattctcgaccgttcttcaagattcatcgttcgttcttcgttttcttcaatcttcaacgggtaagtacctcaaaccaagcttttcaattcattctatgtatcccgggtggtccacatttcgtttcatgtatttttattctcggtttcatttgcctttatacccccttttgacgtgcttaagccattta

SEQ ID NO: 18914 - DNA, 290 bp, Glycine max
taacaatcagtgtcatactattgatcaaaacatagcaggtataaatatgcaatactagactcaaaatatgcaacaaacactagacctaaatcagtgtcacagaaattggaagaaaatattttatccaagcacaaacttcaagccttattccatgtattggggggaagttatggctggccatatgggtagaggtgtcatagaggagcaggtatggaggaagggaccttggactgctgaagaggacaagttgcttgttgagtatgtcaggttgcatggtgaaggcagatgga

SEQ ID NO: 18915 - DNA, 340 bp, Glycine max
agcttcaacattcaattttgatcgtctcgtaatattacgggactcaatcagacatccgagtaaaaatttattgtcgtttggattggctcagagattcaacattcaatttcgagcgtctcaatatattacgggactcattcagacatccgagtaaaaagttattgtcgtttgaattagcttagagcttcaacaatcaatttcgagcgtctcgatatatcacgggactcaatcagacatccgagtaaaaagttattgtcgtttgaattggctcagagcttcaacattcaatttcgagcgtctcgatatatgacaggactcaatcagacatccgagaaaaaag

SEQ ID NO: 18916 - DNA, 283 bp, Glycine max
ttgagccaattcaaacgacaataactttttacttggatgtctgattgactctcgtcacatatcgagacgctcgaaattgaatgttgaagctctgagcaaattcaaacgacaataactttttactcagatgtctgatatagtctcgtaatatatcgagacgctcgaaattgaatgttgaagctctgagctaattcaaacgacaacaactttttacacggatgtctgattgagtcctgtcatatatcgagacgctcgaaattgaatgttgaagctctgagccaat

SEQ ID NO: 18917 - DNA, 345 bp, Glycine max
agcttgaccagtccacataaagttgatttcttctttctttggctttgttcatctaatatcaataatattaggatccataatcaatttccattcaatcatatagtgtactgaataaaaactaacccgataaaagcataaagcgcgactttcagtcaatgaaatttgcgttagaccaatgaaatttgagtgaatgaaatgggtgattgaatttgcgtcactcatttgcagatcatggttaggaccagaggactagatcgtgccttaggtcaggttattgacagaggtgtcggcaaaggagatcgtgatgattccgatgatgctccgcagcgtcgacggcctactaca

SEQ ID NO: 18918 - DNA, 280 bp, Glycine max
tgcatcaatataaccctttaattttaactcagaatctctccataagtgaggaactcgtctttagttcttctcaagtacttaagaatggtctgaagtacttttcaatgttcctcaccgaggtttactggatattgactagctgcacttagtgaataagcaacattaggacgtgtacaaatcatgatatacatgatagctcccactgcgctggcatatggtactctagtcatgcattctttctcttcatgagtttaatataattttgtaagatgacccttgt

SEQ ID NO: 18919 - DNA, 332 bp, Glycine max
  unsure (1)..(332): unsure at all n locations
agcttgacgaggtttcttacttggaggaacacaaatagagaaaggaggagcacaaaattgaaggaataaacgagggagagaagtggaactttgaagtgtgtctcataagactttcattcatgaaagttacaacaagtgttacagacgttatagcctaggtagcttcttgaaaaacatccttgagaatcttccttgagaagctntcttgagaaacttccttgagaaatttctttgagaagcttccttgataagctagagcttaactacacacacccctctaataactaagctcacctccttgagaaactttcttgaaaagcttccttgagaag

SEQ ID NO: 18920 - DNA, 282 bp, Glycine max
gtgaattattgttcatggatgcatttaagataagatataaattaaaaaagaaaaacatgagcttgctaccatcatgtataatatatatatatatatatatatatatatatatatatatatatatatatatgcaacaaagatgtatataccaagagcaacattctttagagcatgtccaagtccaaatttgagtgattgaagacacattattctagaagccatatctcattaggaagatatttgaacacacataactcttaaaaggaagctaagacaacatat

SEQ ID NO: 18921 - DNA, 350 bp, Glycine max
agctttgaacaatatacttggccttcatttaactgtctttgggcttggcggccacgctcaacaaagtactttcgacacctactgtacgttgatttcaccaatgctgttataggaatgttgcgacaatcctttaaaaccttattgatacattctgagaggttcgttgtcatgtggccatatcgacgtccttctctatcgtaagccatcggccatttttcctttgagatgcgatcaatccatgttgctatggctggactcagttcacgaaatttttctaaattttgataaaaaatgtgcttgcatggagtgtaagctgcataaaattagttatgaataccaattttaagtat

SEQ ID NO: 18922 - DNA, 286 bp, Glycine max
tcatgatgaatcaagattaattcaaagatagttttgatgatgacaaaaagctcaaagatcaagaatgagttcaagattgaatcaagaacacttcaaggttcaagaggaaatttgatttcaagaatcaagaatcaagtttcaagattcaagcttccaagaattaagatcaagattcaagactcaagattcaagaatcaagagaagacttaatcaagataagtatgaattttttttttcaaaaactgaatagcacatagatttttctcaaaacttgtttaccaaagag

SEQ ID NO: 18923 - DNA, 337 bp, Glycine max
agcttttccttcgtgctcattgcaacagaacattaagtccccactttctttcttttcaactcttttttaactgaaaaagtctgtaagtgggtgattataaggttgcatgctgcaagataaatcgttattgtgaaaacttcgcccaagattgtgtcatgtgagaatctatattttaaattaactgatcaactagaaattttttacacggttgtatagctcagtggcggacctacaaccacttgagggtgtgcacttgcaccccctcattttttaaaattcattaaatttgtaaataaaaacttatacttttatattttatctatctatatttatataa

SEQ ID NO: 18924 - DNA, 282 bp, Glycine max
tatgcatcccccaacaagcccaattcagtctctaccattctgaccgagtgaattgggcttcaaggtagatctttacagaacctatggcaagctgggtttggaggccttgttggtaacattgagggacaattcttgaaaggattctatggtgatattggttgggctgacaacctgcatacagatatttacgcattaagacaagggttggaaatatgtttggatctgggtataagggagttaacgtgcgaaacagactctcttcacacccttcagttggcgaat

SEQ ID NO: 18925 - DNA, 330 bp, Glycine max
agcttttcgtttggcataactatatcagccaaatctatttcaggtgtattgtttggagcacaaaagttatattaaacatttgtgtacaaaagctgacaagcaagatgtcacagtagttatatgtccactttgtgccaaaggagttcgcctagttcctgatcaagatccaaacataacttgggagaatcatgtcaacaccgagtgcgacccatcgaattacgagaaagtcacaaagaagaaaaaatgccctgtccctggatgcagagaaatattagtattctcaaacacaattaagtgcaaggactgcacagtagagcattgtttaaagca

SEQ ID NO: 18926 - DNA, 278 bp, Glycine max
tttcttgaacttttaggtttccttatgattatgtctattgtgaatttcagttttggtgattgaattgctggctgaaatgttgatcctaagtgaatattgaactcctaaaattgtggtaaacaatcctagtgagttcaacatacataggatggttgaaagtaagcccaaggcaatcaatataccatgcttaaaaaaaaatcgctggtgctggcagcttggacatacaaactagtaaaaattactgagaattggttacttctaattttgagctgaaattt

SEQ ID NO: 18927 - DNA, 333 bp, Glycine max
agcttgtgactcttggtaatttctttaaaaactaggcacttaaaaagttgagacttttgaaagaatcttcagaaataattcacttgaagaattgtgacttttggaaatgtatttttaaatcagccactggtaatccattatcattaaggtgtaatcggttacacatcaacaaatgtgactcttcattttgaattttgaaaattaaaacgtttagtaacactggtaattgattacaagtattgtgtaattgattacacaattataaaaatgtttaaacacaaattgtaactcttgatatttgaaatcttaacgttttaaaacactggtgatcga

SEQ ID NO: 18928 - DNA, 281 bp, Glycine max
tgtaacagggttattattatggttaatggttggactacattgtgagatacactacaagttgtctataacaatagtttttgtaagtataatataatattaatgtgatgatatgaagaataataataatctataaatgaattacaaattacaaatttacaaaactatattaagtattaccattagtagctgaacattgtctttttcgttcttgtaaaatagatttcctacgcttccttcgttcaacatatatgtccatgagtagttgatttctgcaacaactg

SEQ ID NO: 18929 - DNA, 346 bp, Glycine max
agcttgctaacccatggaagctcctaatatctcccacactttttggggtgggccattcttggatggccttgattttctcaaggtccacttggaccccatttctaccaactacaaaacctaagaaaactatattatctacacaaaaggtacacttctctatatttgcatagagggtgtttttcctaaggactgaaagaacttgtctgagatgtcctaagtgatcatctaggctcctactatacactaaaatatcatcaaaataaacaactacaaatctacctatgaaatcccttaagacatgatgcataagcctcataaaggtgcttggtgcattagtgagcccaaa

SEQ ID NO: 18930 - DNA, 284 bp, Glycine max
ttacagcagattttagtaatgacccactaacctagaattaaaataacttaatgccattaacctagggaattaaaacaaactaaatggctgagtgtaactgaaattgttggcaaccaaaagtcacccccaacagccaacaagtcagccaccatttggtctcccaaaaggctgatgcctaggttgccaattgggcccttattacaacttgaactaaagcccttttagttgattaacccaaaacatatttttggtcagccaactttacaaggattgggccattattt

SEQ ID NO: 18931 - DNA, 356 bp, Glycine max
agcttatggtaactatggatatcgtgcaattgctgccttattaggtataagtgaagattcatggtgtttggtgcgcaactatttgcttaaagaacttggaaaatggtctgatgagtatatcaacttgcttggtggcataaatagatttgaggaattaaagcgatccctacttgttgatggattatccatggtatataagttttttgttacgttttgttggattccatttgctttaaataaatgtaattataattgttacatgcaggttaccatggataagtagataaatataaccgacatgggatatgtcattgcatcaaggtatcatgtcatctttgtttctctttctctcaaca

SEQ ID NO: 18932 - DNA, 285 bp, Glycine max
taatcaactctatttttaatgtaatgattcactaagttcagatatccttgtcagaggtgccccagcatatactttatgtggttcatctgatccttttcagtgtgtgtcaataattctgtggctagaggagcgctatgagaccgtatatagaaagcatcctggatttcaagaaggatccaaacctcttttggcactagataatccttttccaacagaacttccagatattctttatggggaaagatgggcttttgtccaattaccttactcaggtatagaggccga

SEQ ID NO: 18933 - DNA, 364 bp, Glycine max
gcatgcaagcttaagcatggaacacttacttgttggtgatgaacaaaagctcttaacggaatcaaaaatgcgaaaaaggatggccctagggctgcaaactcgtcaatcccgtgggtatggcttttgaaaggggggaaaagaagtttttgaatgttaaaacgccccccctttcgtcattcttataatttggtgcaggggtggctcgcccaggcgagctaacctgcacattttttattttttatttcctattttttttttgaggggaatattaaccatgtcccctcccttctcatggattagcatcttgcctaacttgaacttacttaggttagaattaggcgttgattacttatttttttacttt

SEQ ID NO: 18934 - DNA, 287 bp, Glycine max
tctatataagctgaatcattttatcaataaagggaagttgagttttattcagaaaattagagtttatctcttttatcttagtgagagtgattctcctaaattcttgagtgattcaagaacaccctggctgtatcaaaggactttcacaacctttgtgtgttgccctcgctggaaagagtgattctttccttcctttcatcttcacccttgttctttcaaaccacaattccaaaaaatccacctctgcccagaattatctcgtggccataactcccattttacgcact

SEQ ID NO: 18935 - DNA, 361 bp, Glycine max
  unsure (1)..(361): unsure at all n locations
agctttaagagcaattcctttctttttcttatcattctcttcatgttgattcaatctcatcatttccatttcatgttcctgtaactttccaaacaaggtagcaagagacatgttaaatagatctcgtgatttagtaatggatgttaccttgggttgccattccctacttaagcatctcaaaactttattgataacatcatcatttggaaatatttttcccaaagatgcaagatgattaattatgtgtgtgaacctcttttgcatgtcttgtatgctntcatttggattcattctaaataattcatattcatgagtcaatgtatttatcctagatccttttacatttgttgtaccttcatgg

SEQ ID NO: 18936 - DNA, 291 bp, Glycine max
ttttctacaaccttttctccccctttggcaacataaaaaagccaaagaactcggaaatcaacacagatataacaatggagtagaaagatatagatatcagagtataaaacacaataagccaaactcacaaagaagaagtaatcaaaccagaatccaaataacctaaaatgtcaacaaccacaaaacatccaagactgaaagttaaaaaaaccacaagataaataagcaaagtacttagcaaaatagtgtaaattctaagaaactaaaagccaaaatacacggcttataaaa

SEQ ID NO: 18937 - DNA, 339 bp, Glycine max
  unsure (1)..(339): unsure at all n locations
agctttgaacaatatacttgcccttcatttaactgtctctacgcttggcggccacgctcaacaaagtactttcgacacctactgtacgttgatttgaccaatgctgttatgggaatgttgcgacaatccttcaaaaccttgttgatacattctgagaggttggttgtcatgtggccatatcgacgtccttctctatcataagccatcgtccatttttcctttgaaatgcgatcaatccatgttgctatggctggactcagttcacgaaattnttctaaattttgataaaaaatgtgcttgcaaagagtgtaagctgcataaaattagttatgaataacg

SEQ ID NO: 18938 - DNA, 281 bp, Glycine max
tattcatcacgagacacatacaagaatcatgtgggaaatgcttagtccttatatgcttctaaagtagggaacaacaaattgtacttattgaagaattttgcagaattgatgtataaggataagactcctttcacaaaacacttgagtgaatttagatgcactatgatctattgttagttgtaggtattacatttgatgatgatgtgtgggacttttcctattaataactctacctaattcttgggagacatttcaagtttccatgcttagtgttgctttca

SEQ ID NO: 18939 - DNA, 353 bp, Glycine max
agcttgcaagattacttaaattctaaaaaactaaacagaggaacaagaaattagaagatagaaagggataataaaactatgaattatatatactacttttgatttgagaacaaggagcacttgcatcaacatttttttggtggtggtgttgccaagcattttcattctcttcttcatgtaatcttgttgaggtttgaataactcaaggccaaataatataattattttgaatggtgaaatttataaaaggagtagtgatatgtgaacaatttgttgttaaaaaataatttatcagtattcttatcttactctattcgatcccctattcttattataagcaactggttatttat

SEQ ID NO: 18940 - DNA, 274 bp, Glycine max
tcgttcgcatcatatagagcccatgatgctgatgaacacattctagcttgggtcgctggtcatttgcggactttctttggtcttggtgccaccaaagagttctttcattcgtttgatccgtgaaatgtcccagactgatgatcattatgtctatcctacatagaatccaatctgaccaaaaaatgagcaccacgttcatggacttttatttactgaataaatttgaattctaccttggtttgaagaaggctcaatggccttgtatttatgcaaa

SEQ ID NO: 18941 - DNA, 351 bp, Glycine max
agcttgcatgatttacattctttccttttctcaagcaaattcttaattcttcttgacatcatcaaaattttcatgatttacattctccccctttttgatgatgacaaccacctgtaggttaggagcaacaacaaagaaaaaatatctatttgcatatagtttattccccttggttttgcaatgattgcttatatgagacagttgaagatttcatatttttcatatgtaaacaaattgtctcatagacaatagataatttttcttactattttatcttttatctttctctccccctttatcaacataaaaaacaaatcatgaattgagaggagaaagatgttaccacttttc

SEQ ID NO: 18942 - DNA, 186 bp, Glycine max
tgacaagccggcctgtttaactaacatctacaacaattataattataataaggacaataataataatcacaacttccttttatcaaatcatatcttatccagattttattccatcgagattttattttattcagattctattccatctaaaatttatttcgtccagaatgtatttcatccaatctt

SEQ ID NO: 18943 - DNA, 336 bp, Glycine max
cagcttagactgtcttgtttgttccgagatgactttattatttatttggacaagtttgaatatgatgtataaggaagggaatgtgagccttttacccctttgaaagacttgtatttaaaaatgttttaaaaatacttttaattaatatctgaatttttattcctttattagtatatatgtgaggggtagagggtgtcacaggaattgacatcaatagcttggtatccattgcttctgcacctgtaagttactacattggggatgatgattcaaccaaacaaatctcgcgttcaaaagtgggaaacccattatagcttgggttgattacgatgctgc

SEQ ID NO: 18944 - DNA, 284 bp, Glycine max
tggtgtagagcttgatttaaatagccttaagtgacaatgataaatacttgtaacttgttgaagttagtagaatttggtggtttgccaagaattcgacgtagtttcggtggttgagacaaaccaatataaatttcttatgttttattccttttagtttctcttatttatatgaattgacctaaggtttgaatttgattttgcttttgaaaaactgtttgttttagaaatttatgaaactattgtctaatttgtcttacgaaaatataatatatgtttttattagt

SEQ ID NO: 18945 - DNA, 354 bp, Glycine max
agctttgtggatttggtcttctccagtgaaaggatcgaagtgggtctgaaaagaggcaaatctgatcatcctgctttgatgaatgcaaaaactggggcaaatgaagaggatgagaatgagggagaaacccttgctatgactgtcattcctacacggtcaaatttcccatcagcccaacaatgtcattactcagcccataacagtccctctcacccaatcatccacaaatgccatccccaaatcagccacaaggcatgcctacttaccagacgcccaatgcccaaacaccacctacagcgcaaacaaaaaaggaattttgcagcataaagcctgtaagattcaccccaaattctg

SEQ ID NO: 18946 - DNA, 281 bp, Glycine max
tttgccttctcctccaagcgctttcttgttatccctaccactccatttctattttgctttaatcggtttaactcttgtgccgagatcttgaccacttttgctactcttgccatataggggtagaatccggaaaacaaatacgacttccttcctcccagttggcatcccaagatcccttcaaacttttctattgttggtgccaactgaaagtccccaaatgtgaagcatctgagtgattgggcgtagtactgagcgggggatgtgatggcttcaatagatac

SEQ ID NO: 18947 - DNA, 343 bp, Glycine max
agcttatcaccctgaccccatattgcataaacttcttcaccatgagcagcctcatcacctatctccatatcctctttaaaaattctcaatggaaaaaagatccgaatgaaggtgacaaagataacaaagataatcccaaggatttggactcccatttgcctgaagccggtgctgagcttgttggaaccgaaaccataaaagaaaacaacgtattgagcatcatgtccatagaacaaccggttgagtcttggatcagcaaagagcccagtgaggagtcctcctatggtttctgcaatggcatgagtatggaacactgccataatatcatcaaccttctgcagta

SEQ ID NO: 18948 - DNA, 282 bp, Glycine max
taagactttctaaagttataacgtttttttctcttaagtttgtaagtgtttatagagaagtcagaaattatcttttgagaaagttaaggtgcatatggttaagactaattaaacagtctgtgtagtgtgaagtgcttttaatctatcatcttatcataaattgagacgtaaggaaattttgttgattcttacaacaattaccataaaagtcatatctaacataatttctgattggttaaccgcatgagtatataggaattaaactctggctattggttaatc

SEQ ID NO: 18949 - DNA, 339 bp, Glycine max
agctttgcttctacatagaggtttaagaataatcttctgatcatggtgctggaaagaaatcttgttggtgaatcatgcactgctttggtgtaatactgttatggtcttcccaacaatatatgagtcacctccattggaactacatcacacatcaccctatcattgtatcttccaatggtgaaacacacctcaacctgctaagtcacttttacctcatcatcttcactaagccactgaagtttgtatggcctaggatgtggcttaatatccaaattcagtttgacattaacctggaatttgcaacattggtacaacttcctctatcaacaattaaagaac

SEQ ID NO: 18950 - DNA, 276 bp, Glycine max
taaatactagtgtgtgtgtgtacaatgccccttcattttatattttggacataagctatgtcctggggtgtccgattagagttgttgctttataggcagaaattttagacactatgttcaattctaggcttagactagcctcatcatctacatactggaaacatgccaatcccgttacttttgggttgaaatcttaaaaatatctaagggtatagtaaatacccaagtgttatttttagttgttttttagtttgaaatctgattacacgtttctgt

SEQ ID NO: 18951 - DNA, 328 bp, Glycine max
agcttgcccaaagaaagaattcacggaggaaatgcttaccacctcgaaagactggaaagcggtttctaatgactcctctgcggcctccacataaggcatagaggatgggcagctcaccaagatgtcttcctcgcctgatacgatgaccagatgcccttccactacgaatttcaacttttggtggagtgtagagggaacaactcccaccgagtggatccacggtcgccccaacagacagctgtaggggggttaagatccattatttggaaggtaacttgacaggtgtgagggcctatctatactgggaggtcgatctctcccctaacct

SEQ ID NO: 18952 - DNA, 284 bp, Glycine max
tgtctcagtgtttatgcgttgacagagaccaacatgttagctatcatcgccaagtacgaagaagagttaggtctagccacggcccacgagcataaaatcgcggatgagtatgctcaagtatatgcggaaaaagaggctagaggaagggtgatcgactctttacaccgagaggcaaccatgtgggtgggtcggattgctcttaccttgaacgggagtcaagaacttccccgattgttagccaaggccaaggcgatggcagacacctactccgcccccgaagagat

SEQ ID NO: 18953 - DNA, 632 bp, Glycine max
  unsure (1)..(632): unsure at all n locations
agatgtcacttagnacgtcgtcttcagtctctgaggctgcagctttgagccaaatctgactaccatanaccttgacccattgtgagaatgtcaatccttaccctcggaagcanaaaagaatagaatgtatatttccaatcaaanaagaatagaaggaatatttccaatgaaagcataaaaagaaaagaaggaatattctccaatcaaagagtgggagaaagcaataatgaaagatttgaaattccctttcaaagaatgggagaaagttatacaggaagaataagaatganagaaagctcctgatcatggatcgaagganaaacagaagacatgtgctgagaggtctttataccatacaatatctgaacaatacagaattgcaccaaatgaactataagaccganaggataccacgacctataatggtcttcttcctttgataccaaccnaaatcccgtgcgctagcgactttttcngcctcgactanacaananaacagaaaaagatnaagccatccatattaatagccttaaccactagagccgaaacccaccaaagaccattccangggagtctattgtcatgaccacatgatttttgattgatngaatattncaagtcagtcagatttt

SEQ ID NO: 18954 - DNA, 322 bp, Glycine max
  unsure (1)..(322): unsure at all n locations
tctagccacggcccacgagcatagaatcgcggatgagtatgcccaagtatatgcggaanaagatgctagaggaagggtgatcgactctttacaccaagaggcaaccatgcggatggatcgngttgctcttacctagaacgggagtcaagaacttccccgattgttagccaaggccaaggcgatggcagacacctactccgcccncgaagagattcatgggcttctcggctattgtcagcatatgatagacttaatggcccacataattagaaatcgttaggaaacttgtatgggctctcagaccttgactagatatgatttc

SEQ ID NO: 18955 - DNA, 286 bp, Glycine max
  unsure (1)..(286): unsure at all n locations
cgcggggtctggagacgaaggtcaagtggtctcaatatacgaagatgatgttccaagtacatttggattggtacgaccttgccctcctgatttccagctggggaattggcgagtggaggagtgccccgacatttacgcagcgagcataatgtaaacctttacggtttaaaatctctatagntgggcctacgctctagaagttttcttttggttaaggcttngtgtattctgttttttttttataatacaaggatctttcttcatctgttcctacgtctctacccat

SEQ ID NO: 18956 - DNA, 367 bp, Glycine max
  unsure (1)..(367): unsure at all n locations
atactcggatgtccgatagagtctcgttatttatccagacgctccanattgaaagcagaagctcctagcaaactcatatgacaataacttattctcaaatgtccgattgagtcccgtaatatatcaagactctcgaaattgagaacagaagctntgagcaatttcaaaccacaataactntatagtcgaatgtcctattgagtcccgtaatatatcgagatgctccaaatngataatggaagctcgtacaaaattcanacgacaataacattatacacggatgtctgactgagtcccgtaatatatcgagacgctccanannttgaaatggaagctcgtaccaattcaaacgacaatnaacttttac

SEQ ID NO: 18957 - DNA, 399 bp, Glycine max
  unsure (1)..(399): unsure at all n locations
cactactagttagtcctcttttgccggttattttgaaatagcataatatgttccaatagaagcacataccagcctcataacaacgatcaaaacgcaatttcttatctagaaatcaaaagaattaaataacatgcaatntaattagttacatatcanaatattaaaatgtttaanaataataatttgaataaaggcctaactntatancctctaaaattataatatgttactatgtagcttanatggatngcacaaacaanagtcaacatgaagtgaataacttacaactaatattgacatgaaagaatcaattagtgtcatcaaagaacctgcagtaaattngaaagaagaaatcatanataacanaanatgtgtgatctatgatcttactagctccct

SEQ ID NO: 18958 - DNA, 357 bp, Glycine max
  unsure (1)..(357): unsure at all n locations
agagtttcggtgtgtacccgacacttggacgtataacatcctcatttatcttaatattaagaataataaggtcaaattggcagcttaaataattgcaaggatgaaagaagcctccttgaggcagacgttgtgagttaccaaaccctgttgtatgcatactcgactaggaaaatggttcgagaagcagaagagctcatataggagatggacgaaagggatcttgagattgatgaattcacccaatttgcgttgactagaatgtatgtagaatcangtatgctngagcagtcgtggttgtggttcaggaggtttcacctagctggaaatatcagttctgatttgtattctgccaatatc

SEQ ID NO: 18959 - DNA, 281 bp, Glycine max
  unsure (1)..(281): unsure at all n locations
ttaacaaaaccacaggctacctgtcanacgatacaacananaacataattntgttatacaagtgcataacanaatcatgtttcgttgtgattcatatggcgagaaacaaatataagcaacananatgtaattntgttgcacacatacaacanaaacatactttagttgcaatatatggggtgaaaaaatatatacaatgaanatatgatttcattgtacatgtgtgcaacggaatcccacttctattccatatattnngtttccaccccatacattataat

SEQ ID NO: 18960 - DNA, 325 bp, Glycine max
  unsure (1)..(325): unsure at all n locations
ctgggaactgnagatctgaggcatagtattcatttatggttagaaatatctgttggtgtttaagctgggaaatctgtaacagatattaatacattgtttaaattgctactttatatctcacttgaatataacgggatattttggatgaaacttcctgagtgctntcccaacactcagcttctcttataaatcaaacttagcttacaaaggaagctgntacagaatactcagaacagagcagaatagcttacaaaaagacaaanagaagaacacgagcctagtataataggaatataataacttatgttctaacaatctcaatgat

SEQ ID NO: 18961 - DNA, 115 bp, Glycine max
  unsure (1)..(115): unsure at all n locations
tgctctttctcggcgtcatgcattactttctatgcttgaaacaaannatgatggtcttgaatggtttgaaagcatgtatgaaaatgatgaaacttttggagaaacttttaaaatt

SEQ ID NO: 18962 - DNA, 203 bp, Glycine max
  unsure (1)..(203): unsure at all n locations
atttgatgccattcaataccatgtgcaatggaaccccttaactacgaagaatgtaacaccctaatttctcaaaatgtaattataccttaattattttatttctttattttataaagaatattgatgaatntaagttcacaattatataaacttgggaaaaagtgaaccggaatttattgntaataaataaacaacttctattt

SEQ ID NO: 18963 - DNA, 409 bp, Glycine max
  unsure (1)..(409): unsure at all n locations
atcacatgtggtactatgtggcggtcgggcgatggtgcacaacaagtgttccacatccacaatgcgcgcataaacccaccatcctctggtgcccacctgcaactgagctcacgtactcccacgtagcccatatnctctgttctctcaacaccgggtccccatcaatccgtccaagcnttcacaacatgcaaacaaaacaacattcaaacagcacaagctatcacagccaagcaaaacagagcagaggcagaanactctgctcaacacatcaaccaanatcacagcttttctcacttaaagaccacagtaacaatttcttcgatccaattcgttaaccggtggatcgacnntccaaatntactagaagtctatagtgcataagcctacattgtgaaccgtgggatctact

SEQ ID NO: 18964 - DNA, 269 bp, Glycine max
  unsure (1)..(269): unsure at all n locations
tacatcctctggtaatcgattaccagagaggaaatatcatatttcttaanagataatngntcttaanatacttttgtaaatataccctttagccaaacctgtgcaacatcaattaaggaattttttctaagatcctaaccaagtacatcgttcttcttgcatttctgaattcttgacttgaatcgctctcatctttggcatcatcaaaacttcatatcatatatgcttatacaatttcccccttttggatgaatgacataatctgtaat

SEQ ID NO: 18965 - DNA, 220 bp, Glycine max
  unsure (1)..(220): unsure at all n locations
atataatatatatgacaattgtaatagcatcaacaccttccatgttcttcttcntttgtttcataaactcacatatttctaataagagagaatgtctcttgggctacctatgagaaaacttgcgtcacaatggcatttaagaaatataaaatgagttanagtataaggcatcttattctacattatttgcagaaacaatgacttcttggatcaccttact

SEQ ID NO: 18966 - DNA, 496 bp, Glycine max
  unsure (1)..(496): unsure at all n locations
aagagatcaagactctggtaatcgattactangcagtgtaatngattaccagaagatagattaattcaagatcaagcttttgcctcanaacanagtgtntccaagagatcaaggctctggtaatcgattacactggtaattggttaccacaagacatatttgaacaatagctcttataaagggttgtgaatttgatatttgaatcatgtaatcgattaccagcaacgaaacttcatataacactttgaaaagtcatgacccttcaaaatataactatgtaatcaattatcagtaccaatgagagaacttatagnatcatttnaaaagacacatctcttaaactattttaaaggcatgtgggttatattgtgtgtgttgactcaaagaagaagaatttctaaaatataattgcaatgctttcacactttggcaacctgcaattattgaatcattagacttaatgatatatcttaaaaagaatcttagactcattgta

SEQ ID NO: 18967 - DNA, 264 bp, Glycine max
  unsure (1)..(264): unsure at all n locations
catcaagaatcaagccaaggctattgtgcaagcaatcaatggggcaaaacacaccacatgattataatgatggatggctcanattctcacaaaggtaaaatcatcactgtcaaattgagctttcanaactatcatgacatgtagaaaagaatcaaggatttcaagtcacaaaatgtcaagaactnttattttcanaacaattacccatttcttgaacatatcctataattcaaagaaaaacatgcaaagtcgtacgtgcacatg

SEQ ID NO: 18968 - DNA, 490 bp, Glycine max
  unsure (1)..(490): unsure at all n locations
ataaagctgtctgaagatcttanagtagcaattcagngacgaaatgggtagtgacgcaacattctcttctgccagttgcatccttgcgtaaatatacattactatcacttagtttggtaggagcctctatatatacactctatcatgtgtgtgctctactgcacaagcacggaatacgtttagatcttgtagagatgatgataaagtgtaaacctatcctaagttatgcaacttaagcttgaggaagtgattctcagaaatatatactacagggtttattacattagactgaactattctaatactaaaaatgtcgcatgatgtaagcttgtatcatggtcagtactgtactgtacttattgccattaatatacgcctatttgttattcctggtgacagatggtacgactattttataattgtcaaatcactgcttcgttcaatctctcgctaatatacttgcatggcggacggaagtcctctgcaccct

SEQ ID NO: 18969 - DNA, 324 bp, Glycine max
  unsure (1)..(324): unsure at all n locations
caacttactaaatagcaagttactagtacacgataacaactccatanatctgacctttgacactaactaccccaagctaattaagagtcatggggcctctataatatgaaacaaagtcttaaatacataacatagagtaacctgagatactacccatacatagaagccgcgaaaattaactaaaatatcttgaaattataaagatagagaaccctgcattaattataagttactatttggttactgctcctatatcatgagtacaaacaacgtatcgatgaaataatagccacattcgcagacattggacttggaagtctttat

SEQ ID NO: 18970 - DNA, 59 bp, Glycine max
gcttagcaaacccttttctatacaaacatgctgaagtcttactctaacaatcacaaaca

SEQ ID NO: 18971 - DNA, 337 bp, Glycine max
  unsure (1)..(337): unsure at all n locations
ctgcagctggattcctttagtagggaatctatccttcctaagatggagccaaacccagtcaccctcattaagaaactagctctttcttcctctattgcctntagttgaatacacctttgtttggttctctattaggttcttaaccctctcatgcaacttctttacaaattctgacctagattccccttctttatgtataaaagaagtgtccaatgggaggggaatgaggtctaacagtgttaggggattgaacccatagacaatctcaaanagggactgcttggtggttctatgaacccnncttgtgtangcanattctacatgaagaatatactca

SEQ ID NO: 18972 - DNA, 169 bp, Glycine max
aaacttccctgagaagctagagcttagctacacacatctcttttttaactaagctcacctccttgagaagcttccttgagaagattcctaaagaagttagagcttagctacatacacctttctaatagctaagctgcactgcttgagatgagaagttagagcttgacta

SEQ ID NO: 18973 - DNA, 91 bp, Glycine max
tgcagcttggtgccacactcgatccggagatgattacatgaccttgtatcgatacaggtagtggcatcgactcaggcccaataagccttct

SEQ ID NO: 18974 - DNA, 475 bp, Glycine max
  unsure (1)..(475): unsure at all n locations
atgcgcttatgacatagctctcatgtgatatagcttttttgaataagcacttcattaagtatggctagtatactagtagtaacacgcttgatgtaccacaactgaatgagctgagtcagcacattcagatattcagtaaggaaaagcagttaacaatagttgctccttcctctgtataaatacctatgtaataaatgaacgaaaatcactctctctttctcttaatttgatataaacaatactctccctctcttccctatgaataataactntggcattgagctacttctccacacataccctataatatatatcacaaataacaattgcaagcgcacacacacacaaatggcanagaaatcactngaaactgcataccatatcccttttatcataatagccatactagcatattcaacactatatatcatctaatanaacaagtagtaagcggtaatcacacggctaatacatg

SEQ ID NO: 18975 - DNA, 387 bp, Glycine max
  unsure (1)..(387): unsure at all n locations
ctcagctgataacaaggtggttccttatttagcattcactaacctctntcaagtttatattcacctatcataagatgataagaaactaggaaaagtttgtcgtaatgataaagtatacaatgtcgtgatantttgttacgtaaattgaacaagaaataatcagtatatcgtcaaaaaaggtaaacattatatatataaaattactaaacatcagaaaatctcaatgcaatnntttctttggttntattgntatcgggcttataaatatgatttgtatannacttgtgcatgcgtaattggtgcttctactgctcgcgttcagcttcatcacccataatataatggtcaacatcagtgttgcccctacggagccaccttcacacttat

SEQ ID NO: 18976 - DNA, 123 bp, Glycine max
  unsure (1)..(123): unsure at all n locations
tgccccacattatttccatgacacaaatgcananatgatgatttggaaactntatgcaaaactggtcatgcatgcacctatgtggacactcaagtgtcaaaattttatggtcatgtgatgcta

SEQ ID NO: 18977 - DNA, 296 bp, Glycine max
  unsure (1)..(296): unsure at all n locations
ggaatgggtttaggcaaagacaacggtggcataactagcctgataaatgccaaaggaaatcgtgggaagtatggtttaggctataagcccactcaggcagatgtaaagagaagcatcgcgggaaggaagagtnggggtcaaagctcgcggttgagacaagaaagtgaaggaagcccgccctgccacataagtagaagctttataagcgcgggtctgggagacgaaggtcaagtggtcgcgatatacgaggatgatgttccgagtacattggatttggtacgacgatgccctcctga

SEQ ID NO: 18978 - DNA, 267 bp, Glycine max
  unsure (1)..(267): unsure at all n locations
gatattgaaatgactaacattgatttaaatggaaactaatctagataattctcgcatttgataacttttctatattaaatctgtaatntcgctcctctatacatntaaatatgtaattntagtctctatatttctaaatctaagacatttaattcttctatttattagaataagtaattttggtcactcgatcatataatgtcaaatggtagctcgatatgtcatattggtgctcacgcgatgttatgtatgctgttgacatgacac

SEQ ID NO: 18979 - DNA, 367 bp, Glycine max
  unsure (1)..(367): unsure at all n locations
gacaaactcccaccacttcaatttcctcactggtttgctcatcagtttcaccagcaaaccctactgccaggtacctctcagttntctcttggaggcttctatgatgctgctaataacaacctccactttattaaggatggnggaaatcaaaaccgcctcacggcaacaaagtcaacaaggtattgngatatagattcactaaataatggtaaggagttagctgaaagtgtgtcaatctcccanaaaggacagttctggatcaanacanatgaacaagataaccatcaaggtggaggaatnggtggtagtagtactactactcataatagagaggatnattcttcagttcattataagctcttccaat

SEQ ID NO: 18980 - DNA, 286 bp, Glycine max
  unsure (1)..(286): unsure at all n locations
tggagaagagagtgattgtcgagtcacaacgtcaggtagacgtcatctctatcctccaggaaggatcatgcatatagtccctactgcacatttgtctganaatattcctaattcacatcacaatgtgtctgatgagaaacatgtctacctatatgaaacgcctagagatctgtatggaaagctcagactntctagagggatgatacttgatcatatgacgaaccagtatctgaagatgttacaacaattaatcaatcaactagagaaagacagcttcaaatatcgt

SEQ ID NO: 18981 - DNA, 369 bp, Glycine max
  unsure (1)..(369): unsure at all n locations
catgatgtcatgcagatagttgaggtgtgaattntatcaaatctacatttctcatatatgtatttatgctcttagtgaatattaattccttntacattcataggtcttggatgatcgttctcgtgataagcgcctagctgctntactggaaaagtaccacaaatctcagaggtatctnttcctgcggnttgttccttacatgtnntagttttccgcatgttactaagagcttgtaccttttctcangaatcgagtattggttnttggtttgtacaaatggaagccaaacgagttgaanatatgcttcaagaagggtatgtaacacgtccacacaattnnntatttttaaaatttcctggtgaaaatatc

SEQ ID NO: 18982 - DNA, 323 bp, Glycine max
  unsure (1)..(323): unsure at all n locations
agtgtctcgatatattacaagatctaatcggacatccaagtaaanagttattatcgttagaaattgctcagagcttctcatttcaattacgagtgtctcgatatattacgcggattaattcggacatccgagtataaaggtatcgtcgtttgaatttgcttagagctcttttcttgaaattgagcgtcttgatatactatgggacacaatcggacatccgagaaaaaagtattctcgtttgaatttgctaagagctgctgttctgaatttgcagcgtgtcgatataccactggccacaatcggacattccgagtaaaagttat

SEQ ID NO: 18983 - DNA, 280 bp, Glycine max
  unsure (1)..(280): unsure at all n locations
actcggatgtcggattcaagttcataatatatcgagacgctcganattgaataatggaagctattgagcaattccaatggtcataacttttaacttcggaagtccgatgaggcacataatatatngagacgctcgaaattgaacaacggaagctctcgagaaattcaaatggtcataacttttaactcggaggtcggatcgagacgcataatatatcgagacgctcgaaattgaacaatggaagctcttgagcaattccaatggtcataactnttaactc

SEQ ID NO: 18984 - DNA, 544 bp, Glycine max
  unsure (1)..(544): unsure at all n locations
tcatccttttctgggttatctaattcacaatgttcagatttcattgtattagcttcttattgtatgtacatcatgagagatntaatatgtttagtttttacctgtggggccggtgtaatacacaatttgccttctattttgagagaacaatcatacagattaaaagtattagagacatgaacttcaatatatatatatatatatatatatatatatatatatatatatatatatatgtatgtatgtatgtagcgactatatgatgtanatataggaagtgagatgcanacttactcagtaaggaagttgacacgtctagctagaggggcgagtccaagtaggctcacagaacaaatccaaggctatgatatggagaccagtaataaatatatgtaatanctactcactaaatgctttagcaagtgctatctatgtgcaaagctatactctacaccacttataatcaactacttcacttgctactctgaactacaaaatacttagctgttacgcacttggtaatacatctatagctctatactcg

SEQ ID NO: 18985 - DNA, 279 bp, Glycine max
  unsure (1)..(279): unsure at all n locations
gcgatctctgagtcacctgcngcatgcaagcttgngctctngcctactcaccgcctntatggttcatttctagctatcttatacttactcccaagttcagaatttctacacctagaccactccnttgaaacactcctttttactctaactntgctctgaacattttcattccaccaccacgattctttacccctangtcccaaacctctagattcacctaacgtctctgtagccactataataatctctggggaacatctgctccacatatcaattgca

SEQ ID NO: 18986 - DNA, 173 bp, Glycine max
  unsure (1)..(173): unsure at all n locations
ctcttgaccttgactggatagaacctctctttaagtgaaggcgtttgacttgatcccatgttntactaaagagaaacacaacccagcgcgaatcataactccgacttctattatatgttgaaatggatgaatgcatgaagaaatgtatatgaaacacatgcaatttatgaata

SEQ ID NO: 18987 - DNA, 264 bp, Glycine max
  unsure (1)..(264): unsure at all n locations
tttgatatagcgaagaattcgtgttacggccttaagatgagtagtggttggagtctncatgtattggcttatgagtccagtagcatatagaatgtcaggtcttgtgcacgtcanatatcacaaactacccaccanacgcttgaaatttgtagcatccaccttgatgctttgtcaaacttcaataacttcattttgcactccaccggtgttccaattggcttatagctatccatcttgagtttcttgagcatcttcttcacatag

SEQ ID NO: 18988 - DNA, 184 bp, Glycine max
  unsure (1)..(184): unsure at all n locations
atacatagttcaaatcttgtggccgaattctcgtgctntgaatccttgtagtttgcattctaatataattagtgtatatgcatacatgntttcaatatatagataacattatgaattatagtatcaaattggttagtgatgcaagtgcacagctaatttagactatatttcatatatgaatata

SEQ ID NO: 18989 - DNA, 350 bp, Glycine max
  unsure (1)..(350): unsure at all n locations
tatcattgaatgtgactaagaatagggaaacaagatctacgccctcattaatgttaatatcttggcgattcctcatgcatgggatcttangacccanattatggctaaagtgctcgacctagatctaggagggtctttagcaactcatgttnttagctacatgtcactttgtgattatatgagaagtatattattattngttnttatatatcttagaaattttatttgttaaacaaatganattccctattcggccaaataacttcagattatgctcaatacaatcaaatgttcgaccgaagtttaacacatataatttcatggtctctgtaacatgttgattataagta

SEQ ID NO: 18990 - DNA, 320 bp, Glycine max
  unsure (1)..(320): unsure at all n locations
tgtgttctgttagcaagttttccactgggcattaactaatcaatgtagtagtgacccagggtttaatgtaagctaaaatatttctttgtttcagttatgtatntacattcactctntttcnggctaatttgttgntatgcactgtattgtatacttgtcaatgtatcatgttccttgatctccttaagtggtatttcgagcaaaagtaggaaagaggtatcagcttcctcttaagggaataattcctgaagaaattggattggtaagcagtatgttntctttttgtatcccaataattggtcccacagttttctatgtca

SEQ ID NO: 18991 - DNA, 336 bp, Glycine max
  unsure (1)..(336): unsure at all n locations
gaaactctgcccacaacacanaccaatatcacagcttttcacatacaaataccccagtaacattctcttcgttccaattcgttaaccggtggatcgactcgaannatttactggaagtctctagcacataaatctacattatgaccgttgggatctgctagaaacgtccagagcccaatctgtactactctntccacaaccagcanatacataacattntctgcacanagccaaaattctgctacacctatntgacagcannaatatgcataagtgcagaatttcgaattcacactctcccttcatccaatttgcccagantgaatcctacaagtc

SEQ ID NO: 18992 - DNA, 269 bp, Glycine max
  unsure (1)..(269): unsure at all n locations
tcagactgatggccaaactgaacggaccattctgtcgttggaggaacctttgagggcgtgtgtcttagagcanaatangagttgggagagntttctgccattgatagagttcacttataaaaatagttntcactctaccattggcatggctccctatgaagctctgtatggtagaaagtgtaggacacctctatgttggctagagcccggagaagacctcaccttatgatctgaagtggtacaacaaaccaccgagaaggtaaagtgat

SEQ ID NO: 18993 - DNA, 540 bp, Glycine max
  unsure (1)..(540): unsure at all n locations
ntgcccttgaccgtatctctaagcacctgcggctgcagctctacatgaaatgccannaantgaaaaagtagagctctgtcagttcgaaacatattactcccaagatattccaggaagaatgaaanggannatataataanatatccatttaanttggttgtgtggcctggacacagtgacagaatcaaatttatttctacggacaattttttttatatattttctagagaagatattacaaattttaaaaatacacctatgtaagagataatctaaatattttcttgtgcagatataattttcttacatacttcatattntaaatattgggtaattttcattgcaatactatataaattggaggatatcaaatatncttctttattttatactttacctctttaaaagaatgttatggatcaacaactactattatgggtaaaataatatatatctctgagaaaaaaatttttgagatgcggtccacactgacacacattgagatatgtgtctaatgccacttccgataataccacaaag

SEQ ID NO: 18994 - DNA, 337 bp, Glycine max
  unsure (1)..(337): unsure at all n locations
gcttatgcttcatatgccttatatgaagaatatagtcaggtatcggcagctcatttgatgcccgaagctagattcctaaataaaccttatagtgctttcggtgacgtgtggagtgataaaagatgtcttgtgacaaagcaagtgcttcattatgtaacatgttgctttcaatangtgtttntatattgctatttgtttggtctaaacatgtttgtatatgaataaattgcatcacaatgcgcagtgggaacctttccagtctacgctgggttcgagtctgatggaattatctntattattgcactatagtgaacaacatcagattacttttatccat

SEQ ID NO: 18995 - DNA, 263 bp, Glycine max
actgacgcatatcttataatctatgcgatcctacggtagtatgtctaatatggcgtccaaccatcagataatggtctcatattcgctatagacatacgcactcctgcactacccagaacgtctgatcataacagactgcggatgcatcaaacacttgttacgaccttatcgcaacgttcttcttgttctgcttacattgcctggacacggtgcaaccgtccttgtctcttatataactggatctccctgatggtcacatacct

SEQ ID NO: 18996 - DNA, 137 bp, Glycine max
  unsure (1)..(137): unsure at all n locations
ctctattgtcattttcactgcatgaccagagaaaggagatctcataagccaaaatctcgctctcacatctgtcgtctctttctataccacgaatgtattaatcactattcttaccaaagacncgactcttaatcgcc

SEQ ID NO: 18997 - DNA, 311 bp, Glycine max
  unsure (1)..(311): unsure at all n locations
gcggaagtatatgtaaatcacacccctagatttgaanactcagacaagcctaatcatgnttttagaattaaaaaggctntatatggcttanagcaagcccctaaggcttggtatgagcattngagtaagttccttttagaaaaggatttctcaagaggcaaagtagatactactatnttcataaagagaanattacatgatanntttattggtcaacattatgttgatgaataatatttnggatctanctaatgaatatcgtgcaaggaattctctcatgacatgcanagtgagtttgaaatgtcaatgat

SEQ ID NO: 18998 - DNA, 90 bp, Glycine max
  unsure (1)..(90): unsure at all n locations
agttaatctaattntctcgntaaattgtacaaacaacttatacacacatggttatactatgagattcanaaactccacaacatatcataa

SEQ ID NO: 18999 - DNA, 328 bp, Glycine max
  unsure (1)..(328): unsure at all n locations
agtatccttgtggaaccttcacccgatgaagacactgacananacttatctntgccttcttggacaaagtatggcaggctgggggcaagtaatatttcttcccatcaaaccttggatgcaactgtgatcgtatacccatatcagctagatcttgatgggtattcaagccatccttcgtcttgccttgaatgttaaggagcgtcccaatcacactgtcacaaacatctttctncacatgcatatcatcgatacaatgtctaactgtgagatcacgccagtacggaagatcaaagaaaatggacctcttcttccatatgcaacgctgact

SEQ ID NO: 19000 - DNA, 195 bp, Glycine max
  unsure (1)..(195): unsure at all n locations
ttacattcaacgtaactggattataaacatgcacttacaaattttgctatttcacgttacttttactcttcactcatacgtctgttgatatagtagagggttatgagtctatgtnttgtgtggcaagatcatgactatntataaatgacttaatggactctaattgtctcatctcttcacctaatgtgctgttat

SEQ ID NO: 19001 - DNA, 341 bp, Glycine max
  unsure (1)..(341): unsure at all n locations
tcacatgtttgtcatcatcataaaggtggagaatgtgaatgtatgtatacatgattctgatgatgccaaagaaaaatcanacaaggttgcttcaaatgataagcanttgcttcaagaataattcaagagtgcttcaacaaacaaagccttgtttcaagattcactanagaccaagccttgccttataacaaagtgctttcaagacatgcaaggctctggtaatcaattaccaggaagtgtaatcgattaccagaagacagggttgagatatagctggtgaaaaaggttctgaatatgaattntcaacatgtaatcgactaccatatgtctgtaatcgatta

SEQ ID NO: 19002 - DNA, 364 bp, Glycine max
  unsure (1)..(364): unsure at all n locations
agaagctagagcttagctacacatacctctcttatatctatctcacctccttgagatgagaagctagaacttagctacacacccnctataatagctaagctcacccncatgacananaacatganaatacaaaaaaaaaaatccttactacaaagactactcaaaatgccccgaaatacaaggctaaaaccctatactactagaatggccaaaatacaaggcccaaacgaaggaaaaacctattctatatattacaaagataagcgtgctcatacttagcccatgggctcgaaatctaccctaaggctcatgagaaccctanggccttccctnggatctctagcccaatctacttggagtcttc

SEQ ID NO: 19003 - DNA, 309 bp, Glycine max
  unsure (1)..(309): unsure at all n locations
tatctgggctgtagaaccatgaattgtaattggtcaaagaataccaattttttaaaannaatatacggtcacttagaattttntaaataagaaatacaaactaaaaatctaagtcatgcaatcttatatgaatgattaagatattaagtttataatcatatatgatacttaaaagagtaattacatttcacataagtatataagtagcgataaacacaaccgtaaatcttataatacaaggtgataacaaatgaggttagtntactatcgcccctctaatactcgagatttttttcttctaatactaca

SEQ ID NO: 19004 - DNA, 310 bp, Glycine max
  unsure (1)..(310): unsure at all n locations
ctttcatagtagagtatcgataatgtgtctaccatcacgattatcgtcttcctttccatcatgtggggtaccacctgngccgacagatccctccaccttttgtgcgtgttctatgaaagatccgtccncctttttgcacatgttctgtagttgcatcctatccagaaccatatcataattgtactgatactgcctaacaaaggcaaccattatgtccttncaagaatggactcgggaatgttccaagttagtgtaccacgtaacagctaccccagtaagactttcatggaaggaatgtatcagcaattcc

SEQ ID NO: 19005 - DNA, 625 bp, Glycine max
  unsure (1)..(625): unsure at all n locations
acggtgattgaaatccntttgaacgnnccacnannnantactcaagcctggagcanatagactgaagcctacgtcctcgcaatgactgagtcataatattttgttgtctgatcattanagctaatgaattcagtgacaatctctntggacaatagcttctcccgaatgacatgacagtcaatttccatgtgcttggctctctcatgaaagactggatttgaagcaatatggagagcggcttgcgtatcacaatataacttcatctgtccaacttcacagaatctcaattcttgaagtagttgtttaatccacataagttcacatgtaaccatggccatagatctatattcagcctctgcactggaccgggcaacaacagtgtgcttctcgctctatcaagagatagcactcccttcaatgaagacacaataaccagaaatgtgatctctatccatggggcagccagcccaatctgcatcacaatatcccgatacctgtgtatacctatgtcttatacaacaatccttccaggtgctctcttccatatctaaagtgncatgacagctcccatgatcacatgaagatnntgcataatcgactcacactttcacacaaggagatttcg

SEQ ID NO: 19006 - DNA, 171 bp, Glycine max
  unsure (1)..(171): unsure at all n locations
cactcggatgcgatcaggtgcataacatatcgagacgctcgaaattgaacaacagaagctctcgagaaattcanatggtcatatactttcacatggatatccgattctgtggtataatatatctagacggtctaaattgaacaactactcgatatattaaatggcataact

SEQ ID NO: 19007 - DNA, 309 bp, Glycine max
  unsure (1)..(309): unsure at all n locations
gctttactctcttgtgcttgtgcctaccgatgtgcttgtgtgcnnntttttgcgtgtgcattgagtctattctcctgcattcttgctctcatcttacatctttcaccacaatccaagtaagctntttatgttattttctttttccttcagaagcttacaccttatggtagacaatntacacggtttctagttgcatttatgtttagctttagtgctttcaatttagggttacaatgtagcgttacttatgtttaagcccaataggcaattctgtagaggggaaacccctattttgctgagatatgataa

SEQ ID NO: 19008 - DNA, 345 bp, Glycine max
  unsure (1)..(345): unsure at all n locations
attgaaaaacctttattcaaacctttcaaagttagtgagaaggctaanagaaaaattagggaacttaganaaactaaatccttaattgaaggcgtaggtgacaaccatagtgaattactaaacaagattggtagtttacttaaagtcattccagataccccccaagcctcggaaaatacttccaaaatggtaacaagaagtaccttcaaattaatcaatgttattaatgaagatagtggccaaaactcagataacacaactgagataggatcagtgtcagagaagaatataaatccaattaattccaaacactggaaaacaaccttcaaattatattatcaacgt

SEQ ID NO: 19009 - DNA, 279 bp, Glycine max
  unsure (1)..(279): unsure at all n locations
gctttctctgtgactgacttgaatgaattgactggaatatgagtcatctgaaagttttaaccctagattaccaataatttctgttaaaacctcataatatcttttattctttctaactctggtgataaatactagcttccaaatatttaaatatttgaaaacctggtgctagtagttntatcttccttttgcttaaatgaaaaananaaaagcagattgatgacttgttgaagttgataatgcacattggctaagacagccaaatctagttntactatg

SEQ ID NO: 19010 - DNA, 270 bp, Glycine max
  unsure (1)..(270): unsure at all n locations
ttttctggtgcanatgatactgccatacttctgagtatctgttctagtttaatcttgtntaatatattcccaaaatctaaatattgtgcagaatcaaacccatntatagtttgtngacacccactacnnctttggctaataatgcaattggttntgtagaaggatantttacatgctctgctcctgcacttctttctttntcctcttttggaaattcttcttcttttatactacttaaaagtagtacagcactacagcttggaatactta

SEQ ID NO: 19011 - DNA, 410 bp, Glycine max
  unsure (1)..(410): unsure at all n locations
tcgagaagcttccttgcggcttctntgagaagttagtattttctctattaactaaattcacctctttgaaaataattatggataaaataacacaacaaatataatcaaacatcaaatataattactaataatatttcaaggtgttacctgcagcgcaagataaaggagaagaggtgagaggaggcgccatccactanggaataagccatgaaagaaggagcttcaccaccaaaagagtgccttggataagaagcttanaggggaagcttcaatggaggaaaagaaagaaagagaggnggaagcacaaaattgaaggaagaaaagagggagagaagttgaactttgaagtgtgtctcacaagactctcattcatcaaagttacaataangtgtacacatgcttctatttat

SEQ ID NO: 19012 - DNA, 242 bp, Glycine max
  unsure (1)..(242): unsure at all n locations
catgtagcttgctcaagaagcttcattaagaggctgtctctagaagctctctcgtggcttctttgagaagctatctcaagaggcttctntgagaagctagatccttatctatgcacacccctctattaactaaattaaccttcttacaaataattacggataaatagagcacaacgaatagtcaaacattgaacgtaattactaataatatatatatatatatatatatatatacatatata

SEQ ID NO: 19013 - DNA, 305 bp, Glycine max
  unsure (1)..(305): unsure at all n locations
gcatttctctctctctcganagagctgacgaatattagttgcgtgaagaanatccatgccgaggcgcttccgtaacgtttccgtgagtaattacgcgaagattctcgaccgntcgttaagattcatcgttcgttcttcgttttcttcagtcttcaacgggttagtaccttaaaccaagctnttcgattcattctatgtgcccgcggtggtccacactttatgtcatgtatttttggtctcagcttcattcactttatatatccccttttgacgtgcttaagccatctattcaagtcatttctcgc

SEQ ID NO: 19014 - DNA, 469 bp, Glycine max
  unsure (1)..(469): unsure at all n locations
atctgagacanaataaacaagtgttgtaacactgtcagttntattggacgaagganacttgagcanaatgagtgaatcttaactntgctaaattagcgagtttcattgtattcaagcttattgtgtaaatactctttgagtgattaagaatacattntctatcaaacatatattngttgtgaaagccagaagtggcttagatacaaagaatatntgggtcttaatcttagggggagattaagtgtagtgccaagagtggcctatagagtatntgttatagccaaaagtggatagagaatatntggttgaatcaaagaattgatagtggaacccttcaggttngaangagaactgatgactccaagagtanggtgaccaataaacaaaccttgtgtgttcttactgttcttatactaatctttcataactattctacactatgatcgagtttgtaactagttaacacacg

SEQ ID NO: 19015 - DNA, 364 bp, Glycine max
  unsure (1)..(364): unsure at all n locations
tgagaacctgtgacgtacctattcgggcgagctcctggcagtcaaccaataaaggaacaaaagtccacgaagcagggaggtttgtgtggcggttggccagctatctatcttgtgtttntatctgaaaaattccctctggtaatcgattaccatttgagtgtaatcgattatagggtttaaaaattgaaacagagcattcagtagctgctggtaatcgattaccatttgggtgtaattgattacacagtgttatatgctactggtaatcgattaccatttaggtgtaatcgattacacagtgttatatgctactggtaatcgattaccatntgtgtgtaatcgaatacacagtgtaacttttatg

SEQ ID NO: 19016 - DNA, 307 bp, Glycine max
  unsure (1)..(307): unsure at all n locations
ctgcagctttcatattcttgacccgagtggccacattgtgntcgtgcattttattctcgttntggttaacttttatacccnctggtgacgtgcttaangccatttacttaagtcatttctcgcttaacttanaaataaaataaatttccaccgaacgttngaattgtgttatccattaacttcggttaaaataaattccgaccgttcggtcgtgccgtaaccacgttggaaatcaaaagaggtgaaataataatataataatcaaaaagacatcttttagtaaaataaagcggaaaataatcggacg

SEQ ID NO: 19017 - DNA, 259 bp, Glycine max
  unsure (1)..(259): unsure at all n locations
cacttctctctctttcgaatntgcttanganaattgtttccgtcaagaaaatccaagccgaggcgcttccgtaacatttccgtgagtgatttcgcgaaggttntcgatcgttcttcgacgttcttcattcgntcttcatcgntcttcagtcttcaacgggtaagtacctcanaccangctttccaattcattctatgtancccgtggtggccacanttnggttcatgtatttttattctcgtttcattcactttttata

SEQ ID NO: 19018 - DNA, 287 bp, Glycine max
  unsure (1)..(287): unsure at all n locations
acaatatattggtaattaattaccagtgtatcagaacgttgaaattcanattcaattgtgaagagtcacatcttttcataanatgctttgtgtaatcgattacatgattttggtnatcgattaccagtgacaagttntgaataanaatcaagagatataactctccctatggttttcttgaccagacatgaagagtctataanagcaagaccttgacttgcatntntagaacttgatataactcttataatctttntgaacatctntttgaacttcttcttcttctt

SEQ ID NO: 19019 - DNA, 332 bp, Glycine max
  unsure (1)..(332): unsure at all n locations
gcactanatntcctataaactcacaacatgtctaattgaatctatattaagctctgtcatatgtgtttcattacaattatgacgcatctcactgctgaatttggttcagcttggtccttctgtccttgttgccaatggcctgcataatggtagtttagtgcagtgtcgattctcttctaaggtcaatctctatgacgactctaaagttttactttttatttatgacatagaggttgattggattaagatatatgaaaactggaacttcacaagacgtcaaatacttttcatgccttattctggaataggacagtgtccttttccctgaattt

SEQ ID NO: 19020 - DNA, 371 bp, Glycine max
  unsure (1)..(371): unsure at all n locations
gagagaatgggggagcacganattgaaggaataaaagaaggaaagaagtggaactttgaagtgtatctcataagactntcattcatcaaagntacaacaagtgttacacatgcttctatttatatactaggtagcttccttgagaagctctcttaagaaaacttccttgagaagctttcttaagaaaactttcttgagaagtttctctgagaacacttccttgagaagctagaagttagctacacacacccatctaaaaactaagctcacctccttgagaagcttccttgagaagctagagcttagctacacacacccatctaanaactaagctcaccttcttgagaagctntcttgagaaagctagagct

SEQ ID NO: 19021 - DNA, 372 bp, Glycine max
  unsure (1)..(372): unsure at all n locations
tcattatgctntgatacatgccaaanaaaacaagggcaaatgaagagggtcagaatgagggagaagcccatgctgtgactgccattcctatacaaccaagtttcccaccaacccaacaatgtcattactcagccaataacaaaccttctccttacccaccccccagntatccataaaggcaatccctatatcaaccacanagtctgtctaccgcacttccaatgacgaacaccacctttagcataaaccaaaaacaccaaccaagaaatgaattttgagcgagaaagcctgtgaattcacccaattcagtgcctatgctgactgctccatattactgataatcatgtagcatacccagcaggtcataactca

SEQ ID NO: 19022 - DNA, 387 bp, Glycine max
taatatagaacttatatcctaatgtcacatcctatcagagcgtgtgttctcgtgtgctctagcatgatggtcttcatagtcatccacctattcatctgttcccccgaacacaagttcaagatcatcacaggatccaaacacaacaacacacagggagtgagttatcacattcctagctaatagagaaacaagacaattaaatatacatattatataaatgagatatcacttgcttaaacattgctcacgtaacttcaccacttcatcattcaaaattcacttttcaattatcaatcacattacacaagaaatccacacttcgatcaagatataataacacatcaattagcaagcatatgccaatagtatgctaagactcaatcctat

SEQ ID NO: 19023 - DNA, 302 bp, Glycine max
acttctttcttcgacttatattccttaaatttgtgtttagatcttaagaatgagtcttttattctctggtatatcacaaatgaattctgtatcttaattatattgtccacattctcgagatggacacatacagataccatggccactccatgtctgatcctggcagcacataccgtacacgtgatgagaattctggtgtaagacaggtgtattactataatcatagataaatgtcctatgtgttaattaatattgaggagtatactctatctctgttataatctcctgtccaatctgattat

SEQ ID NO: 19024 - DNA, 458 bp, Glycine max
  unsure (1)..(458): unsure at all n locations
gcaccttataacatatngtntcactgncattttgaccgcatctntactatcanattccatgccaacatataattctcggccaacattaaaggtcgacggcatctccaaaccgcanatgtcctcctcatcangataactccagttgatattgttataatgtgaggcatcattccaaaatggattntcaattcgntgtgcacctaacagttcanaataaaataaaaaatcaaataatacttatttagcattaaatacaatngtcatcaaataatanatgtatntgtctaatttttcatacaacannatataccttctgctgngtgaacaattcttactggtagaggaatgtttgtgacttcatcgtctgtatcagaatataccgcaacactgtcatcttcgtctaaagactcttncacgtatgagttagacacaagataatcatcatcatcatcatcatc

SEQ ID NO: 19025 - DNA, 234 bp, Glycine max
  unsure (1)..(234): unsure at all n locations
ttgagcgtctcgatatattatgcngcctaatcggacctccgagtgaanagttatgaccatcttaataactcaagagcttccattgttcaatttcgagcgtctcgatatcttatgtgcctgaatctgacctccgtgtganaagttatgaccatctgaatntctcgagagctctcgttgntcaatttcgagcgtcttgatatcttatgcgcctgaatcggacctccgagtgaaaag

SEQ ID NO: 19026 - DNA, 530 bp, Glycine max
  unsure (1)..(530): unsure at all n locations
tatatatatcgagctcataatacgctgagtaccctaggtataaatagttatattaagtcagctgcctcctttggccttcatttcgtgtatccgcttctactctcacaaccctttctttttcccgcagcccaccaaaccagtctcatataaatgacgatcttgaacccgttcaccgttggatcgtcgtgaaatttgagtatcatgttcgcaacataattccgagcattctcaccgttgggaagttcgatatcatgtctgaactgagagagacacccttcgcattgtagccttattctctctcgcagaaacccagagctgtcttgagtaaactatgatcccngtttcgtaaccgatggatattgtgaatttgatatcgtgtcgacattaattccgccggctacaccggttggatatggagatatattcgtggaggagaatatgaatccatgagacagataagtgaggttcaattctcctcgtctctgacgtggaattatcgagcgcggagatactgagattctcgaccgtag

SEQ ID NO: 19027 - DNA, 247 bp, Glycine max
  unsure (1)..(247): unsure at all n locations
tattatatatggtgtntaaagaaaggtatacctcttactntggtnntgtttgaagntaatctactttcagtatctagaaatacttggtggttagattgttgtgctactactcacataagtgtttctatgcacgattacttgaattactgaaagccaactaatgttgaaagatacatntatgtgggagatggcatgtctgtagaagtagaagcaattgattattttanggtttattaagaattggata

SEQ ID NO: 19028 - DNA, 351 bp, Glycine max
  unsure (1)..(351): unsure at all n locations
gcgcttagcgtgacaattcgtgcttagcgtgactccctctatgctaattctcgcttagtgcactaattcttgctcaatgcaattccctctcgggttggaattgtgcttagtgcgctcctcgcgaatagaaagacattagttgttattatgttcaaaatcccaacggtcagaatgtggagaattgtcttaggaacctncagacaaaatttaaagataatccaatgggtaacgaatccaggatcacgatcntacaganatagggtttggtagaagttgaaatctcataatttcaacttagctcagccaaactccacataactcaacatncacattaagaaagtcacacatgac

SEQ ID NO: 19029 - DNA, 352 bp, Glycine max
  unsure (1)..(352): unsure at all n locations
atgctcatttctgtctntaaagaagaggaagtaaaggaagctanttgggcttatgggaatgataaaagtcttgatcccgatggtttcctttcctctntatcanagaattntgggaggttntaaaagctgatattatgagatctgtgtgagaatttcataagaatggtgctttccctagaggtactaactcttcctttatctccttaattgtcaaatgggctgatccacaagaattaaatgatgttagacctatntctcttgtggggtgtttatataaaattctggccaagttgttagcaaataagctctaaggtgtgttggagccccgtattgaccatcaacaaaatacttt

SEQ ID NO: 19030 - DNA, 409 bp, Glycine max
  unsure (1)..(409): unsure at all n locations
gctatgctganatatntacaatagaacccctcaacctcagtagcantatcnaccacagcagaacaattatgacctctccagcaacagatacaaccctggatagaggaatcaccctaacctcagatggtccagccctcagcaacaacaacagcagcctgctccttccttncaaaatgctgctggcccaagcagaccatacattcctccaccaatccaacaacagcaacaaccncagaaacagccaacagttgaggcccctccacnaaccttcctcgaagaacttgtgaggcaaatgactatgcagaacatgcagtttcagcaagagaccagagcctncattcagagaataaccaatcagatgggacaatnggctacccaattgaatcaacaacagtcccagaattctgac

SEQ ID NO: 19031 - DNA, 213 bp, Glycine max
  unsure (1)..(213): unsure at all n locations
gtgataagcattggttgtgctgttgtcaaaacaaatagaatatttgagtatggttctgacctaagaaagaaaaatcaaccacatgctaattaatactcttatgaataattattaagtggttaatntgttaatgataataacactatatatagtgaatattctttaaaatcaagtttctaanaaataaggtgaagtactatctagatacttggg

SEQ ID NO: 19032 - DNA, 319 bp, Glycine max
  unsure (1)..(319): unsure at all n locations
tcttcgtgccttttctgttaantattatnntcgattctcgcatctctctcgcgcctgttattgactagtgttgttctctatgtntaattaacctttattngctaatcaaattgatgagaattgaagttgcgatatagagtcttccaatttattcttaaccaaaataatattggatctatcatttgatatggtgaatcatgaatgtngatattatttagatgagcagtatgaatgtcacccctctgtntgtgccttttcctcgtctcaccccaatacgatgcaattatgcanatagaattactcctctcctcaagaactg

SEQ ID NO: 19033 - DNA, 396 bp, Glycine max
  unsure (1)..(396): unsure at all n locations
ctctntanaggatanaatctcaagcagaacantatattttcttagaacatattatcaactagaacttcatatgtgaatgatgccaatccaataggaaacaaattatcaaacaataactctcttggccaggaaacaacttgaagagtntaatccatgtcaatcatattagatgcaaattataatgtaaattgttcaatgaaagtatatatataactgctttntgtattggtatatcagaagttctattctctcacanatatcanaaggaattgcaattntntatatataaactntggagaaattgtgacatgtatacacacctttgtctgataanattggacanagtgatcagttgaactatagaaatanattaacnttatagtatactcatatcag

SEQ ID NO: 19034 - DNA, 352 bp, Glycine max
  unsure (1)..(352): unsure at all n locations
attcttgttaactatcggaaacacaggcggtgttgcggtgcctgtgtgtccgcatttctattacgctaaaattaatatttaaaaattttcttctcatgcattattgtttatattaattntagtttagctattttccaagaacatgtgtattcatatgaatattttctttattcctctgcatattagtgacaatgcggcaagttgaaaactaataaagatgaacatgtgttcctatacatacattatataaagggataccttcatctctctcaccttctanaaattagcttcaaccatattaataatattgaaaaacaaaatagtgaaatccttttataataacattcattat

SEQ ID NO: 19035 - DNA, 295 bp, Glycine max
  unsure (1)..(295): unsure at all n locations
ctacaatcacattctatctgaatctagaatattccagatcctctaacagaagtggttactcgttccctacttccatgcatgaatcttcatgcttcccacgcttcacacgtagtcctccatgtatgttggagccttcgttntccttttgggcctctcctcgcgctgctgttctcttacttcctgcaacccctcttccctattcgtaacattcccctccccttcaaataacaccttttcctcaaagtggtgtaaggctttgaagctggaccattcctcccacganggcttctcgagt

SEQ ID NO: 19036 - DNA, 264 bp, Glycine max
  unsure (1)..(264): unsure at all n locations
atctatttcttttgatgaacttcaagatacattcaatganttgcctaaagaatctatcacacttgccacattagtttcattttctaagaaaatcatttcatatntagaaaaggaaatnttgaaattaaacgcagagttagaacatcttagatctaaagttaaaacattaaaatcaatagataaaaaccaaccttctacaaaatgcttaatacaagagaacaatgaagcatctcattcatgtgaatgttgtaataacattaaaga

SEQ ID NO: 19037 - DNA, 271 bp, Glycine max
gctacccagagcatagactctctcatttctgagaatcccaaagatcatgataaataccttggtaattatcatgatctttggaaagcttgcaaagatgacttaagaatatgttatatgtgaatatgattctgtagataataactatcacagtctcaaaaagaacgtttgaatctgatttttatgatttgtataataattaaaatcatatatctaatataattattatctaaattaaatatattaaaagatcgctctctacaatgatcatgat

SEQ ID NO: 19038 - DNA, 289 bp, Glycine max
  unsure (1)..(289): unsure at all n locations
atctanccttcaagttaagatctcttacaactatcagaaggagagaatggtctttaatgatctcatttcatactggttgcaagaagaggaaagactgaagaaagacaggactgataatgcttatgttgtaagtacctctaanaacaaacgcaaaagaaaaagaaatgaggatcctaanaatgaagctgctaacggtccagcacanaaaaaaaaaaaaaatcaagataacaactatntcttttgagtaagtctggacatgtaaagaagaaatataccaaatatcatgcgt

SEQ ID NO: 19039 - DNA, 343 bp, Glycine max
  unsure (1)..(343): unsure at all n locations
ttgaaacttagaggctaacgagatgtatctgatttcatctctttaatgtatttgtgtcaaccacggtggtgtgactatatgtccttctattctggcgcgcaacacagcattcattgacaaggttctcccatcaaaaggaagaaatgtgattgataccatgggctttttcggctctatgttatttgtcttcttaactgcggtanagatagatccaaccatcacttttagatcaggcaaaaggacttttgccataggaattgtaggctactttgttccttacacttttgccaaaacggttgtctgtatgctcacacgctatgcaacattggatagtgatgtctct

SEQ ID NO: 19040 - DNA, 305 bp, Glycine max
  unsure (1)..(305): unsure at all n locations
tgttctcagaatggtgcaaatcagaatgctcaaaattataatgctcaagatcaggatgttcaaaatcaccaataacagaatgcacagattcaccagntatggaatgctcacaatgatcaaaaggtataaaatgatgcctaactaatctatgacatgtcctatctatctcaagatcaaagggttgtaagtcagatggatggcctctagtcatacactacattcagcatgcacacaactagttgccttgcatgtaaataaaggtgtatggttgaactacagctaccctcagatgatatccaaatgac

SEQ ID NO: 19041 - DNA, 133 bp, Glycine max
  unsure (1)..(133): unsure at all n locations
atcacaatttcgttcttgcttcttcttctactctcatttacgtttctgtatcatctacgtttctgttcatttacgtttttgntcatatatgtttatgcttcatgtttcattngcgttntctatttgaatccat

SEQ ID NO: 19042 - DNA, 382 bp, Glycine max
  unsure (1)..(382): unsure at all n locations
tgcggctgcagctgtattaaaatgtttaaaatactttaataatatttgaattttattcctntattaatacatatgtgaggggtagagggtgtcatatgttttgttagaaatgtcaatgggagggagttgagtccgcgaccttttgcctcctcccttctcctttcatccttaagacccctttcccaccctatttgttagtttttcttagctgcatgggtaatctacttgcctccctttttgtatttgccttgtctagcacactcaattagctgcacgtctcttcttatttgtgtatcactcaactacaccacacanattcagcatcattaccaagaagcaacaaaattcacccaaaaccacaagagacccacaccataatcca

SEQ ID NO: 19043 - DNA, 109 bp, Glycine max
tgctgcagatgccactctactccatattctaggagcaatgctttcttgttgcatatagatattcactcagactacatcatagtggaaggatattgcactgcagtgattc

SEQ ID NO: 19044 - DNA, 306 bp, Glycine max
  unsure (1)..(306): unsure at all n locations
gcgtctcgatatatgacgggatctaatcatacatccgagtnaaaagatatggtcgntngaataggctcagagcttctacattcaatttcgagcgtctcgatatgttactggactcaatcagacatccgagtaaaaagttattgctgtttgagttggctcacagcttcgacattcaatntcaagcgtctcgatatatgacgggactcaatcagacatccgagtaacaagatattgtcgtcttaattggctcagagcttcgacattcaatttcaagcgtctcgatatatgacgggactcaatcacaca

SEQ ID NO: 19045 - DNA, 234 bp, Glycine max
  unsure (1)..(234): unsure at all n locations
gcccgggtagtcgaagagaagttcaagtccatagccatcaaagtctgaaaagagtatgatgaactaagggacgtcaatatggccaccgctgaagccttggaacgagaaaccaagaatgcccgaaaggaagaacacgaccaaagcanagttttgaggggctgtatagggcagcaatagtgagctcaagctccaaagaggtgaaaggaatcatcacgggtcanaggcatgatcttg

SEQ ID NO: 19046 - DNA, 397 bp, Glycine max
  unsure (1)..(397): unsure at all n locations
acatgatagagagactcatcttggataccaaccttgtgctacaacaattgcagcaagacccactatccataatgagagaataatctttggttaacaccttgcatcttgtatgaaagatgttttctctttgggtttgggttaggtcacaagaatgactcccaatgagccatctctccattagaagatcaccttcttcgtaggggcaaacctcttcaatatgctcatcacccttggcttcaccctcacttccacctgaggaaggagaagaagtagccttctcttgactactgtagatgtcttgatcccacatgatcatggttntctttgtagtggcattgagaaagaatgtggccttctccaatacattntaagcacttaatggtactagttctatctt

SEQ ID NO: 19047 - DNA, 564 bp, Glycine max
  unsure (1)..(564): unsure at all n locations
tttctagatgtataatttattgaataatctattttacntggnnnnttgtatacttatacatgaaccactncaacaacataccgagggncaaagagagcgcgcttttattttctanntttgtacacanganacacacngatgacgcgcttaagccattctacttaagtcattcatcgctccactcaataatataacaaatgtccaccgaacgtttgaatcgtattatccattaactgtggctaaatagatcgcaaccgttcagtcgtaccgtaaccacgttggaaatctaacgaggtatacataatatatctctaatcagacatgcttcagtataaacatcacataataatcggacgtatatttaggcattgccattctaatcaatgataatactaaagtgactaaagctcaaacaatccctatctacacgtcataaaaaggctttgaagttggattcatattactaaaaatggatatttaagccaccctcaagattctctaggaaaaaatactgtaaagacacgtgctatttcaccaattgaatcagacaagtaacctgtcacg

SEQ ID NO: 19048 - DNA, 401 bp, Glycine max
  unsure (1)..(401): unsure at all n locations
gcactggtgtgttgaacattatagcaagaaacttccttttgtatcaaggcatgtctatgtagcacaacactcattntgatggcaactgacgaatntcacagcttgacttttagttattcttcataggttcagcacatgctangagaatatctttacaaaacagatctcagacacatagtattaaagggtcaatttaatatcatatcanatcatgattctntcgtgtngntgtctgaaatatcaaacacaaacttcacgaaacatattccantagtgcataagatantaactttaacaatngtatntctttacatctnaatcaaataattaaaggtaatcattcgtatcaagacatanatatntntttaacttaaacatttgtaactagtattctaagtctc

SEQ ID NO: 19049 - DNA, 334 bp, Glycine max
  unsure (1)..(334): unsure at all n locations
tgatatgatgtgcaaagtcgggaattgtgattccaatcgggtttgaatgaaagacacataactganatacttgtatactcaagagaaacattggccttgagaggagagaagcatggtttgctctttccttgataattgtcatgatttctaacctctctaaactctgagtacattctttgtatgatgtcatcatgtaaaccataacaagtgtgatcttgagggttgggaattgaaattgtttaggaaagtatgtaattatctcagttggtgtgaataagtttcatccctgatgtngtcattaatctaacctagcnttagtattagttactttttc

SEQ ID NO: 19050 - DNA, 463 bp, Glycine max
  unsure (1)..(463): unsure at all n locations
tttcttataattgttntttcccttattacatctgtcaagtgccaattaggaaagtttctatatataccaagtgtgctataaagatattttagtaactattatatatatattcctagaaaaaatgtcaaacaaacacatantttaattanttttaggcgtatgaaaaatatttttggctatttttaatagttaatcaaacacatttgtataatgatattttcatatcttattcccaaaaataatattcttgagaactaataacattttctgtganacanattcntccttanaattcttaatttataaaaactatntaaaaattaaattatatgtntatatcatgtatagtacgagtatttgacttataacaataatttcataaaaactgctgatatcttggagatttcctcatcacataataatatatttgaaacatatataatataatatctgattttatcca

SEQ ID NO: 19051 - DNA, 329 bp, Glycine max
  unsure (1)..(329): unsure at all n locations
ttcttgccctccagctggtggaacatatcnatttgtaggatntcttcttctgttgttgtgtcacgttgtgtatgcgtcatgaatcatgattggattataatgtgaaagatgtggttaatactaactatgctagangagtgctagttatacacgttntccttttatccctttttatagtcgtgtatgaacatattggccctttntatagccttcccatggtgagaaattggattatgaattatgacatattctgaattggcagttggtttaatttcgtatacagcctgccttggtggctctttgaatctaattcattggtttcaccttat

SEQ ID NO: 19052 - DNA, 191 bp, Glycine max
  unsure (1)..(191): unsure at all n locations
cgcgagctttgaccactgttcttnnctcccgcgatgcttcttttcatgtnncgctgagtgggcttatagcctanaccatacnttccacgatttccttgggtatntatcaggctagttatgccggcgttgtttttgctaaacccatnccgggttcataaccgntccccaacantaactcggccatcattacc

SEQ ID NO: 19053 - DNA, 352 bp, Glycine max
  unsure (1)..(352): unsure at all n locations
ctatgtacgcgtagtggtccacattgtgtttcgcgcattgttattctcgtattgtgtacattttataccgcctgttgacgtgctctaagccatttacttaagtcatttctcgcttaacttaacaataaaataaatttccaccgaacgtctgaattgtattatccattaacttcggctaaaataaattccgaccgttcggtcgtgccgtaaccacgttggaaatcaaagagaggctatacataatataataatcaaaaagacatctcttagtaaaatacagcagaaaatcaatcggacgttttctttctgagatntctcattcttaatcgaattgattaataactaaagtgaa

SEQ ID NO: 19054 - DNA, 245 bp, Glycine max
  unsure (1)..(245): unsure at all n locations
ctatgctgactttctcccatatctactngataattcaatggtagccataaccgcagccaaggttcatcaacctccatttctccccaggtacgactcgaacgcaacatgtgcatatcatggatgagttccgggcattccatgacactgatgactttatgcgtacagacaaagtctaattgatgcgggctggctggaacatgaagagaatcgcttgtaattctaacattggcagcgaaccacacaca

SEQ ID NO: 19055 - DNA, 139 bp, Glycine max
gagctcagatggaggcgggcaacaagggatggtgggttatacgtgatttgtggatgtggagaatcatattgcaccatcgcccgaccgccacctagtaccacatgtgatgggtaccccataattcgacacgcttgaaatg

SEQ ID NO: 19056 - DNA, 237 bp, Glycine max
  unsure (1)..(237): unsure at all n locations
tcgaagagaagtttgacagaacaactgagcagaatggaagagaatatgtngacaattattgatcaatatatcgagaagatgaacctatctgctagtcatangcagatgctggaggatgaacatacgaaggtatcagctctgcanattgaaagggaagcacgagagagggtgatagaatcatttcacgacgaagctatgacatggatgaatacgttcgctctcactctgaatgggagt

SEQ ID NO: 19057 - DNA, 203 bp, Glycine max
  unsure (1)..(203): unsure at all n locations
ccacacagattccattatagtgttgcatccagtccagatgtatcactttgatgaagganaaagatgatgggttcatcataagactcatggcactcccaatcatctgtaacaacactatgtttcatttgaactacatggaggaaagggactacactgatcatatgatgcaagtatatgaacctctcaatactaaaaggaagaaa

SEQ ID NO: 19058 - DNA, 333 bp, Glycine max
  unsure (1)..(333): unsure at all n locations
ggcggtgatcccgacttgtcttcggagatcctaaggaagggttnttcggacagatccgacgattcgttctcgtgttnttcttacggctcttcttcttcttcttcctcttcgtcggggttggaattgngttcgaaaggtggttggaggcagcagcagcagcagaagaagatggttgcttcaaccggcactgtttcaacggttntggggaatgaatatgtgaggaggaacaataataatataaggaacaaaggggtaagttcttaatggagttttgaaatggaggaagcagagcagttcctctgctctatgctnggcgatgattctgatattaac

SEQ ID NO: 19059 - DNA, 357 bp, Glycine max
  unsure (1)..(357): unsure at all n locations
tattatgtaagggtattntagttgttgacgtgtttaatattcattatgttagttactaataactaccttggnttttttattattaaggatgaagcttcgccttgtgtatcgatgatgcacgatattaatgatgttggtgatagtataagttatttgctggtttcattcattgggttgttntttaaagtgtcaagcatctctaggaattatagaataattntgtcaatgttgatctgccacttanntttattttgtactatttaatggtcagttattgattgaatatatatcatatgttgtagtaatatntatcagccactactgagtctgatccaacactgctggaantcatcacac

SEQ ID NO: 19060 - DNA, 472 bp, Glycine max
  unsure (1)..(472): unsure at all n locations
atctctgagtcacctgcggcatgcaagcttatanggggtacataatatgaatcttgatacataatgaanactatatttgcctanattaccaacaagaacgaatataaaactaatatgcanaagagaaacagaacacaccaaaatataacgatatgaagaggaacacaaggggtgaagttcatgagctctactatagagaagacagataagataaaaacctaatgcacgggatgaggaagaagaggagcatcanaagggttacggggtgtgaattgggagagactagagggtaggagagaaatagaagggatattccctacaaagggacatgggtagtataggaagtataaaaacacaagtggtgtcaagagaataaaggagcatgtcaaatagttggacccatgaattaaattcaagttttgatagtatatataaacagtgaaacactgctntctgttgcatatacatgtac

SEQ ID NO: 19061 - DNA, 247 bp, Glycine max
  unsure (1)..(247): unsure at all n locations
tactagttttntntaaccatgtagactatgcttaattatttacaacccatatataaagttttactaactntcacaaagatacaagttnttcttacaagctatgtctaacttaacgaagtgattnttacactagcatctccaagccgaaccgcaagtattatttatcatcaagctactttcccctcttgacaaataataagattggtntaagttcaggtatacattgactaagttaatggcttataga

SEQ ID NO: 19062 - DNA, 258 bp, Glycine max
  unsure (1)..(258): unsure at all n locations
gacttctacaagtggagatgctatttcaccatctcannaaatcgcaaggctcatggtggagatgattaaacatggtgatcaaatgagataagtgagttatgataatgaagagaggatggagagaatgagaaaggagaatgaggagagttcgggaagaatacacaggagtagtaaaactttaagtgtgatgatggaaaatatagagcgaagaagagaggacaaatcatctaattcttttcatggagaagtcgaggggta

SEQ ID NO: 19063 - DNA, 578 bp, Glycine max
  unsure (1)..(578): unsure at all n locations
tgcctgatccgtgaccgcgatcttaagcaccgcggctgcagctaatatgatggaattcatggaaccatgacttctttgttggtggctngcttaagaataacttacgtggtcgctgggttctctgttactcaccgtcgcgcgggtatactacaaacattgataggaagtattaatgatgggagaanaatntacaactgatctatgataatacgagtaatcttctaaaattattattatgtctgaatgaacgcaacaatctttaaccaaagaattagcaaattctcttactaaggtctacaatcattcttctcatataagaactatactaacgtctcccactaaacaattcatatcattcattagtggctttgttgctcacaagctgtgaacagagactccgaattatgggatgtgcctcctacgcctcttgatcgagatggcctaataacttactgcccgtgagtgtgcctcttgccttgcaccgcctaaatcattcattataacacccaaccatgcccataatgctcgcgaacactcataatataacgacataatacgtgtgtgtacaatctgagacn

SEQ ID NO: 19064 - DNA, 279 bp, Glycine max
  unsure (1)..(279): unsure at all n locations
tgcactcagctatgtangcaatcgtgatctttgtgggcctccacttaccanaatatgtntccagggtggtaaacctaacaacacagagccaatagatgaagatggagatganngttgcattttgtcgtggctttacattggaatagaatctggatctgccacgggctntntgggatattgttgtgtcattntcttaatcagaaaatggaggcatgcatacttcaagtntctttatgactngaaagaccaactctatgtcatggtggccatcaaaatgaa

SEQ ID NO: 19065 - DNA, 276 bp, Glycine max
  unsure (1)..(276): unsure at all n locations
cgcacgtcaagcaacatcagttntggtcaaaaatgaagttaacggatacacacaagatcgggtttaataaactgatgttaacaaagtcctttttgtaacataggctntcataaaaccaatgntaaatngacgatgttaaaatcattatttntagtagtgtttggctcgcatcatcattattgaggttattctgaaaatgaaaattctccattattaatagaattgaattcgagtgacctccaacttgatatggcttttacactattcaagttacta

SEQ ID NO: 19066 - DNA, 536 bp, Glycine max
  unsure (1)..(536): unsure at all n locations
ctagnacatganattgattnccctcgtacccgcgatccntagagtcacctgangcatgcaagctntctcaagnagcttctttgataatctacattcttatctatccacccctctattaactaaattaactctcttaaaataattacggatgaaaaaacacaacaattatccaacatcaacatattactaatatatatagattatattcaggtgtacacctacgcgtgaatcangtctcccaaaaggaactgtagcggattattcataatgaaaaccacatgaaggtgggccattaatgggattaattcccatactccgcatacataagcttactactaactggttaactgacaataaaagaagttctcangtgtcttngcatacattaaactgaaacatgtcatgacacctacgacacatgtcatcattgacaaacatgaaacttgtgtcctctcctcatagatcttctcccaaccatgtatatgtatatatatacatgcttcaacctaatagagtcggctttgcttatagacttn

SEQ ID NO: 19067 - DNA, 266 bp, Glycine max
  unsure (1)..(266): unsure at all n locations
atacagtaaaattgccctctagtgtcgaccatggtgagaaagattacatgcatagaaggaaagactagatttacgaagaataagaattaattaaagataangacaaagttcaataatatattaaattaaaaataaagaaatcatatttataaaaaagattcttagactttaattaaaacataaacacataaactgatatttttgatgtaataatatacatcacatgatattacgtaattgaataatatatangtcagattacttaa

SEQ ID NO: 19068 - DNA, 351 bp, Glycine max
  unsure (1)..(351): unsure at all n locations
agtcctaaggtgatatatgagtaatattggtatccaacactagaatgtagtaaagcgcattatgcgttaattgaagagattattangtatccaacactactatatgtnttcatatcacaagtctacaagtttagagaatattangtattctggcttcgactttttcagaatgtcttaatagcagtcactccacataaggatccatatntaaccgtgttggtggaagttaatatttgctgagacgtcatactagaaattatgaatcgctaaatataataactggcttgcctgttgtcgccagcattaagtagtcattgggtggttattgggacaatatcttagcagtatcat

SEQ ID NO: 19069 - DNA, 373 bp, Glycine max
  unsure (1)..(373): unsure at all n locations
ttaccttcttaaacatgacaacaatacttctaataattgcaaatgaganaactacaacctattatagaaaggcatgtactgaaaactgcatgcaagaaatccgttggtaataatgaaatatatccccanaggcaagtggtcaagatttgtaatctctttcattctttatttcacaacataagaagacattatcaacattttatntgaatgcattattattaaagaatacatggtgatagctctttccttccctttccacatgctcacagcacatatatnagttctttaagtagttctgggtccttctctataaaacttcgacctaagaatatgaatcaagtctatgtatattagtccaatactttcaaactca

SEQ ID NO: 19070 - DNA, 293 bp, Glycine max
  unsure (1)..(293): unsure at all n locations
cttcanagaactacataagtctgaattttntcatctcacctgcggatacgtaggagcaaggaaaaatcccttgtcgacccanaaaaaaacttaaaataaaatanaatcgcttttgtttctaanaataaaattctgatnttcttttctaaataagacaaactaatataacaaaatataattcatgctttcatgggaagataaataattaaaaattactnntattttagcacacttgattaaaggttgtcatctttatgacagacgcgtggngtgctatacaccttcatgtgtgt

SEQ ID NO: 19071 - DNA, 486 bp, Glycine max
  unsure (1)..(486): unsure at all n locations
tgcttatattcatcgntatcgcagcaattctgattattgntatgtacgctgtctgtcccctttctncaatttatagtttcttcccattttcttgtantagacctttgtggtcctttatgaccacccaacaataatagaatggacaatcaaagcagaaacgtaactattatatataaaaattctcttaaacaataattttcttattaaatataatgcaattattataaaaattattattatgtgtgtattcattacaattcccatcattggttagaanaataattngtannacatagnaaanatcaatatccanatgatgaaatcttagtttaatacattaatacttgtgctaatcattagtatactattgattatattataataataataagagtataaacactttaatttaaataaattgatgcgtcaatagaaaatactgttgaatgaacaaatcgatataagacttattaacataccttatat

SEQ ID NO: 19072 - DNA, 358 bp, Glycine max
  unsure (1)..(358): unsure at all n locations
tgctaactatgtatggcanaacttattactggtgtcaagacatacaagtgatctngtatanatcttctacactgggagtgatcacctgcagtcctcttgaacccttaccacccactctgtcatcatgccgagactcangaagcccaacaggtttagccttctctaagtattctgaacaaaattcaatggcttcttctgcaatgtacctctcaacaatagatgctcttggacgatatagattctntgtatacccntttaagatcttcatgtatggctcaaccgggtacatncaccgtagataaacaggaccacaacatttgatttctctgaccagatgcacaatcaagtgaatcatgat

SEQ ID NO: 19073 - DNA, 199 bp, Glycine max
  unsure (1)..(199): unsure at all n locations
agctgggaaattggcgagtggaggaacgccccggcatttacgcaacgagcataatgtaaacctttacggttttaaaagctctataggtgggcctaggctttagagntnttccttttgtaaggctttgtgtcttttggttttgaatatataatacaaggatctttcttcatctggtcctgggctctacccattctcattc

SEQ ID NO: 19074 - DNA, 305 bp, Glycine max
  unsure (1)..(305): unsure at all n locations
acggtatgacattctctactctgttaattcattataaaatactaaatgctcttcttctctctgctcatgatttgtttntgatgttgacaaacggagagagattgataaaagataagatagtaagggtttatgagacagttttttatgaaatatatgcaatcttcaactgttacatataagcaatcattgcaaaatcaagtgggagtaaactatacagatagatattgtttttgtgctcctaacctacaaatggttgtcatcatcaaaaagagggagaatgtgaatcatgcatgttttgatgatgt

SEQ ID NO: 19075 - DNA, 109 bp, Glycine max
  unsure (1)..(109): unsure at all n locations
gaatatatcgagacgctctaaattgaatgttgaagctctgaccanattcaaacgacgataactttttactcggatgtctgaatgagtcctgtaatatatcgagacgctc

SEQ ID NO: 19076 - DNA, 576 bp, Glycine max
  unsure (1)..(576): unsure at all n locations
acggttgtttgctgccgtgcactatcatactaagctnancattcaatnntgagggtctcgatagantacgggactcaatcagacatccgagatataagttaatgtcgnntggaattgcttagagcatcaacattcaatttcgagcgtgtcgatatattaggagactcaatcagacattcgagntaaaagtattgtcgttgaatatgctcagagctccggattcaatttcgagcgtctcgatatattacgggacgtcatcatacttccgactaaaaagtattggcgcttaaatttctgagatcttcacatatcatttcgagcgttcgattattctgggactcatcgacatccgaaaaaaattattgtgtttggatttgtcagaccacaacatcttattcagcgtgtcgtttatatggattaatcagactctgggtaaaagttttgcgctgatttgctagacttccaantcattcaagcgctgatattacagctcactcacttccgagaaagtatgcggtgaattgtcgactcatattatttcgcggcgatatacgacctatcacattgtaaagtttg

SEQ ID NO: 19077 - DNA, 616 bp, Glycine max
  unsure (1)..(616): unsure at all n locations
tatgtnatgtgnccgtcgaccgcgatctctgagtcacctgcggcatgcaagcttctcactagtacttggacctaatcagatgcatgtatacacttgtagaagagcttccttggccttctatgatctagcccttgccatatgtcctccaagtccttctaatagtgcttgcccttattgcttgccttgcactcatgagatggcccaaacatgggtgacatgcgtggntagagaatctaagcatatctaaggagatgcttangcgctctaatgggtccatggtctttaacacttacttctggccatgctcatagctcatacgacacaggatatatagtaattgtggtagagagtcctatgtactgatgtggcttagcacatggtatggaactcctttgcgctctcacgctagataactatgggagggtgcanatacgtgctcacacggcggtctctatgactctgattggtgcatagtgagagcgattgtggcgccactaagctatctctgaatatggtagtggacattcacatggatcagaaagtagatcacgacatgcatcatctgccactctcatagatccatgcaggtgagagaattgtaatttgagatgacgag

SEQ ID NO: 19078 - DNA, 580 bp, Glycine max
  unsure (1)..(580): unsure at all n locations
cgatgcttgcctccgtatcacgtacactatgatactcaagctgtcataagggaagctagctagaagctcttctcacagaataacattgattctagctcataaccgctagaactattgcacattgaatgatgcgctccctctagaactatgagttcgcgcagtaattactatggcttagttatagtagatgatcactcactgttcagatggactatgtttgtgaataccacttgtgaagcttttgatgctgttcacaaaatttccaagatgatgccatgtgagagaggtctcaacattgtttcacttagaaatgatcatctatgagaatatcacaatgagtctcttagaacttttgcgacacaatagaattctcacaagtgttgtaccacaagaacacctcagcagaatggtgttgataacagatcatagatctattgtnaaggtcaagaaccatataatgcaacaagtactactactctagctacatgacatgtatcgctcccttgacaatactatggactatctatacactctatgactattangacagacattttctgctagagtgtgtgaatgtttn

SEQ ID NO: 19079 - DNA, 408 bp, Glycine max
  unsure (1)..(408): unsure at all n locations
gcgatctctgagtcacctgcggcatgcaagctngagaatatcaatgcgtcanagtcgctaaccaatcaccttngtttgaagatggagttgtatcaactcanaatggagatgggaggagatctccatgaccacatcaacaagttcaatcggctagtaagttaactgttgaatgtggatgataaattctctaatgaggagcnaagcgctcttgtgttggtctcactaccaaagtcttccaaagctttggttcanacgttgcttgtgggaagatcaactttgaatntggatgaagtgactgtcgctcttagagaanatgatgagaatngaaaatgtngatgatgaacacaatgcaatagctgtgatggaatctgagcgagggaggaatcattcaaggagacatgatggtct

SEQ ID NO: 19080 - DNA, 602 bp, Glycine max
  unsure (1)..(602): unsure at all n locations
acggctaatganccccgttgaccngngccactatacantactcaagctttaggaganaccattataactaaagtagttcctacacacanatcaattgatgtgagcttcccaagtgtccccattgaaattgaaaaacctttattcaaacctttcaaagttagtgagaaggctaaacgaaaaattatggaacttagaanaactaaatccttaactganggcgtangtgacaatcatagtgaattactaaacaagattggtagtttacttaaggtcatttcagatactccccaagcctcggaaaatacttncaaaatggtaacaagaagtaccttcaaattaattaatggtattaatgaagatagtgaccaaaactcagataacacaactgagataggatcagtgtcagaaaagaatatatatccaattatttcanacactggaaaacacccttcannatatattatcgacgtccactgcccctgacctctattagngaagaaggtgaaacattttaaagttagtgccatacatttcgatggacatgatgccaacgagttacacttgatcctcactatacctgtacccggtacaactcatgatgn

SEQ ID NO: 19081 - DNA, 588 bp, Glycine max
  unsure (1)..(588): unsure at all n locations
tttccttggcgtcgccgcgaccttagcaccgngctgcagcttagtatcatacatgattggaatcgataccagtgatgttctacataatanaagatgaactcttcnaatggttttgactctttaaattggtttaagttttctaaaagtataactcttcaaatgatcctcttgancagacatgaagagtctataaaagcaaggctttggtntggattcattcattcattcaatcaatcaatctttcatcaatccaatcaattcattacaatcctttacaagcctngaatctctctgaacttcttcttcttctttgtgccanaagctnntcanagttntctgggtttctgaacccttgaaaacntgtgctattcattatnttcatctcttctccctctgccannaagaatcgncaaggactacaccgctgaattctntntgtgctctcttctccctttccaaagaacgaagactaaccgctgaatctttgtgctccttctccttgcaagaatcaaacgaacagctgaaatctttgatctccttcttatcanagtatcaagctacctctaaagataaagtaacgctgnactg

SEQ ID NO: 19082 - DNA, 205 bp, Glycine max
  unsure (1)..(205): unsure at all n locations
gcttctgttcttttacctaaatgcactcatctattgaacccatacccttataaaaagtctacacgtacgtngattgtaactttgtgactaagtagtgtggcatggacaaggcaggattgttcgccttagaataaacactaattagtcagttggagacccctaatgaaatgaaacatgaaatctccacttcatactgaaaacctaa

SEQ ID NO: 19083 - DNA, 551 bp, Glycine max
  unsure (1)..(551): unsure at all n locations
acaatgataatatatatataaataacagaggaattgccattaatattattaagaaaaataccggaaataaatatttttaaaaagaaagcggccttcgaaactaatacttagagtaactaaaatattagtttttaatacaaacttaagcacttaaaatgtaggtatatatatatatattaggtaaagaaatgtgaattcgagaattcagatgaaactgaagaatgtggaaacttgggaattcgacgtcactggtgaaagtcttggaanagggtngcatgggtgaactatgtcatatangtatctattatctaacatatctncntgggtaccggtgccgacaataaataccatgtgtacgcgcagtgagtctagaaccacccggccaaccgaactcatgatcacgggctttatatnntaagccgttaactctctcaanaaataagttaatctgttaatcttgcagtaacgggtacctgtgactacnacttctatattaatacataatagagagtacgtgtttaatacactcaagttagacttatggtctcttg

SEQ ID NO: 19084 - DNA, 663 bp, Glycine max
  unsure (1)..(663): unsure at all n locations
gtcgcttgtgtacttanntcagagcttctgtcaatantggtacgtntctttatnnnnnnnnntnnnnaagagttgctcagtgctatgacnnttccatactcaagctnngctnatgnagtacnacaagggganacancccctgtcaagccatgatgttatacttttacggtgtgacatcctctactgtgttagttcattataatatactagatgcattgcttctctctgctcaagatgtgctattgatgttgacacgaggatagagattgatgaaatatcagatagtaacggtttatgagacagttgattatgaaagatatgcaatctgcagactgtacatataatcaatcatttgcggatcgagcgggaggtaactatacacatagataggtttgtggtgcacgtaacctacaaatggttagggtcatgtaagagaaggagactgtgaatcatgcacgctgtgatgatgctgaaagatgtacttgaaatgatcgcgtcgtagaaacgggaaatgtgatcatctngttatgagatgtgaaaagagtcactcgttatgatgtcgtctcaaaatgggagatgtgatgatgatactgatttatgatcgcaaaatattagccgagtgctcatatattcaaccactttgctcaaacacaagcttgaacn

SEQ ID NO: 19085 - DNA, 556 bp, Glycine max
ttgatcctgaccgcgatcttaacgacgagctgcagctttatggtgattatttaattcataaaacaaaccacgtaatgtcttatttttaacacgatgagtttttcttttttaatctccttcctaatacaaggagagatacggggatagagtctaaaagtttcaagttctgtcacgataagtgcccttaataatgaagctcctctaaaagcctggcagatattgaatcttttcacattatagatggaaactgggttataaaagtaaacacacatatttattgagaaagtgtgtattctacgtgaccctagaaatattcgctccatatttgtgaccacttatacctatctaaaacaatgggcacttcatgtgttattttgatggcccttactactctgagcaacctgtggacgatgtatctcttgttatttaatacaaattcatcgaataaacatctaaactatatttgccctctgtggccttattggcaccgaaaatgtcagaggttcttaccccctctatcaataaaatgaagttctgttaagaaaccctatcaccg

SEQ ID NO: 19086 - DNA, 649 bp, Glycine max
  unsure (1)..(649): unsure at all n locations
agtaaggggctactttcaagtcantntcacgttaaantcnctnnncnnccccccccaaggtggtcgtgtgtgaccctgacacccagcnnnaaggaagaanannnaactcgngacaaggggnggacgcacagatttcntacttgcatatcatgangacacgcacatagcagaggtgagaatgatatcatatntacaatcctcatacatcgacacatgctgttagtgaataacaattcctgtacattccgaggtctgggatgatcgcacacgtgaaagcgccaactgcttactggacaagaccacaaatctcagatgtatcttgtccagcggctcgcacttacatgtagagctattgcgcatgctactatgagctctgacctactctcacgaatcgagtatcggtccctgcatcgccaaactgaaagccaacgagtcgagaaatgcctcatgaacggtatgaacacgccacacaactgattattcagacgtccctgagacaaacncggacaggatctaccactaaccctagtgaataatcagataccactcagactggagatacatctcaagggtggaagtagtcataccgggacaagccaactgatgtcaangactcgcatcgtcagaatgcaccgcctctatcgaaccg

SEQ ID NO: 19087 - DNA, 298 bp, Glycine max
tctctgagtcacctgaggctgcaagctgtgaatatcctattcttgaatactatagatgcatatgaggacctatttccgttgaatcaaacactgtaatacgatgttggatagcgattatgagctgaatattgtgacgttggagactttttatgtgatctcgaaggaattcttgctgatgaaattagttctgattacatatctcaggctacgcgcgatgtccatgacgttttttggactagacatgcaatgtccaattcgaattaacaaagatacctatcttgatactataatgtttctg

SEQ ID NO: 19088 - DNA, 203 bp, Glycine max
  unsure (1)..(203): unsure at all n locations
tattctgttatttttatgtnttgtcctctgcctatataaggcaaagatgccctgtantttctatatangagaagctttcacttgtatactgcatcgataataaaaagctctctgcntttcccttccgtggatgtagcctcgatcaaaggtgaaccacgcacatctgtgtatttttctcgtctctcttccactatcaatttgct

SEQ ID NO: 19089 - DNA, 364 bp, Glycine max
  unsure (1)..(364): unsure at all n locations
gtatcacacatggaacacaccagaatatcataagtgttcgatctcggcaagtgcaccagatcgcgcaagcagtataaaatggtaagaaccgagtatcgaactctcgaggaacttatgttacttggtaaagctatattcagtgaatacgtgtctagtatgaanagagatgtgtcgactatgcacaagtatgcaaactaactattaacaggaaaatcacgtgagtaatgatgcgtaaagacaagtaggcaacacgttggtcttcctattaggcgcctgatgttaaaaggatattctctacctaacaatgctcatgtgttctatggtgtctcctgatatgctaaacctcgattcctcatgatagtct

SEQ ID NO: 19090 - DNA, 323 bp, Glycine max
  unsure (1)..(323): unsure at all n locations
atgtgacattcacttggggtgaaagataaagcaagcctttgctttgatcaaagaaaagctcaccaaggcacctgttctagctcttcctgactnttctaanactnttgatctacaatgtgatgcctctagagtgggtgtggaagctttattgntgcaaggtgggcaccctattgcttatnntagtgaanaaattcatgggtccaccctcaactaccccacctatgataaagatatttatgccttaataagagtcctccanacttgngaacattatcttgttncaanggaattgcattcatagtgatcatgaatacttaaataca

SEQ ID NO: 19091 - DNA, 394 bp, Glycine max
  unsure (1)..(394): unsure at all n locations
gctcatgacctgtactctacactngtcgaggttaccgctctcaacatcacacaacatttgtccataccttggggcttcacanaattgtcacccttctacttatcaaggctattacccaggacattagacaaactccctcgatgtgggataacctccttcaaccctggacaacctctnttgcccacaagccgactcaaagctcggagggcttatgtgtngtccaaggtccacaaaatacatgtggcatcttatgtgacacttcaagacacatgtcaactctccatgtcaaccctagcacaggtgcacgaatgcccaacccttangcagctagtctcctaaccaataggttatctctaaccttctattattntgaatatatggtcatctttatctc

SEQ ID NO: 19092 - DNA, 314 bp, Glycine max
  unsure (1)..(314): unsure at all n locations
gtttctcanagaagcttctcattgtaagtttctcaagaaagcttctcaaggaagctacctagtctatatatagaaacatgtgtaacactttgtgtaactntgatgaatgagagtcttgtgagacacaactcanagttcaacttctctccctttntcttccttcaatttcgtgctcccncctntctctntctcttccactntcttttcctccattgaagcatcctctccaagcttcttatccaaggctcatcttggtggtgaagctccttcttccatggcttattccctagtggatggcgatgcctcttacctct

SEQ ID NO: 19093 - DNA, 335 bp, Glycine max
  unsure (1)..(335): unsure at all n locations
agagcctttgcactagaataatggggttacgagttagggctntgttntgtgtaattagtttaattaggtagattaggtggtcctaatcaaggcctgtcacttccttctaagtagttaatctatatattagtggaagttatttagttagttagttagttacttctttntgtaaaaaacagaattagttacttgttgtgcaaactntntcttttctctcaattgttcttcattcttcttcctctnttcacttttgttttacaattntattgaacataatttcgtggattttcctttggtaatgatcatggagnggctaaacaataatcaatccaagt

SEQ ID NO: 19094 - DNA, 299 bp, Glycine max
  unsure (1)..(299): unsure at all n locations
cagagatctgaatggtgatctgcagaagaacatagatcacagactctngcaacaggtgtagaatttntattcatggcaagctgagttatcaggttgaccaagggcatcaagtttccttcaagctttctattntcagtagatgaagatgaatctgtggccacctcatggactcctctaaggacaatagcataatttcttgcactgaattgtgagttggaaaccatcttctcaatcaaattcctagcctcagcaagggtcatatcaccaagagctccaccattggcaacatcaatcatact

SEQ ID NO: 19095 - DNA, 408 bp, Glycine max
tcacacatggaacacaccagaatatcataagtgttcgaacccggcaagtgcaccagatcgcgcaagcagtataaaatggtaagaaccgagtatcgaactctcgaggaacttatgttacttggtaaagctatattcagtgaataggtgtctagtatgaaaagagatgtgtcgactatgcacaagtatgcaaactaactattaaaaggaaaatcacgtgagtaatgatgcgtaaagacaagtaggcaacacgttggtcttcctattaggcgcctgatgttaaaaggatattctctacctaacaatgctcatgtgttctatggtgtctcctgaaatgctaaacctcgattcctcatgatagtctagcctaatcctgatcaagcatcgtcctcatattcctcttattggact

SEQ ID NO: 19096 - DNA, 305 bp, Glycine max
  unsure (1)..(305): unsure at all n locations
tgcattaccaaaatttcattntccctctaatctatataactccactntcaaccctgcaagaaaaatcttttgaatccatggcacccatagagacaagaattttcttaagctctggaatgtgataaacttcaatcaattntctaacaacaccatcatgcattctgatttgtatagaacccataccgataaacatacaaggagcttcgttacccatgaggacgttaccaccagacttcttctcacatgtcatanaccaatgcctgtgtcgacacatatggtaagaacaactngagtccaatacccat

SEQ ID NO: 19097 - DNA, 251 bp, Glycine max
  unsure (1)..(251): unsure at all n locations
gtacctgtngcaaggggttgtggtttgtgctcctctgctgaccaccatacagacctttgcccttccatgcagcaacctggagcaattgagcagcctgaagcttatgctgcaaatatntacaatagacctactcaacctcagcagcaaaatcaaccacagcagaacaattatgacctctncagcaacagatacaaccctggatggaggaatcaccctaacctcagatggtccagcccttagcaacaacaaca

SEQ ID NO: 19098 - DNA, 237 bp, Glycine max
  unsure (1)..(237): unsure at all n locations
atctgtatctttccacagaatatatccatagaggtagggctagcaagaatcatacatttatagcttcggggtttcggctcctgatattcatgcggaaggaggacttacacagatgggagaattcttgtgcctcttgtgaatcggatgtggcaattgtacgtctaaagaatagttctggacgctgctgatgcacaatanacaacgagtttgaggtggatgaaatgacaagcttaatta

SEQ ID NO: 19099 - DNA, 313 bp, Glycine max
  unsure (1)..(313): unsure at all n locations
acagtatgggacacagtcactcacggntattatctaatgtccgtctntgaatgtcacactagacactgcattanaagacggntattacataataaccgtctttgaatgtcgaaccatatgcagcattcaaagatgatattatctaatgaccgtctttgaatgtcaaagcagacgcaacattcacagatgatntttatctactgaccatctntgaatgccgaagcagacgcaacattcaaagactggtattatctaactgaccgtctttaatgtcgaagtagacgcagcattcacagactgctattcgacaata

SEQ ID NO: 19100 - DNA, 577 bp, Glycine max
  unsure (1)..(577): unsure at all n locations
ntgncctgtaccgtcgacncngatctctgagtcacctgcggctgcagctngtagagggaataaaanagagcacaagatatatgagtgaggagcaagaaccttatgcttgtgatccttctagtcttncaaaagatccctcaatcaaggaaatggatgctaaatgacangatgacgaagcaaggaggtgccttttctcttcaattgcttgatgcatattagaagtgaggtgcacatgggtgtgaatatttntaaaannatgatattatttcttaaaacanagggagggatatgacagaanaatggaggaaatatgaacatgaggatanaatgtanggtgttggaaaatgctcagtgggangaactttcataactcttcactggatatcttcttatttaaatctattgtaatacnaagttatagtgatatatcgattgtactaaaacaatttagcacgtagaaaactctacctctctgattttaaatacaggtcttttgtattaaatgtgtccgatatttcttgacaagacctactactctatattaatggtttgttatcaaaatattcattattgaccn

SEQ ID NO: 19101 - DNA, 257 bp, Glycine max
  unsure (1)..(257): unsure at all n locations
agtcgctttcaattcatttgacgataatatatatagttcaccanaccctanaaacgaaatanattggtgcaactgaaaaggcattggtttcagccacaaccaccaattntatttatttaattgcaaaaattaaataataaaataaaaataaaaattatggaaacatgggccttcaatcatcatcaatggcagctatacaaatgaccagccttgtctctatgacgtgttgcatctgtttaagtctgcctctggtcatg

SEQ ID NO: 19102 - DNA, 203 bp, Glycine max
  unsure (1)..(203): unsure at all n locations
tgctctttgttcttggattcaagcgccacaatcatatcacgttcccattgatgaaagttactttcggttaacggtggcgaaacaagaacaacgacgggattctctcctggatgaagaanatanggattggcaggctgacaggtgatcaaaagtgaatgtgattgtaacagcctggtgattaaaagaagaagacaagaaagatt

SEQ ID NO: 19103 - DNA, 541 bp, Glycine max
  unsure (1)..(541): unsure at all n locations
cagtgctgactccatgcacatcacactcagctngctcgcanangtgctcatagagtatcacacaaggaacacgcgcgagaatattatgtgttcgaacccggcaagtgctccagagcgcgcangcagcatgaaatggtatgaaccgagtatcgaactctcgaggaacttatgttacttgtgagagctatattcactgaataagtgtctaatatgacaagagatgaggcgactatgcacaagtatgcacactaactgttacaaggaatatcacgcgagtaacgatgcgtcgagaccacgaagctacacgttgagcgatctataatgcgccagacgttataaggatatactctacctaacaacctgaagtggttacgggtctctgaacgtaacccattctacatagacgcgcaactacaacatctcgatatcttgtgcggaacgacagacgtgtaacaaaacaacgctagtccgaccccaccttaaaaacatacacctgcttggtttaataccaacaaacttaagaacctttcctctgcccgga

SEQ ID NO: 19104 - DNA, 165 bp, Glycine max
  unsure (1)..(165): unsure at all n locations
aagaagaagaagaagggtgtctcttacatggtgtgaattcagaggtggagtagtagtagcaatccatgtcattggtgtaagactgatcttccacacctctgttcctctccctcatggctttcttcagatggaggagcttcanaagtaaagtgaaaaaatatggga

SEQ ID NO: 19105 - DNA, 290 bp, Glycine max
ctcctctgctgactaccatacagacctccgcccttccatgcagcaacctgtagcaattgagcagcctgaagcttatgctgcacatatttacaatagacctactcaacctcagcagcataatcaaccacagcagaacaattatgacctctccagcaacagatacaaccctggatggaggaatcaccctaacctcagatggtccagccctcagcaacaacaacagcagcctgctccttccttgcaatatgatgctggcccaagcagaccatacattccttcaccaatcccac

SEQ ID NO: 19106 - DNA, 515 bp, Glycine max
  unsure (1)..(515): unsure at all n locations
acaatttcactttataagtgngtcccaattggcttcctaattntcagcttacctcttngcatgtgagatcgaggcagtaaggtgccaattntccatcatggattcactcacaaaacaaacttcaagatattggactgtcttacacggagattatatattctatatccataccgatgtgagaagcactntctcacgttgtgtatntaaacctctcttaccatcatatccatggtgagcctgggactacattaaagaatccattatctatccatactattgatctangctcacatcacttatgtgggaaaatattctatctttcaagtgatgtgtttcggtagatcctttcagcatncattctctgaaccaagaaatataattctgatcttgctcaataattgctgagaatacaaatgttgatgatggcattctaaggaataattacaacaccattgtggactacctctcctgatgatcgaatgaagagagattacgctcgcgctagaagttccttn

SEQ ID NO: 19107 - DNA, 597 bp, Glycine max
  unsure (1)..(597): unsure at all n locations
ttgaacatgaatgatgtcgttgacngcgatcttaagcacctgggctgcagcttgtctaactatttacaagctatgagtcatgcgtcctatggctcgtgcaatgataattctctgtggcatctgaatcttgccacatgagttgataggactggaaattctaagaaagtgacgcctactttgaaatcataaggtgcgacctctttatgtttgtgaataccatgtttataataagcaacatcacaacaacattcctaagggtgtgcatgctaccaaagccatattggactgcgtttatttagattgctggtggccttgacagtccatcactgtgagggcaacggactctctctccatcatcgatgattactncagactgacagttgtattcatgatgaagcagatatcttaagctctcaaatgttctagcattgatgagtcttatgaaaatcnacacgaaaaacatgactgtttatgactgcactggcttggatttattctcaaactcatgaatctgacataatgcttgtgagtctgaaccactacaaggggtgatangcacgataaatatactccaactaatcttctctcccatcctcg

SEQ ID NO: 19108 - DNA, 183 bp, Glycine max
  unsure (1)..(183): unsure at all n locations
agcttttaggaagttggtccatgacatgctatttttttttttagaccaagtggntatgncatgttattattaatataaagccattattgggcctccatcctgaaacttaggaatttaaaagagtttgtctttgacatggaaattaaaattatagtttatagtaaaaccagcattcataaaatt

SEQ ID NO: 19109 - DNA, 392 bp, Glycine max
cttacatgtgataccttgagcagcctagctcgatgatatatgttattttaataggtcctcttctttctcctatgcatattattagaagagagagatttatagattgactaggtgatataaaactagaagaagaaaccaaaatgatcatcacatttctaacctaatttccaacatgatagttttttagccacttgagttatctgtaaatgtaataatgttatggatgaaaaatgagtttacaagttaggacagggtcttacaaattgtgaatgaaagacggatgttagtatcctttttgggctagcatttctgatgggctcatttgaaggacttaaattttaaatctggcacagctttcaatggtttaattgggcgcccatatcaggtattta

SEQ ID NO: 19110 - DNA, 359 bp, Glycine max
tcctttgatagcccttttgagctttgtttccctttccttgttttgaagctcactaccagccttaagtgaaaaaccatgatattaccatattcttaaagaattttggagctttggaattgttttgggaataagtgtggggggtttttggttcattggacaacttgttttgttggctatgcttcatgatgtattttgggccatacttgatgtacattgtatattggtttaatgttggacatgctgaatgaaatgttgtttctcaaaggctaaaaaaaaaaaaaattgaaaaaaaaaaaatttcaaaaaaaaaaaattcgaaaagaaaaaaaaaggaaaaaaggaaagaacagcccttaagt

SEQ ID NO: 19111 - DNA, 479 bp, Glycine max
  unsure (1)..(479): unsure at all n locations
ctaagcttcacaacatccaagcaaaacaacattcaaacagcacaagctatcacagtcaagcaaaacagggcaaagccagaaaactctgctcaacacaccaacaaaatcacagcttttctcacttaaagaccccagtaacaattccttcgatccaattcgttaaccgttggatcgactccaaacttttactggaagtctatagtacataagcctacattgtgaccgntgggatctactagaaaacatccagaactcattctgcactagactttccacagccaaccacacacaagcatttttctgcacaaagccaaaatcctgctgcacctattttgacagcaaaattctgcataagtgcagatttcgaaaatcacactttccctcatccaatcttgcccaaatcaatttctacaagtcccaaatcatgtatcaatcatgtctanaaccaaatcagctttaaagcaccgcaacacagaatc

SEQ ID NO: 19112 - DNA, 342 bp, Glycine max
cgctaactggttttcattctcaaacctaaaaggtataaagcattaccaattttaacaagcaaaagaatatgctggtgataacaaaaaaaccttaatcaccaagcagcataaagaatcagaaccagaaagagacacactcacaacattggatttatttattcaaaattgaaaatacactttttacaaagaatatttatagacaactcaagaaatatagaagggattaagaagattcttcaaaaaatacacactttacgaaggtagactttgaacttacttgaactcgatgaaaataaaataaaacgtgattgattggctttgttatatagggcaccaaaagta

SEQ ID NO: 19113 - DNA, 902 bp, Glycine max
  unsure (1)..(902): unsure at all n locations
tatcatgaacgacctatanaatataaacctggactttcaacaagggatgtggggacctgccagaaaaggttttttttgtttcccgccctattaaaaacaaggggttctggctccctcaattgtcaccctctgccccagctgttgataacaacacttaagttaacctgtgcttttttgggggcttgggaaaacacatcagtgcattttttgaagacttaaaaatcaggttttttttacttaccagggggtagggacataccaaaacctttcatgagacgagagccatttgcttttcctgccatttgattatggatatctgattaagccgctatatttgggtccccccaaggtttgacatattggtgaatgaggttgtactaactatgctttcgcttttagaaatcccatgacacccaattcccccttgatgaccactttgaattcgaaagccaaatgcttctttggggataaaagtttttccagtgagcttacgggaacgcaaggccaaacagatatggcaatttaatttttaaactttattaggacctcgctggggcgcattctgctcgaaattgtaccattcaattttgatataattaattaaggatccttgctctttactggattaccatttaactttgtgttcgaattatagcctatcaatatttttgcgtttaatagcgttttctcatcttatttctgcaccttgtgtttcgttcatttagatcagactcagggtttctctttatccccttatatatcttataattcacccctgctgtacgtactcggatctaagccacatttttattatcatatcttttaacttccctacatatcttcaagcctaatctactccatagtctttttatagtatggactccatgtacttctcaacaacg

SEQ ID NO: 19114 - DNA, 1017 bp, Glycine max
  unsure (1)..(1017): unsure at all n locations
cgcgaaacggacgcagaagacaacacgagaacntacccgacaccancngccgactcngcacacgcaaaaaacancaagnacaccaccacctacaagcaacagcgaaaaaaggantgatgactcgacgaacaacccccnnnaaananaaagaccgcccggcaggcagcangcngaaggaagagaggatttattatctgcacaaccaacccaccaaccaaaagacgggagcaacataccacaagccaacaccgggacagagaggaaaccagcggacaaacaaaaggaggggagaaacgacccacaaaaccaggggggaagccagcgcggagaacaacacagggccaaggccccgaacgacgaacagagaaaaagacgcccaaaacaagcgccaaccacaagcgaaggcgaaacaaaacgaaggccgaaccgaagcaacaccaaaaaggcaaagggagcgcgggacgacggaggggcactaccacaccaccccatgaaaacgagaaagcgcggaaagagagaacatataaggaccggcgccgacacacacaagccgcgcgaggcacagccaccgggcgcaaaaaaccaacaaaccacggaggcggagagaagaagaaggccgagggaaccccgaaacaacgagggacgaaaaaagaacgcccccgacgccgcgacaacagcagagcgcggaagaaaaatagaggagaccgcgaagacccaaagacaaccaaccgccggaaaacaaacacaccagcagcgacacgcaggcagacaagcaaaacagggggccacggaccatgaaacggcccaccaaccgcgaccgaaacggcgcgaagaaacacacgcacaacagagaaaagaacaaccgcgccgagagcaccaacgaaccacgcacggaaacaaccaagagcacgaagaagaaaacgagggaacacatcaaacacacgacaggaagcgaccgacggacgccaacacgccacgcaagtcagcacggagcacacgaaacacaacgacacaccg

SEQ ID NO: 19115 - DNA, 882 bp, Glycine max
agcgtcatgcgaccttctaatcttagctttctcttcgtggaacctttccaatccggttttaaggggtttttttattttgtccaggtccagggccgggggtgcttctgggtgaaggaccttaatttggttggcccacaccttagggaagggcctcacatttcttggattttgcacaggttggtgacaccattttgtagaaatttgggaacgagcctggttccacctaataacccttctgcccatctgattggtaaaattctaatggaaagctcttgcttctgctgaaatgcctaattctggatggcacttggctcactaactctgatgagaatctggagccttgcccctctatgcatatttgccttttggacaagccctcttgtcctctcgttgtgcacaaaattctctttctggcatgagtgcatctgccttttacggaaagatgttcgtcctgtggtgaacacacaaggtggattcttttttttttttaaaagttcttaatatctttttattcttctctaatacaggtgcctagcctaatatctttggaagtgtcggcgccccatttattataatacccttccgctaatgtcctcggctatctccgcctaagttcgagacttttttatataaatacatctccccatttgctgatccaggattccatactcaggggtccgctctactcattatgcgtttccattcactcttttatgacctctttcttttcgtatactagacctccctctcctagctatttttttcgttatgctttgcttctttctctcccttagatcatctacctccactgcttcttccccttactcttcttaccacaagtatttcttctggaactgtttcattcagtattgtggctgctac

SEQ ID NO: 19116 - DNA, 1048 bp, Glycine max
  unsure (1)..(1048): unsure at all n locations
cacaacccaccacacgagtgcgcctggtcctcaacccacaaccaccgcacacgacgaccaccaatcacagatatgcacccgccacgctccgccccnncnccacccccgncccccgcccanaagagggatggatccatggatagccagaccncncnnaaaaaaanaccnggacggaaggnanngccgaaacgaagaggagacgcgaggaagaagtttacttatactcactcacaccgacacccacncgcgcgagcgccagcgcacggagcaagagagaataccaacagcacccccgccaacgacgcgcgccacaacaacgaagaaccaacgacggcgaccaagacggacaccgcggcgacgcaacaccacgccccaaccacaaaccgccgcccaccaaaaagaacaagcgccgaacaacaccatcaaacaacccggacaaacaccgacaaaccacgcaaccaaggaacggacgccaaacacacaaaccccccgcgcggagccaacaccacacacacaaatcagngaaagaacacaaacactcaaccaccaccaaagcccccacccaacacccaacaccgaccacaagacaagacgggcggcaaccgcgaaccccgacacaccagaacacgaacgacncaccccggaaaacaagcggaaaaatggaacccaaaacaggccccggcggaaaaccaacaccccaacccagaatcgagagcaagcaaccccaacacccaccgaaagcgccaaaggccggccacacaaccaacgaagacgaaaagaacgccgcaaaggcccccaggatgggcgcagcacaccaaccacaaaacagccacccccgccccccaaagaacggccggcaaaacaacaaccgagaaaacacaaccgcacggagacccccacacaacagagcacacagggccccaggggaggccaccaaaaaaaacagaaccgaacgtacccccacaaccacaaggccccacgcaagacacgcccccacaacaccgcagacaggaggcgcaagccgcaacaaacaccacaaaacggcacc

SEQ ID NO: 19117 - DNA, 825 bp, Glycine max
  unsure (1)..(825): unsure at all n locations
cagtttgtgacanacnctttaatacaaagccccgacgtgtgataccctgagcagcccagcgagatgagaggagttatttttatccgcccnccnctgtcgccgggcggtttattagaagagagagacttattcattgactcggtgatataacactcgaagaagaaacccaaacgatcatcccctgtttaaccaccattcaaacaaagaggttattaacccctttaggtcatcggcatacgtgatcatgatatagaataaaaaaaagaaccccaagcagcgaccaggcctgacactatgtaatgaacgaccgcctcttatcttacttctcggcaaaactattcgagggctcggtaaaacacttaactgtaaaaaagccacaccttcaaagggtatattggccgctcaattacgaattcaccatactgtggggagcacgccaaaaaatctcccatgttgtgtgaccacttcaaaagtgccgcaagataaccgcaattctcaatcctttaacctgctaacccaactgttatttcccgcacttccgggatatcatacaaaccgtacttcgtgggcgatcttttcgaaactacgcgtcaaaagccgccaaactctaaccgaaggagatacatcttacatgcccttccacgtacaagcaagacgttgcttcggacctagcaccacattaaccgacatacttctgtggaacccaaatgtcacgacgctttccatatatcccaccacctgtcgcaggctcatgccacacgatatcaccgctatgcctcaccagccactatatttagtcgcccaccacgtataacattctataac

SEQ ID NO: 19118 - DNA, 101 bp, Glycine max
agcttctccttccttttcctataaatatgtggatttgaggaagaacaaaaatgttcaaccctcctagtatctgagattcacttgaaattagtgagaaaaat

SEQ ID NO: 19119 - DNA, 350 bp, Glycine max
  unsure (1)..(350): unsure at all n locations
tgtccggttaaagtctcacgattgtcacgtgttcatgctacaattgttagacgtggctatacgagacatcttgccaaacaaagtcaggttaacgataactcgcatgtgctttttcttccattctatatgtagcaaagtcattgatccagtcatgtttgatgagttggaaaatgaggccgcaattatactgtgccagttggagatgtattttccccctgctttctttgacatcatgattcacttgattgtgcatctggtcaaagaaatcaaatgttgtggtcctgtttatctacggtggatgtactcnggtgagcgatacatgaagatcttaaaagggtatacagagaatc

SEQ ID NO: 19120 - DNA, 371 bp, Glycine max
  unsure (1)..(371): unsure at all n locations
agctttacatcagattttagtaattacccactaacctagaattaaaagaacttaatgtcattaacctagggaattaaagaacttaatggctgagtgtaactgaaattgtggcaaccaaaagtcacccccaacagccatcaagtcagccactatttggtctcccaaaaggctgatgcctangttgccaattgngcccttattacaacttgaactaaacctaactaaagcccttttagttgattaacccaaaacatatttttggttagccaactttacaaggattgggccattatttagacaaactaaacactctaaaattgagacaaagtggtgtcatttagtcctcctccatttgggtcaggatacaactc

SEQ ID NO: 19121 - DNA, 413 bp, Glycine max
  unsure (1)..(413): unsure at all n locations
taaaagaataaagttcctagtcagaattgataaggagctttatagagcgcttcaaaccagtctcaggagaacatggccccatcaatggctaaccaatctccaataatacaatgggaaaaagatattcatctatggattccaatcacaaaattccatcaactttgctacacctaattgaaaaaagataataggactagtcaacctaagagagggtgaattagtttaaaatcaaatcgtaaaaaatatagttttaaaactttttttcacaaggatcgcatcagaactttctttaaaaacaatattgaatcaatcacccaaacatagtnacccttttgtaaaatgcatcactttgaaatatctatgaaaccctagaaaattgataaaaagaatgcaattgagagagagatgagaga

SEQ ID NO: 19122 - DNA, 295 bp, Glycine max
agcttgagatgaggaagtgtggaatggtgaaacttcctgcttttattgttgaccacatagtggtacctggagatatgtcgcgggggtcaggagacctttgggacgtcaagtggggtgctatttgcccaaaccaagcttgaccaatcccgacccaacccgggcatagtcggtcagtgagaacctgtgatgtacctaagcaggcgagctccctgcagtcaacagataaaaggaaaacaagacccgcaagcaaggaggcttgtggtggctggccagctgtgaatcttgtgtaatatgt

SEQ ID NO: 19123 - DNA, 353 bp, Glycine max
tctaagaagcaggggatgaaaaatagtttagaaaattttttgtggttcacacgctaagcgcatcccttgtgctaaacgccatttccttcacacgctaagcaagctgttgttcgcgctaagttccttgacccctgctcattggttggatggtcccactaatcgagtgcttagcgctaagcccaaaaacctctctggattttaattctttcgaattgggcttagtgcaaatgctcgctaaacgcaatttcttctctggaattgcaattattagaattgcactaagcacgaatgacacgctaagtgtgggccactactgcatttaatgagcattaattcgctaagcgtatcctttg

SEQ ID NO: 19124 - DNA, 427 bp, Glycine max
agcttgagatgaggaagtgttgattgtttaacttcctgcttttattgttgaccacagagtggtacctggagatatgtcgcgggggtcaggagaccttggggacgtcaggtggggtgctattgcccaaaaccaagcttgaccaatcccgacccaacccgggcatagtcggtcagtgagaacctgtgatgtacctaagcaggcgagctcctggcagtcaacagataaaaggaacaaagaccacaaagcaaggaggcttgtggtggctggccagctgtgaactttgattgatatgtgggttatggcctctagtaatcaattaccaagggtgggtaatcgattacaaggcttaaaaatgaagacaggaggcttagatggtctctggtaatcgattacccagggatgtaatcgattaccaggctttgaaatg

SEQ ID NO: 19125 - DNA, 499 bp, Glycine max
  unsure (1)..(499): unsure at all n locations
tgccacccagctcgcctaggcgagctaggttgcttccttctgtagcaaccgccttatggaggaatattttggaaggcccaagtgggcctaattgctatttgcacccccatttttactaaatacacctcttgctcttttttggtgattctttttccgtaacgttatgaaactttacgaatttcgtaacgatgcttgttttctttccgtaatgttacgaaaccttacggattacgtaatcatacctttttttccttccggaacgttacagaactttacggattgcgcactaacancttcttttaatttccggcatatcacggaacttcacgaattgtgctacaatgctttcttttgacttccggcatgtcacgaaacttcacgaattgcctaacgatgggtgccaagtaccttgaagtggtcaaacgagggtcgcatcccaacaaccgatggttctcggacgaaattaggtatgacagtggtgtatatcatcaactggacg

SEQ ID NO: 19126 - DNA, 603 bp, Glycine max
cccttgtgatgcttcgtggaccgcccgggatccttaagtcgacctgcggcatgcaagcttggcctataagatttgtttattttatgaatagtcataccatttctctcttgaaatctcacccttgggaagggatccacctcagagttcaatctacatacgagagagatcatggagactcatgacatatagcatcttataggtgagaagacttctttccttcttcattctactttgaacaagatgttgccattttctcaaagcatcctgaaaattataacggctgagcacaaatatttggactgaatgctggctccactatacttatcaggctggtcacctcttttaagacatccattcaggggggacttatataccaaggtaggactttgcgtgacagcctggcctacttcttattctcgtttcagattaaacttacaattattaactactgggacttttggttctacgcgcaatgctctgacccaatttgcgctccatatgtccttttgataaactgcttggactttacggtttttactaaccattatatattgagtgttcttttaaatggtgtgccacttgagaattttcttggtttagtct

SEQ ID NO: 19127 - DNA, 414 bp, Glycine max
cccatttcctgaactcatgttttctggtggggttttttgtcttataagaatgaaagaggagttggtggtgcaagaagggtaccttttcaaaaaaagagacgaagctcacagtgctcaaaacatccctcttcttcaacagtgatggcttcgatgtctacgattgcaagggcaaactcatcttccgctttgactcctatggtccccccgcacgtgacaaggacgagcttgttctcatggatccccatgggcgatctcttttcaccctccgtcgaaaggtacaatttctttccctctcttttggtaacaaacccctattcagcatgaagagatcgtcgatcatcggaaagtctatgacgaccgtggccattgatgtgtacgatagccccattgtggaatacctctttgaaggtgctt

SEQ ID NO: 19128 - DNA, 394 bp, Glycine max
  unsure (1)..(394): unsure at all n locations
agcttggagaaatttattcagtttaatcttacaaaaagttaaacaggggggcaaattgaaaacgagcttcataagcaaagaattataatttattagattataaactatgacaaaatactctaaatttcaatcctataaaaccaataaatttcggttgaaaataaaagaattatctttgcactcaagcatgattccctatagcaaaactcaccaaataactccccatccaaaaccattacaagggcatgggcaaacttctgcaaacttttcagcatcactagagtggactctccgagatattaaatcatcgtaaatatctacatcatacanatttttaaaatgtgatataaatggtatcagatgttttattatccaaagcaaataaaccatataa

SEQ ID NO: 19129 - DNA, 398 bp, Glycine max
tgcaaaatctataattttaattgctttcaaagttctctctgtgaatgcatcaggttttggtaaaaaaaaataatttaactcattctttgccccctcccctagctcttttactttttgtcattgatctcaaggaccaggttttcaatgaggttatataaatttttacatgggacaatgtcatgacaatgagtaagaaggaattgcaaattcatttccttattatatttaattttctaatttcatgattttttcctacttataacaccaatatcaaattctgtgggattcttgctcttccatgctctatggtggtatttaacataaccaattttttgataatttagtatttttctgtaccattttatggtgacaataacattttttgtttcatgattgac

SEQ ID NO: 19130 - DNA, 344 bp, Glycine max
agcttggacaactattttataggaatccttcgtttgtccaaattcacttggcactctagagcagcgatgctcgccggagaggtaacaaatgagtgatatgtcaaaacatcattccttacctactcatagccagcgacagtaagaggggacgaaggagacccagcattacggctatgccacatatagcggaaaccctaatgtccccgccactactcctccttgctccccaagaagtagaatggggaaggatcatggtgactagaacgggttccctatctagaaaggcagcaaaagattgcaccctcctacggaggcgagaagtaccttcgccaacacagcacaag

SEQ ID NO: 19131 - DNA, 245 bp, Glycine max
ctatagccgatgccgctctattctaaatttttgaaggatatgctgacttcataagagcaagtatatccatagtgacacaattgtagtggagggaaactgtagtgttgtgattcaacgcatccttccaccaatgcacaaagatccaggaagtgtcactataccgtgctctatctgtgcagttttagttggtaaggcttttattgacttatgagccaacattaatttgatgccgctctccatctatc

SEQ ID NO: 19132 - DNA, 311 bp, Glycine max
  unsure (1)..(311): unsure at all n locations
agccttctaatccaaggctaatctgggtgtggttgctccttcttccttggcttattccctagtggatggtgcctcccctctnctcttcttctttgccttccgctgcatctccatggtgtaaaatcaccgttgaaggacctcaatgaagctcaaagatctagccctcatagaagcctcacaagcaagcttccattagattgaatgtaatctttgtacccttatgggtccccttttgataagatgtatgtaataatcttttctattaatatgggaatttcattctactcatagtgcttgattctaggtgatca

SEQ ID NO: 19133 - DNA, 192 bp, Glycine max
  unsure (1)..(192): unsure at all n locations
ttgccgagtggttcaagtctgaatattcttgtgtgaacttcatcttttttagttgggggtgcatattacccacaaccatggcaacacgttcacaccttggaagttgtgccatgcatttgcnttttggctttataaatctttctatgaaggcaacaacctgtctcattcacatagttgtttcaaaattcatca

SEQ ID NO: 19134 - DNA, 110 bp, Glycine max
ttttggagatatctaacttgaaatatgagaacaagagcttttggattggtaataattccaaccttgttcctgaccattctaaataaaggcgtatggtttttgatcccatg

SEQ ID NO: 19135 - DNA, 329 bp, Glycine max
  unsure (1)..(329): unsure at all n locations
tgttgaaattgccatgtntggatgacttaaacatacccattcttttttagggtttttatgatgatgcttgtgatgttcatgtgctgaaattgcttatggaaaactgatagaggtgaaaggtagagttaacctagggttagaaagtgagaatgtgatgttatgagtggaaaaagagtgaggctttgagagttggagggtaagtctgaattctgtggtcaatggaggttaaagtgagttaatcctagcttgaaatgccatttagaacatgtgagagagcttggactgtgctagagagaaaaacaaatgaccaaagtgaacaaagagccatt

SEQ ID NO: 19136 - DNA, 326 bp, Glycine max
  unsure (1)..(326): unsure at all n locations
atatatcattcactaccaactgagtatccaacagaaataggggtttttgttaacaattattggagtttactaatgatgaagatttatggtttttcaagataaattagatttcatctcctgtattttttgaaattgcaccagacaccatttatttttgcatcttataataaactccttaattgtttagctcatattgcacccagaactcctccctcctaaacatcgtttaataatttaatagaaagtagacacatgatagtcactngacttttaatgaaaatttatgactaaaataatttcattcataaaagacatgatatcatttt

SEQ ID NO: 19137 - DNA, 491 bp, Glycine max
  unsure (1)..(491): unsure at all n locations
ccttaaatctaagctttggacaacacaagtgtacacacctctttccaatcaccatgttctttggattattggctactggcatgacaggtatattttttgtcgcacctcttcactgattctttgttgtagtcttgtagatatttgttttcaagacaaacctttttgttttggatgcanccttttttatttttattcttttttgtgtgatattggtcaataactttgtgctaccttacgtaaaatgtgattgataatttatgatgagaaaatagttctattagacctgaatgttactgtcaaagttgtgcctatggctaatttgacatatgatcagattcactctagagacgatgataatattattttttctgtaaatagaacttcgatgtattgacccatgtttagattcaaccagagataaataatatttggtttaagatatatttgagctaattatttttctttgaaaatcaattttgcttattatattg

SEQ ID NO: 19138 - DNA, 448 bp, Glycine max
aaaacaatttttttttttgtttcccttagatatagatatggctatgtattggtacattattgttattgcaattacaatataaaatgctatggtagtaacgctgattatttgtgtcttttaactaacaactctagctgggaatgggtactgcattgtctacactttgtggacaagcatatggtgcaaaagaatatggcatgatgggagtgtatattcaaagatcatggatagttttgtccttaactgcactttgtcttcttcccctgttgatcttcgcaatcccaattttgactctcttagaccaggatgagaccatagcacaagtggcaggaaccatttccctttggacaattcctgtcttgatctcttttattggctcattcactacccagacattcctacaatctcaaagcaagaacattatcattgcattcttggcggctttttc

SEQ ID NO: 19139 - DNA, 650 bp, Glycine max
  unsure (1)..(650): unsure at all n locations
catattgatgcattaggcttttgggaaagaccaagctgnnggtttcttattcatctgcagataattaaatttaaattagtaatgctaggacctcagttttgtataccttaatttgactgaacataaaggctatgaaatttccttattatcgagggatgttggtaattgtatttcagctggaactgtgggaccacattattttttaacttctgacttaaaggaaattcacattagataagctgatatgttaaatctgaccatataatgaaaggggtattatttgtcaagcttacctgtcaaaaaaggaagtggtgttgttttaaatcacacccctgccccccaaaaaaaacccatccactttttttttaaatttttttttttgagagggaacagctattaaaatggaatctttcagaaagagcctctccaggatggatttgttatgtttgattgttttgatgtcactttactaaatgatatagtggttgtgggcttccacatctagttataagtgaatatgccacatatttcagttctctatattgaatgtctactggcaggttatgcattacttttttatctctgaaaatttggacacttgagaactattgttatctttccacttaaactaatgaaagcctgagtttact

SEQ ID NO: 19140 - DNA, 113 bp, Glycine max
  unsure (1)..(113): unsure at all n locations
gatgcacacggagatgatgaccaaaagctcaaaagtcaagatcactntatgatgacatagatgatgacattcaagaatgagttcaagattgaggcaacaacacttcggggatc

SEQ ID NO: 19141 - DNA, 363 bp, Glycine max
tcatgatgttgaatcaagattgattcaaggagttttgtttattactaagatgatgacaaaaagaccaagagaatgagttcaagattgaatcaagaacacttcaagaatcaagaggaaatttgatttcaagattcaagaatcaagtttcaagatttaagtttcaagaatcaagaatcaagaataatcaatttgaagattcaagaatcaagtaaagactcaatcaagataagtactaaaaagtttttcaaaacattgagtagcacatgaattttcacaaaaccttttaccaaagagttttactctctagtattcgattaccacgttattgtatcgataccagtagcaaatattgtttcaaaaagc

SEQ ID NO: 19142 - DNA, 327 bp, Glycine max
  unsure (1)..(327): unsure at all n locations
tgcaagctttcaccatcaaagtcagntgttagtttattttatncnngccngcnnacaaagaatatacaaaaattatgtataaatataactcttctaaacaaaggccctgaaccaaataagaatcaatacaatttagattatgaaaaatatanattttgatttaattntgaatatgacaaaagtacgaattacgttttatgtaccatttaataataataaattaggttatgaaatttactatttattatgacattcttaaacattacaatctaatcatatcatataaatttaacaaaaggatttatagtatttttttatatatttatg

SEQ ID NO: 19143 - DNA, 456 bp, Glycine max
  unsure (1)..(456): unsure at all n locations
tcaagctgattctatttccaattatatcggagattgaacatttacttatgaaagcatctatttggtgcagcattccgttttctgttgatgacatatcgaaatcaatggagcagatagatatcgcagatatagagcccccgcctctaattcgtgaaaactctggctttagctttttgttgccacgcccagattgatagcttttggtgcagatttgatccaccggtattcttacccacctccatggtattaccaagtcacaacaagtcagtgcttgaaattgttgactttggttgtgtcaaaaacaagtcagtgtattaaacataccaaatttacatctcagtgatggatgacanaaggtagatagatcatcacgtcgtgcaagtagatttttgggctgacagtaaaagggagtaatattgttatatgggccttttctatgaagtttcactcattttt

SEQ ID NO: 19144 - DNA, 373 bp, Glycine max
  unsure (1)..(373): unsure at all n locations
agcttagtatttgggttgaggaacttttattattctttttctgtctgggtgtcctccannataaaggatttgacaacacaattatatataatgggaaattgataagaatgctatttagtttgtgaaacaaaaattgatgttttcctcgattgccttctttttatcctgttactttgtcttccccattctttgtccaactggttggtgggttgtttttatgtaatattgttaaccaaaatggatgttgttcacatggtttaatgaaacaggttgggacaaggaagggacaaagcaatacagtacttaaaagagaatacacatcttttagaagaaattgagaggttaggtgatcgaacctgttatgtttttttta

SEQ ID NO: 19145 - DNA, 335 bp, Glycine max
tctacttatgtggcaaggcgggtttccttcactttcttgtctccaacgcgagctctgaccactgttcttccttcccgcgatgcttcttttcatgtctgcctgagtgggcttatagcctaaaccatacttcccacgatttccttgggtttttatcaggctagttatgccgccattgtctttgcctaaacccatcccgggttcataaccgttccccaacataactcgggccatcattaccgccgcatcggacagacaaggtttgccaaaaagggagtccacggagggaaatgctgaccacctcaaagactggaaaagcggttctaacgattcttctg

SEQ ID NO: 19146 - DNA, 386 bp, Glycine max
agcttgtatgattatggggtacctgtcattgtggtactagggggagatcggccgatggtgcaaatcaactctcccacatccacaaatcacacacgaacccaccatccccagttgcccaccttcaactgagctcacgtactcccatgtagcctttatcctcgtccctctcagcatcgggtccccatcaacccctccaagcttcctcaatatccaagcaattcaatatccaaacatcatgaactaccctaaaccaagaaaacagggcagaggcagaaaactctgcccaaaaacacattccaataccacaactttccttactcaaataccccagtaacattctctttgttccgattcgtttaccgttggatcgactcgaataatttact

SEQ ID NO: 19147 - DNA, 473 bp, Glycine max
  unsure (1)..(473): unsure at all n locations
ttactatgcaaggaataaacaaggaaaattccttcatctgtcttttcttaaattttcctaggttttctttaccattgtttaatacaaaacatttgcatccaaaaacatgaagatgtgaaatgttgagttttctaccattaaacagttcatatggagttttctttaaaatgggtcttattaaagccctattcatgatataacatgcaatattaatggctttagcccaaaaatattttggaagaggagtgtcattcaataaagttctagcaatctcttccaaagacctatttttcctttcaacaacacaattttgttgaggggttctaggtgcagaaaaattatgttcattgccaagttnttcacaaaataaattcaaatcttttattttcaaattcacccccatgatcacctctaatagatattaatttgagattttcctatttgaataacctttgcaagttcctaaatgcttg

SEQ ID NO: 19148 - DNA, 570 bp, Glycine max
agcttcttcttccatggcttatcctttttttgatggcgccgcctcttacctcttctcctttgtcttccgctgcatctccatggtgaaaaatcaccattaaaggacctcattgaagctcaaagatccaacctccataaaagcttcacatgcaagcttccatcacaagtccacgaatttgaccaaaccaaaccaatattgattgggtcaagcagatttttttatggtgtttttgggtcaaatcgatccattttcacccctaatatatttcaagtaagattttgctatcaatttctctaaatggtactccatagtcaatttcattgagtattagttaaggagtatttaaaatactttattattatttaatatattttttttgaaaaatattaaattcttttgataattttttcaataaaataaaaatattaataaaggaatttaaaattttaataaaataaatgctttgagtaaaaaactattatttaagaatatctattatatttaatcaattatttaaaataatttaaaaaagattaattggattaatattttaatggaaaaatatttttt

SEQ ID NO: 19149 - DNA, 423 bp, Glycine max
aatctcagctgaatgaaggcctcagcttcaagaggatttaggtttggattgattgttaggtttctagaggtggaggagacatccccaccactttgtaatcttaattttccctcaaaaacctcatcttggtgcttaaaggtgctaacttgaaatggaaggctaattctctggttgggaatttatgctgagctttgatgtaaaaaatttcactatctatttaaatttgtttatatgcgtttattgcttctatctgtatttaattcttgcatgcttgtggctgtatcacccatttgtgtgtaaagataggaattttagcattgggaagtgttttaaatccttagaactggatagaacaggctagagaactgtatgtatggacacggagtgcaagaatttagtctatattatgtcgtaatcttaatg

SEQ ID NO: 19150 - DNA, 623 bp, Glycine max
  unsure (1)..(623): unsure at all n locations
ttatatnacgggacccaaccggacatccgagaaaaaagggagagacaaagggaaangccgagagcatccaccanacaaactcgagcgtgangatctattactggaactaacgagacagtctagttaaaaggtattgtcctgtgaatttgctcacagcttccgtgttccattttaggcgtctcgatatattacaggactcaaacagacatccgagagaaaaggtagtggcgctcgatttgctcagagctgtaagattctatttggagcttgtcgatttattatgggattcaaacacacattcgagctaacaggtattggcgtttgaattgcttagagccttcccatttaatttaagcggctcctatcttctggactcataagccttccgggaaaaatttttccttggaatttgtcaaactcaaaaattttttcgggcggtcgtattttatggaaatttaaaaaattcttattagaaaaatttggccggggattggggaaatttttatttcaattctagggctcggggggggcgggccctttggggtctaatgacaagggttgggttaaaattcccagactttcttattattgaaggcgtcggttttttgggcctcaacaccccc

SEQ ID NO: 19151 - DNA, 311 bp, Glycine max
  unsure (1)..(311): unsure at all n locations
ttgaggattttcaaacgacaataactttttactctgatgtcttantgtagtcccgaatatatcgagacgctcgaaattgaatgttgaagctctgaccaaatgcaaacgacgataactttttactcagacgtctgattgagtcctgtaatatatcgagacgcttgaaattgaaagttgaagctctcagcaaattcaaacgacaataacttttttactcagatgtttgattgagacccgcatattattgagacgatcgaaattgaatttggaagctctgagctaattcaaacgacaataactttttgctcgga

SEQ ID NO: 19152 - DNA, 357 bp, Glycine max
agcttgccgcccagctcgcccttcttttttgttgcttcctccaaaagcaacaaccttctggaggaatcttctggagggcccaagtgggcctggttgctatttacacccccctttttactaaatgcaccccccttttctatttttttggaattctttttccgtaacggtacgtaactttacgaatttcgaaatgatacttattttccttccgcaaggttacgaatccttacggattatgtatttactcttttttggctttcaaagaagttacggaaactcacggattgctcaaaaacacgtcttttcgattttcgccacattacggaatttcacggattacgcaagcctgctttcttt

SEQ ID NO: 19153 - DNA, 853 bp, Glycine max
  unsure (1)..(853): unsure at all n locations
ctcaagaaagcttccatcattaattagcatgtaatctactcttgagactcaacannacaacaaccccaggcttcaaatacatggcctattaaataaacctgaatttattttcttgtgccgggaccttccaaataagtccatcatctttatccctcaggtggctatgtgggtgaaccacctgggctttaatccttctagatgtgaacatgcttcagtgagagaggtgatctattgggtcaaaggttcttttctttcttatcatgtgccccagtgtcatgggcccaccaatctcgtgtagtgtacagtgcccgtgccccgtgtggggtcataacacgtgtgtgttatattgggaccacaactcttatggtggtgtgaacacattggtgaaagatgcctggggggggagttaaaaaattttttaatgattgatgatccaccatctggtggtttaggggggaagaagcttcttcctccataaattaagtgtgggtgcattcacactttgattctactggggttgacctgactaagtctgaggacgaccagttgtattaggaatggtaaatctattacatgaacatccatgctagctacgcattcatatcatgatccatgttattcatttggctcaatgtatgtgaacattggatgaatcaggtacaaaaggtgaacaaaagctgctttgccctttgtgggatgaatgaggcacggttggtattnaatctttgataatggtggatggggggcccataagatattttttcaaggggaatttagggtccactataaccaaggggaaatgctggtcctacccatgtggcctttaagaaaaaatggatggcgacggccttat

SEQ ID NO: 19154 - DNA, 396 bp, Glycine max
  unsure (1)..(396): unsure at all n locations
agcttggaacgataaagacattcatggtttctgtcngcaatnnggnatcgcgaaccacttgatccaatcagtggtgagaagattggaaaagtaaggccaattgcaccagaagactcgatcaatatagccggcctctcccaagtacctgacggtgtagcttcgtggcacgttgctgttagcaagtttacagattcgccgttgctttctgcagcattgccagtttgggattcttctaataaaagcattgaggcagttgtgggtgtcacaactgcactttacagtgtggtgcagctcatgaaagagctagttgagacgcatagtgggcacatgtatttgacctcccaaaaggttacttacttgcaacttccacanatgctcctttactattaaattcta

SEQ ID NO: 19155 - DNA, 81 bp, Glycine max
caaaaggattcctcttaaactataaggcgacaaacaaaggagaagaaatgatcggtggacatggatcatgcctggaggtca

SEQ ID NO: 19156 - DNA, 292 bp, Glycine max
  unsure (1)..(292): unsure at all n locations
agagctgccgcatgcaagctataacttatagtgagtgattcggtttattctcttacttgngctaagcgcacttccaatgatttcaaaacagaacgatgttggcgcttagcgcatcctttcccgctaagcccagcttgaaagctcaacttatagaatgaatctagggcttagcgcagaatggcgcacttagcgcagctataataaattttcacaaagaggaagtggtgcttaacacatcatccacgctaaacccactgcttaaggtgcaacttatagtgaagatgttgggctt

SEQ ID NO: 19157 - DNA, 513 bp, Glycine max
tcatcttcaacccaagaaggaagtgataaggaggattcaaatgtaaatgtctaagatgatgatctcagtctttttgtaaaaagattcaacaaatttctaagagtcagaggaaatcaaagaagatcaaatttcaaatcaaagaaaagggcagaagattcatcctctactccaaaatgttatgaatgcaatcaacctatacatctgagggttgattgcctaattttcaagaaaagaatagaaaaatctgaaaggaaagcttttaatgaaaagaaagctaagaaggcctacattacatggaatgacaatgatatggactcatctgaagattcagaaaacgaagttggtaacctaagtccgatggccaagaattatgaaagcgatgaagaggtagcatcttctgataacaacttatccatttcatttgatgagttacaagatgcatttgctgattacataaagaatcagtaacttgcaaactggttcatcttctagaaacttttcaattttgaaaag

SEQ ID NO: 19158 - DNA, 172 bp, Glycine max
gaaagagcagtccagaatgcgttctggatgtttgctagtagatcccaacggtcaaaatgtaggcttatgtactagagacttccagtaaaattttggagtcgatccaacggttaacgaatttgaacaaaggaattgttactggggtttttaagtgagaaaagatgtgattttg

SEQ ID NO: 19159 - DNA, 242 bp, Glycine max
  unsure (1)..(242): unsure at all n locations
ttgtcaccttctttgaaatcaccttattatagggaaagcttcncttttttctatgcggcaccatggtaagttccatggtcttgaacgtaaaggattcgcttgcgttggaggagccctgagggcgtgaagggggtttctgacttgcacgcttgggttgtgtgggtgctgcaacgtgggcgttggtgtttgcattgttgtgcacttgtggctaaagatgaaggtgtggttgntgtaatgggtgc

SEQ ID NO: 19160 - DNA, 338 bp, Glycine max
  unsure (1)..(338): unsure at all n locations
agccncattttaaccaatggtagaaattatcctcttaccatggaattaaaaaaccatggtaataacaccatataanatctttcatataattatatgaatatgtaacttttaaaaaaacataaaatgcaaaatgggaatacatcttattttattacctagtagaaacatatagctacatttaatttcatctttaaaaagtattgcatatattacaaacaaaataatattttctaatanaaataaaattaattgatagttctgcatctgttccataactntcttcacaataatttaattattttctactaaattttttttttctgataatttaataaaat

SEQ ID NO: 19161 - DNA, 459 bp, Glycine max
tgtcaaggagtgtgaaacaatgctggaccaccttttccctgtttttatcctgctccagtttccactgagacaactccccaagctgaaagttttgatccttcaacttcaaccactaccaagagtgatggtttggtgattccgaaggaattagctgagatcgagtacatggagagcctttatatgaagagtactgtatcagcctttgcatgttttgcaggaaaattagaagtggaagctcaacagttagcattgttcattgccaccggtgaagataagtggttcagataaaaaacatggaaaaaaatccttgtctggaacaagcaccaagtacctgctgggttacgtgctgataatgtagaggatagcttttcccatctattttcttctttaaatcgacgcctttgtttgcacccttaaatctacacgatgtagaagctaatgaaaaatgggttaatttat

SEQ ID NO: 19162 - DNA, 749 bp, Glycine max
  unsure (1)..(749): unsure at all n locations
ccaacgacgattgatgctggcnnncnggaannacagacggacggcaggcggcaagcacggggggagagggttgcatgcttacgcagggaaggaacgaggccgagagcgagngagacagccaccccgggacgagcacagggcaacangcgaggaagagggccaagcgcggaggggcaacaagagccaccccccccgggccgcccccggcccgagagacacagacgccggacgggagcgaaacacacacgagggggcacttacatctctcccctcgcaccaatagcaagggccacaagaggacccacggccaaaacaaaagctgagggaaaaacacgaggggccccacacatgaggtcctgggagaagggccacgatccccccccacagggcaaaacgaggaaggcccccgcctgggacacacaaacgagacgggcaccccgcagcagggcaagcgccggccaaaagaccccccagcacacagccccgcgccggaaaagaggcccaccgcaccgcagggggacggcggccaacaaacaaagaacggcccggcgccacacaggcccgaaggcaagggggacaaagactctgaggcggccaaacgaaggccggatgtacaaaacaacggcccaggaagaaaacgggcggaccggcgcccccaatcacgaacacgagaggagaaaaagggcgcaccaggagcgcccaaaaaatcggcgcccccgcaccccccccacggagcgcgaagggacacg

SEQ ID NO: 19163 - DNA, 835 bp, Glycine max
  unsure (1)..(835): unsure at all n locations
ggcacgtcgaccactcggaaaaaaccaacacccggcgacaaggagataaaaggggcgggcgtttaattatccccccacccacngacgaggggaggagtgagatcaggcgtggagctcacacaaacaccaccccgggagggtgcgcggacgaaaaaccaggcgagaacccacgagaatcgccccgcgcacacgcgagcgcaaggagcagaggatgacgggccgcgagagcccgggaccgcccaaacacgaaacaaacgcaaaaccgcagcagccgggcgctccagagcacgcccacaacagacacgaagcggccatacccagccaggccagggggagcaaagaaaaagacggggaagaaaacaaggggacgacacggccccccgaggccacgcgggccagcccaggccggagacagaccgggcaaccacacgaagacggaaagggagcgaaagaacccagcccccacaccaccccgctaacgaaggaagggaaaaacgcgccagacgaaggccgcaacagggacaaaaacccacggccgcacccaccccactacccacaagcccgacgacaggtaaagcgcccaccccccatacagaaaagcaccccagaacagacaagccccaacgcggacgacccccgccgactcccaccgcaacacccgcagacacagccccaacaccacggccaacgcgcaaaaacggaacacacgaccgccgccgccaaacaccgccacacgcgaagaggaaacacaccaaacgccccgcccacaaacactcaccccgcaaacagaacaagaaccgccgaagacaccgaacggaaccgagacccccccccc

SEQ ID NO: 19164 - DNA, 110 bp, Glycine max
  unsure (1)..(110): unsure at all n locations
aggcttgaatcggacatcncggggtttagttttgatcattggaatnacgcaagagctgccattgtcaaatgtgaagcatctggatatattataggcctgagtcggacata

SEQ ID NO: 19165 - DNA, 346 bp, Glycine max
tataatatatcgatacgctcgaaattaaacatcggattctgttgatattattcaaatggccataacttttcacacggatgtctgattcgatcgcataagatgtcgagaggctcgaaattggacaacagaagctcttgagaaattcaaatggtcataacttttcacacggatgttcgattcgggcgcataatatgtcgagacgctcaaaattaaacaacggaagctcttgaaaattcaaatgggcataacctttcacaccggtggtccaataaggcgcatcacatattgagacgcttgaaaatgaaccaccgaagctctttggaaattaaaatgggcctaacttttt

SEQ ID NO: 19166 - DNA, 327 bp, Glycine max
agcttatgaggtcttgggaggtatttttttatgttatcaataatagttacaaagaaaaattactgatgagagttacttgccatacacctattaaaagaccaattacataatgacatgtggtagtcaatgttttccctttacaatcaacttttaatttctgttctggagattcagatagtcaatttggaaaaaaaaggactctaataataaattaaaaatatggggaccaatttaatgagttgggaaaaatatggggactattttcacaattaaacctattacgagtgaaaaatttcttcctcatttgcattttaaagcaacttttac

SEQ ID NO: 19167 - DNA, 666 bp, Glycine max
  unsure (1)..(666): unsure at all n locations
ttttgtgttctgcaactganagtgaaagaggggaagtatatttttttcccaatcatgtgttctctacttggagagcattgcattggtgtaccaatccactcctcactgggatgggcaccctcaccctttaacctaggaccttccttccaggcacccctgttagtttctactttaaggttgtgaaggtggtaacaaaaaaaagcgcccttctcttgtaaatctaaaaaacattccaaccctggtttggctaagggagggttcaaacactgtgtttttcaccggaaaaaaagtccaacaaaaaaattaaattggcaatttgctgtggcccctgttttaaaggcggttgtttaaaggcgggggcattttagaggggcctttagagacgctttaaccgaggggggtggtacactcttgggaaaaagcccacttttttcgaaaaatttggcaatattgatgctctagggggggtatcaaacacactaaacatgcctgcatcacaacctgttgttaaacctcctcggtgacaacaatttttttttgtcgcggagaacttccaaaaaacaatactgtctttaacggtcccccctacatcctttacctcttttagcaaaaagatgtgccccctctttccaaacctcaattactaatggtgcctcaactttgtac

SEQ ID NO: 19168 - DNA, 351 bp, Glycine max
  unsure (1)..(351): unsure at all n locations
agcttgtccacaaaaaatagggtttttgattgttatcatttcagttccttaccaagtaaaatggatcattnttaacgtccaacgacttaaaatgatcacctttcagagaaaaaaaatcacttgattcacgcttaggaaagaactacataggtctgatttccttttgatggagggtccgtaggagcaaaagccccgcttttgtcgacctcaaaaaataaaaggaattaaggttaaggtaacacaatttccacaattctaaaaaataggctgtgtgccttcaaaacaaacgtaagaggggctaataccttcctcaaccgtaaatacaactcccgaacttagaattttcatttt

SEQ ID NO: 19169 - DNA, 382 bp, Glycine max
tggtttggggtacttaccagttgaagatcgaaaaatcatgatttaacggtgaatatcgaagaacggttgaaaatcttcgcataattacccacggaaacgttacggaagcgcctcggcttggattttcttcacggaaacaattttcctcagcaattttaagagaataagaagtgccaagaagactgaaccccttttctcttcactcctcctgctatttatagcaaaataggggaggagcttgccacccagctcgcccaggcgagcaaggttgctttctccagaagcaaccgccttcttggaggaagaaactggaacgcccaagtgggcttgattgctatttacacccccctttttacttaatgcacccccttttacttttttg

SEQ ID NO: 19170 - DNA, 418 bp, Glycine max
  unsure (1)..(418): unsure at all n locations
agctttgagccaaaatctgactctcatatacttgaccagggggaaatggtcaatccttcccctcggaggcaaaaggaaaagaagganaattcccaatcaaagagtgggagaaagcaaaaagaaaagaaagaaaattcccaatcaaagagtgggagangaaaannaaaaagaagaagaaagggaagaaagttcccgatcaaagaaaacaaaagaaatatgcagaaaggtctttggaccggacaatatctgaacaatacagaattgtcaccaaatgaacaaaaagaagcaaaggaaaccacgacctaaaatggtcttccccctttaattgccaaccaaaatcttgtgcgctagcgactnttttgccccgcactnaacaaagacagaaagggaaaagcccacaaaaaatcaaggcccaaaa

SEQ ID NO: 19171 - DNA, 320 bp, Glycine max
tgaccggatataagatacatcttcttcaaccttagtcattcttgactttatttcattgaagcgcatatccacttgcaattccaaagtatcaaacatctcaccaacaaaggtttgaagaccatcaaacctttccaaaatcttcgaaagaaaaaatgaatctttctcctcatgtccctctttaccaatatttctagcaccctttcttacccatgatccatcatgctccttaatgtaaccaaaagatgctatgactgaagcgcctataaggaatgatctcttgattagaacataaggttcagaatcaagagggatgttgaaat

SEQ ID NO: 19172 - DNA, 453 bp, Glycine max
agctttatacaagggagcaaaatattcttgtattattcaaggtaagctaagtggtcaaagagcttgtgtctatacaattcatggccttcatcaaggtatcattcgaggaagatttcagagcgcaccccaattactaagttcacccccccttttcgtactttacggaaaagttacagaagccttatgggagcgtttcagacttgattttcctcttttttctcttccctttcaccaatattaagtgaaataagataactcaaggttttcagaaattttacggaagcattacggaagcctcaaatgctatattttaacaaaatggaggtgattgccgcccagaggcttcttgaggaagattcctgaatgcaccccataattgataagttcacccctcttctagaatgttttggatgaagttcctgagcacacaccccgtgtttgataagtcacctg

SEQ ID NO: 19173 - DNA, 576 bp, Glycine max
tgtagccattagaagagaatttggaggagcaggcctactggttttctttgtcatccattgatgttagaatgtactaactactgccattgggcgaccaaaacaccctggttgtgtctgtgctgctagagccgatgtcacgatcaaacaataatttggaccgacttcaaggagctccctcacgtcatcatccatggctcccgaagacctggagcaaccgaaacaaaaaattagggaatagctgaaggagtcgatcacaaaaaaaagtgacttgacaactaatgttgtccttcagccaaatgcagtcctagttgcattctaagatgcaatcgcagatgcaatcatagggactcgcactgtctctttaagcctaaggttggttcctcggggcaggacccagacatgggtgactcacagaaatgtgggttgtatgtcaatgagaatcctccccgcctagttgcccctggatgagattatgatgggtcaacgaccgtccacaatgtcaatgtctcagcatctctattataatatcatggattctataagtcactttacattattgatattagctaactgatt

SEQ ID NO: 19174 - DNA, 291 bp, Glycine max
agcttcagcctgatcgctaatctattacttatccttggctaagcatgacctattgttgccaagcgcaattccttatagccataactgaggtcaatgaagctaagtgccagtcatggcagctaagcgagattcattgtggcaatgtgcgcgctaagcgagtccttatcagctaaacgcatgctcctttgtacttaagatgcatcattttaactaaaccagctagagtctggcttagcgagagttgcagtttttcggatctataaacctcgctaagcagtctgatcctcgcac

SEQ ID NO: 19175 - DNA, 432 bp, Glycine max
tctgcttatgagtgcacaactctttcaagaatttttcatatcttggaatttgctttattgcatccagcagaggtatgtttacctctacttttctaaatttttccaatatctccttctctgtctcttccatttttttgttggaaattgctcttggagggaatggaagagggatatgctacttctgtaaatcagaattaccagtggaagattcacctgcatagaacttgttaggtaactttttaaatttttgtcatcatctttttttggagtagagtgagattgggcaggttcatttgcggatgaagaagatgttgctggttgaggttcttgacactgctttcccaaccttaatgtaatggcactcacatttttgggattctggacagattgagaaagaatctgtcagaattctgcgactgttgttgattaact

SEQ ID NO: 19176 - DNA, 355 bp, Glycine max
agcttagccttaaataaaattctctagttcgaccttaaaatggcagcaagcaaaggagtaacatgttagcctttgcattcaaactacgctttcaaggattttaggcttaatatttcaatgactcttgctccaaattcttcaattcttttttttctccaataaaacatcacaaggtaataaaatttctaaaggattagaaacattaaatgtgcttctaattaatagttaaattagcctaaaagtgacaaacaaaagttctaagtcaagaaaatctaagataaataccaagtatataagacatttatcaccgatgatcaatcattcgcagcacaccctactattgataagatcaaag

SEQ ID NO: 19177 - DNA, 370 bp, Glycine max
  unsure (1)..(370): unsure at all n locations
taaattcaactttgtcccaaggtagatgagcagtgttctatttattatggcatgttagaccaatggtcatcattacctgcgatttctcagctgctcttgtggacctaccatatcaaatggtaggtagttgccgtgcaaaaaagaaagattgagacttgtttttgcatctgctttggaattgtaacataaacactcattgagataaatgtaattcttttgaaaattttcccatttcnaaatcanggactcttgcgcactntgttaacatgtttatgcaatatggaacataatcaagacatgggcacgatcttcaactcagaaagctccatttttagtagaaacttggtgatttttactcgttttttttctc

SEQ ID NO: 19178 - DNA, 383 bp, Glycine max
  unsure (1)..(383): unsure at all n locations
agctttctggtgggacatcttgacttgcttcnctattctgacattcaccacagattctgccttcttctattttcagattgggaatgcctctaacagcacctttgtcaatgattttcttcatgcctcttaagtgcagatgtccaaatctttgatgccatattttgacttcatcttctttggagaatagacatgtggaggagtgactggattcttgaggtgtccataggtaacagttgtcctttgatctgctgcccttcattagaacttcactcttctcatttgtcaccaggcattctgactttgtgaagtttacattgaatccttcatcacacaactgactgatgctgatcaagttcgcagtcagtcccttcaccagcagtact

SEQ ID NO: 19179 - DNA, 792 bp, Glycine max
  unsure (1)..(792): unsure at all n locations
agagatcatctacncactgaatcaaaagctccatccgcggatccgtctggagagactaagctgtgctcaaactgtattattttttcagcatatccacgaaaccagaaccccgaagtccatccctagtttgtagaaatctcgagctccgtcgatacaagttcaaaagcttcattgcggtgtccccccgctggggaggccaaggcttacagacatgtttctgatcgtgcaagacttgctctatggatcttctaacaccggtaaaaacagtcctgtcttggagccgaaatttgacccacatctggtgacatgtcatttgggctgcgaaatccccccctacttttgagatgtgaagactaaatttgatgcctacctgggggggggaatcttactgtaatctctattgtgtataaacttaaaaaggaaaaactttttcctttctttccccgcggttggtgggccccagtttaaaaccccctttaaacttttttttggagttgggcaacattgggccaatgccccggtatgctctagtacctgcaggggccacacgcaggaccattttcatttggtgatatgaattgatagagggaactttgggagctaacctccacactgttgggctatttatgggctcgcgttaaccaaaccgttttcttcttaataactcctttgataatggataaacccccgatgggggaactgggcctctttggggnctctccctttttccttggggggggggtttcttctcaaaacccggaggtttgggccttcttcttgagcgggaagaac

SEQ ID NO: 19180 - DNA, 338 bp, Glycine max
tgatgatggtttccatggcctagactggccaaagctttcgccagtttgcagaagcgtgaaaatttaaaaaattgtatctattgctgacttaataaggtatgcagttacaattcatggaccatgtaataaaattcattgcatgcatatttatgtttagactctgctttagtgcagatactatacttttttatgtttaagtagtgttaaatatattaaatgagtttgatataggtgtaatttataagcctgaatcctgaatacataatagaactaacttggattctgtggtgctttttgtccgttgaatcaatcaaacataatgattggtttattaaata

SEQ ID NO: 19181 - DNA, 269 bp, Glycine max
tctacttattacataattgatatttatatattcgcggcgatttttttatctctcctatggctccaataatattcctatatttgcctttttagttaattatgactaagacagggcacttagcggaattctttatatgttttacgtgaataatataaataacattaattttcggcttatcattatacaaaagagtttaacaagcttaaaacttaataagctttcacttacagagtgtgttaaaacatatttagtcattgcgcgaggaaaaa

SEQ ID NO: 19182 - DNA, 230 bp, Glycine max
  unsure (1)..(230): unsure at all n locations
ctaaattatttaacctctttttttaccctggctcccaatttttttttttatatatccacccagaattggctgtgggccttgcttaatagtgaccagtgaagaagacgggaagcgtatgtgttaattaatgcacttgagtgaatttttttttttgagatatataaggtgatttacatacaaggtgatttttattgaaatattcgntaatatgggaattacattttttttgg

SEQ ID NO: 19183 - DNA, 328 bp, Glycine max
  unsure (1)..(328): unsure at all n locations
tgcgagacctggaagagttcctgtcaccacatgtgcatgggatcatgatgttaattgcatcgctggnggcataggagatggttcaattcaagtatctatctttcctcgctataatactgcgtaataaagtcaatatctggttactgatattaagcttggattgaaacaccattaactatcttcttatatattgcttggaatggcaaattaatttaacagatttggatattaagcctggatgggggaataggccagatgtacatattgagaaaagtcatgaggatgatataatgggctgaaatttaagagatgggagaatcttattgtc

SEQ ID NO: 19184 - DNA, 377 bp, Glycine max
tggccacacccgataaggaaaacaccaaagttcctgaacaccactctaaaccaagtaactggtaaagcaacaaaaggtaaacaaactaaaacggtaaaaacatactaacaaccactgcagcagccacaattttataaggtattataatgattatccactccttaggcttcaagttcctgcttgtttcatccttcatttcttttgctgctgctaaaagggggatatctattgctcctttttatgtacttctcttatgataaaatccctctcttttttttattcataacaactacaacatccaccatctatatatattccttgagccagacacatgaaatatcaaaacccaaggggtatgaagccaaatctacaaaaaa

SEQ ID NO: 19185 - DNA, 336 bp, Glycine max
gtaaataaagatcatatcatgaataattagtattgactctataggaattgcatgaggataatacttttttgtgtgactctcttcaacttatatgtgcacagatttacaatgaagtgaagagaaattgtatgaaccattgaattgaagagatttcaacatgaatgttttcctgcgggtaccttcagggttatagttgaaatatgatgattttgacttttcgataggttttacattatacgagatgatatttcatttatcttaaatcctacatcagtagacatttgtgaaaccttgaaaatcaggtctacctgtctcttggatccatgactgatctca

SEQ ID NO: 19186 - DNA, 695 bp, Glycine max
  unsure (1)..(695): unsure at all n locations
nttatacctttgaagcaccggggaancttagagacgaccttgaggcatgcaagcttaatattttttgtgggtaaataaatctctttttaaattaagcaacttatttggcaaatattattataggtcataggttcttatgggcccaatgaatgattctcggtgcttaaagtgagccgggatttatttaagagaataccactcattgattgaaaaatgtaataccctcccttcatggttgaaagatacacaacccaggaaccattctatttaaaaaaaggaccctttttttttatgggcgcccccaaaatctctccctcttttaaaaaagtttggggcgatcaatcccccctattattttttagaggcccccccccccccggttttttaaaacagggggaaaaaaaaaatccccccggcccttttttaaaaggcaccaaaatggggattctttttatatttttataaaaataaataaacctccaccatttttaaccgaaaacttttggcccctcccctcccaaacattataagaacggttttttaaaccttcaaaacattccctcgaattgtttccaaaaacccgtttttaacccgaatgaccccccctttggggggtttctttttcaccccctaaaaaaccaattttttccttccattcttggggccaccacaaaaagggcacaatttttttcttc

SEQ ID NO: 19187 - DNA, 482 bp, Glycine max
  unsure (1)..(482): unsure at all n locations
cttggtgctggctgtaaatgcaacaactgcgagggggaagatattattgttcttagggaatgtactcaaaggcggtggatgacgcaacgacgattacacccagagttcttggccaaccctttcatggagacctttggttggatcaacaatgttgaagatgcaaccaacttcaaacttccagatttgtttctcaagtaaggttatattgttgtagagaaattctatattatcttcagaagttttaagagttttgatacagttattaacaaattttctatgatgtatcaaattcattgttccaaaaatataaccgtatcaaaatccttagaattctctggatactatagcaattctttatattgtatcacattttaggagaaaanatgaaaaaaaaattgaaaaaggggcactccaaatttttatgtctcctataacaggcattaatattttgcacaccatatgcatctggataatttttctgg

SEQ ID NO: 19188 - DNA, 123 bp, Glycine max
ctcttagcagtataaacagcgatagccaatgctcttaactacaccgctgaaaatgattgtcttcatgcatattatgcgcagatcaccatatcttagacgccgtaccttgacttcagattcttt

SEQ ID NO: 19189 - DNA, 300 bp, Glycine max
gcttggcagcttgctggctgtgcaatgatgtgcgcgattattttttttatccgcgagtaccacgagtcatgacccactaggtccatgacgagcttgagagaagccgcacgtcccggtgagaattttataaattttgatggtgttatctgccaattgggtagctttacgctctaagtcttctttctgttgttgtgatgcatttgctttagtggctcttcctaaagcttggataagaaatttgtctttgtactttgccccaagaaatttgaaacaacacaaacctggtgacactgatttttt

SEQ ID NO: 19190 - DNA, 87 bp, Glycine max
  unsure (1)..(87): unsure at all n locations
agcttagaagccaaaacttgcagntattttttttttttttgacagngacaaaaactcgcaacttggtaaagttaatgaaaactgatg

SEQ ID NO: 19191 - DNA, 836 bp, Glycine max
  unsure (1)..(836): unsure at all n locations
agactttcatcgaacngaccctatanaatactcaagcttgtccgtctggatatgtagacacaaaagatgagggtttatatcttttctttcggaacnacgactgaccaaccatatgtgctgttgaaacatacatatcgtggtgaacttttgaagaaaaataactgagaaagcagttgagctggaaacaaaggtcgtagaatgttgacatgcgagtaggagagacattggctattgacatgtaaaaatgttgacttgctatccgcaaagcatgtcaaatagtgcgcagagcaagatatcatgacgcttcacttctctttatatatgatacataaaacgcacgtgagcgcattacaaatggaacattgtgattgctcacaatttgacactgcctcacgttatgcctacaccaactggaatagctcggaacttgttaacccatttagtagaccttacctgctgtatgtgagatgcccactctagacatacaagacattcccatcataccggcagaactaaccccttatgggaactactccaagttaaaatggaagactgcttcataggcctaatataatgatgtaaatctttgggtagaatgaccaacgccaaaccgcttgacaaatcttatcttcacttgccggataccttcttcataaaaatatgtgaaatttttcccccgcttgtgttatatttatccacaactaaacttatttgtttttacttggcttagccaaaattggggggggctcatacgcccccctcggctcttcgtttgtcggacagcattctttcttttaatcacgacacctctttccctttcttctgaccattacccg

SEQ ID NO: 19192 - DNA, 397 bp, Glycine max
  unsure (1)..(397): unsure at all n locations
agcttggatagctagcttgcaggatttcttcagattggccaacttcacttggcactgcagagcaatgacactcgttgcagaagtgagagaggaccgatatttcaaaacatcgtccttcacccattcaaagccaacaacagcaggggggataatggtgacccaacattgtgggtacgtcgcacacgggggacacatgaatgtccncaccaccactcgtccttgcttccccagaaacagaaggggggagaattattgtgatgggaacaaattccccaaccagagaagtagtggaaggttgcgccctcccatggaggtgagaagtgtcttcaccagcacaacatgaaaccttttacctttttgaggaagaagattcattgttagaagccccacgatgagt

SEQ ID NO: 19193 - DNA, 312 bp, Glycine max
ttgagccttctagcaacagaagatctccctcccctacttcatttagatgtaatgtccatttctttagaatctgttatccagtttttcctttaatctaaactctgaaagatatggacttttcggtctagtttgataggtgtttacagattgaagtggctcgtatctgtcaatttctgtgaaccatctggtttacaagaaaccaatggctgttttcaacaaaggaaagtccccatgtgactactgttagaaaaatatcagaatttaattatgccttcaattgaagtggtatcaaatgataatgtccaaattcat

SEQ ID NO: 19194 - DNA, 663 bp, Glycine max
  unsure (1)..(663): unsure at all n locations
nnccctacttctcgagcaccggganccnagagacgaccgcaggcatgcagccaagtaaatccgaaaaagttgtttgttcagtnccccccacacccgggaggggggccgggcactaaccacaccccccaacagcgcgagcagaagaaaaggcccacccccccgcaaaacgaggccaggccaaaaaggggggctaggcccgcccagggcccacccaaaaccgaccacccgccaaaaaggaaaaccgggcaacccggcccaaacgccacgggaggaccgaaagggcgcgccaggcaaaaaaacccttgcccaacaaacaagcacaacacacgtgcctcccaaagaccatccggccaacagagggggtcgccccacccggggggcacgcaaaccgcaggggggccaacgaggagggggaaacaaccccgggaaaaccccccaaaaaacgaaaaggggagaaagaaacaacgaccccccaaaggggggccgaagaaagatgacacaccccacccaagaggagccccaccccaaaaaacccccaacgggggagggagcggactaagacaaaaaacccccaaaaaaccgggaggcgggcccaccaaaaaaaaacacaaccggggccaaggacaaaacacaggaggcaaaggccacggggacgccagcaac

SEQ ID NO: 19195 - DNA, 340 bp, Glycine max
tcaaatacattcacatgccagccaatgactgagtttttaatgttgttttgaggatgactacatttcatgctatgttagtattctataaagaaattgaaattgaaaaaatgatagagagcattggtgtatcggaaaggttattgttctatgaccaggttatctcagattctagtcacgggaaaaaaaataaaaaagcctctctgctcattcagataggattgcctacatgtaatcctcttcaactccctagtaacagaaggtcgtgttgagctgtccttttgaattacaaaagaacacggtgcaatacctagtatgcaaccacccaatgacatttaacatg

SEQ ID NO: 19196 - DNA, 606 bp, Glycine max
  unsure (1)..(606): unsure at all n locations
ggccnnncgagagatgtacacgacnncnnnnaaaangaccgcggcagcacaagaacacaaaaaacttgttttatagccaaaggcagaaaaaacaggacgaaacaccaccccgcaccggggggacgccgggccccaaaccaccaaaacaaaggcaaaacccaaaaaggcaggcgggaccaaaaaaacaggaaaggataaggaagaaaagaaaacaaaacatcactaaaaaaaagaacagacacacgacaggaaagacaacccaccgaaaaacgcaaagaaatccaaaaccggagaaacacgggggaagaaaacaccaacccaaagagccaaaacccccaaaagaaggaaaaaccccaaaaccccaaggacccccaggcacccagaaacgcaaaaaaaggcggaagcaacaacccttcgggaaaaagaaaaccggggcgaaaaacaaaaagggaggggaacccggccaccacaaaggacgaccaccggcgacacaaaacaaagaaaaaaaaagggccgaacccccccacgacaaaaaaaaaaaaaaacccgacaaaaaaaggggggagaaccccccaaccaacaacacaacaccgggaaaacccaaac

SEQ ID NO: 19197 - DNA, 937 bp, Glycine max
  unsure (1)..(937): unsure at all n locations
aactattcgtttcgtaacnaccncnanannaatagaacaagccaagctcgctgaaccctnccncgcaaggagcgggcgaggtttattggtattggggngcaccccccgcggagcggaggctaccatcaccataatttgatccccattagatgatgggaaaaagttggctccaccaaactcattcaccgcctattatgggcaagagatagaagtgtttttatcatatgggcaccagcttcgccccgaatattaattctataacaaccatgcgtcttgccgaaatggatatgacatatgataacaggggtccacatttatccatcacaactcactttttcttcgattcttgctggaaataaagtcatccaaaaatcggttccttattcaattggagcctcgccatctgttatataacgaaggatttcaatgactttgggcaggtcgtggaacgagattttgcttctttcttggtgggtgggggtcagtattcccctgttttcatgccaatacacctctgattttggcttggtgatgataaatactaattttcttggacttctcatcacttaaacattgtttcctccccacactgcaatagcgctccacacttttttgctcttttagctcccatctacttgtgactctcaatgggcagacttgcggctcctctcttttctttagtgactcaaaagatcacgggggcctatcacacgaaacttttcccttagaaagctctgtggatattttacctctcgtgtgtcgctaatgagcgcaacctaatacaggtccttccttgagtgggctctcataatatttaccatcctcgggcgtcactcttcttgaatgaaaaacccctcccctcctccttagactctcccctctaccgtctatctcactgttnttctacgtggcgatcaccctacttcccatcgacttc

SEQ ID NO: 19198 - DNA, 373 bp, Glycine max
  unsure (1)..(373): unsure at all n locations
agcttcaagctgttcaattgctccttgtttttgcatggaagggcaaacgtctgtatggtggtcaaccnaagagcacaaacccacaacccttgcgacaggtacagaattctgattcaaggccagctgggttaccaagtaaccaatgcatcaagtttgccttcaagcttcctagtctcagatgatgcaagtgagtttgtaactacctcatgcactcctctaatgactatagcatcatttttggcgctaaactgctgggagttagaagccatcttctcaattaaattcctagcttcagcaagagtcatgtctccagggctncaccactggcagcatctatcatacttctctccatattactgagtccttcataaaa

SEQ ID NO: 19199 - DNA, 491 bp, Glycine max
  unsure (1)..(491): unsure at all n locations
tgtcaaattctgctttctactccaaatcttggctcttttacttttttcaatggaactgtcagncaccaactcttctccacatgcaatctttctttccttggagaagtaaatattgacatgaattgggatggaggttcagatgaaggttggggtgaggaaagttcaatcatcatgaaatagctacatgtgctttccaatgtaaaattgttgacattttatccgcatgcatttcaaataatactaggcgcaagttattagtaccttttcgcctctttatttttttttaatattcataacttgtttgcattcatatgtcaaaatatttgattgctctcaatttcaaaatagcaatttaaatgcctccaatttactccaattgtgtaggaactctcaaatcccatttcaatgagacctcaacctccgagttttgttagattggagtcactgaaagtgaataaaagtttatttgcaaacatgtctggtgaggaact

SEQ ID NO: 19200 - DNA, 371 bp, Glycine max
  unsure (1)..(371): unsure at all n locations
agctttggtctctgcagatcttcacacatcataatctctcanacactctcaaactntgacctttctctctttagaactctctagacatgcagaaacttcaagaaaaggcccaactcctctccaaaatttgatttcaggcttaaataggtggctttgttcgtgctcatgggcttagcgcaattctgaactacttgcaaattagtgaatttcggcttagcgcgtgcttttatcgctcagtggatggactgaagtggtgcgcttggcaagataaccctttgctcaacaaacatgcacaactcatctttcttccagattcttcttcgtgctcaactgangagtgttgcgctcagcggatggctcgctaagccgac

SEQ ID NO: 19201 - DNA, 399 bp, Glycine max
  unsure (1)..(399): unsure at all n locations
tctcccctattttcctataaatagggagagaagtgaatgtattttatgttcagccctcctggtaatttgagatcacttgaaattagtgaaaaaaattgtttccgtgaagaaaaatccaagccaaggcgcttccgtaacgtttccgtgggtgaattcgcgaagattttcaactggtcttcgacgttcttcattcgttcttcgtcgttcttcggtcttcaaccggtaaattcccgaaattgaactgttcaattcattctatgtacccttagtggtcctcatttgttatcacgtgcttttattttcatttcatttactttccgtacccccttttgacgtgctgttgtcattacttnaggcattttctcgcctaataaaaaataaataattttcaccgatcat

SEQ ID NO: 19202 - DNA, 232 bp, Glycine max
  unsure (1)..(232): unsure at all n locations
agctttgagccaattcaaacgacattatctttttttntgatgtctgattaagtcccgtaatatattgagacgctcaaaattgaatgttgaagctctgagccaattcaaacgacattaactttttactcggatgattgatggagtcccgtaatatatcgagacgctcaaaattgaatgttgaagctctgagccaattcaaacgacaattactttttactcggatgattgattg

SEQ ID NO: 19203 - DNA, 893 bp, Glycine max
  unsure (1)..(893): unsure at all n locations
ccgatcatcgacnnctcgnnannaanncnnccgcccggaanaaanggnnncaccacgaacaaacggtttttttctttttttcaggaacagacaggcgcccactctggttctcatgcaatctctctttccttggcgaacgaaatattgacatgaattgggatggaggtccaaaacaatgttgcggtgaggaaagttcaatcctcatgaaatacctccacgggctttcccaacgcaaaaacgccgacatcttatccccctgcattttaaataatctcagcccaagtctttatccctttccgccccttatcttttcttaacttcctaacttgcttgccttcatatgtccaaacatttgactgctctcatttctaaaatagccatttaaatgcctccactttacctcaatcgtgtaggaactctcaaatcccatttcattgagaccttaactctcccattttgtatcatcggatccactgaaagtcacacctacttctatttgcaccatgtctggtgaggaactaaccccactcttggggttctggctccaacattctcaattggaccgaccccctatcctacgggctcaaatcttactcctgcctaatcttttaccggccaaatttctcaaagggccaattcccgtcctcttttactatactctctccttgcccggactcttctctctccccaactaagcctgtaccctgtctcctcgcgcttgtcccacccttggaacctaaaccatattcttatctttctttactcggtcctagactaccattctatcgcgcctcataatgcagtccatgtcctatctcctcctcctcactactatacttcctaatcttcctcgcacgctatctctttcatcgatactttcccctcttgtcccc

SEQ ID NO: 19204 - DNA, 461 bp, Glycine max
  unsure (1)..(461): unsure at all n locations
accttctaatctaaggcattctctaatgtgtgaagctccttcttccatggcttattcctgaaaaaattgtatctcttttccttagaaatttaggcactactcatatgcntcatttagagttttgtagcgccctataggtcttgcacaaagcanataggtcaagtaagcacaaaaatttgaaaatatgcaacaattatcaattaagcccaattatttgcctaagacccaaactgagttaaggagagaaaataagactccaagagaggtcaaataagctaagatgaatagaaaaatactaaactaaaaacatttaatcaaattcccccatactttatcttttgcactccagggaaaagctaaaagaaagactaagaanaatcaaactaaagtaaaaccaccactaaaagaaatgaattaacaaggaattcatattttcaatggatcttaacaatgcaaaaaaa

SEQ ID NO: 19205 - DNA, 454 bp, Glycine max
tttaatctcaagctcccaatatccaagcaattcaatttccaaatatcatgaactttcctatccaagaaaacagggcagaggcagaaaactctgcccaaaacacattcacatattacaactttccttactcaaatatcccagtaacattctctttgttccggttcgttaaccattggatcgacttgaaaattttactggaggttcctagtacatacatctaaattttgaccgttgggatctgctagaaaatgtccaaaacccactatgtactaccttttccataaccagcaatgcacaagcattttctgcacatgaacaaaattctgctatacaaaatttgacagctttttgctgcacaatttggcagattttgaaatccatcttatccacctcccattttgctaaaatggatcctaccagtcctaaatcatgttaaatcatatctaaccaaaaa

SEQ ID NO: 19206 - DNA, 151 bp, Glycine max
taaaaagtttttcaaaatattgaggagcacatgaatttttcacacaaccttttactaaagagtttttactctctggtgatcgactaccagtttattgaaatcgattaccaggcgcaaagattgttttcaaaaagctttcaactgaatttac

SEQ ID NO: 19207 - DNA, 341 bp, Glycine max
ttgaaacatgatgaacttcagccaaggttctaacaacaccattatgcttttttatttgtacaaaacctatactgatagacttacaaagagcatcattacccatgaagacgttaccaccatacttcttctcatatgtgacaaaccaatgtttgtgtggacacatatgaaaagaacaacctaggtctagtactcattgcttagaatgttgtgtagttggtcaccaacaaccaaaaccaaatcactttccgatgtggagtcattctgaacaagatagcaacaaaatcttactttgctttctttggatagtttcgctttcaatgacccaattctttgcagtaatt

SEQ ID NO: 19208 - DNA, 338 bp, Glycine max
  unsure (1)..(338): unsure at all n locations
ttttcaaaaccatgctatgtgctcgcgactgggctctctcttcccttcgcagcttgagttcactattgctaccccatagagctccgtgaaatttattccggccatactcttccttgcgagccctcttggtctcttgttcaagggcccttgtggtagttgcattctcttcccgtaacccggcacactccttncgaatgtgtgtagcggccaacttgaacttctccttggcaagtttcgcctttcctaactcgcttttgagagcttggacttcttcgtcctcttccggtgcctcaaaactctcttcgctgacgacttttaacttggcgagcccatctaaa

SEQ ID NO: 19209 - DNA, 389 bp, Glycine max
  unsure (1)..(389): unsure at all n locations
ttgaatgctctattcaatggagttgacaagaatatcttcagacttgatcaacacatgcacagnggccaaggatgcatgggagatcctgaaaaccactcatgaaggaacctccaaagtgaagatgtccagattgcaactattggccacaaaattcgaaaatctgaagatgaacgaggaagaatgtattcatgacttccacatgaacattcttgaaattgccaatgcttgcactgccttgggagagaggatgacagatgaaaagctggtgagaaagatcctcagatccttgcctaagagatttgacatgaaagtcactacaatagaggaggcccaagacatttgcaacttgagagtggatgaactcattggttccttcaaacctttgagct

SEQ ID NO: 19210 - DNA, 488 bp, Glycine max
acctcaaaattttggtttctcaaaacccctcaatttaatggattttcaaggtttgagaagtgaaaatgagaatggggtaaatttggagcaaactctcacctcacacaagtctataacatcaatctaaacttgctcaaactggttttacgcctaaaattctgccgaatcaaaatttgactcctcaacacccaattttaccctagaaatggctcttgccttcactttggtcatttgtttttctctcttgcacagcccaaactttctcataagttctaaatgacatttcaagctaggattaactccctttaacctccaaataccactaaattcagatttggccttcaactctcaaagcctcactctttttccactcataacaccatattctcactttctaaccctagggtaaccctacccttcatctctaacaagtttccataagcaatttcagtacataaacatcacaagcatcatcataaaaaccttaa

SEQ ID NO: 19211 - DNA, 500 bp, Glycine max
  unsure (1)..(500): unsure at all n locations
taaagtatgcccgagtcattcatccctatgagatgttgttgaagtattttcgatcagaattgccattccttggattatagggttgaaccaagctcatgcttttacaaaaaggttcatcaagtcaagttgaaatatggaagtaaccgtcttgcaaaattggggcaaaagatgaatcgagtcacatcactgcttcgtctactgccaaacatatttaggattattgatgtccttgttacttccagtttcaccttgacaaagatgtcatggaccatgttgaaaatctaaattgattcaaccccatatcttgcgtaaaaattcgcaatacttcaactgtacatcattcgcatgcatccatgnctttcattggttgcattgctcattgcattctttccttgaaaaataaaataaaatgaacttagtcattgttataaaaagaaagggacacgctttacgacgcccttaccgaactcgtgctagaactagagttatgtgtgaagtag

SEQ ID NO: 19212 - DNA, 139 bp, Glycine max
agcttcaagaataatggcctcattttactatttatttcctgaagggaattcaataaatagacctcctattttcaatggagtgggttaccattactggaaaacccgtatgcaaatttttatagacgcaatagatttaaat

SEQ ID NO: 19213 - DNA, 532 bp, Glycine max
  unsure (1)..(532): unsure at all n locations
tcaattcttcaactttagtcacagttgtaagtttccagggattctgtttctctgctaagttcccttcattttcaagaattgctgccttctcaagaaatctaatcgaacaaatcactccatcaattagtttttaatatataacattgtcgtatattagttaaaaaaaagtactctaaagaaggaaggttatttctcgccaaaaaattattgtataaaaaacataaaaaaatgttcgaagattattttttaaaataattggaagtatttagtaataagcataaatatctttttggtctttataatttaatgtttttttatttgtgtccctccaatgttttttttagtccttataaaatggcgtttattttatttttttgcatttaaagcgttgtaaataacacttttgttatcattcaaaatatttnttttactctttattgtggtatctacaacggctagaacgaagaataaaacactcttttacaaagactaaaatggaaaaaaaatgaccgagatgaaaataattaaaaat

SEQ ID NO: 19214 - DNA, 353 bp, Glycine max
  unsure (1)..(353): unsure at all n locations
agcttctggtatatataggtcttcttctttaagtgttcgnngggtataaatagataaagttcttcactaaagctcgtgcctgaagaagtgtctgttggggcatcttgcattaaatgcacatcctcttcatgatggaaaaccactctgtttagcttccttgtagaatacttcaacaaaaaaccacttgtttttccttatagtaggtctgtcacaacaggacacgtcttttgatacttatttgaacttcaaaacactaaaagttcctttattcttcttaggaatttgatagatcctatgagaatgcctcttaagcaattcttgccaaatgaatctcagacataaagcattaaatg

SEQ ID NO: 19215 - DNA, 127 bp, Glycine max
cgccgtacatagctcattagtcatatcatgcgtgcttttttggttacttaacgagccaagagattgatacattgcgtacgtctatgccactttatgacaacttcggctgagtgcgtaaattgagaaa

SEQ ID NO: 19216 - DNA, 386 bp, Glycine max
  unsure (1)..(386): unsure at all n locations
agcttttggtgatcactggaaanattgattgttttttgtattctgaagctgaagcactagaacatacgaagaaaagagatacaggccatcaaagtgtgtcattggaagataagacaggagattcaactgtgccgaagatagganattcggctaaagttgtgataaaacaagacatgaaggaaagaaagcataaatatgggtttaacaacaacaaacgtgagaaggcagagaaaacaagggtggtggatgatgaaactggcgacaaacatcagctggatgaagtcctaaggatgccatatacatgtgtatttctgaagatatagtatttatattccatcaaacatacatcgactgttgattacatgtaatagactttttataacatg

SEQ ID NO: 19217 - DNA, 408 bp, Glycine max
  unsure (1)..(408): unsure at all n locations
tgctctannaatttacattnngatgtttgtattttatcgggagtgtgtgttgtntgccatttttgttttaagagtagcgtcccactggtaaaactaactttccaaatgtttgccttcgcaggaaatggcccccaggaagcttgcctcaaagaggtctaggaaggacaaggcagccgaaagaactagttccgctccggagtatgacagtcaccgctttaggagcgctgtacaccagcagcgcttcgaggccatcaagggatggtcgtttctccgggagcgacgcgtccagctcatggacgacgagtatactgatttccaggaggaaatagggcgccggcggtgggcattactggttcctcccatggccaacttcgattccacaaatagtccttgagtttatgccaatgc

SEQ ID NO: 19218 - DNA, 432 bp, Glycine max
  unsure (1)..(432): unsure at all n locations
agcttttctttctcaaccaacctgtctatattctacaattctaattgcaagctcacattcttgttctttctctatctaacatacacgctagctcaaacttatgaaaagggacacaatcttcatcacaatcatgaattcaatccaaaatcagtttataacacccatttcacaaaaagataaaagtgtttcactgcatattcatcaagatcaagtcaaactgttccgtatgcttcaaaacatgcatactaactattcacaaaaaacacaagtatatataaacatcaaccaaaatcactaaaacaatgtactgaaatataatagttataataatttccaaaaagcaaaatcatcaggaatttaaaattcctgagacagatcctgngtatcctgagtctgagcatcctcctcatctatcaagtgaagtactggagt

SEQ ID NO: 19219 - DNA, 530 bp, Glycine max
tggacagcaagacacgtgggagaggcacaacaggggaatttatttttattaaatggggagttagaaattcgacaattagggagtcacatgtggctggggcaacagggaaaaaaaggtgcaaaaatggatgtaaaacaaagttattatttatagtatttattttaggaaaaagatatagtattagaattataagttatttttttataatattatatttatttttgtattattatatatttattgttttttagtatttaatagttaatattattagtatatatgaataagataatattaataaataaaactaagttgtattagtataaataacttctttagtagtaacaaatatatgcctttataaaaaattagtcattaataaaattgattaatattttatactaatgcaatgttatggtgactaaaaaactaaaaaaaatcaaaacatctctatttttaaaatattctattaaatagatcaaaaaattaaaaacacaatcaaacacatcttgaaattgcttttaaaaaaa

SEQ ID NO: 19220 - DNA, 344 bp, Glycine max
  unsure (1)..(344): unsure at all n locations
agcttaagcaaaaacattatattgttttttgtctgntggattctactcagntggatagttttctgttgattgattgccgttgaaatgggtctcttgcagattctctcatgttttttttttatgtttttttggatttcattatatgtgtcatgtacgttgcttaatgttctttatctatttatttatagattcattttttcttcttaaaatgtcaattttatagacattttgtaggagattctgtaattaagagctctttgaatgaaagtacatatcggtaattcactatgctgagttggatttttaagcatgcttagatacccttcatggaatcacctattaat

SEQ ID NO: 19221 - DNA, 379 bp, Glycine max
tctcggctcatgctgggaacgcctctagttcaacacccgtgcttcctaaagcacccacccagagggaagctccccaagttccaactccgaacacgactcgaccggccggtaattccaacacgacaaggaactttcctccgaggccattgccggaattcaccccgctcccaatgacgtacgaagatcttctaccatccctcatcgccaatcatttggccgtggtaactcccggaagggtcctcgaaccccctttcccgaagtggtatgaccctaatgcaacttgcaagtaccatgggggtgtcccggggcattccgtcgaaaaatgcttggcccttaaatacaaggtccaacatttaaatggatgccggatggctgactt

SEQ ID NO: 19222 - DNA, 360 bp, Glycine max
  unsure (1)..(360): unsure at all n locations
agcttgcgaagaaagaagacgtctttgtgttggtgaggancancatcaagttttccatcaagaagtgcctgaggaagtgcttcagcaagttggtttcgcgcgaagaccaccacgaagcgatgatcatgttgaaggacatgccgcctgagccaaactggtaccaaaggaagtggaggagggcaaggcacaatgggaacaatgaggagctcaaaggagagaataataacaacaacaagggagttcaaagaaacagaaccattgccttatcanggcctttggatgggaatggaagaataattcatgagaagatggtgaacaacaacaggtgatgaaactcttttgtcctcttgatgggaaaat

SEQ ID NO: 19223 - DNA, 140 bp, Glycine max
tatatctgatagagtacaaatctgagcatacattatactcccaacaactgattcatacaaaattgcttccatttgttttcgttctagatcatttttaggatattgtgcgaaactaaatttggctcctttctaaattgaat

SEQ ID NO: 19224 - DNA, 285 bp, Glycine max
aagcttttgggcttagcgcatcagatgcttttatttagaacgttcagccaatgatcaagggtcaatgcgcttagcgcaagcaagagctcgcttagcgcatgaagaaaatggcgcctagcgcgagtgatgtgcttagcgagtggaaaacaaaaaaaaattaagttatttttttgtgcataacttcacaaaagccttttaaccccttttttcatactaaacatgctaaattcatacaatcacaagcactcaacttaactaaatgcaagaaaaacaaaattaaaaagg

SEQ ID NO: 19225 - DNA, 450 bp, Glycine max
tataagaacaaaattgccttaatcatttccaaatatgcatgtttattttgacgcatcaacaagaatcaagccaaggctattgtgcaagcaatcaatggggcaaaacataccaaatgattataatgatggatggctcaaattctcacaaaggtaaaatcatcactttcaaattgagctttcaaaactatcatgacatgtagagaagaatcaaggatttcaagtcacaaaatgtcaagaacttttattttcaaaacaattacccattttttgaacatatcctataatgcaaagaaaaacatgcaaagtcgtacgtgcacactaaattgacccaaaatttaaactgaaaattcgacgaaacttacaacatgtacaaatttacacaacttacaaatttacaaaacccacaaaacttgcaaaaccaaaaaacactctcgcccatactaaacaaca

SEQ ID NO: 19226 - DNA, 290 bp, Glycine max
agcttgccacccagctcgcccaggcgagttttgttcttcctccagaagcaacaaccttctggagggcccaagtgggcctgggtgctatttgcacccctatttttactaaatacaccccctgtcctttttttttggtgattctttttttcgtaaagttacggaaacttacgaatttcgtaacgatacttgttttctttccgtaatgttacggaaccttgcggattacataatcatccccttttttgacttacgaaatgttacggaacctcactatttgtgcaacgatgttt

SEQ ID NO: 19227 - DNA, 352 bp, Glycine max
caccttgaattataattgtaccctttgcaccctttgtgagttgaaagtttttgtcaataattgaaccctgaacctaaatgattatctccagataccttgtttagattctaggtgagcatatggttcaaggaaaatttaccccaaatttgggggagtggaactgattgggatgcaaagaaaaaggtaaagcatcaacacacacaacacataagttgtatgttaaaaaaaacagagaagaaaagagcacttcaagaaaatatgtgttgttgtaataaggtcaaaagcaaatgaaagtgaaaatctattgagcaagctaatcgtgtttaaaagatcacttggataaatcaaagat

SEQ ID NO: 19228 - DNA, 336 bp, Glycine max
  unsure (1)..(336): unsure at all n locations
ctggtggtacctttgatgaacgagagtcttgtgagacacaactcanagttcaacttctctccctttttcttccttcaatttcgggctccccctctctcttctctcctcttcttttctccattgaagcatcctctccaagcttcttatccaaggctcatcttggtggtgaagctccttcttccatggcttattccctagtggatggcaccgcctcttaccttttctcctttgtcttctgctgcatctccatggtggaaaatcaccattaaaggacctcattgaagctcanagttccagcctncatagaagctccacaagcaagctttcatcactcta

SEQ ID NO: 19229 - DNA, 493 bp, Glycine max
  unsure (1)..(493): unsure at all n locations
ctacagcaaatgccactctactccaagtttttaaaggatatgtttatcaaggaaacacaagtatattcaccaggaaaatattgttgtggaaggaaattgtagtgatgtgattcaaaagatccttccacccaagcataaagaccctgggagtgtaaccattccttgttcaattggagaagtcattgtgcgaaaggctcttattgacctgngagccaatattaacttaatgccaatctccatgtgcagaaggttgggagagttggagatcatgcccactaggatgactntacagcttgttgaccgctccattaccagaccatatggagtaattgaagatatgttggtcaaagtaaaacattttatcttcccggaaaactttgtggtaatggctatctgtgaagatataacattcatgtaattttgggaagacccattcatgtaactgcaagctgcatagtggatatggggagaaagaagctggaactgggctttg

SEQ ID NO: 19230 - DNA, 663 bp, Glycine max
ttttttaaacaatcattggttgaggactcaaggaataggggaatcatttacccttcacacgcatatttctttctaattaacctctgacctcaatataggaattgatatgttagagcgcacaggcttgttgcaatatggcataaaccacttggacgattagtcattactagaagagggttaactaaagatgtctcgaaaattacaggaggattcagaatatgacatattcttggtcaaccatagtgaagaactatgatacacggatgggtgtgaatatatctatctattcacaatagtggcgcgcccataaaagatcaagacgcgaagaagctactttcaattatttcaggaaatggatgtgacacaacatataatatttgcattacccctttctaggatttcctatggctgatgagaatgctagtatactatgaccattgagtcaaacacggatgatttattctttggatagaatagaaacaaatatgtcccgcccgcttgcttatctcgtatttacatatcgaataatctttgcatgccatatatcgagatcaaaccgtctttcaattctaaggtttacaacgcccaatgtacgaagaaggcctcttactaacaacatcaaccttttagaatagccatatacgcgtcaccttatttccttgg

SEQ ID NO: 19231 - DNA, 319 bp, Glycine max
  unsure (1)..(319): unsure at all n locations
tgaaccaaagaccacagagagtgtgaccttactctgtgagtgtatgtcttactgtgaactacgacctttgcataagtctctgaattctagaatgatatgtatcactcacaacatgatgaaagccatgaattgatctacacaagctctttcgaccaaatagcttaccttgaatgatactcgtatctattgctcccttgtttaaagcttattgatttgtcaagaattgaaccctgaatattcaatgattatctcctgataccttngacacattctaggaaagcatatggatcatggcaaaaatactctaaatttgggggag

SEQ ID NO: 19232 - DNA, 406 bp, Glycine max
  unsure (1)..(406): unsure at all n locations
ttctatgcattaaattattattgagcataaaaacattggaagtatacaaaatggggtggtactgggattaattttgtcttagagtattttaagtatgcatcttcactgtgatgtgtaataataataataataagaataaataaaacaaggttgttatagaaattattgtttcatagtgattatttttgttactttataaattaattgatgtagaagttttttttattttattgtgctgaattaatatatttcaatttaatttatatttttgttntgttaagtaaatgttactattgaatgatatgtgtangatgcaggggatgccaataattatttattatgaaattgtgattgggattgtgtgtaagtgataattatttgatacgtaatggatgtgaattacatg

SEQ ID NO: 19233 - DNA, 613 bp, Glycine max
ctaagcttacacaaaatttcaaaatgttagtgtgtaggttcgtaactcatttattcaaagcttctagtatttataagtcattttctttaggtgtttgttgtctttaaatagacagaaatcttcacttgagctcgtgtttgaagattgttgtcattggagcatttaatgcttgcattaaatgcacattcttcttcatgttggaaaaccactctctttagcttccttgaagaacactttagcaggaaaccacttgctttttgtcaaagcaggtctatcacagcaggatgtatcttttaatactatttgaaattccaaagttctgaacttcgtttatttttcttaggattttgacagatcctagaagaatgtcttgtaacatagttcctgcaaaacaaatctcaaacacaaaatattaaatgaagtcttaaatgcattcttaaatgttgtatcagattgtaaagtatatctacttccaactagaacttcatatgcaaattcaagatgtatagtttgatatcgcataagaagcacttttaacctttgtattatctacatataattaaaataataaaaagtatgatttgacttaagacccaatgtcttttgacttaac

SEQ ID NO: 19234 - DNA, 131 bp, Glycine max
  unsure (1)..(131): unsure at all n locations
agcttatgatcngtgngtttggttttttcttttttttttggntctttggnaaaaaaaagaaaaatgtatgtcgagggatccattaagggatggtttcagatcaatggttgagtcgggatggagttaccgac

SEQ ID NO: 19235 - DNA, 423 bp, Glycine max
tcaagaataatggccttagcaaaaattttattcccagaagattatctctataaataggcctcctatttttaatggagagggttactactactggaaaatccgaatgcaaattttcattgaggcaatagacttaaacatttggtaagccatagaagttggaccttatgtacccaccatggtggctggtaatacaacaatagagaaacctagagaagagtggtctgaagaagaaagaagattagtgcagtacaatttaaaggctaaaaacatcattacttctgccctaggaatggatgaatattttagggtgtcaaattgtaagagtgctaaagatatgtgggacactctacaagttacacatgagggaacaactgatgtcaaaagatctaggataaatactctaactcatgagtatgaatattt

SEQ ID NO: 19236 - DNA, 399 bp, Glycine max
agcttgccacccagctcgcccaggctagcatgtttgcttcctccagaaacaacagccttctggaggaatcttctggagggcccaaatgggcctggttgctatttgcacccccatttttactaagtacaccccctgccttttttggtgattcttttttcggaaaattacagaaacttacgaaatttcgaaccatactttgtttctttccgtaatgttacggaaccttgcggattacataatcatccccttttttgacttatggaatattgcggaacctcactaaatgtgcaacgatgcttccatttgatttccggtgtgtcacggaaccttacagattgtgcatcaatattttctttttgtttccggcatgtcccggaattttacaaattgcctaatgat

SEQ ID NO: 19237 - DNA, 470 bp, Glycine max
tcagctctcagcccaaactcccttcacaaaatctgatttcaggtttataataggtggccttgttcgtgctcgtgcgcttagcgcaattttggaccacttagtgcacattagttaatttcggcggcttagcgtgtgcctttctcgcttagcggatggactcaagcggtgtgcttagtgagatgaagcgttgcgcttagcgaacctacacagctcatcttcttccagattcttccttgtgcttagccaatgagtgttgcgcttagcggacgctcgctaatccagcggattgtcttcgcaagaaggtgaaaaaacaacacttttcaaagctggcctaattaacctgaaattgagataaaatgattatttaacacacaaaatggaagtactaagtatttattacctatacttaacagaaaatacttataacactacaaaataacccataaatggaagaagttgatacactttac

SEQ ID NO: 19238 - DNA, 395 bp, Glycine max
  unsure (1)..(395): unsure at all n locations
agctngctctttgtcttaatggctttcttgncaattnctactactatctcgncctccttttgtatgtcttctttcactccatcgtctacctccatgtactttcttactggctctttagttgctaacccacttttggttattacggcattacaataaaccttgcttgtgatttcttttatttgcatcgctaactcctttacttgattttttaaaagatttattacgggtgttcacgggccggttttggccanattcangacccaacccaatcaaatttgatcggtttggttaagttcggttttcataactttttttgaaacccaaccaaacctattcatgaaatggttaatttagttcagaccaaccgattacccaatttaatttatctttttttt

SEQ ID NO: 19239 - DNA, 334 bp, Glycine max
tctacttatgtggcagggcgggcttccttcaccttcttttcttttcgcgaactttgaccattgttcttccttcccgcaatgcttcttttcatgtctgcctgagtgggcttatagcctaaaccatacttcccacgattcccttgagtatttatcaggctagttatgccgccgttgttttttcctaaacccatcccgggttcaaaacccgtccccaacataactcgggccatcattaccgctgcatcggacagacaaggttgcccaaagagggagtccacggaggaaatgctgaccacctcaaaagactggaaagcagtttctaacgattcttctg

SEQ ID NO: 19240 - DNA, 401 bp, Glycine max
agcttgtgtctttatccggttttgttcattattactaaaaaatatatggtaaaaaaatactagtaattcttaacatggtcattatacttcttcaaaaaaaaaaagaaaaaacatggtcattatactttttttgcactcaagaagaaactactaatatatttggattattagtgcatttaaaaacaattgccaattcgcaaataaacttattcttattttggttacaacctgatcaccacaaaaaaatgaaacatcttataaacattttgatacacaaccttatgggatcaaatacaggtgaaccataagaaaatacattttaactccatatttgaatatatcagcgatcatcaactaaccaataacctagtccttcttggcataaaatctccgtacatgga

SEQ ID NO: 19241 - DNA, 467 bp, Glycine max
  unsure (1)..(467): unsure at all n locations
tgacattaatagtttgaatatatttattacctaaaaagttngttttttatttattacatttacttgacaaattataattttgtttattattatctaagatataccatttaccgaatttcaattttaaatgggtgactacaagttgtataaaattcaccatttccatcatcaaagatttcattttaaatcttgagtaatctttatgaatataaaattatgttttattacttatttacttcactttctagcttcaaagtatctatcagaaaaataatcaagccataaacaaataaacgaatcaagcccaagcttcatatattttaaccaactcaagttgaagttttaaatttgttcagtttaaataaacgagtgaagcttgagtaacccattttcttcacaaggcaaacctaaactttagctcagctaaacttgtttacaccagtgaatgcgggtggagaaaaatcatg

SEQ ID NO: 19242 - DNA, 179 bp, Glycine max
  unsure (1)..(179): unsure at all n locations
agctatatatggagctacattattttttttcttagcatcttcatctaggggatggtcttttgcttcctttatcttttgttcagccaattcactttaattcattgttcttcatcatcttctccatgtatctcctccattnttttgtggattggggcttttagaacaactgttttttttaa

SEQ ID NO: 19243 - DNA, 543 bp, Glycine max
tggtttgaggtacttacccgttgaagactgaagaaaacgaatatacgaacgatgaatgttgaagaacggtcgagaatcttcgcgtaattactcacggaaacgttacggaagctcctcggcttggattttcttcacggaaaaaattttcctcagcaatttcaagagaatgagaagtgtcaagaaggctgaacccttttcttcttcactcctccccctatttatagcaaaataggggaggagcttgccacccagctcgcccaggcgagcaaggttgcttcctctagaagcaagaggaagaatttggaaggcccaagtggtctggattgctatttgtacccccctttttactaaatgcacccccttctactttttttggtaattcttttttcgtaacgttacgaaactttatgaattacgtagcgatacttattttccttccgcaaggttacgaatacttacggattatgtatttactcttttttagcttttggagaaattacggaaactcaccgattgcgccaaaacacctcttttcgatttccg

SEQ ID NO: 19244 - DNA, 470 bp, Glycine max
  unsure (1)..(470): unsure at all n locations
agcttggacacgtattgcanaggctnggatttgttaaacatannngggnactgcagctggaagtgacaattttgggcgggaaattaggttaaccacaacgcgacacgtagacatccaaagccttgtttggatatagatagataataatattgatcaagttcaagtatctacaaaaaaaacaattttaacattgagttgggtgttgatttcattgaatcagacgacaaagaagctaaaccaaaagatgaattatgtgggaaacaaatatcactgaagaaatagccaatttaaaacatccaatggtaatctatttgtttatattttttatttaaccttaatcattttaacaatgtcttagttttgttaacaggtcatccctgaccatgtcattcactacattttcactagcatgcctattgaaacatatgtcaaattggctgatgataacttaaaaatttggacactacatt

SEQ ID NO: 19245 - DNA, 296 bp, Glycine max
  unsure (1)..(296): unsure at all n locations
cctaactaccataaancatcttctacaggcggggacgagtccttatttctgggggagctgaggctcctgcgccctttggaattttttaaacctctaccccacaataaatattctctgctgaaaaatatgtagcatttttcccaatgggactgattctcactggaggcttataatgatagaccggttgtttcataacaacccatgcaccaccactggtatctaattctatactagatatcatctaaatcaaccttgatcattggcgtgataacaacacaacaaactatttttttttt

SEQ ID NO: 19246 - DNA, 474 bp, Glycine max
  unsure (1)..(474): unsure at all n locations
agccttaataatttgttaaatttttttattatggnataagaattaatatataccccacaatcttttaanatctttcaaaaattcccaaatatctataaagtaaaagccccacatttttctgggaaaatcanncacctaagatatttttttttttttgtcattgaagttagaacacttntttggtgtttttcccaatttcattggaatcanntatattaatcatacctcttaatggtgtgaatatttgttaagttcaagaaaaattttacgcctcgaagaaaatgaaatacaaaattgtttagagtttcaagaaaattccattatcgtgataaaaaaaaagcctaaaatttaacttttatgtaacatatataaacatactaaaaaaacaactaaatacaattttgttttgttggtgaatacatcaagatacaaacaaactagcattcatccatanactgaaatgcatcgaaacat

SEQ ID NO: 19247 - DNA, 590 bp, Glycine max
  unsure (1)..(590): unsure at all n locations
tgaactcttgcacctccttgaagttcaaccatgctttctttttactttggcttcataaaccttcttttgcccaccatcttttgcctccaaagtgatggtgtacaaggtaccagaaaccacttgctgttttgcacttactaccttttcaaactccaaaagggcattctgcataaccattaacaattcaataaaaataaaatagaagtcatatttaaattcccttaccacaaaatgaaaagataatagaaacccactagtgtttctataactacaaagaataaaaaattaacttcattattgaaattggcgccaccaacctatttattccttgacataatgaacatgcaaatntgtcgcaacaatcaattgattttttttggctaacaaaanattatggggaggagggaatggcccagtacacaacagaaaaaagcctctaggctcaaagaacatntatacanaaacttacatataccccactccanataaacaaatganggttcaaacctgcnnatctatagatgcaagattntgtcttactctactcaatgaatcctttgatgttccacaatcaatatattagtgcttaa

SEQ ID NO: 19248 - DNA, 353 bp, Glycine max
  unsure (1)..(353): unsure at all n locations
agcttagaagttaccttcattaaccaactttatgctgnatttgccncannnncgaagagcgcacaaccaaaaaatacagncttcccatgactattcatacccacaaaaatcccaaatggcatttcataagaattgaccttgtatggagtatcaaatacaacaacatcaccatatttttggtaccaatcagagcaggaagtatgagaccaaaaaatatgctctaaccttctctcttcataagtgtatatgcatcctgaaatttagagccacttttttttgcatccttacagaccttgaaaagaactttgcatcatttttttcaacttttttttttggtttcacaaaaagattac

SEQ ID NO: 19249 - DNA, 349 bp, Glycine max
  unsure (1)..(349): unsure at all n locations
ctcaaatcatacaaattctcattcaaatcattctcaaacacttatttcatgcaaaacaatccactgcaaatcattttcaatccattcactgttcaaaccagcttttttgtacaagcaaacaactcanagtgctgaaatttaaataactgaaaaagtaaaaatgaattaaaatggtgaacataaatcataaaataactgaaaataaactaaaatgttcaagatgcacaaatttaaatgtcctgctcctgtgcatgctcattaagggccaacacctgaacaactggtgaatcctaaaaaataagctgctctaactcagatgctatggcatcatcangtattggtgctgggg

SEQ ID NO: 19250 - DNA, 382 bp, Glycine max
  unsure (1)..(382): unsure at all n locations
tctacaaaaagctgatgcataaactaattttatgtgtatggaataactttatttcatctaagagaccctagtgaagccagctatttatgactaaagtactattttgttcttgaatntgtaacgctctaatcggttagtccttcaaattaggtaaatttgaaaagaaaaaagaagttctaaaaacttgttcccgcgactgggaatacatcgatacatgtaaaaggacacaggcactgcatgtcagtcaaaggggccaagacgtcaagttttggactagctttgttgatggaaaaccaaattnagagtttttttttttttttttttggatgttagctaatttcagggactatatcaaaatataaattcaggaattaaaatgggg

SEQ ID NO: 19251 - DNA, 314 bp, Glycine max
ggtctaaaaaaaggcaaatctgatcatcatgctttgatacatgcaaaaaactggggcaaatgaagagggtgagaatgagggagaaacccatgttgtgactactattcctatacagccaagttttccaccaacccaacaatgtcattactcagccaataacaacccatcttcttacccaccacctagttatccacaaaggccatccctaaatcaaaccacaaaacccaccttccacacgaccaatactaaacaccacctttagcacaaaccaaaacaccaaccaagaaatgagttttgcagcgaaaaaaaaaaac

SEQ ID NO: 19252 - DNA, 484 bp, Glycine max
tggagaaggtggatttggaactgtgtacaaggggctattggattattatgaggtagctgtgaagagagtctctaagaactcacgccaagggaagcaagaatttgtggcagaagtgacaacaattggaagccttcaccataggaatttggtgaaactcacaggttggtgctatgagaaaagagagcttctccttgtgtatgagttcatgcctaagggaagcctagacaagtacctctttggtgacaaaacttttggtaacaacacccttgaagaggggtgttcttcaacactgacttgggaaacaaggcacagtgtgattcatggcgtggctcaagcattagactatctccacaatgggtgtgagaagagggttcttcacagagacatcaaggccagcaacataatgttggactcagactacaatgccaagttgggagactttgggatgtgcagaaccattcagcagagaaatgaaacacaccac

SEQ ID NO: 19253 - DNA, 446 bp, Glycine max
  unsure (1)..(446): unsure at all n locations
acctaatcacaacctcatctatgaaggttttttttatttttcaggaccaattactttatttcaagggtcgtctattcaatacctgatcatagcttcaagtctagaaacattaacaagggtttatgtgaaatctatgtctttctggtgggtaaaagccttgagctactaacatagctttgntccttactaccttatcttgttcatccaatttatntctaaatgcccatcttgttcccaagatgctnttgttctcaggcttgggaacaagcatcttgacatcatttccagtgaactagtggagttcttcttccattgcaataatccaaatattatatgtgattatttcatttatcatcttaaggtctatttcaaacatgaaagcataagacataagatcttaaaatgatgatctggntttgactccttcagtctgatcttaataatct

SEQ ID NO: 19254 - DNA, 474 bp, Glycine max
tgttagtgggaaaattttgaaacttaattcaccccccttcttttgttattgaggtcacttatccaacaaaagatgctagtatatggctcctgtgctttttaggcccaatgatatgacctaatagtaatagttggccgactctattataaaagttcctttcacagcacgtatttgactataatacccttgtacctattcttcttaatgttaaaccttgtcattaactcaatggatcctcttgtaggcattctttctccagcaaatttgaagagcggatcatcgtggggctaaagtattgattcaggtatgtctatctgcttaaatgtactccaaaataagatatccaccgagcttccttaatgaatgagggttttccatacccagtatgtgtttgataaatctggatttgagtgtattttggtgtgaattttcatgtcatattcatgcattttaatatatttatttaataaatct

SEQ ID NO: 19255 - DNA, 500 bp, Glycine max
  unsure (1)..(500): unsure at all n locations
agcttcaaaacataatggcaaccattcctttcttattccagaagtggaaacgcccctcaaacaagaagtggaaacacccctcaagggttcgagagatcgccaaagttttgcttgctgcgcgttgatgaccactcatttagggctttttatttaattcaattgagataacgacgggtttttaataaaacccgtcataatttttatgaccaatacacattctaaggtggttttcaataaccatcttagaatgtgcatcgtaaaagacttttatcataaaataattacaaaaatgtcaatgtctcatttgctatagtggatccaaaagaaccgtcgtagaatgtctgtcgtaaaaacacaagtttcttgtagtgattgagtcatctgtgtactctaaaattgaaaattgtatctcatcaactaccttaactncatcaaatagacctgcatctnctgccttcctcatatggccagacaaacctttagccactaaaaaaaaaaaa

SEQ ID NO: 19256 - DNA, 544 bp, Glycine max
taggtgtcaggctacataggtaatggttggtgaggaaaatattggcttcatgaagaagagaaaagaaagtttgaaggggggaaggaatgggtttagaagaatattacgttttaagttttttttttcacatcctaggtatgattgtggttacccctttccctttctaaagctcttaacaagtacatgcttagattattagtgcatgtcacgagtgtggtcatgatcacacccctatgtaaagctcatcatgggggtgcgactacaatcacattccattatgatcttctcaacatgcacctattttattggtagaagcactcatgcataatatcccaacacctacaaaatcaatctcaataaccaaattaatgaagaaaaattaactatctaactatgtagttaaggaaataaaatgagcttgggttacttcttaagaaattcttattaaggccataagctcgagccctattaaaatctatctcttaatgttagttgaggaaagggaaagttttccctttttctcgattagttttcatgctgacat

SEQ ID NO: 19257 - DNA, 603 bp, Glycine max
  unsure (1)..(603): unsure at all n locations
agccttcaccttcaattggctgtttaattantttaatgctatgnnnaatnngaacatattgactaatattttacgatgtataagaataaggcttactgtattatatatattccaagtaaacaaacaagtaaaataacacacatgtcattgcaatgttcgtgatgataaaggttttctttttaaattttgttctgattttaatttctattagatattcaagtgtgttactaggatatgttggcgtttggtgccaaactgtgcactttctctctctctcgctatatttcttttaaattctaaaatttagtaatttcacttaaattttcatggatttgagaaattaatttttgcctctagtagtttaaaaagaattaagaaaagatttcactcactttttcaacaaaaattggcaaatagtttgacttccaaaaaggaaagaaagtgtaaaaaattaaaacattagactttaaacttgtgccatacacattggttgggctaaaacaaagtttcaaatagaaccttttccctgacaaacaaatgggaccctttttttaactaataaaaatttaataaaatttttcatattttatttaaaattatttt

SEQ ID NO: 19258 - DNA, 318 bp, Glycine max
  unsure (1)..(318): unsure at all n locations
tgttctgattcttttttattagaaaaatccaaatcactttcattatcatatacctcatctttgtctgagtcttacatgaggcatangttggacgcatactcctcatctttctctgaggatgatgagtctatatcatcccatgtgaccatcattgcctttttctttggatcacttatcttgaagtctttcttaaggaaagggtagtcatcattcatgtggctaggtttgttacactcaaagcatttaacttgtctcaaactttctcctttctggaagtctcttctagagaagttccttcttggcccttttcttcttcta

SEQ ID NO: 19259 - DNA, 390 bp, Glycine max
  unsure (1)..(390): unsure at all n locations
agcttgcacctgacgccaggggggtcnttttgtacagnccgngaganatgacccccgtgcttaccattagttgcaaaccttcttggtgcaagggccaaccattatgaccaaaattgctttgcacggaataacaatggaacttggcgtgtatcacaaccctttgccttttatcctgggcagtatangcaacagcaatagcttccgaaacagaagagtcacgggacagagctgcttgagtgagaagacgttgttcttcccaaagcagttcgccaacacatacacatccagagagggaagtgggtggcgatttaagagagcagcacgtacagcttcaaattcaggtctaagcttcatgaagaaatagtcccgtttaatgaacttataaaccct

SEQ ID NO: 19260 - DNA, 425 bp, Glycine max
  unsure (1)..(425): unsure at all n locations
tgtagttaaaaatgttttaaaaatacttgtaatgaatatttgatanttttattcctttattaatatatatgtgaggggtagagggtgtcacaatgatcaaataatactttggaccggctccaaggaattttcatatgtctacctccatggccctcgaaaacctagagcagctgacgcaacaaatcanggaccagctggaggagtcgatcacagaaaaagtaactcaacagctaatgttttcctttagccacatgcaatcccagtttcagtcacagatacaatcacaaggactcgcactgcctcctgagcctgaggttggtcctttagctgctcgtgtcagcataaatgagagttatgttgattcctcagggaacgatcgacacacgggtgactcatacaaatgcgggttgtacattaaagacaat

SEQ ID NO: 19261 - DNA, 1039 bp, Glycine max
  unsure (1)..(1039): unsure at all n locations
atcgatggagcgaacncacttaatacncaagctcggagcaagtggaaancgggacccttnccacacagggcgaagaggagtaattttttctgcngccccccaacaaaaggcccgcggaggaactctcgccccatcggtgaaccaccaactatcgcgtgcccaagaagacaaactacttgggaaggccctcccccatctaggatactcgggggagacactcccacggctgggtgcctcttgagtataaggacaacgcattctcccctcgcgacagatttcattgcctaacgggaagcccgcaaccacgaacccttcattggcgaatacgacctttcaggtgacaacccccacagagcacaatgcgtagttcgtcaacgcctcgcattacgccaccgagaccaccatcgatagtccttggcggttcgaacctactcccagaacctaacgccaatgcttatgtgccacttcatgggtctttaccaggccaaaacaaaggactccaacgacggaaaacagaccgtccacgtatccttcaatattccggcccactactccactggctaaggaaccactccgccaaaagaagttcacccttccatctccccaatcgtgcaaacgctaagcaccctatggaaactatcccccccagacccacatccactacatccacgcgcctatggtccacaaactcctccgccttttggggagaatctgcgatcattaccatgcgtcgccgtgattcacccgcgtctagcacctcaccctgtaactcctccacacacacccactccacagcgttcctcgaatatgtacagacaacgacaactggttctcgccgttatactctcttacaccacgaataacatactgggactcaaatcaccgatcacactcatctcgggctccaaatgccattcgaccccccactgctcacaatcgtaatgatgacataacgttgtgatcgcaagtatcctcctcatccgacgagcgtatatactcctattatgccataatcgtcgacctcatgctacatatcacc

SEQ ID NO: 19262 - DNA, 333 bp, Glycine max
  unsure (1)..(333): unsure at all n locations
agctttgatttacacagagggttttttgtacttatctttgatttacatattgaatttcatccaaatttttgacaagtcattgttacttccatgaatattgatattgtatcatgcttaattatatgcatttgcttattctgatcattgtgtgttgtgtgattatttcttccatgtaggtacatgattcctatttgttgtgagagtgaaatgatgggcagcagcaccaactgaggtgagtttatatttccttttttttgtctttatctttggtagtttgttatatattttttattttatatgnttgagttttaaatgtgtaaaaaaataaaatag

SEQ ID NO: 19263 - DNA, 454 bp, Glycine max
  unsure (1)..(454): unsure at all n locations
tatccggcctcctattaacagggctttcattgagaagtatctgtttttctctgccggngtagggtcaggtgccacagcagccagaggaggactagcagcaggtagctgcagatgcaccatcgccaccttcacggtggtcgccatctccagagtctgtctctgctcacctgtagaggttggaactctatatacggcatgtggctgaccagcaggcgaccaatcataatggttaggtacaactgaatgagagcttttacctgtacaccctgcattagcagagccaagatcccagcccttacgcatggcctactcctgagaagttcggagccacagtggcatggcctggagattggcccgattttcagacaagggcagggcctgtacggacctccacagatggagaccaagctcaagacgatgatgacatgggcgatgtgatggacttcttccttgg

SEQ ID NO: 19264 - DNA, 520 bp, Glycine max
agcttaatgacatgacacatttatttctgttttacattggcttttattattattattattattattattattattatgagtgctgagttacatcgttaaatgttaagtaaatatatgatttttatgtatataacttttatttaccaataacattaataagaaagcaaaagtaatacattataaataatatattttagaataaccttgattatcatataaattataattattttatcttacataacatttataagaaattttgttaatatatgaaaatcgatagatgaaaaataaaaaaattaaagaaaaatgaagtgaaaagttgtttcctaaattttctttcttttcattttctcttcagttaaaatttcaaacattttttctctcttttttcattttccttttccatcaaaccaaataaatgtcattcaaaatggatggaaaaaaaataatgaatttactgtaaagtcttcacgtttggtgtcgaaatcaattgaataataataataataataataat

SEQ ID NO: 19265 - DNA, 621 bp, Glycine max
  unsure (1)..(621): unsure at all n locations
tgtaaaccattctttgtcaaaatgcatctttgaatgatggattattgtggtgtatttttctgtgaagtggacgcaaaagtctccttaatttgtttttcattatttgttgggaaaagtttggctacaccaaactctattcaacacctataaaagaaaagagatagaagtgtatatatgatagttgatacagtatgatacaaaaaaaaaattagaaaaaaataatagatattgaagaaatgtatatgtaatatataaaaggtgtctacatcattcatcaatcttaacttttctttcaatcttcttgtaattttatccttagaaaaatgggttattttttaatntgttcccttgtaattttatatataatgatgttattaatgtaattgtcaaagtgatgcaatgatgttttaattatcttgtatggcattgtgttctttatcacaatcatttcatgtcaataaaacaagattttgcatatgtgaggaaaaatattaatatggctaaagtataatacataaataattggttacttccaacaacttggtaacactcataanntttttctatttatttcctctatacatcatatcattattatataatataagaccttaatctctt

SEQ ID NO: 19266 - DNA, 421 bp, Glycine max
agcttcagaggtataacctaggggttcctttatctatacccacgagaaaaaaaacgttgtacttgtcaagggtattcctgtttagatgttaaaaacactggagagcaaggcctggaaatgttggttggtggtagaacttattggaccatttatcaagaggagttaaccaaaagtatccgataatggaattgacttgaaatctttttggcactaaggagtccttaccagtcaagcgtcaaacgcatgattctcaaactcgagagaaaaaaaataaagggtttggttcctaaatggcaggtctaactaatctatccaatctttgttcttggcttaacttggaacccacttgaaccaaacaaaaattttttcgtgttcttgaagcaccacttatgcttgttttttttttttttttttttaattt

SEQ ID NO: 19267 - DNA, 389 bp, Glycine max
tcctaacccaaagcctgagccttgcatggccgagagacttgctatcttatcatgttacaaggaacatatcaaggaccccttgaagtgtgccagtcttgttaccggttttgctgattgcctgcgtatgtttggccgtttaggtgacaagtaagttatactgagaagtggtttaaaaggaaattcgtgtgtgcctaatgcaaataattactagtgaactacatactgacaaatactcatttgttacggccaattttgtgtaatctcattcccaacattaaactacaagctcagaataagtgacctattcgtcgtttggaatctgaacattttctgttattttcgtgccctaccggtcttgtcaagttggccaggttttatatacacacatg

SEQ ID NO: 19268 - DNA, 330 bp, Glycine max
  unsure (1)..(330): unsure at all n locations
agcttccacctatgtcagggagctctttttatcaccgccgnagttaagaaatggcggcaatacttgttaggccactctttcatcatattgacggatcacaagagtttgaaggagctaatgaattaggctgttcanactccagaacagcataaatatctcgcacgattactgngttttgattatgtaatccagtatcgagcagggaagagcaatatcgttgcagacgcattgtcccggtcaacacctgcctcattattcattatctcagtccctcacttcgtcttcctcgacgagctgcgaagggagttgcaggcaaatccagcgttcatg

SEQ ID NO: 19269 - DNA, 507 bp, Glycine max
  unsure (1)..(507): unsure at all n locations
tgtgctattccaagttcattaatcatacctttaagctagatttcttccttcactccttcagctagggccatgtactctgcttcagttgttgctctatcaaaaactgattgttgatttgttttccaattgattgctgtaccaaacaaagtaaacacatatcctgttaaagatttccttgtgtttacatttcctgcaaaatctgcatctacatagcctgtgattgctgcctcatgtgttgtcttcttgtaccttaatccaactttcaaagatccatttagataccttagtgtccacttcacagcttcctagtgtgcactgccaggatctcccatgaatctgcttataatacttacaacatgagccaagtcaggtctgctgcaaaccattccatacattatgcttccaacaccactggcatatnggtgttgatccattttagacctttcttcagcttgtttttgtgcttgaataacagatagttttgtatgatgaccaagtggtgtgcta

SEQ ID NO: 19270 - DNA, 422 bp, Glycine max
agcttataagaaacaaattgcctaaatcatttccttttatgcatgtgaattaggaatcatcaacaagaatcaagccaaggctattgtgcaaacaatcaatggggcaaaacacaccaaaagttatgatgatggatggctcgaaatctcacaaaggtaaacttatcactttcaaattgagctttcaaaactatcatgacatgtaaaggaaaaacaaggatttcaagtcacaaaatgtcaagagacttttatttttagaacaattacccattacttgaacatatcctataattcaaagacaaacatgcaaatttaacacaacaaaactaacaaaattaaactagaacccaacaaaattaaactaatttaacacaactatcaaaacccaaacccaagaaaacctccccccatacttaaacaacaca

SEQ ID NO: 19271 - DNA, 865 bp, Glycine max
ttgcttttcgaactctcaatctaagcttcagactattcttatgtagcagccctcattagagacaattgttttttttttagcttggatgatgccaaacttgaattgcctcttagtgcatttcgagactcttaaacgataatgctgttcataaacaaaccttgaaagcttttttacactgagagagtcatcaattgatgtcatcgtcattacttattatacttgtatattgatctattttcttaaggcaatgcatatgcgacgtcattttttgtgttgtggagtcctctatacatgccaccagcatacactatgttattgcaatactttacgcaatttcaactcctctcaccctgttggctcatatagcccttaagctatcactactcgtggctgcactccacctaactctctgtgaaaatggaatatctcagcgcctcaatcaatattcatctctttcacattacaatctaattatcccaggcttgcggtgtttttatttatttctccgcctgttcaatttaatctttctgatcttcccctaaataacgtgattgccttacgatctataacgttcttcattttgtcttaaagactttactatgataatcattaataaatcaatctacctgtctttcatttgtgtttcagctatgaatctcagcagtgttgtctaacatctcaaaaatgaggtcccttcttctacatcattttaaagcacttctcttttatccaatcatgctatactttttactgacatgctcggtacttgcctcttcgttgcttccaatcgtaatagtgatatgaatagctgtacgctgttcactactactttttatttttcctgccaatcacttacttgtgtacg

SEQ ID NO: 19272 - DNA, 536 bp, Glycine max
gccttttttgggttgttgaggaaaaaaggtgtgtgtagatgcaacaagttaagaagctgttaggatgtgtattgtgttttggaagccaagcaatggcatcatcatgtgtaagtgaatgtgcaatttgcttggaggatttaagaagggggaagagtgccttgttttctctgtttgggccacacttttcattgtgattgtataaagcattggttagaggaaaaaccccagtgcccaatttgccggcattatatgcatcatatcagtcattattgagtcccaacctagaagcatggaaatcttggagaaattaatttactattaagcagtgattgttggaacacatgctttggtgaaattatagtttaaaaatagactagttctatttttttttacaaaaaaaaaatagactaattttatgagaaaggttatttattacttttgcaaagttcccaccagtttattttccccggtggaatttttattaacttaaaatcaacgggtgctatttttcttttttttccaataatcttttattt

SEQ ID NO: 19273 - DNA, 133 bp, Glycine max
agaattctaagctttcctgtaaaactttcatgagaagcttatttgagaaagctattcttttgtagctagagccgtaccacacacacccctcggataactgaccttacctccttgagaagccaccttgagaaga

SEQ ID NO: 19274 - DNA, 274 bp, Glycine max
  unsure (1)..(274): unsure at all n locations
tgagaagctcgggttatgttgcacgtactaatgggtaccgcgagagatctacggcggcttgatccatgcgggcactaaagtgacggcatgggtatcttccttcttcctctntgccccagttgctccgatcctcctagcgttggtacttgtggaggagacataatcgaacttccctctcttcaagcccactttgattctttccccggcaaataccaagtccgcgaagctggagggaatgtaccccactaatttctcatagtaaaacaccggcaag

SEQ ID NO: 19275 - DNA, 425 bp, Glycine max
tgagatgaggaagtgtagaagggtgaaacttcctgctagtattcgttgacctcttagtggcacctagagatatgtcgcgggggtcatgagaccttggggacgtcacgtggggtgctattgcccaaaaccaagcttgaccaatcccgacccaacccgggcatagtcagtcagtgagaacctgtgatgtacctaaacaggcgagctcctggcagtcaacagataaaaggaacaaagaccacaaagcaaggaggcttgtggtggctggccaactgtgaactttgattgacatgtgggttatggcctctggtaatcgattaccaagggtgggtaatcgattacaaggcttaaaaatgaagacaggaggctaagatggtctctggtaatcgattaccacggggtgtaatcgattactacgctagaaaatg

SEQ ID NO: 19276 - DNA, 735 bp, Glycine max
  unsure (1)..(735): unsure at all n locations
naatggcatgtagccgcgacttaagcaccgcggctgcacctttagaaatggggggagcctttttttttttttctacgagcaaactgaagggtgggtgcccatggagaaatcaattctcaaagaatataaatttgaatgggggataagaatctaaaaaactcatccaaccagacagttgcgaccaaaaagaaaaaaggggatttctaatggatttcttaaaaagctctttaatgactttgccccttgcctctttttttaaagattacatcgtaccgttggctacgctatgcatgagaacgattctatttaaatcattaaggttgccaagaaattggatgtttcccatataggaattaaggggtagttttaataaatgaagccaaagctttcatggatataaaaaatttttttgttattaaacgggacnccttgcggtttttatatttcttaaaccaaaaccccaaggtagtttaaaggttatgaaaattaatttattaatccaaaggattttttctttggaacggatataagccattcttttttacatggtggggggcccccgaagacactccactccccatattatatggccaaaaaatggcctaccccaatagcacttaacctttaaaagcctataaatgttttataaaccaaaaaaaacacatttttatttttggtctccaccccgggttttattgaccttttttaagggagaggggggggggttaaaaaaag

SEQ ID NO: 19277 - DNA, 593 bp, Glycine max
gaaacacccatttggttccaattggcttgtgagaggcagattgaaggactaaatcccactcttcattccttttaaactgatttagttctttatgcatagccaacaagcaatgttcgtcatgcaatgcttcatctatgtttctaggttcaatttgaggaacaaattccatgttattgcataaaattctaagtctagatcaagtggatactctcttagatatttcacctatgatgttgtccaaggggaggtctcattgagttcctcattcctttgggaggtctttatgaggtgtggttgtgatttccttattttgttcaagatccttaaccttggtttcatcttcaagtgcaatgttcttatcctgaagacctatatcttcatcttccaaagcattttctttgaatagagagttatgttcatcacacacaacatgtatagattcttccacacataatgttcttctattaaacgctctatataccaccttgccttccaatgaataaccaagacaaaatgcctcatcagcttttgatcaaaatttcctagagattcttttccattgtttaaaacaaagcatttacattccaaaagcc

SEQ ID NO: 19278 - DNA, 818 bp, Glycine max
  unsure (1)..(818): unsure at all n locations
cgaaagcaaacacgcacgcacccaacaataacgcaacgcacaacccacaacactaccccaaccagcccgggtttgactcacgcccccccgganacaaaacgccgcagcagcacacagggcgcacaatttttacacacccccccaaaaaggggggccgaggcgcccaaacccgcgccaaaacaaaccacactaaaaaaaaaggccctcagcaccggcctccacggggacaaaaaaaaaaacaagagggggggcgctaaaagagaacacccttcctctaaagaagcggagaaaaaccacgaaacaacgcccgaggcacgccaacgccacgggcaaaaattaaagaacaacccccgagacgtgggtttgttccgaaatcaagccctaacattcctaggcaaaaaaagctggtgcggaaccacaagaccccaaagggagggcgaaaaaaggggggggaaaaaaaaaacccaaagcaagggaaaaggacacacccacggggccaaaagcaggccaaacaaaaaaaggagcacgaaaggcccaagggggcaccaaaaaaaaggagcgccccggaaagagaaacccccaaaaccccccgggtaacggaaacccggcaagagtaagaccaaaacaagggaaatgtcgggacccaccccccgccggggaaataaaggccaaaacagggccgaaaaaagaacacccaaaaaaggcggcgggaacccccccgggcgggacaaaacacccaaaaggaggccaaaaaaaaaaaagaaaggggggcgcgcaacggcgaccaacaatgcaaaccacaaaaaccaaccaccccc

SEQ ID NO: 19279 - DNA, 551 bp, Glycine max
tgtgtcgcactttcaactgccgaggctgaatatataattgtttgaagtttatgtactcaaagtctttggatgacgcaacaacttaaagactttggagttatcctcaatcacattcctcttaaatgtgacaacacaagtgctattaatctaacgaagaacccaattatgcattctagaaccaagcacacagaaattaggcatcatttcctaagagatcatgtgtctaaaggtgactgttgcattgagttcattgatagtgaacatcaattagtagacatcattgatagtgaactaggcatattcgatgcatctagcatagaatgacatcttatttgcataagggtatgtttcactttgtcattcatatcattagtctttgtttggtatgtgttttagcttagtgattcatgtgcattcttagtttggttgaatatcacatgtttttcttagtcattttgtaatttcttgctggtataattgattacctggtcatttcaatcgaatactatatgatttctggttggtaagttgttcaaaactttttgttttaa

SEQ ID NO: 19280 - DNA, 446 bp, Glycine max
agcttttcattatttaggactaacctgattttagttagattgatggaagatgatattttttctaaaacgcaaacatcattttaatgttaggaattttactacacttgttaggttatttttttttatttttatcttaattttaaaaatcaatttcatctttttaattaaaaaacagataaaatctttcataatatttcctctctaattatttcttttattatcttctctattttcttttaaaaaaaggcctatatttatcactattattatcaccacctccatattaatattttctattccaccaacaccagcactatgttgtcgcttcaccgttgaaaaaaaaacctatttcaccatcttttctcccttattatatctctcctttatcttttattttttttaaaataaataacctcgatgcttttggcataatttatcgacatgat

SEQ ID NO: 19281 - DNA, 457 bp, Glycine max
gcttgatacattgttaaccgattgataagtgtatcaattttattattaataaaaaagattaaaacaaaaaatcgagtgtcaaatccataaggacacattactaaatacttaatttgtaagtaagagaagaagtagaagagaaaaagaattgtaagtataaaatttaaggataaaagggaaaagaaaaaaataaccagaaaaataaataataatgtaaatgcaaaagatgaaggcggattatgataatgttgggggtctaactatccttgatgcaatattaatatttttttctattaaatatttttccaattttcaccaacatccactaatatgctcaagatccctcatgatgaagaacaataattatgttttctttctctcaaattcctttgccaagattttatcatagaccacattaagtgtaaagatgcatgccaagacataacaaagtcacttt

SEQ ID NO: 19282 - DNA, 251 bp, Glycine max
cagcttagacagattagaagtgatgaaaacttttgttgtacctacttgtaaagaaatcaaatgtagcagtggtataataattacatatgcaccgttgcgggtgttgttccaactcaaaatgaagcacaaagcatttgcatccttctcttgactttaaatcttggaattttcctattgagcctcaattactaaccattaggtgaatgtgaaatagtgaagttttttttttggtgtgattaatgaaacaatga

SEQ ID NO: 19283 - DNA, 459 bp, Glycine max
  unsure (1)..(459): unsure at all n locations
ttacaattataaatttatgatttacttgatttctgatgtgaccatattaatcttgtttccaggggaagccaatggacaggagcctatgtcatggaatttcgagatctaattaatttgcctcaaatgggagttggaaaccaggaagaagaagaagcacgattttcattcttgaagggtggatacgttgaagattttgaanatcaaggtagtttctactttctattccttgcttctatgcttgcaactgaatgattactttaattagggattttaaaaaaataattatattcgtaattctgagataatagaataattagtgaagatgttattgtcaatgacattggacaatctgcataaaaggaaagttcccttgaagagattctgtcaattgtaattccaccatattagaacatctaaactggcatgagattgtagctctttcatggaattaaaaaattt

SEQ ID NO: 19284 - DNA, 452 bp, Glycine max
agcttagcagattatcagcatctttgttattgaaatttccttgttggggctcagtccaataccacttcaactcattttcaaacacagcccagttaaaatgcttcacaacgaagttaacaaagtcctcattgtcaatgttcattctactgatgcatgttccaattgggaaatcattctgtgtttgtataacttttaccgaggtgttagcatagctgccagagtccagtccagagaatttcaggataacatcacgtttacgaatctgcagtgcagcaagtacgtataaattaaaatatatataaaaataatgcaaatcatctcatattctatcaatgaaaaatggatcatgtaatattaagaataggcacagaagtcttgaacatacttaacttcatgcaacattatttactggcatgaaaaatttgttttgtcacaaaaaaaaatatgccttt

SEQ ID NO: 19285 - DNA, 426 bp, Glycine max
tcaagaaatttgggaatacttcagttgcaaataactcattgattaacattcttgaagctgcatcaggagaacaaagtcaatcttggtctcaacaacaatgccagcaagttcttgccctctttcaagctcaaatggcacagctgcctggtgcctctcagcaagactcttctgacattgcaggtattgaaactataggcatgtcaaactctactttaaattcccttttccaagaacctaatgcttggattgttgattttggagcaacaactcacattacttgctttcctgaatttctctttaacttcaaattcttgaaaaacaagtttgtgcttctaccaaatggaattagagttcaagtggttgaaactggttctgttaagataaattctcgcattgttttgcataatgtcctttatattccctctt

SEQ ID NO: 19286 - DNA, 364 bp, Glycine max
agcttcaaggatttcaaattccgcctgtctaacaataaattaggttttattgtaagtaaataacaaatttagactattaaagaaaatcaatgaagaaaactcaaatacctgaatatcctcccatatcaaatccttctgagcagtagggacttccttccaggtgtcatatgtcacgtcaaccttatcacgagtgacaatccccaaatatgttcttaatttcttcttgtggggaccgtcggccttgccagtagcaggattgacgttgaccacaggtctttctgccctaggtggtctagtggccaatgatcatagccgtgtcgccttgcgtgtccgcttcaacgtagatggagacgctgatgcgtct

SEQ ID NO: 19287 - DNA, 438 bp, Glycine max
agagaatagcaactcggaagcatgagtcgaaattgtatatttatggatttagagttggcgatcttgtatggagaatgagaggagaagcacacaaggaccatgctagaggaaaaattactccaaactgggaaggaccctttagaatcactgctaaaatgcaaaatagagcataccgacttaaaaagcttgttggaaaggaaattccgaggacctggaaagcaacacacttgaacgatatgtaacatccaaaaaattcaattatagtaattttgaggtattactattagaaataatagtaatgatagcttagcaaggaagttattaaattaatggagttattatagattacgaataaagaaaaaatgaggaaaaaaaactcatttttagtaagaattagagaaagtcaacaaaagtcaacaaggtcaaccatagactact

SEQ ID NO: 19288 - DNA, 438 bp, Glycine max
  unsure (1)..(438): unsure at all n locations
agcttgcctcaaagaggtcctggatggattatgcggccaaaggaactagttctcctcctgagtatgacagtcaccgctttaggagcactgtacaccagcagcgctttgaggccatcaagggatggtcatttctccgggagcgacgcgtccagctcagggacgatgagtataccgatttccaggaagaaataggtcgccggtggtgggcatcactggttacccccatggccaagttcgatccagaaatagtcctcgaattttatgccaatgcttggccaacagaggagggcgtgcgtgacatgaggtcctgngtgaggggtcagtggatcccgtttgatgcagatgctattggccagctcctgggatatccgttagtgctggaagagggccaagagtgcgagtatggccagaggaggaaccggtctgatgggttcgatg

SEQ ID NO: 19289 - DNA, 352 bp, Glycine max
  unsure (1)..(352): unsure at all n locations
cgagatgaggaagtgttgaaaggagaaactaccngtttttattttttgaccacagagtggtacctggagatatgtcgcgggggtcaggagaccttggggacgtcacgtggggtgctattgcccaaaaccaaacttgaccaatcccgacccaacccgggcatagtcgctcagtgagaacctgtgatgtacctaaacaagcgagctcctggcagtcaacagataaaaagaacaaagaccacaaagcaaagaggcttgtggtggctggccagctgtgaattttgtgtgatatatgggttgaggcctcctgtaatcgattaccaaaggtgggtaatcgattacaaagcttaaaaat

SEQ ID NO: 19290 - DNA, 244 bp, Glycine max
agcttcaaggtcaatggccactggctgtttccattccttcttagtggatgtagtggtggaagaaacctccttacttcaccctacttcttttctgccatgacttggggaggtttcttttttctgtctccttctttacttttattgcccttgtccaaaatttattgattgctttgattgttcctgatcttatgattgtgctacattgaggacaatgtgttgtttaagtgggaggggggagaagatt

SEQ ID NO: 19291 - DNA, 473 bp, Glycine max
cagggtaccatcgaaagtggctattttcgcttggaggttactataggacagattgccaaccagaggtaatttgaagaagaaaagggttgaattgcaagaatatttgtgtcctttttgcagatcggcagaagagagtgcaagtcatttattctttcaatgcagcaaaattatccctttgtggtgggaagcggtggcgtgggtgaatctggtgggggtattcccgcatcaaactgagacagcattttcttcagcatttctatggagtctatgacggagtgcacgcgcacagatggcagtcgtggtggttagcactgacttatacaatttggaagcatagaaatagcatcattttcttcaatggttgtttcaatgctcataatataatggacgaaacagtgtttttgctatggacatggctcagaaaccttaaaaaaaattttacatctcattttaattcagggtcttcaaatatc

SEQ ID NO: 19292 - DNA, 389 bp, Glycine max
agctttatgtttttccctcccgtttatgtaacctttctcaaggtgaaccacgtaatcatgtgtgcgttctttctcattctctttctctttcaattctgctgcaatttggggtgtatgacatttctagtctgctgcattttttgctgctgttcttgcttgttcttcatcacttccataacaaactggtatcaagagctctagttgtgatcaagggaattcaagattctcgtctgaatacaaaggtcaagctgtaagagtcttgtttctggttttcgctgcttctttgtgatcaagaacattcaagaaatcatgtcaaacacaatcaggattgagaaattcaatggaaaaaacaacttcaatctgtggcgcatcaagatgtgtgcttttgt

SEQ ID NO: 19293 - DNA, 550 bp, Glycine max
  unsure (1)..(550): unsure at all n locations
tatgctgtagcaaataagggttcagtatgtttctatagaaatgactcacatatagataagacaaaaacatcaaattttccaatcataggaacctatgaactagaatggaataaacaagtgaataagccaagttcaatgcatacaaactagacaattcgttattggcataaataatcattccctctggctaacaaaatttgttgctagtcattgcattacttacttttctagtattgctccaataacaagcttcctgatataaactaggcattaatcttcaactaataacttaagcttctagctgagttggtttggtcctttgatgatttttgtgtatattgaccaactgccctatcttttacttgtttacaaatatatatttgatgttggcatgcacatttatttaatgtaattcttttgatatgtgtagatagagaaaggtgcatgctacatattgttaaaaattntagaagcccagtaatactgcatgagaaggatgcanngtctaaaattctaaagaaagggaatgttaatttttcatgataacatc

SEQ ID NO: 19294 - DNA, 941 bp, Glycine max
gaaacaatatatatcgtatccacacctcatccttagcctcttccatccttccttaaccagccaggaaattggacccctaaccccgggaccttaagccactgaggcagcaacttttggaaagcacccaacaattttgctactgaaattaaaatgttcaaacataaaaaattgaaaattataatcccactacgcctctcaaacaaccaaaataaaactaacagtggtcctaatgccaaaaaaattaaacctccccgcccctcactggggcctggtgcttcacttaacacacccatgcctgattgatggcgtgtagcctccctcaagaatcaagggcacacatggtgggagatggttgaaaggggtcttaagctggaaaagccctccctccccctggccgctgctggtgggtggcgggcctccatcatatcccacggctccccggggctcgtgagacgggccccacccccctctcccgacagaataaaaaggctgggctcccttgggcaacagccacctatagccccaaaccccctcccatgcgccaataaagggaggcgccagcccccacaccctcgaaagcctcttcattgataaaaggcaccgccccctcatgggtgcccctcgagccctggaagagaaaccctctcccgggagcctaaaatataacctccttctcttacccttctctacaacaggatcctccgccccccgccaccttgcatcgaggccgccaaacacaacccccctcggcatcctctcccttggctaaacaaaacaggacggcacggtgtcgcaaaacaaatcagtctcgctcgctatctccctcaccctctagatcaactatacacccagtctaccagttcctaaaacctccacgattctacgacccctccgcgcgtcttcctgcagaaccatcccacctactgaacagtaccaatccg

SEQ ID NO: 19295 - DNA, 498 bp, Glycine max
  unsure (1)..(498): unsure at all n locations
tggggnnntnnnnatctctcctttgagtgcttctgantctaagctagaatctcantacacttntgcccaccatgagtcctctaatatatgtatctgaactcttgtctttcttgttactggcttctcgggctctagcgatctcttactactcgtgcacttcttctcacactgatctaagagtgcagctcctgctattgcttggccatctcctggagagaatccttcaagacaccataggaacatcttgggcttgagcagcttggccaagactatcacctgtctcatctttgctgctccatctcttaaatcttgatcctttgaattctgcgccatggtgggtgatggtgtcctggtcaccctctttacaggctctgatgtcaaatggtctgtccacatgctagtctcactcaacgagttgccattcacactactcttgtttggctgtccccttactacacgcagatgacttcaaaacgatgcctatttcccataactccg

SEQ ID NO: 19296 - DNA, 321 bp, Glycine max
agcttgccacccagctcgcccaggcgagctatgttgcttcctccagaagcaaccgccttctggaaggcgcaagtgggcctggttgctatttgaacccccatttttactaagtacacccctacctttttttggtgaattcttttccgtaacgttacgaaactttacgaatttcgtaacgatgcttgttttctttccgtaatgttacgaaaccttatggactacgtaaacaacccctttttggttttcgggatgtcacggaactttatggattgcctaacgatgggtgccaagtaccttcaagtggtcaaacgaaagttgcat

SEQ ID NO: 19297 - DNA, 728 bp, Glycine max
tttctgtctttcaccctttacaacattcattgtgcgggctgaactctttgagaattcacattcccacttctattaaggctgcacgcaaacttgtaatatttactggaccactttacttctgctttttggttgtcccctttggagccaagggaccagacaaccaaccaaaaatttctaattgggctcacacatgaactaacttttggattcttcttaagatggctaaggcatgatccaacgtctcaatttgtctttgtttaagggaagtaacaaataggctcatccttgagtccttttcaaaatactaaagggtttcgaaatttccctcttcataaatccttctaaacgcccagtatttttcacctttattgggaaaacaaatcaacacctctcctggaatcaaaagctatactgcaaaaaccaacaacctttaaaggcccttctagaaccttccctatacaatatgagggagggaatggaccttcctgcaaatacaagggttatttgggctttttgaacaccctttacaaacaaaagggggggttggggaatccttccatttcttttcaaatgaaaccccacaccgttcccccaaaggggggaggagggtccattagcacacctggtcgcgtacgaaaaaaaagaaaaacctcttttttatcttggtttaaagtaaacacacttctcttcattctcaaaataaatttttgggatagtgattcttcacg

SEQ ID NO: 19298 - DNA, 69 bp, Glycine max
tctctatgtctccgtccgcacagaatgcgcatgtcgtcaatacatgacatcctctcgtcgattcaactc

SEQ ID NO: 19299 - DNA, 431 bp, Glycine max
agcttgtagaaagtgtctttgataaggtgaacatcaagatctttatcccaaccaattcttactcgttcaccaatgttcaagcaccatgttgcacttgcaacggtaaaaatgtcttcaatcacctatactctaaccaccatgttagtgatatgatccttgaagaagtcaacatcaagatctttatctcaacccattcttactcatttaccgatattcaagcatcacgttcttgcgatggtagcaatttctacaatcacctatactccagccactatgtcaatgatacgatccttctctatcaatacatttctctaaaaatctttgaaacgttcaacaataataactttgtccttgttgaagaagttaacgatgtcataaaaaacaaagttatttcttaatgcaatccttatgtctttcaacatgtttatgtt

SEQ ID NO: 19300 - DNA, 172 bp, Glycine max
cttctaaatagtggatctctgctctatatctcggctcttctatgtatggttcctagatgaactactatcattttacatccttatccattaactggaattaaccattctttcccattatattggagaatttatgctgaactgaactgcagaacacactccgggggggggggga

SEQ ID NO: 19301 - DNA, 437 bp, Glycine max
agcttctataggttcttccaagtattgtttctaaaagccttcaggcttcatccaactattctttcaaaaagcctctccaaacttcactcacccaacacttgtgttcactttgaactttagaagcaataatcccctactcactcttccgagcttttcctactaacccaaggggacggatgatcattgcaactttttgggattcctcctgttaaggctctttgtatgaaggtgtttatagatattcctacaaatttggctctgtatggctccacctagagtgttttttataagatttttctaatatggttattttggatagactattttatgaccttactatctcttaatggcactccttccttggaagttgctcaattgaatttgcatccatagatatagaagctatcaatttatgggcgttggaaggggaaatttga

SEQ ID NO: 19302 - DNA, 162 bp, Glycine max
atcccatgtttactaaagtgaacaaaaatcggtgcgaattaaaactccgacatctatcacgggtggaatggatgaatgcatgaagaaatgcatataacacatatgcgaattatgaataccggagctcgagaaattgtctccttcttagaatacaacatcttg

SEQ ID NO: 19303 - DNA, 263 bp, Glycine max
  unsure (1)..(263): unsure at all n locations
agctttttgtacaagcacacaaacaactatgctactgaaattaaaatgttgaaatataaaagttgaaatttaaatgacattaagcataaaataactaaaataaaactaaagtgttcataatgcaaaaaatttaaacgtcctgctcctcctgtggctggtctttattaagatccaatgctgatgatggctgagtctcctcaggagtaagtgcagatggtggagatggttgaggggtctgagctgaaatgctctcctnctctgct

SEQ ID NO: 19304 - DNA, 256 bp, Glycine max
cagctttaactaactcagaataaatatgctatttcaaagacatgaaaggaatgagatttgagttctaaaatgcatgaatgcattcaaaactgtcattggaaaacaaatccatgtcaatgaattttggatcgataatggaacgagaaaagaaaatatttgtgtaccgtattcgttgttcttttgatgattcacccatttgagggagttatttgaaatttcaattggttgaagtgaaagagaatgaaaaaagatgaag

SEQ ID NO: 19305 - DNA, 655 bp, Glycine max
  unsure (1)..(655): unsure at all n locations
tgttntcnnnnntatgcaccaatgacnacgttgatggcccttgatctcagctgagttgccgagtatcatcctatagaagtgtcaagtattggcaatcataattgccattctctgggatatanggttgaaccaagcatcatgctttacaanaagggtcatcaagtcaagttgtaatatggaagtaaccgtcctgcanaatgtggcaaaagatgaattgagtcacatcactgcttcgtctactgccgaacatanttaagaattgagatgtccctcgtactctcagtctcacccttgacgaagatgtcatggaccatgtttgaaatctaatttgattaaccccatattctgcgtataaatcccaatactctgactgtcatcattcgcatgcataccatgctttattggntgcattgtcattgcagtctttcttgagaataaataaattaaatgacctatctacagaaaatgaacgctttatgcgccctaccaactcgtgcttagcttatgtatggtgaacagagaagtgctaatatatgatgccataatgatgcttcacagtatcgcacatgtaatgcttatgcggatatatatgaacattggtgatgccctcacctgcctaggaccatctcatctgctacaatatttcactcattcn

SEQ ID NO: 19306 - DNA, 596 bp, Glycine max
agctttttggttactggtagtctggtatatctttcttgtcaatggggttaagctgcattggactattgcttgtgggtaaagcatccacactaacagggaagtttacgtgaatcagtgtgtggttgggcaacaactcttgggggttgtacaaatggttctaattaatgtgtctgcttctatcaacttaattaggatggttgaatattaaataaggtggttcaccagttccgtggttctttggtttttttaatttttatagaaagccaaatatatgcctagcaggtccaccacgtagggactctatataggctaactcaacaagggatttcccagattaatgagtgaataaataatgggcaaaaagtgattaccttttcatccaagctgacaaaaaaatgaaagggtggcttatataataataatttggttggtttggataagatcatgattgaatgggccattgcaaaatcaaacatcaaaaatgctcccttttaaaacttggcagggttaaaaaaaaaataactctttcccctttttttatttaggaaaaaccccccaattgattccattccccctttttttttttaaaagggggg

SEQ ID NO: 19307 - DNA, 355 bp, Glycine max
cagctacatccactgagtgctatgtctgatcatatattagctatgtttttctgacttaatttacaattattcacttttattgccaaatggataattataaaataaaaatgatgtaattgcaaaataaatcaattgtagaataacaaaaagtaaaataaatcctaataattgtggataatataaatcaaagtgagtaaaattataaccttcatatagcttgatgaccacggcataactccacgaagcatgatgcaaaccgtcaaaaacaacaacgcactgactcaatgaccgtgtgcccacgaaaaatatcatctatatactataatgatatattctacattatctaaaacagtta

SEQ ID NO: 19308 - DNA, 435 bp, Glycine max
  unsure (1)..(435): unsure at all n locations
agcttgttagaacaatcctcacatgatactttattggcacagaataagttgctttctaagaaacttgagattttaacagaaacactttgtaagttgccaactaaattgtctattggtcaaccttcgcattcttctgttttgcaggttacaatttgtaccatctatggtgaggctcatgaaacaggccaatgtattcccattgaagaaaacactctagaaattcattatatgggaaataaaaaatgacaagggtatactcaaggaggatttttaggctttcagcanggttcttattatcaacaaggacaatggaagtcgctccctagttatcagttcaacaaagactagggtggaccttcgaacaggccaatccaacaaaggcctaacatatttcaaatgactactaagctggacgagactttgacttaatttatg

SEQ ID NO: 19309 - DNA, 271 bp, Glycine max
  unsure (1)..(271): unsure at all n locations
gactacctganntaatccttgtagccctntgagccttgttccctntccttgttttgaagctcactacaagccttatagtgaaaaccatgatatttaccatatcctaaggaagtttggagcttttggaattgtttgggannataagtgtggngggttgtntgtttcattggacaactngtnntgttgctatgcttcatgatgtattttgggccatacttgatgtacattgtatatttggttaaatgtggacatgctgaatgaaatgttgttc

SEQ ID NO: 19310 - DNA, 344 bp, Glycine max
agcttaggttctcataagaaatcctttgtatagcaatggagcggcatccttccaagtttcacttttaaaggggagcacctatgacaattaaagcgttaaaatgaaagttcttcttggagcacacaacgcttgggaaatggttgaaaaatgctataaggagctcgaagacgagacttcactatcccaagcacaaaaggaaacctttacaatgtgttgggatgaatacttttcttttggaaattcattataaataagatatgtgaattgttgttatattaaatctaaggttaggattatgatttaaggagaaattaaataccctgaaattttagtaaaccaaaatt

SEQ ID NO: 19311 - DNA, 362 bp, Glycine max
  unsure (1)..(362): unsure at all n locations
agatgatagattaatatgaacaaatactagattctctgcccaatgaggtgtcatctngtttctnttgatagaattaatgaaagagtaaatactctagtttctttcaaagcatgatgatgaacaaggttgccctaataacttaagagcaatatnntgaagtgttggtgcatgagcaccatgatatagccaccaagaacttgcttccattagacctctatccttaaagagtaatatcatcaaagccttctattcaccagaaatgtntgcaactctacatttcacttgccttctttgattatcatcatcagaatacctttngaagcatgtcaatctctcacgagtaagttctccatcttggtgtg

SEQ ID NO: 19312 - DNA, 322 bp, Glycine max
agcttcaacaactatggctattgctactcccactctctctctccatttcgccaaattccccattcgtcaaacggattcatcttctccaatacgccatcgcagcccttctggccgacggttgaatctctattaccctcctagttttcaaaggttactttttttttgtttggtcttggttaaatgaaattgaaatttcgaatttggattctgagttaaatgttaacggttgtttgtttgctatctccctttggtttattgggtacagatatgcgtgttggcactgaagtgcatttggatcatgttgccccggatgggggatggg

SEQ ID NO: 19313 - DNA, 660 bp, Glycine max
  unsure (1)..(660): unsure at all n locations
tggggtcntcnnnnnnnatgctacgacgttgatgaccnnagtagactcacgttgntangtnacnctatngantactcaagccttcatcaagacttnccttcacacaaaccacgtntctctagcncatgcatttgcctccatgaantacanaatagacttcattctggagaacctcgcatccgtcaccactactccttcttcaccataatcctcacccacaccatgttcgcctctttccncacctcatagaccacacataaaacttgatgtcccgtggtttgatgttaaagacncacagggcgtagattttaaaatctccctagtttttactaccacgcatctcggaaaatgagtgttaactgttgcttcatttacatggaaggtcagctctgtgctgtaccaatggatgtaggaatgacatgttacatctangcggcatgtgcangcctcagtcatattgctcatcttctacaaacccatgggcctgtcagctcacaaaatgttatcacgatatcttcgattaagcgttgcgacacatagggttagcccccgtcctctactgttatttggctacttcaactcttgggggcatcatgcacctctcttccagggagcttgcacacagaacaataatatccactgctacttcacattcacccg

SEQ ID NO: 19314 - DNA, 60 bp, Glycine max
agcttcttgcttgatcttacattttttagccaaggattcaaaacatacttcctaacaaaa

SEQ ID NO: 19315 - DNA, 461 bp, Glycine max
  unsure (1)..(461): unsure at all n locations
gaacgcacatagacatagtagtctattccagatagtagcacagtgcagtaagctctaaataaagctatatnggtgtagcagatcacagatganaccagattcatacagtcagcacattataaccattggatgaaagtcagacggctcatatctagatgcatgtngtaagtccaatntaagagctaagatatgagccatccgatctntatcccacgattctgagatgctgactgtgtgaatccatgaagaaaatgactggcaggaggaatcaatcacagagtggctgctatagcaaatacaatgcatataaattctatacacacccgaatatgctagaaccatctctttcaatcattcttactattggtgagcgatggcaaaagtcacaaaagtgcacaggtgaaacatgtctacaaataacatctcactcaaaagtacatgtatagtcaacagtcaagacc

SEQ ID NO: 19316 - DNA, 283 bp, Glycine max
gcatgcaagcttgcacgacaagacaatgtggatgtttgttttttccaagcccttaaaaaatgcccttgatgggtaaataggttaggcttaagccgtatacatttactgaggcctagcatagttagctagactgaaactatatttacccctaatatgaggaattttactcttagattaattgagcgcgtcatgtcctactattatgaagattaaacaaactcggtaatagcaccgttgtttttctgtataaaactccaaattgcatgtttataatcaaaacaaa

SEQ ID NO: 19317 - DNA, 585 bp, Glycine max
  unsure (1)..(585): unsure at all n locations
aggggcncnnnaatccccttgtgccccaatactacctgtagtaccatnanactatgcttcgcgcacggcgatctcaaatttgcacagattcatagtatattaaaagnataacaaatcaatggatagctgaactaattctatgaagattaccaacattaccacattgccgcaattcaaataacatacaaatggcannnncgcacaatacgcacatcaagatttgtaagatataatatacatcttcatcttgtgaattcatattccgatatcattgatcagatacatagccgcataaaaacaattaatctctgttgtcttgacactatctttcttcgaacacttatatgttcttatcacaagaaacatactattacctgatattatatacgatattcacatcacatgaagaagtgtctatcatatctaggactattaacatgaatagataatatgccgagactaactctctattctcattattgtaatacacacagtctacngattgcccacatacattcacgcttaacttaaacactatgtcattatcttaatactctatccttctatgtataaatataacatcan

SEQ ID NO: 19318 - DNA, 378 bp, Glycine max
agcttctgggatagtggtagtttttaacagttactataatatttacaaattaaaaattctttgcaaagaatttcaaaatttttgcactcgatttctctcacatttttgtgaaacttaaaattgattaaatgatttttttattctatgaattttgattaatataggttaaaatcaaatgatttcaatgaaacatgtgtggaagcaatgcctttcaaggttattttgatgatgccaaagaatcaagagtttaaccaagtttccagcaaagattcaagaatcaagtttcaagtttcaagaatcaagtttcgagaataatccagatcaagattcaagagtcaaagattcaagaatcaagaggacgacttattctagataagt

SEQ ID NO: 19319 - DNA, 188 bp, Glycine max
acttcatgctctgtatctgtgctgaccgtcttcttttacactcgctaaaaactgttccttctagattggcttgatgtggaaatggggttgtatgatctgttgatcataagttggccctctgtcttgtttgaattgctctataatggttatgttagtaaaaaatcataaaaaactattatgattttacg

SEQ ID NO: 19320 - DNA, 359 bp, Glycine max
agcttgtagccattagaagagaatgagcatgttattggaagtatgactgaaaatgttagtcagtttgtcagattgattgtgaaggaatgcattaaccgcatcccggtgagagtgtgatccttaaattttgagagaaacgactatcatttaatactgatttttgtgtgaatctatgaagtatggattgaatgcatgaaattgaggatgatgaaggccatgttttattgttatagccgcttagccaaaaagctgaccatgtgttggaatgaattatcccttgtacctaatttgagctgaatgaattattgattgattgaaccctgatcctatacagtgttatctcctgctaccttgacttc

SEQ ID NO: 19321 - DNA, 244 bp, Glycine max
gatcttttcatacgtacgaacttacaatttgtatgtgctgtttcttcgaatgtacaaactacgatacgtatatccttttgcttcgacgtacgacttatgatgacactcactcttatttcgctgtacgaactacgatggctcatgcttttgactcgcttacaactacaatgctacatgtgcagtctcgatgtaataggcgatcacacgtgcccgcaataggtacacgccttatacacttgtttat

SEQ ID NO: 19322 - DNA, 349 bp, Glycine max
agcttattcggagggaggtctgacgttccatggggagttcccggcagtggcgagttgcgtcaccgtcatgtggacgttgatgtgcttgttgggctcggggaggtcgagaatcgcgttgttaaagatgacaaaggcctcctccagatcgctgaagatggagaatagcgagtggaggccatcagtggtggtgtcctatccaaggccgtggaagaagagcttgcgctgggagacattgtggtccgtgacgatgcgcacaacaacaaggacgttgaggtggcccaccaccgctttctaatagatgttgaagaattggttaggggttatgaccttgttttcctggcgggcttct

SEQ ID NO: 19323 - DNA, 133 bp, Glycine max
  unsure (1)..(133): unsure at all n locations
taccttggactatgagccaagtgttaaagcacttggtttcttaggactagatgctgatgcagtatcgttcaatgaatgatactntagctatcatctagagtatttctactcatgcattctaattgtatctcat

SEQ ID NO: 19324 - DNA, 349 bp, Glycine max
agctttatataaacttgagcaaacccattttggtcaaacataatttccttcaatatgaatttgatttgaacttaattacattcttactaaattaggctaaatatgaggttgtacaaaaccactcaaattaagaagtatgaatcattaactatacatgaaataatggtatatttaagctcaagtatgatgtttgataggggtgttcataagacaaccttaactactttgccaaaaactttataggatcaattttgtgaacccaaatccaacccaaccaaaacccaaaaacatttggaatgagatcggatcaacccaatttgttggcataatatggtaatcttaacatata

SEQ ID NO: 19325 - DNA, 319 bp, Glycine max
atatctatactgtttgaaaaaccataatgtgacaatgatgatatcaaatgatgatatcataatgaaagaattatgtatacaatatcaataaattgaacaagctagttggacaaataaataaagcaaattgttaaagcaatatattaaatcaagttcttacaatataaataacatacagctcaatgagttttgagaataacaatatgcctgataaaaacactacctactgcaaatacaaatatgactaatatacaaactaccgagataagacttttacgataaacaaaatctatatggcaaaaaagaatcagcagggggt

SEQ ID NO: 19326 - DNA, 382 bp, Glycine max
  unsure (1)..(382): unsure at all n locations
agcttgtagaaaatcttgaagatgttttgtcttttacatgcccaactcctttgagtggcgtttgtactggttgttatattgaatgttgcatcttttgtgcatcatgcatcatcatgaataagtgagaagaaaattttctaagttagaaaagtttcttcataaggcaaaactctctgttataatcaattacgcttangatgtttaattatccacggtaagtgcactgatgattccatgtctcatacttcatattgcatggaaatagtataaactttgtcagcaagtatttgtaatttttcatgaggcaaaatacttgtaccttggggcatgtcattttgtttttaactcccttgtgacttangctgatcaccattgggggggg

SEQ ID NO: 19327 - DNA, 604 bp, Glycine max
  unsure (1)..(604): unsure at all n locations
aggggcncnnnnntgtgcacgtgtgagcacgctgtagtgaccttagatctcagctntcgattcatcttgtcnnctggtggtccacatgtgttcgtgcattttattctcgtntgttacttttatccccctcttgcgtgttaagccatttacttaagtatttctcgctaacttaaaataaatcaattccaccgaaccgttgattgtattatccgtaacttcggtaanatgaattcgaccgtcggtcgtgccgaaccacgttggaaatcaaaagaggtagaaataatataataattcaaaaacatctctttagtaaaatanagcgggagaataatcggaccgtttctctttgggattctcattctaatcgattgatnataactaaggaactaggctanataactcgctagtcactcgnccaaaatagctntgagtngcattcattctactagtaaatgtattttaggtcacgctaaatgcacactagtaaagatcctgtacagactctagctgatctattgagtctagacaagccgcttgcacaccagaatctatgtcatgctacgtcttcctcaaacaaatgtatgcaagctacgtctcttaaatt

SEQ ID NO: 19328 - DNA, 184 bp, Glycine max
gaggaagtgttgaacggtttaacttcttgcttcaaatgaagaccacagagcggtacctggagatatgtttggggggtcatgataccttggggacgtgaagcggggtgctattgcccaaaaccaagcttgaccaatcccgaaccaacccgggcataaaatgacaaggagaacctgtgatgtacct

SEQ ID NO: 19329 - DNA, 93 bp, Glycine max
tacagcgtgttgactgatgcctaagtgggactaactgttatcactatcagcatgctcaaagatgtatcaactctacacgcaacgacagctcat

SEQ ID NO: 19330 - DNA, 243 bp, Glycine max
aacgaaattattatttggccatcaagctccacccacttttttccagaaaaggttccattggcccttccgtcaaattcgactctgaccctgtcagtcttttttatttttatcgcttcttcttttgttttaatacaactgttctaaatattggaaaatgtattttttttctaaagctttccctttgtattcaaagccctcgtgattgggtgtcttattatctattctaccacttgctaactgaaa

SEQ ID NO: 19331 - DNA, 712 bp, Glycine max
  unsure (1)..(712): unsure at all n locations
ccagtgacaccttattgacgcgcttnangtacacttngatactcaagctggatatngtanatgacgagggcnnctcgtggtgaccatgaccatngtcngaagttgtgacgttntgngaccgtgcanactgatcacgaccctcttggagttgaccagagttgtggtcaatgtaccacngcccgtatcaagtgagaattacattatattttcatgaaagatgtgtattttcaacttttttcgcttgattgagtggtgtatttctacaanggtaaaactaatgttcanacgtgagttctgccaagaaaatacatgatataacacgaaaactcataanatatcactcanattatggtntatcaactgccattatntnntctattntctgtattttttggtgcatacanatatgagtataggctgattgccttngatgatataatcatgctntntnctntanagtgtcattcttcntgctntgcaactagatcatatttttatatattctctttcctgtaccttgctacattgtaccacatgcattcanaatatcaattncataacggtcttgattatcatctcttgaggcggcatttatacatcttgctgaaatggataccanacgctctcatacttgtcgtcgaattttgccaatgctttcactaaaagcanttantacgttgttgtatctgttgtaggaaatcatgccaatact

SEQ ID NO: 19332 - DNA, 1039 bp, Glycine max
  unsure (1)..(1039): unsure at all n locations
tttaagagaaggagagagtncncttntnttctnttnntnnctctccctccccttncttctcttctctggcggtccgttggnntactagcncntctttccnccncncacaggggcccnnnnnnnnnnnttgaggtcttggtaagtaaccgngcgnnnnnnnnnnagangnngccgggagggatgggaggattataagcgagagtgaaaagcgtttttaatgttttaaagttanagaaagtaagaaaaacttaagaggcgtatttagcgccgtagctaaaaataaagattcgcagcgggtgtgagtggagagcgttagtttgttgaaaaaattttaaactggtcggaaaggagaggcaaaaagttattattctttttgtatattcgtaaaaatttagaaagtgtaaggcccctaaaagaaatgtcattcttaaaaacaggggaggggaaaaatgtaaacgttttttttgggggggggagtacaaagcgtttaacaaacggggaagtaatgcaaaataatctaagagggagtttttttaatcattccccacccttggaacttaagaaaaccccaaaatattttttaccccctaaatgtcccgaataaaccaacgggggtaatttatttaaaaaaaaatgggtgggggcttaaaaaaaataaataaaaaaaggtggaagtttctaggggggggttgatttccaaacataaaattaggaaaacggggaggtggtttttagaaggaccaaaaaaaaaatttgtgaaggggggtgtttaattgggtgtaaaagggggaaaatatgaagttttttaatgagaaaaggtgggaataaaagaggggggaaaaaaaaaagggaagtaactccttagagcggggttggttttcttctataaaagacctctcagagaagttacttacaaaaaagtgggtgcccgggcggaaaaaatccacaaaataaattttgtgggttgaaacaaaactaattcttgtggggaagaaaaaaattataaaaaaggggggggcagatatcgtgtgttggatag

SEQ ID NO: 19333 - DNA, 309 bp, Glycine max
ggcttatctacttgacatggttggtggtacactgtggtaagcgaaagtggtggtgcctaacagctgattttgtaggaaaacttcttaagtatataatggtagctagcttatgttacatagggaatgtgagaacccctgcaatgctaactagtgctgactacgatacgatgacctgctgagatacttgtttatataataactatgatagctctctttgaatttatctagaaagagtgccaactaatgatgagtaactttagtaggagggagactgtagatgacagatgtggagagaacgtatgttaaaat

SEQ ID NO: 19334 - DNA, 200 bp, Glycine max
tgcgggctgccttcttgaggggaaacggtgcaccactatttactccctcttttaacgtgggtcccaacgggaattctaatgatccactttcctatctggatgtgagatcatggtaggtgggtcccacatattcatagaggattctgtcactcacctcccttccatgtttggacctgtcttacacacggacttttgattct

SEQ ID NO: 19335 - DNA, 291 bp, Glycine max
  unsure (1)..(291): unsure at all n locations
tctcgctgtaagactggtatacatgtatgattatataattgatcactggttatatttatgaataaaaatatttaggatttatttattaaataaaaatatttatgatttagttgacacatgtatattgtaacaagttctatcacatttatggttaaataccttatgttntaaagaaatattgattttctagaaaaagtaatcanatcaacattgattgtgcctgttgtaatattatctatggaataagaaaaagcttaaccatgaaactgaattaaatctaagaatcaaatt

SEQ ID NO: 19336 - DNA, 314 bp, Glycine max
tgccagcttatgtaaacaaagtgaaccggatatatattggggatatattgaaaacacaaataaagtgcctgactattatcacaggtgaaactgtgacgaaaataaactttaatgaaattctatttatattccgattgatgtgtgcgataataagaatcaacttcttcttatgaattagaaggtcaagaaaaatgaaatatgatagacctatgtgcatgtattggattaaattcttagtaaacatcaaatacatgaagttttacaagacttaacataaaaagacatgaattggatggatacaaaagtattcattc

SEQ ID NO: 19337 - DNA, 400 bp, Glycine max
  unsure (1)..(400): unsure at all n locations
agcttcatcctcagatccctcttgttggactanactcaagttgacgaccctcttaggtttagactaacttaaactaagtttcggccggagatccctcttgtaagactagactcagctcaagcaacttacgaaagtttagcctaatttagcctaagcttcggccgtagatccctcttgtaacaacataattaaaaccaaaacttaatccgcagatccctctcgtaagactaagtttcgatcctgcttcaatcaagttctaaggcaacaatacatttcccaatgctaaagtcacctaactatgcacacaaattgatgatcagaccaaaagcataccaacattaagcattgaacatagaaaacataatccattagatattaagtatttacatcatttgttcat

SEQ ID NO: 19338 - DNA, 238 bp, Glycine max
  unsure (1)..(238): unsure at all n locations
atgagtcatnnctttggaactntagtctagcttctacaaactacccacacattcacaatgcacacnaattatttcgcaagctaagttccacaaaatcatgcacanatgccattgaggcatntcaccgaacacttggtgggcgcatgtntaagcatgataatcaagggaatggngcaatgtggcaagcccattatctcaaaatgcaccctatgcctaaggtcatacnctacaaccccac

SEQ ID NO: 19339 - DNA, 404 bp, Glycine max
agctttgagcaaattgaaatgacaataactttatacacggatgtctggttgagtcccgtaatatatcgagacgctccaaattgaaaacggaaactcttaaaaaattcaaacgacaataactttttactcggatgcccgacaaagtgtcgtcatttatcgagggatgctccaaattgaaaacggaagctcgtatcaaattcaaatgacaataactttttactcggatgtctgattgagtcccgtaatatatcgagacgctcaaaatttagatccgaagttctgagaaaattgaattgacaataactttatacacggatgtcaaggtggagtctgtaatatatcgagacgatgcaaatttgaaaacggaagctcggaagaaaattcaaaagaaaataactttttac

SEQ ID NO: 19340 - DNA, 392 bp, Glycine max
agcttgttgaaatccatgttttttacatgggaagcagtatctcaaacttatcccttttaacatagtgttctaaagcaacaatacttttgtttatagtgaaatctggaaccaattctaacactaatatgaaagctccaattcttggagctatggggaaatctttgtgctgtgcaagaaatgaggagggttcatgatgtagcatcctgaatggagggattaacagaaaattcaaaactttggagaactttgtagcacaaatcaaaggtcagaaaaccaagattcgcacctgaggatgtggaaaagagatgttagagcacataatggctttcccaaacaggggtcccaaaacatctggaggacattttgaggacaatgcatagcatgatacagat

SEQ ID NO: 19341 - DNA, 306 bp, Glycine max
agcttgctgggacctcgctggatataattttttacgctcatattcactacctaaaggtgctgagggaacactttaaaatttaaagtttgatcctggacaacccccctattggcccagctttatttttgtaaacatggttaaaaccctaaaccaaaaacttaacaacccatttcccgggccaatttggtaagcaaagcaagaccaacaatggtaaaaaaaccaactccggaaaaaatataatcaaataacatgggtcacgaacgggatggattttagcgagccagaaaaaaattattacaaaaattt

SEQ ID NO: 19342 - DNA, 257 bp, Glycine max
atctgtaggacatggtgaaactattttaagtagaccaaatacaattgcagggttctagaatgcccatataaagaactgtaatgaaaaatggattaaacctgcctgaatctgtagtgacatgttttagcccaactatctgtctgttacccaactcgctgagagagggtgcctgatgaatactttgaggaatgaagtatgtccctggagatatgaagagaatttgatgaatggtgaggtacactactcattataatagc

SEQ ID NO: 19343 - DNA, 313 bp, Glycine max
agctaggagcatttaatttatatgctcctttttgagggggagagttagaatataagctagttgtatctttgtaaggtttacaaaaggctgtttttagtgggtaatctgaaaaccctaagtaggagctagttccccggtctgaacctgtctttttttctttcttattgtactctttctggtttatataaatataatacaatgtgtggctgaataaagcaactccgcacttttctaatgtaatgtgtttctcaaacccttcaacaatttagttattaactttaagagaaacaaaacgtatatattctacttatca

SEQ ID NO: 19344 - DNA, 229 bp, Glycine max
agcttcaccggatgatgccgatcgaacaatggtcttatcgacatcatccaattgttattcagggattgaataaaataaacaatggccggtgtcggtcgttatatggccccgactgatatctttcagccgacaatgcgccatttcttttacaaacgctagccataaagggtttttttttgggttttacgggaggagaaactttttgttttggggttgcccaaaaaattta

SEQ ID NO: 19345 - DNA, 107 bp, Glycine max
tactgtaatactgtgtgtatggagagattgccttttttaagactcactgtaactacttcaagttgctccagatggcccagaactgcctcaaagtcagaagacaagcg

SEQ ID NO: 19346 - DNA, 362 bp, Glycine max
tggttttacactccattggcaatattttactaaggtttaaacttgtgaaaattacgtgactcataggactataactagagccaaactgcatctaagacaaaaataaagctaggtatgggattgagtgccaaatttcattcaagacaaacattggtcatattgcattttgaacaaaaagataggacaacattgaaaaccaatgataataccaaaaaggtagaaaagctgaaaatttaacaatgaacatacaccaacacattgaacccagaccaatgaggttgagtgtcatcagattggccacatcaaggtaagcaaaagagtcacactaccaatttaaaaagaacctaaaaatttaacaatga

SEQ ID NO: 19347 - DNA, 639 bp, Glycine max
  unsure (1)..(639): unsure at all n locations
cgggccnnnnagatgcgcgagtacgccgctgangtaccnttgnatctcagctagatcgccacaaccacagttaacgtcaatcctgccactgtgagaggatcnagcttctcataagaaaagtccatggctatctgtggggtgtagcgtgagaaataaatctctattgtccactccaattggaatgttgtaccaagaatcttaaataatacctatctaggacttgtctgtttgtgttcatttgacaacaatgttgtgtggtttgttctttacgntagaagcctgatgtttacgtacatgggtgcagttaacgagcgatttttaacatcataattcaagtaatgtataccaatttgangcgtataaacacactgaatgattcgttatatatgttaatgtatatngaaactagggaatgagacataaccactactttgaatgaagccgactactgtcctcgtgtttgacacaagatgttattttctgaattgtctgaatctgcggtgtcttctagtccgcttagtattattgtattgctttatcatgtctaccgagctgagtgggttttgctctattttgtgctttcacatgttatataatgataagtttactacggtatttactcctcatctatcagtctcg

SEQ ID NO: 19348 - DNA, 725 bp, Glycine max
tattgttccaaacggatcggcaaaaaagccaaatgaatcatcctgcttacactaatgataagactggggcacatgaagacggtgaggaccatggaaacaaccctgatgtgactgccaatcctatgaagcccaacttgccaaccaacccatcagtgttcttactaaaactataaggatccatctgcttagcccccacccaaatatgcacgtagggcacgacttaataaaccacaaagcccgtttaccgatctttcctgtgacgaacaacccgcttcagcacaccccaaataaaacaccccccaacatatgaattttgcgaccaaatgcccgatggattcaacccagattgccggagacatatgcggagattgctacccatttttacttgatcaacctaatgggtggccataatcccccggaatgatcccacaatgacccgcatttattgtgttggatttgacttcgacccgcgacaaaaacctattcggcggaggaaactcctgggggccgttctctttgtatgcgcctggatggaccccctaatacgccaaggggtcaaaaggtttatattatggccaccgtgggccaaaaattagaaggtaaaccccactgggaaatactcacccttgtacaagaaaaatgccccccttaggggccgaatatgaaaacctgggggaaaccattcctctcaatgaatccacctgggaatttctgtggcctcccct

SEQ ID NO: 19349 - DNA, 465 bp, Glycine max
  unsure (1)..(465): unsure at all n locations
agcttctgtgctctatagaatagtagttgtttgtttttggctcacaaaaattagcctataactcaaacaaccactttagatcacccaagtaaagaataacccctcttcccacatagctcttcataaggtttctaatcaccataagcttctattcaacctcctccttgctaatgtttctgaagcacttgagaggaaggctcacagattgcacatacctcaagtccccaataacattcttgttatgcttctagaattcgaggactaggagacctgcagaaaagggagattaaggagaggaatttcagattttatattgcttgcattccattacatcttacattcgtatatataagcacatgaatgctgaattggtattctaattcctctgcaggtcctaaggagcanaggccaacaaaagccaataaccgaataacaaaataagattctaatagtagacaagtattc

SEQ ID NO: 19350 - DNA, 142 bp, Glycine max
  unsure (1)..(142): unsure at all n locations
atatcagccatgagaacagatcttagaaggactntggattctnctaaagtaaggtccacaccaaatagtccaaccaaaactctcacaaaaattcatggttctgtgcttacaagatntgagagctgattccctactctctctg

SEQ ID NO: 19351 - DNA, 1181 bp, Glycine max
  unsure (1)..(1181): unsure at all n locations
atactcaagtagtaaaataatcatacacactcacaacactatttgtcgactgccacttcgcgctngttgaatatacaactattcccacattaaccgacgacgggatttgttgactcccttgtaaccacccgcggattctttataacgacctgctagcatgcaagcttctattgacagacgactatgatacatgttcttggcttccctactttgtgagataatgttgcaatggcatgtcagaatggcatccctacattaaagttggaaaaatcacacacacatgcacgcgtaggaaatgaaaacaaaaaaaaccttttaaatgaacaacaacccttattaagtttggccattacatgctacacaagatgcgattgatccaatgtcaagtcttataatctggacacttcagaaacttataatttccaccccacaaatagtggggtacacttcatataattctcacatgcccaccgttgtgtatgtcaaccatcaacaccacaatagtgggatgtctcacatttgataaaatcaataaataagagatgtctttcttttattcttatagtctatattaatatacactggcaactntgtgaagcattataatagagggctcaangcgcgttntccacaataanacagagtttaaaactcattctgccgtgggctaggcgcaatcttgcgtgtttatcaaatagataactaaaacatctatcataatatttactttctactaagacgacttatgggcgataatataatgcgggtgcgctgtctacatactatctccgggcagataaacatcttatatagaatntatagaaaccnacctcacacagaagcgcgttgcggtcggacagataatactatggggccacccacatttgcgggagtatatgtgacactagagaatagagggctttatatatgtcaccataactatggagctcaggcgcgccacatctctatattgactaaagtacatcttactaaggactatgggtcagtgactgatctatcattttcaatagaggggcggatatggacgcattcctaacacccattataatcacatatgttaatattcatagttctcttattaaccaacaacgttctcaatcggactacactcatctttctctcaactctctatatggaaaattgtttatcacaacaaaacg

SEQ ID NO: 19352 - DNA, 270 bp, Glycine max
  unsure (1)..(270): unsure at all n locations
atgtcatatatcctacttgtgttattgtatttaattaattattgaatacaggcatgatcagagaagatctatcaatannaaattcatngattcaagaaaggataaatagtgaatnttcctataaggtntcatacagaanaacatggatggcgaaacanaaggcgatngcaattgaatatggcgattggaaagagtcatatgcganactntcgtcatgactaacacacatgcaaaatcattctcttggctcttatttcaaatactacatga

SEQ ID NO: 19353 - DNA, 231 bp, Glycine max
agcttcaccggatgagggcgagcgaactatagtattatctacgcactcccatggtgaggggcgggtggaaggataaagacgaaagacggttggagaccccatttcgggccaagtgatgtgtctaagccgaccttgcgccaatccttttacgaacgccttcgaggatgagccatttttatagactgacgggggaacaaggtttttgatgtggtgttccctaaaaaatgtaca

SEQ ID NO: 19354 - DNA, 384 bp, Glycine max
agcttcatgcttaactatgtatggcaaattttcattactattggtcaagacatacaagtgagcttgtaacaaatcttctatacttggagtgatcacctgcagtcctcttgaacccttaccacccactctgtcatcatgccgaaactcaggaagcccaacaggtttagccttctctaagtattctgaacaaaattcaatggcttcttctgcaatgtacctctcaacaatagatgcttctggacgatatagattctttgtatacccttttaagatcttcatgtattgctcaaccgggtacatccaccgtagataaacagaaccacaacatttgatttctctgaccagatgcacaatcaagtgaatcatgatgtcaaaaaaataggg

SEQ ID NO: 19355 - DNA, 526 bp, Glycine max
  unsure (1)..(526): unsure at all n locations
agctgtagaatgctagacatgatacatgtanaggttaggtnggntcaanngataaatggatgcctcacattatctccatgacacanatgcaaatatgatgatntggatattntatgncaaactggtcatgcatgcacctatgtggacgctcaagtgtcaaattattatggtcatgtgatgctatggctcacgaatcactatctctatttatattcaacccaactgttccagaatatgttctttatcagtattgcattcatctagccatatcggcgtccgggaaattcacacatcactctcagtgtanaacatattcataaatggtatgacaatgaattttcaagagagttgaatattctttcaagctgcggtttactaacactattctttttcactattctactgctcattctatagcccttcttatgaactcttctttgttcttcacaatattcttcattacttaaaaatgtgtacatatttgaagtcaaaaacctcgtctattacatctttatattaccccaac

SEQ ID NO: 19356 - DNA, 484 bp, Glycine max
agcttgcatttggaattgcgaaagccccactccatcattaggattagtacctgacatctcaaacaaacaaatcaaacgtaacaagacaattatagttgctgtttgaatacctcacccactcaagtgtatcacacaattatggcttttctctaatgaaacactcttgccttttaccactctaattccccttgagttcttaggcaattcaagagattatggccacaacaaagaacaattcaccaatatgtgtaaggtaaggctagagagacaaggaaaaggttaaccaagaaaaaggctaacaatgtttttaggcacaaatgaaggaaataaaattcagaatttaggaattctaggtacaatccttcatgcaaccaatatattaccttaaagagatttttttttaaagttctttaagcatgaaccattcagcccaatttttttttttttaattttgcttatacgaaaatctgcttttttttttttt

SEQ ID NO: 19357 - DNA, 317 bp, Glycine max
  unsure (1)..(317): unsure at all n locations
tctcagctctctctagctctatcagcctctctgtgggaactctctcctggtatntctagggagggcctctttacctttttttatttcgtgaactctggtaaatacatgaagactatgaactaaacttctcatagactctaacagctaatatgtaaggggcttggctctgtacaaaatggtggtagatgtaatcgtacaattcatatgatcacaccattatgctgatgattgatctgagtggatgacatattggttgcaccttatacaaaatgtgtgctgaatcattctcacacatgccaacaatcatatctttacat

SEQ ID NO: 19358 - DNA, 349 bp, Glycine max
gcttgttaatggctgcagtaatgcatggttttgtttgggttggctcaaagataaaaaggatgccccacatcatttggatgagccaaacgctgccatgctgatttgcaaatgtgaaacaggacaggggatgaatgcacctatgctgacacttcagggataaagttatactgtcctgtgatgctagggctatagatgggcctacgctatatagaatctacccttggtaacgcaaagaggctcttgtatcagaatgtacaatacaacgagctctttttgtgtgctcctgagaactacccagtcttattcctttgcgtgtacacacatttttctgaaccggcacatcctatga

SEQ ID NO: 19359 - DNA, 73 bp, Glycine max
actcatcatttatttcttatttgtagacctcttcaatataaatagaatatttatcatggtgtgatcaatcctc

SEQ ID NO: 19360 - DNA, 252 bp, Glycine max
ggggaagagaaagaaaccgagcgagagaaagaaagatagaggggatgagagaacaataaagaaaggtggattttctaacataagaatctacctgtctgcacgctatctgtatcttgagtcacggcataaggatctaagcttctagaacagacatgagagagagaaaagaaacttgtagcatagaaaccgtgcactgcacttcttgattatcagttcaccctctatctacaatacatcagtcgttcactattt

SEQ ID NO: 19361 - DNA, 202 bp, Glycine max
tactttctcatatactgtgattagcagataatatgttagtatactgattttgggcaagtcaacatgctctggatgattgcaagcgcttctgatctattatcactatgagacttttattctcatagtaaaaagcgagatttggatatcatgttgctataaccaacatctccatatggactgtcatctttgactttgatatgag

SEQ ID NO: 19362 - DNA, 442 bp, Glycine max
agcttgtctcagcgtttatgcgagacggttaccaacatgctagctatcatcgccaagtaccaagaagagttgggtctagccacggcccacgagcatagaatcacggatgagtatgcccaagtatatgcggaaaaagaggctagaggaagggtgatcgactctttacaccaagaggcaaccatgtggatggatcggtttgctcttaccttgaacgggagtcaagaacttccccgattgttagccaaggccaaggcaatggcagacacctactccgcccccgaagagattcatgggcttctcggctattgtcagcatatgatagacttaatggcccacataattagaaatcggtaggaaacttgtatggtctcttagaccttgactagatatgactttctttttttgaaaaaaaagagttgggccccatgttcctactccaaaa

SEQ ID NO: 19363 - DNA, 208 bp, Glycine max
agcttcttatccaaagctcatcttggtggtgaagctctttcttccatggcttattccctagaggatggcgcctcctctcacctcttttcctttgtcttccgctgcatcttcatgggggaaaatcaccattaaaggacctcattgaaactcaaagatccagcctccatagataccccacaagcatttttccatcacttgcacctcctca

SEQ ID NO: 19364 - DNA, 606 bp, Glycine max
  unsure (1)..(606): unsure at all n locations
cggggatgagtgacgacttgattgnactnatagactaagcnttggaactggtctaacacaagtgatttgacccctcgacgaacctcatcatacatngatatcttgttgaganaaactntcaagagtttcgaaagactaagtgttatccatcacactattcaaccctcctcacccgcttctagtgtgtttagggtattcaattaggttcaagctctaccttatagtgagctcttgacaatgtagaggagacacaattncttgataatgatggaagaanggatttgtcgtgaacaaagcttccattgtcaaaggagccatctatgagtcttgaagggatatatgattgctcctctgaattactcacattatttgtggatgtgaacacaaggtatacgtccttatgttgacagtggctcaattcttagatggggtggaatagaattgaactatttcctataaatcattcattaatgcgtaaagtccaatattctttatatatttattacattatttttgaactcataataactctttgatataggaatcattacttttgtcccttgctaccactcactactttgatactcttatctatattgaccatcg

SEQ ID NO: 19365 - DNA, 165 bp, Glycine max
ctgcagggtgatccaagcatcctatctatcatacataaggaagattgtccggcttttcgctagctactcttctgacaattatggctgatgtgaaactgttaaatataacttggaaaatttaaatggaaatttaaaaggtcttatctaaggttttcaaaaacaatg

SEQ ID NO: 19366 - DNA, 373 bp, Glycine max
agctttataagcgcgggttcgggagacttttgtaagcgttcgcgatatgcgaagatgatattccgagtactttggatttggtacgaccatgccctcctgatttccagctgggaaattggcgagtggaggaatgccccggcatttacgcaacaagcataatgtaaacctttacggttttaaaagctctatagttgggcctaggctttagagtttttccttttgttaaggctttgtgtcttttgtttttgaatttataatacaaggatctttcttcatctgttcctggtctctacccattctcattcatttgcatgtttacttatttttctgaaacggcagatccgatgacgagtcccccgaaggtactaatacc

SEQ ID NO: 19367 - DNA, 594 bp, Glycine max
  unsure (1)..(594): unsure at all n locations
ntgagggtgcacagcncancatctnttcatagtagagtacctgatatgtgtctactatcatcgattatcgctccctntcnncatattggggtaccacctgngccgtcagatccctccacctcttgggcgtgttctttgaatgatcacgtcctcctattttgcacatgttctgtagtgcatcctatccggaaccatatcataantagtactgatactgcctaccaaaggcaaccattatgtccttccaagaatggactcgggaatggtccatgttagtgtctcagtaacagctacccagtagactttcttgaaggatgtatatcaattcctcatttttggtattcccatctctgacatcatcttaatggttctgaacagtagtcccttgacttgtatagtcacaccttgacttgggatgacaagtgtggtttatgaacactttctaggtagcaatgattattcttactctcaatgcctgaccttccttaatatcactatcattctgccagcataagttttatcttggatgctaagcgattcgtgtcttcgctccaagtgtgttgatcccaacctgctcaagttactgcaagtacn

SEQ ID NO: 19368 - DNA, 166 bp, Glycine max
ccccctataaacaaggacccgtaagtacgctcccctcctataaatatcaaggtacatcggaccctttacaaattcttgacaccctttaccaccacatcgacacggttgggcctctgtttttctctcttactcacttaagcgcgtagttaaagcatactacctggct

SEQ ID NO: 19369 - DNA, 351 bp, Glycine max
  unsure (1)..(351): unsure at all n locations
agctnttgtcatatatagttcttttttatgcacatgatttcttttactcgctttcagattagtgtatttgccatctacaatatatcgaagtgttaaagattgtaattgatcttaagtgatgttctgatttatattaagtttgtttttatggattacaatactttgctttacttaatttcgttaatataattaatttcttgtcttaccacaggtaaataaatacttccctattgttaagcaacggctcagcttagaatgctatctattccccacaagttactaattatcgacatgcaagaactacggaaattatatatattgtatatggccacattaactaaattgattgtg

SEQ ID NO: 19370 - DNA, 760 bp, Glycine max
  unsure (1)..(760): unsure at all n locations
cggcccaactgcgatgccnacgntgantagangcagctgntatgtgaccctatgantactcaagcctcatggtgaatcaagagtgantcanagatgtctngatgatatcanagatgatacctttagatgatgaccaaggtgatgacanatagctcaaaggtcaatcatagaatgagttcaatatgttcaagatagaatcaagaacacttcaagaatcaagaggatagttgaattcaagaatcaagaataaagagtcaagagatcaagggtcaagactcaagattcaagaatcaagataaggctattcaagaatcaagaacaagcttaatcaacataagtatganaaggtttntcatanactgagtagcacattggattttctcataaccatgttaccanagaagttttactctctagtaatcgtatacccagatatttgtatcgantaccagtanccatatcgatcttgaataatgtttcaaacctgaatctaccaccgttccgacatatattccacacaagttgtaatctgataccaaatgtntggtnantngantacccagtgcctctgatcgtcgatatttcacatctaaatgtgatgagtcacatcccttcacatanangccttgtgtaatcgatacactgattntgtattcgatcacagtgatagntactgactaattacatgatgtacctctcacanagtttcntcncttctcaatctgatntaagtctnctataagtatacctctctcatgcg

SEQ ID NO: 19371 - DNA, 450 bp, Glycine max
agcttatgcgcatatttccttacaaacgttctcttgcacaagacattctattaaccgaaaaaaatgcacccatatacaatcaaggcagcttcgtttacctagattatttacacgtacttccaaggtgtatttgttacttacatcacacacctccttggctaaattcacacacatgcatactcaaagcattttggggtaccaaaaattgcacatgtgcacatcttggtatttctaatacctatacatacacaaacttcatgatgaatcttgactatctacacaataaggtgctacattttatgctcttttcaagtttttgctacctaaagccgcatgcaaattcaagtatattttcctttgctgactaaaattgtattcaaattaaaaggtatacattttttggtaatgtatcttctttacataacatgcaacaatatttttgtatatttt

SEQ ID NO: 19372 - DNA, 291 bp, Glycine max
gacttatctcactagtccagctctcgtaagtggattgcactatgcatctgattgggccacatcttcaatatcgtatattgatactcgaatggcaataagtctatgtttcgcacttagaggtgctgctcatacgcaagtggcaggaataagacccttcgcaaatcactacttctatctctcgcttgggtgttgtcttctgatatatagactctttaaaagccttacctcatgcactaaggacaggcaaaagcctggcaacagcttgcttctaaatacacgtgctctccgtga

SEQ ID NO: 19373 - DNA, 337 bp, Glycine max
gcctgcaagctttgtgccaaaagactgacttatttttttccttgacccacggtgagaatgccaatccttaccctcggaagcaaaaaaagaatagaggggaaatttccgatcctagaaaaagagaaggaatatttccaatgaaagcgaaaaagaaatgaaagaaaattccccaatcactgagtgggagaaagcaataaaaggaagagaatgaaaattccctaatcatagagggggagaaagtctaaagaaaagaaaggattattcccaatcaaagaatgggagaaagtataaaaggaagaataagaaggagagaacgcttctgatcaacgatcgaaag

SEQ ID NO: 19374 - DNA, 188 bp, Glycine max
  unsure (1)..(188): unsure at all n locations
ctgcacctgtcgccagactctgtagtttatgctcctctgctgatcaccacacagaccattacctctctgtgcaacaatatgaagcaatngaacagcctgaagcttatgctacanacatctactacagaccttctcaacctcaacaccaaaatcagccacaacnataacaatatgacctctccagcaac

SEQ ID NO: 19375 - DNA, 343 bp, Glycine max
agctttcacaatatccaaacaatttgatttcatttaccatgaaactaccctaaccaagaaaacagagtagaggcagaaaactctggccaaaactcattcaaataccacagctttccttactcatataccccagtaacattctcttcgttccgattcgttaaccggtggatcgccttgaaaattttattggaggttcctagtacataaatctacatttttaccgttgggatttgctagaaatgcctggaacacaaaatgcactactcttcccatgactagcaatgtacaaccatttttctgcactatgtaaaaaaaactgctgcacaattttgacagcattttt

SEQ ID NO: 19376 - DNA, 779 bp, Glycine max
  unsure (1)..(779): unsure at all n locations
nttaattgacttctctcccgggcncgggatactctatagtcggcctgccgcatgtcaacttgtaggattatggggtaccctttatttgggggactaggtggcgatcgcgagatggggcaaatctaatcttaggcatgcacatggtacacctgaacccagcatccccctttgcccaccttcaaaggagcttaaatacccccacgtagacgttattctaggttctctcaggacccggtgcgcattagcccctccaagctttcacaatattcaagcaattcaatatccaaacatcttgaactaccctaaacccagaaagtagggcagaggaagaaaactcctgcccggaacacatttcagtaccacaactgttcctactcaaataccccaagaaacattctcttttggtacgggtcgttaaccggttggaaccacttccaaaaaggaacggggaggccccttattgcataggcttaccttttttgaccgggcggggaactgtttttaaaagagcccacaaccccaatgtgttccacctttttccataacctagaatgcaggaagctttttcttgcaaagaacaaaaaaattttggtgcacatttccaagaggggagttttttgcttattagggccggatcttcgaaaaaccttctggcccttaatccaattttggttcgaaatgggggcctacacaggccaaaattaaattatgaaaccttctttgaaccacaacacaaactcttgggtaaagggaatcccaaagttatgggcttctttaat

SEQ ID NO: 19377 - DNA, 495 bp, Glycine max
  unsure (1)..(495): unsure at all n locations
gtaagtgtanncctgttgccaatacgacctgagtaccttgatctcagctgcgcacgagttccacttgctctgtgtggggacatctcaaagtgagacagaataaaccatgtgtcatgacgaataaaaatcatagaacggtttccactgtctcagactgaatcagctctaaactaccaagcacaagggtgagagtttcaggaatgattctctattagcatatgaaaatagagtacatgctcatctatggttgctatgattccggatatgtgactcagagttgttaaatgatattcttacaacatcagtgacacattaagaagagggctaagattacacttgttcttattgaaccaagtaaaatggctgtcttatgtccacttcctaaactctaagtccgagatccttaagagtatattatgttaatccagctagcattctatatcctatatgcatgttaaaggaatttattattattgtaagtaagatatcctctcc

SEQ ID NO: 19378 - DNA, 384 bp, Glycine max
agcttcttagtctcagatgatgcagctgagtttgtatctacctcatgcactcctctaatgactatggcatcatttctggcgctaaactgctgagagttggaattcatcttctcaattaaatttctagcttcagcaggagtcatgtctccaagggctccaccactggcagcatctatcatacttctctccatattactgagtccttcataaaaatattggagaagaagctgctctgaaatctgatggtgagggcaactggcgcataattttttaaatcgctcccagtactcatacaggctctctccactgagttgtctaatacctgaaaaatccttcatgatggctggggtcctggaagcagggaaaaattttttctaaaaatac

SEQ ID NO: 19379 - DNA, 680 bp, Glycine max
  unsure (1)..(680): unsure at all n locations
cggggnaagattgccacatgagtaccttgatactcacctggtatgtgcgctactgatggtccatganngtgttgctgggntgaccactccggtgtngaagagaccgcatgtgcatctncgttcctcctttntgcccctgttgccacgattcttttggcgttcacgtntgtggaggaaacgtaatcaaactttcctctcttcatccaacctcgattctttccccggcatacaccatatccgcanagctggacggcatgtaactcactagcttctcatagtataacacntgctgagtgtctaccatcatggtgatcatctctctctcaaccatggtatgagcatcttgtgccgtcagatccctccatcgctgcgcatattccttaagagtgcaccactctctcttaacatattctgcagatgagtactgtcccgagccatatcataattgtactgatactgcctcatgatggctgtatcatatccttccagtacggaacttgaaacttccaaataatgtacacactactgtactctgccagctatctgtagagtggttactgctctcatctatgatgcggccactacacgcgtcatttgaggtgtcttggacaatctcctatactttcattcgtccttactctaggattcacatctgtctaacataatccattcttatcctt

SEQ ID NO: 19380 - DNA, 423 bp, Glycine max
  unsure (1)..(423): unsure at all n locations
agctttgcaaaaatgttgatatttggagcttccttgcttaaagaagcaattgaaaacgttcttctcacatttactccatgcttaccttcgcgggggaatttgatttatttttgagcccggtgtgcaagaaattgacaagtgtaagctgctcaagacgatcactttgtcacaaatatcatcagaacttctaaatgattcacttttttatgaacaaaaagtaagaccctcttttggttatacacaattcatttttacccctcacacaaacacacataataatagagttgcatattaatctttgccagtgtnttttttagcttatttcagttttctgttgaatctttaattttttttttatttaatgctgggggggggtattttgagcaaaaaaaggttaattcatttcatactgttgtttcagtt

SEQ ID NO: 19381 - DNA, 247 bp, Glycine max
  unsure (1)..(247): unsure at all n locations
tctactgatatctgcggtaaccaatgcatgaaaatatgattttgtagtnatggaactacggtgccagactaactgctcagtgaataccattatcttggtgctctttttgcttgactgcaatggttaattattctgatctatatctcttgtttcaaaaaaaacattttctcatattgaaaagttgataaacatcctagtcttatgtatatcatcaacataactgtttcgtttgaaagtttattttaaa

SEQ ID NO: 19382 - DNA, 182 bp, Glycine max
taataatagcttcgttcctctctatctacccttaattgttgaatgactgagttttgtaatgtattctctattgttattgaatacaatatcattatgagcataccgttcatgtaccaccttggtgtatgacagactgtactttagtgctttgtacatatgtgtagatgtatatggcctgtatc

SEQ ID NO: 19383 - DNA, 337 bp, Glycine max
tcctctaagtcacctgccgcatgcagcttacacaggcacgtgtttcatcttattttcttatcacagatatgtcataaatcgatcttgctagtcatttcccgtcaaagcaaggataatgtgcataatcatcatggatcaataggaactcttaacatcagacttgtaagaaattttggctttggtcgctctggccttcctttttttggtgtgagtacgagagcacgcgtaaagattttggtactaacttacacgggcgagcacttcctattctcttacgtgttgaccaagctactcgcggtttccttcctttttactctgtaccacaactctgaacatg

SEQ ID NO: 19384 - DNA, 364 bp, Glycine max
agctttttggctggcagtgagtgttaatttgtaagagcaagagaaaaataaattggacgaaaaagcttaaagattgtcaaaaaaaaaacattcaattgacacggatcctgatttattagttcatctgtccccatgatgattggacaggttgaccaaaaagtgagacaagtactaacttgcacacttgaattgcggatggggaatgtaatggtgcaatgttaaatgtctttttcatttggaaagaagagatccttatgttatgtgataaatgtaacaagcaatcaatggaaagatatggttttggttccactttaaaagttctacagtcatgttcaaactatgctcttcaagtacaagcagactc

SEQ ID NO: 19385 - DNA, 521 bp, Glycine max
  unsure (1)..(521): unsure at all n locations
tctcgttctatatnntaatntnatatttcttcactgtattctaatatggtattcatttntctggtactcttagacataaatatgagttgtgagttttctgttatttatatttttaactacttcaatgattaatttatcagacactntataattaataatagttgttcaattattagcttcangacttcagttactaattagttgtatcgaacatantcctaaatgctaatattgtctgtactaggaatgctagcaacatttctttaacnatatctgtgtaattgatggannattntaaattaagaaagaatcataaatgaggagaatgacccatcaaaatagatatttctctataatacatntaatcaatacgaacaagagaagtttganagatgaaaagagtcataatccaatataatacttatttaaagtacatatatctcatctactaataatgtgatgttaatttaattcttaaataatgtcatcctatatattaaaatggtactagtatacattag

SEQ ID NO: 19386 - DNA, 240 bp, Glycine max
aaaaataagttccgaaaataatggttgttgattctctccaaaacatgttatgttcaaaaaaatttcctgtttaagacccaaaagaggtataatctataactatactaacagaatatcaaagcacgcataaattactcaaaataaactcgcgtaagtttttcaaaaaattcaaaaacaataataatgtaattaagtacttcaaattaataccaagcgactaataaacattaagacaagttc

SEQ ID NO: 19387 - DNA, 691 bp, Glycine max
  unsure (1)..(691): unsure at all n locations
cggggnncaactgcagatgatccgnttgttgancnacgcttnangtgacactatngantactcaagcctatgcgcatacttctntacgagccgtcactngcacaagacattcttatnnactagagatatgcacncatatacaatcaatgcaccttcgttacctagattatttatatgtacttccaaggtgtatntgttacctacatcacacgcatntncttngctaaagttacatacatgcatactcaaagcactttggctatcaataaatgcatacgtgcacattctggtgtttctaatacctatacatacacaaacttcatgatgaatcttgactatctacacaataaggtggctacattcatgcttgtttcaagtggttttactacctaaagcggcatgcanattcaagtatatnttctcttgccgactaaaaatgattcaaatataanggatntttgtagggatntccttacataacatgcacatatatatatttatttttgagacatttgacttcaaatacatatctactactatatctgctaccaccacacgtaaatgccaaggatttgctctattctaacctatcttatgatagcaaattcaaccatcaggcgctgaattatgatcgtgctaaactgatgtggcaaagaacctacccactctacttctggtcttgataaactcg

SEQ ID NO: 19388 - DNA, 765 bp, Glycine max
  unsure (1)..(765): unsure at all n locations
cgccnnttttgatgatctngtagganccggcgcccctctanagtcgacccgcccgcatgcaagcttacaaatttaatttaaggccaagcccataaacgaaagaaaacaaaagctggacaagacaagaaaagaggggcggacctcccggggcggacgaaaataattatagattcgnaccgagccgggcatatnnnaacgcccgccccctttaagaccaagctcactttggaaatccagcccaattgcgtataaatctcccgaaggaaattaagaacacaaaataacgcccggaggcccaaacgatacaacggcataatgaattcgactatcaaggggcaacagtaattaaaacggcgaccaacggcggaagaaatatgagaaaaaaatgacacatcacatgcatttccaaggcatggatgctaccctaaaccaccaccagccaggttgatcttggcgagaacacaaatatgcacaccccaggcacttgggctacccaaaaaacccctacccccctaacccaagaaaatttctccacccgcccaaagcgcgacatgcgtagtccaggaattggccacccaagaacaccaccatgccggtgcaaccggtgcccccccaaaagataatttacgcccacaccaaaaattcccgcctcccaaacacaaatttgtgggggaggatttttgggctcctaaacacacaaatacttcccacacgctccgcgcggccctgaacggtttcgcgcccccgcgcgagcaaacaaccccc

SEQ ID NO: 19389 - DNA, 55 bp, Glycine max
tggctataccctaggcttatctccttgggcttgtgttcatcgctaccaatgcttt

SEQ ID NO: 19390 - DNA, 309 bp, Glycine max
attaaaaacgactaaatgggtgagtgttactgagattgttggtaaccaatagtcacccccgacagacaacaagtcaaccaccatttggtctcacaaaacgctgatgcctatgttgccaagtgggcccttattaaaacttgatctaaagcccttttagttgattaacccacaacatatttttggtcagccaactttacacagatggggtctttatttagactaactcaacactctgaaattgaaatactgcggtgtcattaagatctccatttgtgccatgatacaactgacaaccttggacttttcttc

SEQ ID NO: 19391 - DNA, 654 bp, Glycine max
  unsure (1)..(654): unsure at all n locations
cggggaacgagttgtccccctgagtgangcagcatttangtacactatgaatactcaagctntgcngatntgggtctcgccagtgaanggatcgaagtggatctgaaagangcatatttatcatcctgcttagacgaatgagaaatactgggcanataaagaaggtgaggatgatggagaaacccatgatgtgactgccattcctatacggccaagtttcccaccaaacccaacaatgtcattactcagtcaataacaaaccacctccttacccaccacccagttatccacataggccatccctatatcaaccacatagcctgtctaccgcactttcaatgacgaataccacctttagcacagaccantataaacaccaaccaagatatgaatnttgagcgatagcctgttgatcacccaaatccggtgcatatgcaacttgtccatattacttgataccaatgtaccataaccctgtatgtcctcaaacccattttctaggattactctaccacatggctatctggggagcctgggcatcatgacactgatactctatctaagtcatgctatgatctgctgctgatcaagaatcctgtaactacttgcagaagccactggcattgaactgttaatgttagatatagattcacn

SEQ ID NO: 19392 - DNA, 446 bp, Glycine max
agcttcaagttgcttggacaacaacttattttttgccaacaaggcatcttgagatgaaagctctaataaactctttttggtaggaatatgaactctatcatgcaaaattgcatgggcactggcaaccatattttcaattaaaaacatgggttcttcaagtgtcttcacggccataacccattgatgaagatgttcaactatataggctctgaaaaagctacagagggagttttctgtaccaagctatagaatctttcttatgcctcactcaaagattcatcgagaaactgatggaatgaagaaattacaacttttccctctacaattttaaactctgggagatatttttttagaaacttctcaacaacttcatcctaaggctttaaaactgttccctttgatgaatgcaacgatctcttgttctccccacataaaaaaatgaaaac

SEQ ID NO: 19393 - DNA, 341 bp, Glycine max
  unsure (1)..(341): unsure at all n locations
gtattcaatntcataanatgttgtatctagagccatttgngtgggtcacacnngttgtgactcgctggggctaaatgtctgtctgggatgtgatnttggctggctaggctntaatctagtcgttatatgatgattantaaatttccttaactcttccttacttttttatgatcaaatgactttaaactattttgcaatatatatactatntgatgatgatatgtcattctgacctgttatattatgtaatgtgatgcattgttaagtgatgattacgatatgtttacttatgtatgagaaattcttaacgtctattgataaggattggtatgttgtgattc

SEQ ID NO: 19394 - DNA, 395 bp, Glycine max
agcttatgacaattaactaacctacacttatgtataatgagaggttctattataatgtgtatttaatataagcttctggaacagtatatgaaaattggatatgtcaaaatctccgacttaagggcaacaaagaaaaaggaaatatattaactggtagtaaatacaagcctagtgcaaaatgagctactgtaattacttatacctattttctaagtgatctttgaagtttaaacaaacacttttgagatggcttttttcaatttattctaaaacatcttactccataatttaataacacatacaacaggtcttgtaagctatatttttgcttcctgataagtgataagctatatttaatacccacaacaagctcaaaaataataaatactgaaaac

SEQ ID NO: 19395 - DNA, 239 bp, Glycine max
  unsure (1)..(239): unsure at all n locations
ctcagctatgctgaacattatataggacctctagcagcnaactcacaacagcaaagtaattatgacttttcaagcaatagatacaatccagatgggaggaatcatccatatctgatatggacaagtgtcatactctaatntcgtccggggaccatngtttgatggcattgcaaccttggttgaccgcttcgaggtacttggcaccctntgctgcacaatacttgaagtttcgagacatg

SEQ ID NO: 19396 - DNA, 311 bp, Glycine max
  unsure (1)..(311): unsure at all n locations
agctttgagaaaacaacaaaagactccatataggatggtgcctcttgtacaaattccacccacatgtgatgcgtcacccatgagggcgcggacttcattattacttnngnnnncngcccgagaaatttttagcacacactagttagagtaatcttactcaatgttaatcggggtaatttttgcctgaagtcaaccaaggtcttttttggtcaacttcgactagcctgtatattttgctaaccttggtcaagattggtttcagcccatctaggctaggttatttttagcccacctcaatcaagactattttt

SEQ ID NO: 19397 - DNA, 527 bp, Glycine max
  unsure (1)..(527): unsure at all n locations
atcaacaccgtgtntcttatgaccatgcagatgttcctcatgactagcctnggattatataagacatgacactgntngagatgtgacatgtgtcctattcgactatcatagccgcatacaagctncaaccagttgcctgtgcactatgcaaaactgctaaaccaagtgcaattcgccggaatagaccttgagatcccgtattactattggagatattgtttaagcccaacaacctgaggcaaggtgttttgatggggcaggaatgtatgattgataaggaccaaggctgacagatacttatcactatgctgaacaaggtgtactgagtgtagaattactaactcaagacaatacgaactttgcctatgatcgttgactgggcatcgtatgtatttgctaaaacttgctgcataggcaagatcagtcgtattgattctcaactagcaatagtttgaacttaaaccttataagaagatgattatacatctttttttctcttcctagacctgctaacttttatcaacgcg

SEQ ID NO: 19398 - DNA, 388 bp, Glycine max
  unsure (1)..(388): unsure at all n locations
agcttctccttcatagacttgcatacatggctccttccatgctanttccggcccaccataaagacgttcttttggtcattcccccgcaccctgtttttggtgaagatatttatattaaactcgcatcaacattacacttcgatcatcccactgctaggtttttccattgcatattctaatttattatgttccctgctataggcttagatcccttcgagttgtcatttttttagattcgataaaattcatcactgtgcctcaccactgactgggccgagagttggatgttattccatagtttttcattttgtcccttccagatcccccacaacaccattgtcatttgattgatttgctcctgctgcaagcatgcatgtagtggaaaaat

SEQ ID NO: 19399 - DNA, 645 bp, Glycine max
  unsure (1)..(645): unsure at all n locations
cggggacgagtgcacatagtccttgttctacgcttcatatcngactctactatgaatctggaaccgtcggtcacctttgcagatgcccaccatatggatcgcacaagttaaggacactcanaccgatgacccccagacctacactctgagaagtcgcaggcctctccctctgatcangtcaacccanaaaaaanaaacatttgacacacagactctacctatgaattatgcaatgcacaccactacctcaattgtnttcaaaatctcaattgtatatatatttctttaaaaatatatttaactcagtgcgcatcaagtgattaactcgtcgggttccacagtggatcccatcacactcatcgcgcataactcgtcgccttgaaggtctacantgtgtgatacatattcatgggtacactcaaacatacacatctcagagtatgtantcacaatccatatgttanatgatatcactacacattattcaatcacatttcattataaataattatctatctattcttctcacatatattcatagtacatttcttgcancacaaaatttaatttaattaaccccaatttttatttcacaanntataataaaaactcttcacagttatcaaaagctcacatatcactggn

SEQ ID NO: 19400 - DNA, 368 bp, Glycine max
agctttttaccaacatcctgtaattgctgtcttaatgacactgagtagactacacggatacacacaggaacaataaattcataacgcttaaattttcctcacaaaatgaaaagttaaattttagcaaagacttctttaccatcgccagagttcaaaccaatgagcaaatcatgcccatccttagcatcctgatcaaacgtgtggcacacaggatttgagttactgaagtgaatagactttatggggtcctacacgcaacaagaaacctctcatgaaccatgaagcaaacccaaaattcttaaaatccatcaaaatctgaccaatataccttgtcttgcgaaatcaaatcactaatgaaaattgcttcc

SEQ ID NO: 19401 - DNA, 636 bp, Glycine max
  unsure (1)..(636): unsure at all n locations
nggggnaacgagatgcgccactangngtcaatagacgcaccntttgctcctatgctccgaactctaatatnctagtggatatcaattctacattaattctatcttgtgtccacataatgggacgtaatcacgcttntggaagaacatacaccacatctatgttttctagacctagttcaccgagagtcaaagacataanagaaaagtagtcaaataatttctcccncttgcatntgcacatagaattgacacacgagaattcatattcaagtgggtttatcagcttggacatggcttntatcctcagtngaagatagaatggtttcactcaatgacatacacanaagatacgatattgacgaggcactcaagagaatagagagaaattcctagaatgagagagtggtgaagtcggagatggatatatatacatacagacaatatgaggtataaaattagagccatgaagagtagagagagagttctgactatcaagtgccgacttaggtgtgtctctacccttctttatacatggtctgcgaattaacacttattgtttgtaagtggaaagactgcccttcacaggagctatgtagaagctttcaaataatctactgggggcaggctgctaatttg

SEQ ID NO: 19402 - DNA, 483 bp, Glycine max
  unsure (1)..(483): unsure at all n locations
agcttcttatccaaggctcatcttgggggtgaatcttcttcttccatggcttattccctagtggatggcgcctcctctcacctcttctcctttgtcttccactgcatctccatggtggaaaatcaccattaaaggacctcattgatgctcaaagatccaacatccatagaagccccacaagcaagcttccatcaggtttggcttccacccattttgagacataatcaacagcaaggagaaaataaacaaaaccaaaagagacagggaaaggccccataaaatctataccccattatgcttagcatcgctcttaattttatcattttgagctttagatgctaagggaagaaaaacagaagcaaccaaataattcacaatattagcanaccaaggagtggggaaggaatcagaaatactatacagaatgtacaaatggtcatctggaaaatcatcccgaatggatgagtccttagaggcatgctc

SEQ ID NO: 19403 - DNA, 375 bp, Glycine max
agcttgcttgtggggcttctatggaggctgtttttttgagcttcaatggggtcctttaatggtgattttccaccatggagatgcagcggaagacaaatgaaaatatgtgagaggaggcgccatccattaaggaataagccatggaataaggagcttcaccaccaagatgagccttggataacaagcttggagaggatagcttcatggacgaaaagaaagagggagagaaagagagagggggagcacgacattgaatgaagaaaaagggagagaaaatgaacattgagttgtgtgtcacaagactctcatttatgaaagtttcaacgagtgttacacatgcttctatctatagactacgtagcgtacttgagaagc

SEQ ID NO: 19404 - DNA, 611 bp, Glycine max
  unsure (1)..(611): unsure at all n locations
cgagtggcacttgatgacctcttatactcagcgtgtcgtgatgcctgactacaaagaatcagtcggttattctctatgactagagggttatattctcagagagtacatatcccagacttatcacaatggtcttgttaatacacttagagtgctcactagctctatacttttatgtgcttttgaccttgatacatcaacacactgtattctcttctttctcttattatntataacatacaacttacttgatgtgtgagctgatgctntctcttcttcttgcatcccaatagttccactcccccgaagttggggaaaattgccttgaactatatgctctcctagaatctaagcaggtatctggagagaattattngctcaaggttaattatngaanactcatttctcaaatggtgcaatgatgaatataatcaggtagctnttgtcaaaggcttgatgaaatatgtctcatatgtctcctatcatcatctaattaagatatgcatatatacacactgcgtcctccatatgtcactcccgtgtgtacgtttctcacactgtatgcaaattaagccgaaaaacactctcaatgcttattatgactcaccatcaan

SEQ ID NO: 19405 - DNA, 380 bp, Glycine max
agcttataccagtataactgtcaccaactatttacaccatttaataactttataaaaaacgagaattttattgatccaatttttgaactaaattttatattatcttaattggttctgacagaggaaaggaaaatatgtccttttactcttcaaaagatcttgaaactaaaatagtaacagccatgaagttgaaccaaactccacctttagaatggagaggtaggaatctgaaaggcacgtatatttccctactaaagctatacgaacctgccatttaaaagaaacaaaattataaccattgccaacaatcatggataatatatagattagctttggattagaacccactggttcataaagcaaatcactagattcagctc

SEQ ID NO: 19406 - DNA, 687 bp, Glycine max
  unsure (1)..(687): unsure at all n locations
atgagttgccaccatagtgaccnacactgtactcancctcaagcttcctcacacgattgagatatacagagtgggctgcactaacntcgaatatcacaacgtagggagatcctatngtcgaatcatatacccgtcgatagatctgtggatatcatagctntggcatcgctaagggtaaagactccttccgtggccttcagatgtccagtttggtcatctatgcctccaccattctgccccttcttgagatatggacaatatctctgaatatgccgccttttgtctacaattaagataggtcatgcctctatcaacataatttgacgagatgtgctctcgcgtaccacacttataacaagtgatctatgtgcggaaagtattggcgtttgctccactaccacccacanaccccatagcaatagtcctctgattggtggtgcagtaccatatagcttaggacgcgttgagtacagctatacccgatgttanggtcatnncttttgtcttcattgacctatactctatatatgtcgcatgctcggagtcttattcatatctgacatcgtacaagagtggaatgcgacacntggnatcacatctgctactctgtncgagcatcaaactaccatttgaattacattctcttaatgtgaagactacactctaacttgtgtatagccccatttg

SEQ ID NO: 19407 - DNA, 377 bp, Glycine max
  unsure (1)..(377): unsure at all n locations
agcttatctctcaattggtgacccaagataacattttttttatctaaccccccatctattggtgagattaaaaatgtagttttcattatgagtagctctagttcccctatccctgatggtttcagaggccacttctaccacaggtactaggaaattatctcaaaggttgtctataattttgtccttcaacttttttcaaaagaattggcttctccttggatttaaatcaaacattttttgcctttattcctaaatttccataagaggatagaatagagaacttcagacccactgctctgggtaatttccaatttaagattatctctaaaatcgtcacaagtagattggcctanattactcctaagctgattttaata

SEQ ID NO: 19408 - DNA, 186 bp, Glycine max
  unsure (1)..(186): unsure at all n locations
gcttgcttctacatatagtttggtgagccaatctcgcaagctgtgcatgatataactgcctggaatagctctgagcataggactagggttggagctctgacatccgtcctattgttgtgatggangagctggaatggatgatgaagggatgtcatctgctcttgccctntttctcgatgccatctg

SEQ ID NO: 19409 - DNA, 330 bp, Glycine max
agctttataagcgcgggtctgggagatttattgtaagtggtcgcgatatacaaagatgatgttccgagtacattggatttggtacgaccatgccctcctgatttccagctgggaaattggcgagtggaggaacgccccggcatttacgccacgagcataatgtaaacctttacggttttaaaagctctataattgggcctaggctttagagttttttctattgttaaagctttgagtcttttgcttttgaatttataaaacaaggatccttctttatctggtcctacgacgtctacccattctcattcatttgcatgtttacttcttttt

SEQ ID NO: 19410 - DNA, 202 bp, Glycine max
tctctgtatcctatgtgcctcttacttttcttgtttcatgatctcatgggaatacataagactatgtctaaatcactctaaccccaacactcatcagttgctcccattgactatacacatgaaatacaaccaaaaagaagcctaatatccttctactgctattatattactaatcagagaaacaacacatatacattacaca

SEQ ID NO: 19411 - DNA, 328 bp, Glycine max
agcttgcctccatcgcgcgaggggaattatcgtatcaccctcttgccatccacagctgcggtgaacgtacgtccataccggtaccctcattttcagaaggctaaaatcgaaaaaaaattgcagaattgctctccgcgggcttcatacggccaagcacgagtccatactcgtctctggtccttttggtgaagaagaaggatggaacctggcacctatgtgtcgattacaggtccctcaacgccgttacagtctgagataggttcccgatacccactatcgacaaactattggaccagctgggtcacgcttcttggttcactaaactcaa

SEQ ID NO: 19412 - DNA, 158 bp, Glycine max
  unsure (1)..(158): unsure at all n locations
caccagacttcttctcatatgtcacatacccatgtctatgtggacacatatgataagaacaacctgagtccagtacccattggtcagagtgtnngtatacttgttcaccaacaaccaanactaaatcacttcccgatgaggagtcattctaaacaaga

SEQ ID NO: 19413 - DNA, 455 bp, Glycine max
  unsure (1)..(455): unsure at all n locations
agcttgtgccattgttgccttttaaaattttttgcattcactaatccttgtgtaagtacccttccaaccaaccaatgatgatctggttctatcttccaaacatgaccatattcacctagatctagaatcttaatcacatctccatcatcttccactaaaactttatttgtgcacaatccatgataacattcacgagatccacaccacaaaccctaatgagttgtgcatgtgagcgggattaaaccctaacaatcaacaatagtgctgagaaaagcaagaatacatatcttgggaatgtcaaaaccttaatgacacccctaagggagcatgtangaagaataaacttaggttttcttttgaattaaaagtttttgtggatttttcaaaataaaggaaattttaaaaagtgcatttttatccctttataatatttttttcttttgatttctcaatat

SEQ ID NO: 19414 - DNA, 608 bp, Glycine max
  unsure (1)..(608): unsure at all n locations
atgcgttggcnaccttagtgacgcccgcatgnangtgacactatgantactcaagcctatgagtgtgtcanacagttacaantntaaagaaaaaactctacgttagcatataataagatantaagttcagcataattcaataaacttaagaatatanactaaacatattananagggtcagtcccatgcaaaagtgctaataatattagtaggagactagtgagtagcanagcatactttcatgatctgtgccanaaatgaaaaatatactagcattaagctntgagtattagcaatggttatatnagtagttctaaaattgacatagcatttgcgagggatcaaccatntagctatagaaccttactgatatcctcccatatanattctcatgctgataactgacacctcacaaatataccctctatggctactgatcatgagtatatcatgcttaatattcactgactcttgagagggtgtggagcgattacttgagcctgctgcttagactggatattatgtaaaataatgagctaagtcctatatggtaatcatttatacacacccaactatgacgtttgttgcatgatatacatggtgtgtgt

SEQ ID NO: 19415 - DNA, 230 bp, Glycine max
tgccagcttaagctccgtaaactgcactttgttattattattggaagagtatccttgtggaaccttctctaatcaagctttagaagggaacaagttaatggcggatgctattttttacactatggacatggctgaagaactttgataaggacttagccttcacctacagctagagggattgtaacatagcatcgcgagtattattttcaggggggcctaaaccatagaca

SEQ ID NO: 19416 - DNA, 274 bp, Glycine max
agcttgcctcaaagaggtccaggaatgatatgcggccgaaagaactagttccgctccggagtacgacagtcaccgctttatgagcgctgtacaccagcagcgcttcgaagccatcaagggatggtcgtttctccgggagcgacgcgttcagctcagggacgaccagtatactgattttcaggaggaaatatggcgccggcggtgggcaccactggttactcctatggccaagtttgatccagaaatagtccttgagttttatgccaatgctttg

SEQ ID NO: 19417 - DNA, 214 bp, Glycine max
  unsure (1)..(214): unsure at all n locations
taactttaaatcgaggatactttatagatgactgaaataatatntggggtaaatgacaatggaatcgaaccatgaacaaaggctaagtacttcaaattagatataatatttttaactaaatctaccaattgaaataaaattattaacctaatcactataaacacttgagagaaagtcacactattcactattgactttttacatggactacaca

SEQ ID NO: 19418 - DNA, 369 bp, Glycine max
agcttcattaagaggcttctagcacactttatacatcttctcaaagatcccaacggtcagatcatggaagcgtgttttgtgaagttgcagaccaaatttcgagacgatccaacggttaattgaagctaggaagcgtttttaccgaagcagcttcatgtagctttctctagaagcttcattaaaaggcttcctctagaagcttccttgtggcttctttgagaagctttctcaagacgcttctttgagaagctacatccttatctatccacccctctattaactaaattaacttccttaaaaataattacggatgaaaataacgcgccaaatagtcgaacatcccacattattactaataatatatagata

SEQ ID NO: 19419 - DNA, 59 bp, Glycine max
aggcctatctactggaactcggtatcgcttctttagggtgctcggaagtactattatcg

SEQ ID NO: 19420 - DNA, 274 bp, Glycine max
  unsure (1)..(274): unsure at all n locations
tgcagcttgaaagctgctctctcctatttgtactaataatggcatngaatgaaataaaactagcaagttagtgaaaagttttccttctcacatagtcaaagcctgaagaggacagactaaccaccaggattaatttgcgtaagacacaagtacagattcatgattggcgaagtcctttttgcaagggtgctgaaaaggaggcatcttatttcgtcttccattgcatcttgatccaacccctatggggagaatcgatgtctttgtttaacttaaa

SEQ ID NO: 19421 - DNA, 279 bp, Glycine max
taatttacctgccaattaaatgtatctaactttctaatttgtcacactgcttgcaaagtcatgcaaacctgttcattctcttctctctcaaagcttaaacgctctgtgatcgactagatactcttagtatgagaggaatctttgttatactgccagatactctggtatgcaagggtgcttgtgacctaccagagatctgggatgtgtggattcagtttaacccatatgtgacttgtgcgtggcaccttatcgtctttttctatctctcgttttactagc

SEQ ID NO: 19422 - DNA, 322 bp, Glycine max
  unsure (1)..(322): unsure at all n locations
tgcaagcttggaggattatggggtatccatcacatgtgttactaggnggcggncgggcgatggtgcacaacaagtttttcacatccacaaatcgcgcataaacccaccatcccctgttgcccacctccaactgagcttacgtactcccacgtaacccatattcttgtttctctcaacaccgggtccccatcaatccttccaagcttccccaacatccaagtaatacaaaaatcaaacagcacaagctatcacaggccagcaaaacatggcaaaggcaaaagactctgcccaaaataccaaccaaaatcacagcttttctcac

SEQ ID NO: 19423 - DNA, 72 bp, Glycine max
atatcttctctttgaatctttaagatctacttaaacacctgttcttggagaaacataaaggtgagtgtttta

SEQ ID NO: 19424 - DNA, 233 bp, Glycine max
agcttgcacttgaagaaggaaggatatttgcttttattgaaccactttcttaactcttagggcttcaaaatttaatattttcttttgctaatacgtaacaattaatcgtataacgctatggcttatggacatgggcatttttacccccaacactcctagaggtaaatatataccatgcttctacgaaaaaccagttcctgatagatgggcctggaaacattagcaaaatggac

SEQ ID NO: 19425 - DNA, 246 bp, Glycine max
  unsure (1)..(246): unsure at all n locations
gctagtgcanatccttgtagcacatgttgtgacatcctagaattctacccggannatttgtaagcgttacatttaaattctactaagtgtattattcagtgtatatatgtatattctnggtagaagtatgtacattggaagagaaatacacgggttagactatatagcgaagagtaatccataactggacanngtatagataatcctcaatttaatagtctaaaatatcngttgcgtgcaattaaa

SEQ ID NO: 19426 - DNA, 218 bp, Glycine max
aaaaaattttttttttgggtacacataactgactcataggttggctcacctactttggatgagaaactcgagcttaactcccacccttgtatatatctaagctcacccccatgacataatacatgtaaaacacaaaagggtacttaggttcatctcaacccctaataccccgttctactttgggtaaaccctctacttctactatggtcaaaatacta

SEQ ID NO: 19427 - DNA, 643 bp, Glycine max
  unsure (1)..(643): unsure at all n locations
cggggccgagttacgacatgatganacaattgactcaccnccagangattnaattgncgtggtccctcagatcggtcgncnaatngactgttcctatctngtctattactgnatgcataaagcattacaggcatatgcacctcttccatactcccaacttgtcactctctttctccaacantttcatgtccctctagatgatgaaccctttgtaaggttaaacgatctcttgctattggagctgctgctatcgcctactctggttatcacaaggatatgaatggtcagagtgttcagaaacaagacctatcacctactgtttctgatgaacgtacaccctcaccatcaccacacgaggattcctcgtcttcactgctgcatgatgtgctcactgaacttcaggagcccttaggcctctgtggtgactgtctatatgctatggaatgatgtatacgcgtcttacgatacatgatctcatctgtgatcttgatcttcgctatcattagccttttgactattctctacatagctgcttatactggatgtaatattgatatgcctaatgcattttttatacgatgctatagactggcgctatgaagttgtagaatttttcggtatattgcctcgtatctagaatgtg

SEQ ID NO: 19428 - DNA, 493 bp, Glycine max
gcttgaggccttggatcttcttcatttatgaaatcatttgcttcttgaagatcatggaagtggaatggagaaggaagaaagatgattggagacgccacttcaaggagaagataagtgtagaagctcaccaccataggaagccatagataagagcttgaaggttgcagaagatgaattgatggagagggagacaaggagcatgaaattttgtgcctcaaaagaggtttgaactttgaggtttaattctcaaatgatcaaagttgaaaaaatgcacacacatgacctctatttatagcgtaagtgtcaaacaaaattagaggggaatttgaatttctattcaaatttcacttgaatttgaaattgaatttgtggagccaaaatttcactaattatgattagtggaatttagctatggttcaacccactaatccaagatcaagtccaagaatcttcactaagtgtgcttaagtgttatgaagcatgtaaaacatga

SEQ ID NO: 19429 - DNA, 104 bp, Glycine max
gttgacctggatctctcatgtaagtacccatcctgatgtcatgaaatatgaaagtttgctgtctctcttgattctcgatttgtcttattcatttgccagagtca

SEQ ID NO: 19430 - DNA, 439 bp, Glycine max
agcttcaatggagcttacattagtaacctttcaagaatgtttgattttgaagatatatatggaaagcatcttcaatttgcttgtatatttggtggttttttactgagaaaaataatgaatttgcctactctaaatgtggaaaacatcttcaattttttatttcatgtagaaattgcgataatatgttttttcctcttttgttgcatttatacgtaaccaattaattaaatctgaatatacaatatgaaacttgaagctatatatttagtttagcaaatactgtgagaatctataattattatactcaattgattagtgaaagaatgagttgagaattttttggtgcccaacataagtaatctctatatgaatagtcggcaatttaggttttttttgtttattagtagtcaacaatttaaattgagcatagtaaaatgtt

SEQ ID NO: 19431 - DNA, 210 bp, Glycine max
  unsure (1)..(210): unsure at all n locations
ctagtagtgccactaatgctgctgtcaccttactttatctgttgcaagtacggctgacacttgtggggagctatgggtcactgtgtatcccctgacaaacattcatgaagttattactgggaaccacctaacaaatntaatgacgggatttctggattaacatgccaatctaccacaataaatcaaggagactcacctggtatcattaat

SEQ ID NO: 19432 - DNA, 378 bp, Glycine max
agcttgcttctacatggagatgtacattttgttcacttagtacaaaatttggcttatcatcacaaatgatgatattcccatcctagattaaaagcacaatgggcagatgctgatctggccactatggaactaaacacaagagctagatatacactagtatgtgctctatataaaaatgagtacaaaaagatctgtaggcttaaaacaagcaaagagatttgagactcattaagcacaaactacaaaggtacaaaatatgtcagacttagaaaggctgctactctaactagacattacgagaggttcttcataaaagaaagagaatttgtggatgacatgtttgagagactgcaagttatcctaaacaatctataagct

SEQ ID NO: 19433 - DNA, 300 bp, Glycine max
cagcttgtaaaaatagatatcaaaattttttttatgggtccagacgatagacccagatcttgttaaacaaacaaagtttttcaaatacaaaaatcaaattcgaaccttgagtcaattttaagcacaaaagaaaaaattaattaaggttagacacaaaaggttacattggttcatctcaaccactaagactacattcaggtcttggtaaaccaccaagttccactaacttcaacacgttacaagtattaatcactggcacttttaactctacaactcaaactctacacccagcttgttaca

SEQ ID NO: 19434 - DNA, 642 bp, Glycine max
  unsure (1)..(642): unsure at all n locations
cgagtgcccccttattatgcctnttgangtgaccttagactctcaagctctgnacttctgagagnggagagagaattgggctntaantataagaatttctnttttcttttgttntctaanagcacttgccacatgtctgtctttaagtggagcanaanaggtccaccttttcccttgatttgacatcatactcagccacaaggagagaaaacaattgacccttatggatgctgaattctgccttggtatgcatgcctctctgtgtccagttactcgcgtttctctacacccgaccgggccctgtttcgaaagtaggcaatatatatatcaaaacgctcagaatgagaccctgacatggtcaaagttggttattaaatttattcatcaaatgaaattttaactaattaatgcgaataatctatgtcgtctgtatctgtactcttattatagtctacccggtatttccccgatgacaacttctccagaaatattatatatattattataataatatttgtctttataatatatctgtactcacggagtatttgtgttcactacgtcaactgtccctcaatcgtggntatctatgtttcactatgctatctaatttgttaacttgtctctctcttctaccggccg

SEQ ID NO: 19435 - DNA, 328 bp, Glycine max
agctttacttgtgaataacaatatctttttattttcctactttggagtttcttgttctgttctctctgcgggtatgcatcgagtgatgagagagacccagagagtatttccgcacaataactaattaaccatgctccaatatgaaactaatttttgtcttcaaggatgctttcatgggaaaagacacttgactatgggacagccgccggcctgcccaaaattattgaatacgcttgtcggaagatatgagtgagttggtttttcaaattaaaaacttcttaccctatcgtccagagactcttcgttatgcgaacgtatgggaaagaga

SEQ ID NO: 19436 - DNA, 449 bp, Glycine max
  unsure (1)..(449): unsure at all n locations
atagactntgtacctatagtctccacaattcgaacaagcactaaagggtgatgcattgattactagaccaagactagttagtagaaagagtagaaaggctaccatctnntgttgaatatggaactagctatgaagaattagttcacatttacantaaatttcaaacttactattttttacanaagataanatcaacatagttaatcaaatatatgatgcatcanataaaatagtggctggaggataaagtatagttcattctatataataagaaggaaaaagaagactgtgaatangattggaatataatgacgcttaatatatttgtctctttnttaaattacttattttatttaatggattattttatttaattatattagtcttttataacatgctcactttaaatatattagtatgtcattcagatatatgtttgaattgtgctg

SEQ ID NO: 19437 - DNA, 408 bp, Glycine max
  unsure (1)..(408): unsure at all n locations
agcttntcaaggaagctaccttttttattaatagaagcatgtgtaacacttgtggtaactttgatgaatgagagtcttgtgagacatacttcaaagttccacttctatacctcttttattccttcaatttcgtgctcccccctctctctttctctccctctttcttttcctccattgaagcatcctctccaagcttcttatccaaggctcatcttggtggtgaagctccttcttccatggcttattccttaatggatggcgcctcctctcacctattttcctttgtcttccgctgcatctccatggtggaaaatcaccattaaaggaccccattgaagcttaaaaatccaccttcatagaagctccacaagccagcttccatcagatgggttttaaaaatttccgctt

SEQ ID NO: 19438 - DNA, 613 bp, Glycine max
  unsure (1)..(613): unsure at all n locations
attgatgttcttgaggagatcatnactctangactgttccatcacntgatgntgtattatggaggatgttgatgccatnttgtttaagagagtgaccactggtaaaactaacttccaatgcttgcctcgcaagaattggccacgaagaagcttgcctcatagaggtccatgaaggacaaggcagccgaatgaactacnttcgctccggagtatgacagtcaccgctctaagagcgctgtacaccancagcgctnttacgccatctagggatggtcgttctcctggagcgacgcgtcagctcatggacgacgagtatactgatntctcagaggaaatatggtgccggtggtgggcatacttgntactctcatgtcaagttgatccaaaatagtcttgagtttatgccatgcttggcacagagatgcgtgcgtacatgaaatctggtaagtgcattgatcccgtgaaccgcactatcgcactctagatatcgtggtgtgaaaaggccgacggatatgctcagagaaccgctatggtcatagagctcgccctgttttaccggcagattgccgatgtgatgaggagtctattccctactgccctgccaatgatgcct

SEQ ID NO: 19439 - DNA, 308 bp, Glycine max
agcttgaatcggacctcagtgtgaaaagttatgaccattttaatttcctaagagcttccgctgttcattatcgagtgtctctatatgtgatgcgtcttaatctaacatccgcgggaaaagttatgaccatttgaatttctcaagagcttccgttgttcaattccgagcctctcgacatattatgcgcctgaatcggacatccgtgtgaaaaggtatggccatttgaatttgtcaagagcttccgatgtttaatggcgagcgtatcaatatattataaccctgaatcggatatccgtgggaaaagcttt

SEQ ID NO: 19440 - DNA, 657 bp, Glycine max
  unsure (1)..(657): unsure at all n locations
atggggnnaatgtgttgnnnncnntgnnnttgacgcaagtgactcnacgctgcangtgacactatgantactcangcctggtgtcgattcacatatactgcantcgattacagagcagatattcgtaaatattatcaatcgtcacatcnttatatgtggttctngaatggctatcanaggcctatatatatgtgactctatacactaatncgctaagagttctttagaacacaaaggtcttatcctcttcaacagtactaatcatttatcctcttacaaagtccctggccgagatacttgtgatcaataaggaattatttagatctcaaattgtcaatctattctcttaagagagatgtcttcttttctcttcttcatctgaaagggattaagagaccatggctctatcgtaaagaatctaacacaatgaatagtgtcctgtgtgttagaactgtaaaggaattacaagatatgaactctcaaccggttgtcgggacttacgctgcacatggtgtgccgaccatataatcgagtagcattctctctctaactcttattatataggtatatctatcaaatgttatcgatcatatgacaatcgtataagaatttacttattaaggaatatttatgggatagtgaattattacctccccg

SEQ ID NO: 19441 - DNA, 427 bp, Glycine max
agcttgaagaacacaaaaaactttttttttttatgaattacacaaaggatgaagcagagggtaagatgataaaagttttgaagtagacgaagagcaatgcttgcatcaatcagaaggactgaagattgttgaagatgagaatcgactcaatcactgcatccaacagtggatgcaagggtggttggtgctacaggggtggctggtgatggttcattatggcaaacgatgaatctacaaggatggcctgagctacagtaaagaagaggaaggatggttggggttgcaactataaagaggaggatggataagggtaccgtttgttaaaaacgtaaaacgttattgatgaaaaccatctttttttattttgaaaattgatgttaaagtgttttgaaattggagtaaaaacctttttaccccattttttcca

SEQ ID NO: 19442 - DNA, 271 bp, Glycine max
  unsure (1)..(271): unsure at all n locations
ctcagctggccatgaatcatatatcagcacctgttgcaagagtctgtggtctaagttcttctgtagatcaccatacagatctatgtccttctntgcagcaacctggagtcaatgagtaacctgaagcttatgctgcanacatttataatagacctncttagcagcaaaaccaatagcagcagaataattatgacctttcaagagacagatacaatccatgttggaggaatcatccaaatccgagatggacangttctccacaacaacaaca

SEQ ID NO: 19443 - DNA, 302 bp, Glycine max
agcttgcctgtgaagcttctatggaagctgtatctttgagcttcaatgaggtccttcaatggggattttccaccatggagatgcagcggaaggcaaaggagaataggagaggggagacaccatccactagggaataagccatggaaaaaggagcttcaccaccaagaatgtgtcttggataacaaacttgaagagggtgctttaatggtggaaaagaaagagagaaggggggagctccaaattgaaggaataaaagagggaaagaagcggaactttgaagtgtgtctaataagactttcatt

SEQ ID NO: 19444 - DNA, 309 bp, Glycine max
taaactgatctgtttagatcttcgtcaaagctagaggcagtacaagttctccgtcatacaattctcttcatcaattcacttggggatgtaggacactctctagggatccggccacaaaacacttaaggggtattcatattgatgtactgacagggaggctatctttggaataactctcctacttccagtgcgcaagccaacacataactggttaatggagcttgatggatttccaggcttagctactcaatgacatacatacactggttattgcctcatactatctgaagcttatcctcctgcggtttt

SEQ ID NO: 19445 - DNA, 447 bp, Glycine max
cagcttcaatatagctgctggtaccaacactcttaaaatcatttcatacaattctctcattggaacaaccaaagctatatagacaagagaagggaagtgctttggatagctctatccatgactatttggaaacctaaaaattcagtggttttcaataaccaaattttcaaccccgaaaaagtcatggatgaagctttattccacacttggtcatggttaaaatgtatggacaaagatttccatattcatttcaaccaatggtctactagcttgaaagaggagctgtcttagggggttctttcctttttggtttcagctattgtgtttatgtatcttataagtgggatcggcaattatctgccttgtatctttttaatcctctcttcagtacacctagtactgaaatatatataatactatctgatttttgcgtggcaaaaaaaaaaa

SEQ ID NO: 19446 - DNA, 265 bp, Glycine max
atgggaccgctctgactctggactttaacatggatgaggatctgtttatttcattataagttgtatatagagctttgctggctgtgtatctcggttgttagcctttgtagcttgcatctgtggtaccagtgaaaatggtgacattatagctacataatgtgacatccttgtactatctgttgttatcttcacatggatcatctcaatctggtaacagaatgtttttatttctctgaaattatatgggaggtgtatgagatttata

SEQ ID NO: 19447 - DNA, 419 bp, Glycine max
  unsure (1)..(419): unsure at all n locations
agcttgtaatggtccttgttgtagagcacatgttttatatcaccgtanaatggatgaatgtcgtcaagccgggggaactcgtcgattatggtggagagcttgtcgtgaaaattctgctgagtatacttcactttgcgcatgtagaattggcgcagccgtgaaatcgcatatcctttgtgcacaacggttggtgtctgacgctgggtgcgagagaggataatgtcgaccacatgcttcccatttggcaccacggtaatcttcttaaaattgtactgaaccatcgtgctctatcaaccttgttgccacagaaaattaagaaaaagggactataagagtaaaacatgataaagtccgcggagctacataatttgagatcccaattgaaagctgagagaaaataaaaagcgattatgtgaatg

SEQ ID NO: 19448 - DNA, 701 bp, Glycine max
  unsure (1)..(701): unsure at all n locations
aaaanacatcatatgccgtaggtcaataactaccnnangactacttngcatacantgctatggcactaccacatgcctatgatcatgacncntccttctcgcaaccattcctncggcctcattacaaccactccttcccgcttccaaatctgatcaccatctcanacncctcaacataacctgcaacatagaatcatatatggtggtgcanaggagtcgtgcttgctgatgtgtggtgtgtgaatgacaccacattaacaatgcctctaatgagaagtgtggcacaatgcaatctgattgatctcgactcggaatggtggcgcatcgcacacaatcttcatgaatcttgacttcngaatgtgtgtcgcgagctacagtgcttgatgttggacgcgagatctacttctgctcatgacggtatagagaatcgtacgtcgtgtaacgagatgagacgagcactngtcgtcattgatatnagttcgtgtgccatacatacatcgactgtatttacttcacagatcgtactagctgatgtgtgactagnactctctgtttcattatgtgatatctcacatctactctgcgtttagtcataatatgatctcgtatactcttcttcgtttcatcaacaattagtgtatatcgttacttctgtatatatattagtcaccttcatcctcttcacgattcgacattttccg

SEQ ID NO: 19449 - DNA, 344 bp, Glycine max
agcttattattgttagggtttcttctgttttggctggctaaacaccctagttggggatttctaaagaacagctgatgtaaatacctaatatctaattgattatgttttctgtgttcaatgcttccttcaatgcttaatgtttctatgcttttggtctgatcatccatttgtgtgcatagttaggtgactttagcattgggaaatatactgttgccttagaacttgatggaagcaggatcgaaacttaatcttacaagagggatatgcgaattaagttttggttttaattatgttgttacaataatgttgtttagtctaggcctaatcttacaagagggatctgc

SEQ ID NO: 19450 - DNA, 222 bp, Glycine max
tcaaaagagaatttttcatctgttgacaatgaaaactgggcaataaaggtgagataagaaagcctgcgactgcattctatcacaaggtccccacccacattatgctattcataacacctatttcctccaccgcatctcaagccacctaataacacaagctactacgttccatgctcacacctatctaatcaacacacaagaataattgtggaaacttgatta

SEQ ID NO: 19451 - DNA, 523 bp, Glycine max
  unsure (1)..(523): unsure at all n locations
cggcnatagatctgccttganntcnncagtgatcacctgtagtgcacttgantctcagctgaatgacaacgagctctcaaactcaatgcgttctatacactgtgccattgggcgctaattataagacgctcaattaacacaatctccagaatcaaggtgactataacgatcgtcaggctatcacagcctcaatgacccgatgtctcagagatcaaaggtataatttcaactgagccgttaggcgctatcatcgaaactgaatgacaacgagcttcagacataaatgcgtacttgcccggattctagtagccatatcatgaacgctcaattgacacgagcttcagaagtaatgtctacttcaacgaagcattagcgctaattcagatgtgatgacccgagcttggaatcaatgctaactttaacggtcatatgccaatatcgatgtaatgacaattgtttaaatcaggttaatgtcacgatcctacgcgttctcgacgtgattaacagtcccaactatgtctcc

SEQ ID NO: 19452 - DNA, 657 bp, Glycine max
agcttgtgactctttgagcaaattgatttaacaagcaatttattgtttctttattaaagctagacaatgaaagacacgtgggtgatcatgaccattttaattagagtgggaaggagggtgtttaaaaccattctaaacaactaaaactaaaaatataaaataatcattttttaattgttctttaattaaattttcagtttctatatattattaaatcagaatccagccacactaaaccaaacccttattatatttgtaatattgatttgtaatacttatgtagtagtagtgttttaaactttttataatagtagcttatatgtaattttatgtgttgaacgtttaagttatattaaagaaaaaatgatttatttgggttttatcttatttttttttgggttatcttcattctttatctattaaaaagcttaaattaattatttattctatttttatattaagtttagtcctttacctttaaaaaatttattttggctaattaatttgtgtttctttcaaatttttcgctatttccctctacttcaattttaacaatttttttaatgattaacaatatcaatcttaaatcagccacccaaatatccaaattctacccaaaattatttaaatctaagaaccttaaggggttgcttttgt

SEQ ID NO: 19453 - DNA, 166 bp, Glycine max
aatgttgaagataaaactgagcaaagggtagatacatgtctaacaatggaatataaaagatcctagtgacttcttatcactggtttggaagtcatctatcctattctgacctaatatatcacctgagaagtaactactcacacatctatggtgtgcacatgctcca

SEQ ID NO: 19454 - DNA, 369 bp, Glycine max
agcttcttccttagccattgtagttttctatgtaattctatcgcccgtctcactttacacctattggattctggagtactattgataactgctaataaatgagtatattttggaggtaaattatataggaatttgtaattcttctctcataaatggaccttttttagcaaaaaattgttaaattaatatcatttaagctttcgcgcagaaaatattaatagcgatgaatttgtgatgcttactgaataacataaagctcattaaggaaaacaaaactatttccggaaaatataactaatcaacgaaagaagactaattgagaaaaatacggctaattaaggaaaagaaattaattgaaaaaagaatgac

SEQ ID NO: 19455 - DNA, 385 bp, Glycine max
tatctcacttgttggttctatgttgcagatatcagctctggatttttattaccacatgcaaggttcaattcagatttttgttcttggctactgtctatggtataataagaaataaacaagtgatcccgattggtatatggtgcaccgccacctataatttctcgttgcatactggctatatatatgatggattctctttttattttgcatttatcactttggatgttctcttgttggtactgctatcatgatatcattattattatataactatatcatttatagtgcatatataactctctgacttttttttttttttttgtcagttaattgaattttacttgattatgttaaaatctaatattgagttatatatttaaaaatt

SEQ ID NO: 19456 - DNA, 344 bp, Glycine max
agcttgagatgaggaagggttgaatgttttaacttcctgcttttattgttgaccacagagtggtacctggagatatgtcgcgggggtcaagagaccttggggacgtcaggtggggtgctattgcccaaaaccaagcttgaccaatcccgacccaacccgggcatagtcgggcagtgagaacctgtgatgtacctaagcaggcgagctcctggcagtcaacatataaaaggaaaacaaagaccacaaagcaaggaggcttgtggtggctggccagctgtgaattttgtgtaatatgtggattgtggcctctggtaatcgattaccaagggtgggtaatcgattac

SEQ ID NO: 19457 - DNA, 640 bp, Glycine max
  unsure (1)..(640): unsure at all n locations
nnnnaagagtagtcctcgatgntcagctnatggaccatngacctcagcttagcatgccgtcgtgatgaagccattgatcctttattgtcatacgtcggtcttcatctgttcttgcactccctcttcattatccatnntgtctaggatcgacgtgttatanngggttgcctttgcgctntcttagntatggtgagtntcctaaagaaacagacaacggtgagtataccaccanaacatgaatatgctaatgaatgatcagagtacttggatcacctcaatgcctgtttagataacgtgatgagctcagaacttctcgttntatacaanagaacacagctnttatctagccaagatcatacaacagtgtacaatagaacctaccgttctaatatacagccatctatctatcatgtgttacagaattgatacctgtaaattctcagagctaacacactcatcatagccttgtntgctatagtcccggaggcttacttcattaaggcatgcgacctatcatcacatatacttctgatcatgatcatacctcctttgtctttcggtacttgcaatcttctacttgtatgtacaatgtactctctgctgcatatgtactctcctcggctcatgtagcactcttgtn

SEQ ID NO: 19458 - DNA, 340 bp, Glycine max
agcttcatcctcagatccctcttgttgggctttgctaaatttagacaaccctcctaggttcagactaacttaaactaagcttcctcctcagatccttcttgttggactagacttagcttaaatagcttacaaaagtttagactaatttagcctaagctttgtcctcagatccctcttgttagactagacttagaccaaacaacattattgtaacagcatacttaaaaccaaaacttaatccgtagatccctcttgtaagaccaagtttcaattctacttcattcaagttctaaggcaacaatacatttcccaatgctaaagtcacctaactatgcacaca

SEQ ID NO: 19459 - DNA, 178 bp, Glycine max
tctcagcttggtatcatacaccgatggtatcataccatgatgttctgaatatcaaaattaactcttcaatggttaagtcttctaaagcatactctttaatggttctgaccaactgaaatcttaaagcaggcttgtttgcataaaaaaatttctacatcaatcattcatacaatcttac

SEQ ID NO: 19460 - DNA, 231 bp, Glycine max
cagcttactttaagaataaccttttttatgcttttcgagaagttctcttataaaaggtttttaaggaaaccacctagtccataaatagaaacatgtgtaacacttgatgctcctctgatgggcgacagtcttgtgagacatactttaaacgggcacttcattacctcctttattcctttaatctactgctcccccctctctctttctctccatctatcttttactccattg

SEQ ID NO: 19461 - DNA, 415 bp, Glycine max
agcttgaaggtaaactagaagccttggtttacctgggaacccaactggccatgaataaaaaatctggccctgtcgccaaactctggggttatgctcctctaccgatcaccacacagacctttttccttctatgcaacaatctaaagccattgaacaacctgaagcttatgctgcgaacatctacaacagaccttctcaacctcagcagcaaaatcagccacaacaaaataattatgacctctccagcaacatgtacaatcccggatggaggaatcatcccaaccttagatggtcgaatccttcacaacagcaggcaacaacaacaacaaccttattttcaaaatgctgctggcccaacaaaccatacgttccttcaccaatccaacagcaacagccccagaaacaacaaacaatt

SEQ ID NO: 19462 - DNA, 204 bp, Glycine max
  unsure (1)..(204): unsure at all n locations
agtcaagaacacttcatgataacagagatgatgatctcaagaatcacagaatgagttcaagattgaatcaagtacacttcaaggatcaagaggagagtngaattcaataatcaagaatcaagtttcaagatncaagctccaagaatcaagatcaagattcaagactcaagattcaagaatcaagagaagactcaatcaagataa

SEQ ID NO: 19463 - DNA, 295 bp, Glycine max
agctttgcttcttatgtagacaaactgcttctcacgtttgtgaatttcatgcttcgaaagtacttgctcaattattgttattttttctgttaattgtatttttatttattttttgtttcttcgtttcttaaattatgctcattaaatttgtctttttccctgcttggagtgtgttatacttgctttttattctctccttctgtcgctattaaaaagacattctcatgagtcgtgtctctaataccatttttttttttatgaaactcacatgaaattatttcaagcatttaaccac

SEQ ID NO: 19464 - DNA, 225 bp, Glycine max
  unsure (1)..(225): unsure at all n locations
ctaagcttagccatcctggctctaagtaagtacagcctgtntagtggtcacnatatattggatacgtgaatagggtttaatcatatccaatggtttggtgaacactagacactagataacatcattgtgttatcatgtcctatnattgacgcggaccanatatntataggataggatataaattatgttcaaatgagaaaaataagaattcaataaaattacata

SEQ ID NO: 19465 - DNA, 287 bp, Glycine max
agctttgttggatttctgttatttggctctattttgatacctatccatataaaataataaatatttgtagcaaaaaaatatatacaagtgctttacaagatcgttagtgcaacatttgagtcccctttttaacgaacagtgttggataataaattataaatccaccggaattaataaaatattaaagttcatattttttcatggtgaaatcgacattcttttgtcttatcttggtaaccttttgatactcgattcacctaaatattaaattaaaaaaatgacatcct

SEQ ID NO: 19466 - DNA, 289 bp, Glycine max
tatctaaaattggagaaacctcatgatccaaacaagtgcatcctaaaccataggcaacatgaaacaatggttctttacaaaatggaatagggaacttgatcatcaatagattaaggtaacattcattttattaggtgtacattttggagaagatgtggagaagaataaagcactactactagcaatgtgattagaggcactcatatataattctccaaggacgttgactattatcaaattaagagacacgggttgttgaggcattaacgctagtcgcaaaaaaacaact

SEQ ID NO: 19467 - DNA, 288 bp, Glycine max
agctttaatggagctacattatatttagtcatccctggtccctctaaaaccacaaaatgtaagatgaatgggtttggattatgaaaaatgggagtgaaaaaataaaattcaatttcatccatattaaatttgtggaaattcatctaatgttttttttaattatttattcatatactttaaataaattataaattaagttattaattatagtttaattctatgtatgtaatgtatattttcataatgaataataaataacttatatatttagttaaatgtataaatttt

SEQ ID NO: 19468 - DNA, 299 bp, Glycine max
tagagctatgacagaatggatttttgctgagttattgtgagtgagactgagaccagattagctgttgggtttggatgctccattttaaaaaaggaacagcagagggttgttgtgtgtatgtggtgtttttaggggaagatatattcttgtcctaatcatccacttagggaaccaactagcatttggctatgtagaccaaacatgaaaagatgaaagaaaaagcaatagatttgtttagcattcatatgcttaattaataataatacccaatctatgcttagatacataatatataaagt

SEQ ID NO: 19469 - DNA, 290 bp, Glycine max
agctttgtcacctctttaaaaaaattatgagatcattaatggtccaatgccttaatgttttctctcctttcaaaagaatcgaaagatcatttaatggtccaacgccttaaatgaccttttattcaatcaaaatatatcttgcaaaaagggataaacacaacttaaccaacgtttagttctcaaagaactacgtaggtctgatttccttatcacaattgaggaatatgtaggagcaagggaaacacccttgtctcccacaaaaagataaaaaaaatacaaaaggcataaaa

SEQ ID NO: 19470 - DNA, 300 bp, Glycine max
tcatgcttgtgagaagtaattgatttattcattccatgatattcagttcatatggttgatgtccttgatgaatcaaacaccattttcttttgattggccactgtctttgtcacttgaggacaagtgaactgttctttctttgcttgaggacaagcaaaactgtaaatttgggggagtttgttagtcgctttatacgactaaattttgtatagaaatcattttccaaagcttgtatagttccccaatttatggttattttggagtaaattttgtaaataaatcttgttttatggttaatgt

SEQ ID NO: 19471 - DNA, 289 bp, Glycine max
agcttggactcatgagtgtgttagttgttgtctaagtggattggtcctttggttgttactaatgtttttccttatggtacagttgagatcaaaagcgactccacacacaatagctttaaggtcaatggacaccgacttaagtcattcctcacaaacccttctttagtggacgtagtggtggaagagacttccttactccaccctactcttcctccatcatgacttagggagtttttcttttcctatctccttctttacttttattacatttgtctgattctatttgatg

SEQ ID NO: 19472 - DNA, 297 bp, Glycine max
tgttgaaagaatacttgggtaagtcagttaaggttagagaatactagttgtaggagcctaaggggaggcttcaagaaagaaataatacccaattgtagaaactcggggagacttcaagaaagaaagaatactcaattgtaggagcttatggaggtttcatgaaagaaataataccacaaagtgcttggtcttagtggaaagcctgtagttgtaggaactggacgtagcctaggttaggtgaaccaacataaatcattggtgtgatgtttcctcttttactgctttttatttactgtt

SEQ ID NO: 19473 - DNA, 291 bp, Glycine max
agcttatccttattgttgtatgtgtggttcatgtctgtgtaaatagacaaataattcatttctagaatagttcatttttctttaaaacgtggtttataaagatcaaaacattttcaaatcttggttttggttcaaaacagatttttttttccctttcatttggtcaccaaaaaatgcacacgtttttaacttcatttaattattattgattaaaacattttcatgttttgatttgattcaacacacgtttgattttatttcttctttcatttactcaccaaaatttggaac

SEQ ID NO: 19474 - DNA, 214 bp, Glycine max
tttaggagtagaaacatgggaccaactctttttatttcatttaaaaagtcgtatctagtcaagagctgatagaccatacaagtttcctatcggtctctaattatatgggccattaagtctatcatatgctgacgatagcccaaaagcccatgaatcacttcatgggcggactaagcgtgcgtcattatcttggacttggctaagaatcggggaa

SEQ ID NO: 19475 - DNA, 284 bp, Glycine max
agcttcctccttgtgcagtttcccgggctcagacgtatcactttccgaaggttaaagatgccgacattgtatgcagactagaaaaaatttgcgccgaagaaggtcttgaatttgaacaggatgctttggacttcattgctgcgaaatcctgtggttctgttagggatgcagaaatgatgcttgatcagatgagcttgcttggaaaaaagatcaatatttctttagcttatgagctggtaagactagtgcttttgtaccatacatgtatatactccaaactacag

SEQ ID NO: 19476 - DNA, 295 bp, Glycine max
tatcaatacatttgtagaggtcatccaccacttcattatcactgtcaatgtttggattggtgtaaaagaactttggatttagataataacccgctgcatgcaaagggtggtgaagttggcaatcccatcttttatcaatgattgcaaggatatccttatacttcccttcattgttattgaaagctctttgaattgcttctttggccctatccattgcttcataaatgaaacccattgcaggtttttttttcattatccaccaaccttaacacacttacaagaggccccatttgat

SEQ ID NO: 19477 - DNA, 281 bp, Glycine max
agcttagctctttttgaggttttgttattaatattaaattctgataagtttttccccttcaccaattattctgtatttgttgcttgttgatactgatccatgcatgcttaatgcttgattaattgtctctgtgcttaattaacgttcatgcttaatggacatgtgagagggattaattggtgtatgtgttgcttaatcacataatgacagccttgtgttaattttcgcttagtaaattaatttcgggttggattaagtggttgaattgatcaggcataaat

SEQ ID NO: 19478 - DNA, 107 bp, Glycine max
tcctcggggccatttcctgctaaggcaaacatttggaaagttagttttaccaaggaatgctactcttaaaacaaaaatggcatacaacctcctccaataaatccaaa

SEQ ID NO: 19479 - DNA, 284 bp, Glycine max
agcttcaaagatggatgtttcttaatttacctcatcatttttaaacacaataatgagatgcttaatttaccgaccatacatactagcacaaatgcattatagttgcagaccgaccaagcaagacctcataactttgcccaggctgcaaattctgctaagcaaaattgaatacaatattgtccaattttgtttgttattagtatatctaattataaactatacaatgaaccattattgaccccaaatgtttttattctgctgcattgcatatatatctcactttt

SEQ ID NO: 19480 - DNA, 293 bp, Glycine max
  unsure (1)..(293): unsure at all n locations
tgagggataagattggatgctttagtttnaagtgatacccaaaatatcgctttacttcgtgaaagtttgaggaaacttggtggattgtcacttgccaatagctaaacataatcttaatagtaaacacaaatcaatataaatttctgagtctgatttatttaccttatggggtcttactaactaaggatttgaatttgatttcgtcttcaaaagtgtttgcaaaatctgttaagtatcgcatgactctgcttggtgggaaaactttgttttgttactttaaacttttcaaacaa

SEQ ID NO: 19481 - DNA, 282 bp, Glycine max
agcttggagcgttatcctcttactccacaggagtcagttgggaaagaaatcagactatgtgcatgaatcttatacccagtgggttattgataggaccaagagctttggcctaccctaccgcttacctagatacctatcgtccaccatcccaccatcatccttgcctatcccctttgacactaaggaagagtttcatgaacaattaaccaaagaaaggcaagaaaaagaaacttggaagaggagatgccaggagctcgagcgagagaatgagactttgaaggg

SEQ ID NO: 19482 - DNA, 327 bp, Glycine max
tgtactctgtcagaagatcattttctattagggtttacaagtaatccttacatatggaccgaagatgaagacactttgaagccacttttcggttaaagccttgtactcaggggccgtactagcgtttaatacaactgaatagatagatatcatcttgtatagcgaaacatgttcaaagatcttgaagaaagcaaaatctgagggggagctaagcctatatgttcaaacgaagcacaatctaaggggtagcttctatggtgacttatgtcctatctatttattatgtaatccaaaataaattctccttgatgtgaaattttttacatg

SEQ ID NO: 19483 - DNA, 287 bp, Glycine max
agcttcttagtttcagctgttgaatatgaatttgtggctacttcatgcactcctctaagaacaatagcatcatttcttgcactgaattgttgggagttggaagccatcttctcaatcaaattcctaacttcatcaagggtcatatcaccaagagctccaccactggcagcatcaatcatactcctctccatgttgctaagtccctcatagaaatattgaagaaagagttgctcaaaaatctggtggtgagggcagcttgcacacaatttcttgaatctttcccagta

SEQ ID NO: 19484 - DNA, 295 bp, Glycine max
tgaagaatcttagaaaaccatttgagattccgctatcgctactgagctacacacgtgagctcgcttagaggtaagagatgagttactcatgcttggggattggaatgaacatgcgtaggaatccttagaggatcaattttgggttattttgggttgttttatgaaaaccaattttgttcttatgcttttaatcatgaattgactgtgtttgatggaccaattgatgtctcgatgcaaaattaaagtgaaattgatgtgtttttgtgttgagtgtgaaccctagaaattgggacct

SEQ ID NO: 19485 - DNA, 277 bp, Glycine max
agtttgctttttttagaagagaaagaacatgtgattagaatttgactgaaaatgttagtcagtttgtcatattgattgcgaaggaatgcattgaccgtattccgctgagagtgtcatccttaaagtgtgagagaaacgactatcatttagtactgaatttttcatgaatctttgaagtatggactgaatgcatgaaattaacgatgatgaaggccatgtttgattgtgatagccacttacccaacaaggtgaccatgtgcttgaatggtctatccct

SEQ ID NO: 19486 - DNA, 289 bp, Glycine max
tctcaaggaggagagcttaattgttgtttgggcgtgcgtgactgaactctagctcatcgagaaagttttctcaaagaagctgctcaaggaagtcttctcaagaaagcatctcagggaaactacctactctataaatagaagcatgtgtaacacttgttggaactttgatgaatgaaagtcttatgatacacacttaaatgttcaactgctctccctcttttataccttcaatttcgtgctccccccttctgtctttattttcctgcattgaagcatcatctccaagctt

SEQ ID NO: 19487 - DNA, 291 bp, Glycine max
agcttctttgttagacctttatcggtcatctttccaggccgaggtcgaccgtcatttttttcgatccatttcggtgaataatatttttttgccgagatgggcaaaatgccagtttcggccgaataaatgggaaaatgccagtttcggccgaaacgaaaagtcggttgggctcgcacaaaaaaacctagccgacctacattttaaattttttatgcaacaccaaaacaagaaaacttcctgtgccgtaaaaaaaaaacattacatgacagcgagcgttttgaaaaacaaaat

SEQ ID NO: 19488 - DNA, 281 bp, Glycine max
tcaccggatgacgccgatcgaacattttctaaccgacgtcatgcaaatttcgttcagggattgaattgagaactcgttaggcgacatctgtcgtgaagtagcgaccgatgtttttcacccgacattgcacaattctttttagaaaagctcgctggtcgataatggtctttttacggcagagtaagttttcttgtttcggtgttgcataaaaaagttacaatgtacttcggctaggtttttcgtgcgagttttaccgacattttgtttcggccacgaaaaca

SEQ ID NO: 19489 - DNA, 291 bp, Glycine max
agcttgaaaggggtgctttctattgggggggccttcactggcacaacatccccaacatctgtatcaacaaaactcataacagagaggctttcctgaaataaataatccaatatttgttaagaagagaattgttattttgaggtcattcaaggaatagaatggcatattcaataatcaaatattacataagaatgatatcatatttcaatagaatggcatgtgcaagcagtttttgtttttttatattttattttttgttataaaaaaagaaaaaaagtaatacaagggagt

SEQ ID NO: 19490 - DNA, 181 bp, Glycine max
tctaaactttatacaaaaataaagctctttataccacttattaaacaagtggccacagttatcttaaaaaaggggggggggggggaatatttcatccttttaaaaatcttcctttctcaccctcttactactaaataacatcgctcttccctcccttatcccctcttcctcttctctttcc

SEQ ID NO: 19491 - DNA, 290 bp, Glycine max
agcttatagaatatatatttaaagatcaatgacaattgaagagtctatacatgtttcctttgatgaatctaatgccattcttccaaggaaggattttttaaatgatatttcagattccttagaagatacacatattcatggaaatgactctaaagaaaaagatgaaggaagcaatgaagattctcaagttaatggagatagagcaaataatgaacttcctagagaatggaaagcctcaagagatcatcccctcgacaacatttttggtgatatatcaaaaggggtaacaa

SEQ ID NO: 19492 - DNA, 298 bp, Glycine max
tcctttacaacaaagagaaaagaaaaatataggattgaagaaatacaagtagtggggatgtctcctccaccgctagaacctcacaatcactcacaaactcgtctcatactctcagaatggcttcctcttcaagctcagttctctaccagtcttcgcacagcaaaagctctcaaaactctttggaacttggacctttctctctctagaaatctctaaacatgcacaggcttcgagaaatgcccaaactccacctccattcctgatttcaggcttaaatagctggtctcgttggtgctct

SEQ ID NO: 19493 - DNA, 285 bp, Glycine max
agctttaatacactttttaagatatttggccggagccgcagtagtttggtacactaatttggaagcttcccgtatccgtacttggaaggatctgattactgccttcctaaggcaatatcagtacaattccgatatggctcccgattgctctcagctgcagaatatgttcaagaaagagggcgaaacctttaaagaatacgcgcagcggtggagggacctggcagcacaagtggctcctcccatggttgagagagagatgatcaccatgatggtagacactctgcc

SEQ ID NO: 19494 - DNA, 299 bp, Glycine max
tgtcagagttgcgaaccagattgctaagtgcacctgctgcatttgccttagtcttgtcttcctctgccatttgtaacaaatttgccaattgaggaatagatttcctcagctcttcatacaacaagtcattgtggtaggccgcgtttccaatctgagttcaagtatggtacagcagattaaaagagaggtgaacaaagaagaaaatgtggcatatatagggtatgaaaaagcataagcatgacatcagttctaaaaacgagaaggataaatttgtgctagacacatctctgtaaatttga

SEQ ID NO: 19495 - DNA, 284 bp, Glycine max
agcttagggtatttggtttcacctaactagataagggtttcgtttgggattaatattactgtgaaactagagaggtgataaaaaattgaaattgatattggtgcatgctagctggtcacaaaggacctatttcattggcttcctggagttttcatttccaacaatagaacaaattaaattattttttgatacaattgtttgagtagcagagaagggacagttcatttagatagtgttgtgaagaattttagttgattttttctcccgcacctcaataaaatatt

SEQ ID NO: 19496 - DNA, 286 bp, Glycine max
tggagcttcaactttctaactttgacttctctagtgacacatttagcaataatatcccaaacttttttgctgatgaggaaaattggatctcttaaaaaatgttggggtcaacacattgatgaatgaggaacaaggctcttccatccctattcgttgcttcctttttctatgcctcaatggaattacttgatccatggacgtcattctctaccatttcaataacatcttgaaatcgaaacaacaacttcatctgtgcacaccagcgatcctaattcttgccatcaaa

SEQ ID NO: 19497 - DNA, 284 bp, Glycine max
agcttgatgtgttaaagtttggaagagtcagtcttcctacttttgtttgttgaccacagagtggtacttggagatatgtcgcgggggtcaggagaccttgggaacatcaggtggggtgatatttcccaaaaccaagcttgacccatcccgacccaacccgggcatagtcagtcagtgagaacctgtgatgtacctaaacaggcgagctcctggcaatcaactaataaaagaacaaagaccacaaagcaaggaggcttgtgtggtggctggccagctatgaatct

SEQ ID NO: 19498 - DNA, 295 bp, Glycine max
tactaacccatggaagctcctaatatctcctatactatcaggggggggccattcttggatgaccttgattttttaagggtccacttggaccccatttctaccaactacaaatcctaagaaaactatattatctacacaaaaaggtacaacttctctatattggcataaagagtgtttttcctaagaactgaaagaacttgccttagatgtcctaagtggtcatctaggctcctactatacactaaaatatcatcaaaataaacaactacaaatttacctatgaaatcccttaaga

SEQ ID NO: 19499 - DNA, 282 bp, Glycine max
agcttagaagttatgatttcctccgagaagctacgaaagaaaggattgagggatttttctctaccaaatccttgaggtggattctgacgacaagcaatggcggctcgacgacaagctccggttaaaacgttcctcttggtgtggtggttcgacgacaagcaatggcggctcgtggtggccactgttagtcatgggtggtggaaaagaaggtgttagggtttgggtgggcatttgtgatgcaatcctacccccccaagggtattggatagaagactccaagaa

SEQ ID NO: 19500 - DNA, 294 bp, Glycine max
tgaaaagaggaagtgtataatggcgaatcttcttgtttttattcgttgaccacagagtggtacctggagatatgtcgcgggggtcaggagaccttggggatgtcaggtggggtgctattacccagaaccaagcttgaccaatcccgacccaacccgggcatagtcagtcaatgagaacctgcgatgtacctaaacaagcgagctcctggcagtcaacagataaaaagaactcagaccacaaagcatggaagcttgtgtggtggctggccacctgagaatcttgtgtgatatatg

SEQ ID NO: 19501 - DNA, 284 bp, Glycine max
agctttagccttttacttttcactgtgcacatcttttctaattgtgggaccccctttggttcaaagatcaaacccccctttatcctatatgaaatatttaagtaaccccctcctttgtcctattcaaatacccatttacttgtcttattccaaatttcttttggaagaccggagatctatttgcaatgttggaacgaattctaatttgtgacccacatattctgctactatgttcttgctttagtggagcaatgcaaaaaaaaagaaacaaacatcttacaagt

SEQ ID NO: 19502 - DNA, 304 bp, Glycine max
cctgacgcttagtgaatccaataaagccctttcagcttgagtatttgccgtaaacatggttttcgatgacataaggaccaattttggaaatagtggaatatataaactaagacttttttgcaacaacaaattggtgtaagccttaatgacaacctaattattaaggtaagacagactaattaagaaaatggaactgattcaaaaacaagaatatattccttatgtatgaagaaacgagaacattgcgacgactctcaaaacttccaacataatatagttctttatacatgactgaagctttaac

SEQ ID NO: 19503 - DNA, 284 bp, Glycine max
agcttttaacttatcctttaacgccatgctttccatccttgattcatccctgccggcccttctaatcttgagctcgttactgctaccccacagagcccttcggaacttgttcttgcttcattctttctttcggaccctttttgtttcccgctctatcgcttcaattgtggttaggttgatatctttcagcttatcacactctttcctgaccctagtgactgtcgtcttcaacttctctttcaccttcgagctctgccttcaaagcctgcactttttcactttcc

SEQ ID NO: 19504 - DNA, 291 bp, Glycine max
tttggtgtttataagacccttttctcctaataaaggacgactgcaactggacatatttgtttctgcggacaattaaacgaatgatgtggaacctagcaacataaagatgtacccttatattacacgagacaagccactctttggctctgacgtgttaaacactcccttaggaccacccttacccttatggcgaatcaagggaattgagcttacctcccttctctttcttaggctatctaagagctcctgatgcgcacatgcactaatcttacgctaaacgcgcaactctaa

SEQ ID NO: 19505 - DNA, 270 bp, Glycine max
  unsure (1)..(270): unsure at all n locations
attttatttttgaaaattgacggngtgagattttccctagactctactaggggcaattttcattggcacccttaatcatgttcaatttgttggtaagtttaggtcttttaatccaaaaaaggaaacttggttaccatgtgagagtaatttggataaatgaaactagttttggttgttatatgcatgaatatttcgatgcttgtttgcaacaatgtattatacaaaagtacctaccacatanagagtggctatgcaatttggaatgcatca

SEQ ID NO: 19506 - DNA, 262 bp, Glycine max
acctaaaattaaaatatcttaatgccatctacctataaaattaaaaaaaacttaatggctgagtgtaactgaaattggggcaaccaaaaatcacccccaacagccaacaagtcagccaccatttggtctcccaaaaagctgatgcctatgttgccaattgggcccttattacaacttgaactaaacctaactaaagcccttttagttgattaacccacaacatatttttggtcagccaactttacaaggattgggccattat

SEQ ID NO: 19507 - DNA, 278 bp, Glycine max
agctttaaggtaaattattatgggattgtgctagaatttagattattaacttattgtaatttaatttattttggtgtgaaatggcactatgacataaccatggaactcatcccacttccttcaaacttctatccctctttcttttctttttttgaaacttctcctttgtggttgagtttgatctatgttttttctcatatctatcccaagtcacaggtaagttagtttttccactcactactaaaaaatatacatttaacatcggcaggttaacatcg

SEQ ID NO: 19508 - DNA, 292 bp, Glycine max
tgcttctacatcccaaatctagattgggcagattgtagaagcaagcttcatgatgaatcaagattgattcaaggagtttcgatgataacaaatatgatgacaaaaaagctcaaaagtcataacaaagatgatgacattcaagaatgagttcaagattgagtcaagaacacttcaagaggaaatttgatttcaagaatcaagtttcaagattcaagaatcaagaagagactcaatcaagataagaattaaaaatatttttttcaaaaactgagtagcacatgaatttttctca

SEQ ID NO: 19509 - DNA, 290 bp, Glycine max
  unsure (1)..(290): unsure at all n locations
agcttgcggngttttatgattgcattggctttctctgcttggaggttgttgaaactgaacgagtccatttatgaagggttaatagagagagaaacaacgtgggttgtctgactcactcgaaggggaatataaacttgtcaatagcaacagaacatgatggtatagaaaatagtgcagaggtttctacacttggaagcatggatttggagaggaagttgaagaaaggaaagagagtgagtgaatattatgtgaactctgtttgaacagagtggctctgtttgttgcgttgc

SEQ ID NO: 19510 - DNA, 298 bp, Glycine max
ttgaactttggttgttttagtcttggtctggccttttgcactctcaacctgtggcactcccacatccacacggcaaaaccagcagacaaaaagtaaagagagtgagagcctaaattacactaaataacaacacatggatgaacaggtagacaatttttataataatatagattaattgtgaataaaatctattctgtaaagtttattttatataaaaagtaaacaaattcatatttgcatacttttatcttaaaagcaagtttgcaataaaatttggtgtaaatgttttatgttaatg

SEQ ID NO: 19511 - DNA, 290 bp, Glycine max
agcttggaaaggacatcttttgccttagacttcaaaatattcagttgcatgctttctagtttctcgagaaattgaaatcagtctatgaaagtaaaaattgtaaaaaggtcaaggaaatgtttgttatgtttatgaaagttatcaatatgatttatttcccaggattctgttcttgcgcgtgaaatagacaccaaaattatctatttagtttatagctcagataatcatgagttattaactcgggaactctttataggaatcttttgagagttttgttgtaattattttta

SEQ ID NO: 19512 - DNA, 274 bp, Glycine max
tggagaggatgcttcaatggagaaaaatatagagggagagaaagagagaagggggatcacaaaattgaaggattaaaatgggataccagttgaactttgagttgtgtctcacaagactctcattcatcaaagttacaacaagtgctacacatgcttcttttatacactacgtacatcccttaagaagctttcttgagaaaacttccttgaaatgcttctttgagaaaactcttcctataagctaaatcttggattcactcacccctctcataac

SEQ ID NO: 19513 - DNA, 283 bp, Glycine max
agcttgttaagaccccatcttggacttattgttgtctcagactgtttctgctaagttgtccaaggaggacatattttttattttacaggtgaagtttgacatgtcaggtgagtaaaattcctatatttgataattctgtccttttctgatcgttggaaaacgcattaaagacatgtgtttcgtttgtctttttccgcaggtgagtgcagcacacacacgttactcttgcttacatgtcactcgaggagtggacacatattggatacgcggtgtgtggtgcaaa

SEQ ID NO: 19514 - DNA, 297 bp, Glycine max
tgtcaatatagctctcctttgcttaaatcttatttgtctttgattaagtttagacttagcctatagaacttgagagtgtaaatgtaagcatagacttagtctatgcttaaattttcattgtggctgaacaactgaaaatatgtcgcaatgaaaatttaagcatagtgttgtaaatttaagcatagacttagtggatgcatgatcctttttttctctgaataaccttagcataatgtatagtagcacattactctgtgttaagctgcatttttcttataacatttgaagggtctggct

SEQ ID NO: 19515 - DNA, 287 bp, Glycine max
agcttcccatggtgaatttacttgattgtcatgtctacataatctgctacatgtggacccaaggtagccaaccaagtcgtgcctaaaatcaaatttgtcccagcaactggaagaagatacactggtatagttagtttgtgcccttgtatcagcactggtaactcagtaatgaccccttcagctgtcagatactggccattgcccactaaaactttaaaacctggtgctggttgtactagtaacttcaggaattttgcaattctaggttgaatgaagttattagaact

SEQ ID NO: 19516 - DNA, 301 bp, Glycine max
tcagttacggtggctctacgtccattttgggagtcccatatctcaggtatcacttgtttctcaattgaattatgggtgttctcagcatcattagaattatcatactcatgcaattcctttagatctgtcaccacagcaacgtatgcctcctctcccaaatcattttttaaagataataatttaggatcattttcatcaattacttcctgacaaaataaaaagagagagacatcaaattttgctcattcaattgtccatgctagtgtacatttgtgacacataattgaatcccctaccctgc

SEQ ID NO: 19517 - DNA, 292 bp, Glycine max
agcttagttaactctttttaatttatatgacaaaaaaaaacttattctaaatttaaaagactaaaaacataattaagtctaattaactcacacttaaatatgttttatgcctataaaatacatttttttagatgactacctaaattatgttcttttgcttttggtacttgaaatatttcttttttgttttcatacctactattagtgtttgtccattaagtgatgacataacaaatcacattatcattgacacgtctttttaagaattttatttatttatttttaattattg

SEQ ID NO: 19518 - DNA, 302 bp, Glycine max
tgagcttggacattcaataatcaagtatttaatttttctcgtttttgttaaagttaacttatttattaattatattatttaatttctttttcttttctttcttgccgagaacatgaattcttgaggttacttgcacacaaaggaggtaaatagcacaaaaaggttgaagagctcagggattgttcagattacatatgctttttggcaaagaataagatcctagttttgctcaatggttcaaaaaaaaattgttacctgcgtatagaatcatataagatgacaacattcttttatatatgtat

SEQ ID NO: 19519 - DNA, 284 bp, Glycine max
agctttgagctttattcatatgacaataactttttactcggatgtctaattcagtcccgtaatatatcgagacgcttcaaattgattatcgaagctctgaggaaattcgaacgacaataactgtttactcggatgtctgattgagtcccgtaatatataaaaaggcttggaattgaataccgaagctctgagcaaatttaaacgataataactttatactcagatgtctgattcagtcccgcaatatatcgagatgctcggaaatgaatgccgaagctctgagc

SEQ ID NO: 19520 - DNA, 286 bp, Glycine max
gcgagctgattgtcgttcgaatttgctcttagcatttgtcttcaaattcgagcgtctcgacatattacgggactcaatcagacatccgagtaaaaaagtgattgtcgtttgaatttgctcatagcttcaacattcaattttgagccgttttgatatattacgatactcaatccgacatccgagtaaaaagttattggcgtttgaatttgcttaaagcttcggcattcaagtccgaccctctcgatatactacgggactcaatcagacatccgagtaaaaagttatt

SEQ ID NO: 19521 - DNA, 284 bp, Glycine max
agcttttggattgatcattaagtgctttatgaatcctcccgtgcttatgccaccagtgcctggaaggcctctcattttgtacatgacaatcttggacgagtcaatggggtgtatgctggggcaacatgacgaatccgggaagaaatagcgcgttgtttactacctaagtaagaagttcacgacctgtgagatgattactccttgctcgaaagaacgtgttgtgctttagtatgggcatcccatcgcctaaggcagtacatgctgagccatactacctggttgat

SEQ ID NO: 19522 - DNA, 260 bp, Glycine max
ctcattgactccttattgcttcaaagaaagaccgaaatttgtatggggatccacagaagaacatagaccacagactcttgccacaagggtaaaattctgaatcatggcaagctgggttactaaggtgaccaaggcattaaattttccctcaagctttttatttttagtagatgaagatgaatctgtggccaccttatggactcctctaaggaatatagcatcatttcttgcactgaattgttgggagttggaaaccatct

SEQ ID NO: 19523 - DNA, 287 bp, Glycine max
agctttgagtctttaatcttaacacaccataaaccttgacccgggatgagaatttccatcctcgcccttggaagaaaacaaaaaaagaaaaagaaagttcctgatcaaagatcggaagaaaacaaaaaagaaaaaagttcccgatcaaagatcggaagaaaacaaaagaaaaaaaagttcccggtcaaagttcagaagaaaacaaagtgaaaaagaaaatccctgatcaaagatcggaagaaaatgaaagaattatgtagaagggtcttcggaccagacaaatatcc

SEQ ID NO: 19524 - DNA, 296 bp, Glycine max
ttttggagtacaaacatgggaccaactcattttatttcaaaaagaaagtcgtatctagtcaaggtctgagagaccatacaagtttcctaacgatttctaattatgtgggccattaagtctatcatatgctaacaatagccgagaagcccatgaatctcttcgggggcggagtaggtgtctgccattgccttggccttggctaacaagcggggaagttcttgactcccgttcaaggtaagagcaaaccgatccatcaacatggttgcctcttagtgtaaagagtcgatcacccttcc

SEQ ID NO: 19525 - DNA, 284 bp, Glycine max
agcttgaaggttaactatatgccttggttaacttggtaacccagctggccttgaatcataaatctgtacttgttgcaagagtctatggtttattctcctctgctgaccaccatacaatcctttgcccttctatgcagcaacctggagcaattgagcagcctaaagcttatgttgcaaacatttacaatagacctcctcaacctcagcagaaaatcaaccacaacagaacaattatgacctctccagcaacatatacaatcccggatggaggaatcatcctaatc

SEQ ID NO: 19526 - DNA, 295 bp, Glycine max
ctagtgaactaaaactcaatttaagtctagaaaattgtaagcaagaaaaaggcttcatttagcaagaaaaagttgtatcctggaataacaaataataaaaacctatattgaacacagaaaagaatgtaaatctatacgggaaattaaatcatgttttgtgagtagtaatatttagtatctctctaaatctatacatcttctataatttctccttttttatccaactagcctcgtataaaaggggagaagtttaatcaagacaaggggatgggggtattggaacagtaataaggaa

SEQ ID NO: 19527 - DNA, 284 bp, Glycine max
agcttgacacattccttttataatgtaacaacacaagtgctatcaatttgtctaaaaaccatgtcatgcattctaaaaccaaacatatagagataagacatcattttcttagagatcatatatcaaagggtgattgttgcattgagtttattggtagtgaacatcaactagctgacatctttactaaacctctagccaaagataggttcttcttcattaggaatgaactgggtatcttagatggatctagtattgaatgatgttatgcttagaacatgtagctt

SEQ ID NO: 19528 - DNA, 296 bp, Glycine max
tattactagtaaacttagattatgatgtgatgaaccttttgttattactaatgttttttcccatggtgcagttgagattaaaaatgaagttatcggcaaagtcttcaaagtgagtgatcactgactctagctttttcatgagagccctcaagtggaagaagagtttgtggtggacctctctttggtcttgccaatcttatgtgatgatgtgccatgaaaggcacttgaggagttttttcctcccttcgtttatatgttgcctcttttcattgcatgcttacattgaggacaatgtg

SEQ ID NO: 19529 - DNA, 275 bp, Glycine max
agctttgttagtttccatttaagaactaagctagccaagttttgagtagtctctcttttcaatcatgttcttgtatatgcaaaactcgaatatgagatgctggttaatggatctaaactccgtttcacttgaaccaacataatgttggttgagattcatggtttgaatttatttctagaatgaaaaatttaaaaagaatttaaaacatctattaattaagatattaaattttattgaaaaaattaaacaagtttaggtatacatgaataatatct

SEQ ID NO: 19530 - DNA, 248 bp, Glycine max
aagcttggcacccaagttttccagattaacaaggttgcttccttcaaaaaccaccaccttcttattaggccctaaggtcaactggaggttctgcaccaagcccctcattggcccaacggtagggttttaaggtcccaatggtatctttccgcaataacctggtaccagggacctaatgggtgaaaacttctaatccggccctaaggtcggttggaggttattgataatgcctttcattggcccaatgt

SEQ ID NO: 19531 - DNA, 279 bp, Glycine max
agctttagactacttgtttttatcaattacgaaggacctataatcaattaaaatagagagttttttcctcttgaagaaacttttctaacttagaactttttttcacactaaccatgatgatgaatgatgtaaccaatacaaatgccactcaagggagttaggcatgtaaaactcaaaacatcttcaaaaattcttcaagcttttccttgagaggttgttcaccatattgctcatgttgctcatgttgttccccttatctctaactatctcccccttttt

SEQ ID NO: 19532 - DNA, 290 bp, Glycine max
tctacttatgtggcagggcgggcttccttcactttcttgtctccaacgcgagctctgaccactgttcttccttcccgcgatgcttcttttcatgtccgcctgagtgggcttatagcctaaaccatacttcccacgatttccttgggtttttatcaggctagttatgccgccattgtctttgcctaaacccatcccgggttcataaccgttccccaacataactcgggccatcattaccgccgcatcggacagacaaggttgcccaaagagggagtcgacggaggaaatgc

SEQ ID NO: 19533 - DNA, 289 bp, Glycine max
agcttctagccaaatggttttaccttgaattaattcctttgatagcccttttgagccttgtttccctttccttgttttgaagctcactacaagccttaagtgaaaaaccatgatattaccatatccttaaggaattttggagctttggaattgttttgggaataagtgtgggggggttttgtttcattggacaacttggtttgttggctatgcttcatgatgtattttgggccatacttgatgtacattgtatattggttaaatgttggacatgctgaatgaaatgttg

SEQ ID NO: 19534 - DNA, 276 bp, Glycine max
tcaaaataaaaaaactagccgattgattattgacttacgatgaagaatgaacgaagaacgacgatgaacgttcacggaattgatcacgaaagcgttacggaagtgcctcgaccttgattttcctcttctttctccttcttttcactaattttaagtgaaatatgcttgcccggggtgctgaaccccttccctcagcctcccatgccccttgtatagccaaaataagggagaagcttgccacccagcttgcccaagcgagctggttgcttactgatg

SEQ ID NO: 19535 - DNA, 290 bp, Glycine max
agcttgaagaggaagattatcctgttaaacaaaagggagagaagaagtaaaaaaacaaagaatgcaaccaaagcagaagatgcacaagctaagggggagcgcatcatctgacggggaaatttatcttaaatctttgaactcttatgtaatacgcttttgatgaataaaatgagagttttatgatgaaatgactttatctcaaagtcttatgagacttgatgttatatattttattatattgcatctgataaaacatacattgcacttaaattgtcattgtatgtatatat

SEQ ID NO: 19536 - DNA, 298 bp, Glycine max
tctccttcttttccctataaataggggtataagggaagaacaaacatgttcaaccctcctggtatctgagaatcacttcaaattagtgagaaaaattgtttccgtgaagaaaatttaagccgaggcgcttccgtaacgcttctgagacgtttctgtgggtgatttcgcgaagattttccgccgttcttcggtcttcaaccggtaagttcccgaaatcgaactttataattcattctatgtacccttagtggtccccacttgtttcgcgtgcttttatttttatttcatttactttacg

SEQ ID NO: 19537 - DNA, 290 bp, Glycine max
agcttacaaatctggtttatatccatgcccatttataaattaaatccaagatctagataagataagatctagattaaataacatctagatgagatcaaatctaaataatatctagataagtgatgtgccatcattttcttctattttctaaaccctttttgcaccattttaattattgagtggtcttaatcgtcaattaattaggcagttttattatttgggctcatttagctaatttgatgtttttaatctaatttcaggaattaatgaaacattgggcttaatccgga

SEQ ID NO: 19538 - DNA, 290 bp, Glycine max
ttaagcgataggaaaaaagtgcatcgttccaaattctttttgaaacgcgttaacattgaaaataaaacgtatgcattcttgggcaatatgattaataggaataaaaaacatgtgcatccttcggtgagatgatggaacgaacagtaatcgggttgaagtcggaatatgaaaatgttgtcatcaatggctattaaacggagtttatcaaatgtcatttcagagatcaaaataactgaaataaaaggtgcataagcttctttttttactttagtgcgcggataattaatgca

SEQ ID NO: 19539 - DNA, 288 bp, Glycine max
agcttgttcgatcccgatataaccttctaataatcgcagcttattatgtaccctaactactacaacttgagtctacgcgatctgcatggctaaccgttaacggacgtagtcctctaagtgagagggaagggttactctccttttgggccttcctaatgacacccacatgctgctatctacctcctgtgtcccccttgctaacggtaccctctgattatgatgtgtaacacttatgcaccgcagaaacaagatttaagcaaacctggttgcacatttgatagcctaggc

SEQ ID NO: 19540 - DNA, 302 bp, Glycine max
tatcaaacagaggtgttgctttgtgttatggaatatcttttttatggctaccactatgtttgttacaataagtatgtggttatgaaacaccacttcagtcatgaaagcctcattcttagtaatgacacccttgtcattcatgattctataagtctgaacaatggtatcctcaagggaattatataagcttccaagaattccagcaatagctcccaagagaagtactacaaatgtatcaacaacactatatgtaatattggttgaactaacatcgtacattatcaaacaacctttcccaaata

SEQ ID NO: 19541 - DNA, 288 bp, Glycine max
agcttcctagttatggaatgctaaatcctttgttggatcttccttgtaagtacttgatgtaaatatctttttatctatttaacgatgttttgtgtgttcactgtgctatcagaacttcattctaccatgcttttgccttgatcacgtacatgcatgtgtttttaggatcattcaatagtggaaattggtttgattcttagaacttgatagtacaaggctagtttgtcgtattttcatgagctatcgaggtacggtaacctagtggttgtatgtttgtcttaatgcggt

SEQ ID NO: 19542 - DNA, 263 bp, Glycine max
tctgcatgtctagggttttctagagagttaaaggtccaagttctagagagtttgagagattttgctgtgtgaaaacctgcaaagaatcgagctttaagaggaagccgtcctcaaaacttgaaatgagtttgtgagtgattgtgaggttttagagggggaaaagacttccccccccctggatttctttcaatccttctccttcccttctttttggtggaaagggagccttcccagtattggaagcttaaatctttggtgggtat

SEQ ID NO: 19543 - DNA, 286 bp, Glycine max
agctttgagcttaaatcttgactcaccataaaccttgacccagggtgagaatgtcaatccttaccctcggaagcaaaaaagaatagaagggaaatttccaatcaaagaaaagagaaggaaaatttccaatgaaagaggaaaaagaaaagaaaggaaattcccaatcaaagagtgggagaaggaaaaaagaaaaggaagaaaattcccaaccaaagaatgggagaaagtaaaaaaggaaggaagctcctggtcaaagaaaccagaagaaatgtgcagagaggtcttt

SEQ ID NO: 19544 - DNA, 295 bp, Glycine max
tatgcatagaaatgtatgtctctaatctatcgtgctcttgtgttctatgctgcagcctaaattactaaaccctcaatccctcgtcaggctgaatatccaagcttcatccatagatccctcatttaagactacacccgatttagagagccctcttaggtttagactaacttaaactgagtttcgcccacagatccctcatgtaagactaaacttagctcaagtagcttactaaagtttagcctaatttagcctaagcttcgtccgtagatccctcatgtaagactaggcataaact

SEQ ID NO: 19545 - DNA, 282 bp, Glycine max
agcttgtaagtatttatttttataatttgcctgttccattaggctcttaatgtctttagaggttacttcctcgttgacatcttttgtcttgaatggaatagccatgacaggtttattgttactgtctttgatattcggtagttgatattgtgttgcaggaggtaattccgattggattaactcaccatccttcactttccaatttgttatgacatttgttgttggatcacctatgatgtcttgtttccaagggtaatctatatcatttctgatggcataagc

SEQ ID NO: 19546 - DNA, 180 bp, Glycine max
tcaatcctctacctctttggcctggagctatgggctgactgttagaagctcttcaataccctgactactcgaattctgttagtgaattcatattagggaaatgagaagactgcgaaaggtactctcaagagtattgacctgggttccggattgagaactaatcttgctaagagaaaattt

SEQ ID NO: 19547 - DNA, 284 bp, Glycine max
agcttgttgttttgtgtttagtgtgtatgcaagtcatgtaaatgagttcgatggaacctgtatttatagtagatgattgagggtgttggtccttgtctgtaagggctattgttagccttgtagatatttcccggcttatagataatagccgggagcttaaagataatgttagagataaacctttgaattaaagataaaggtagaagataatcgtaccttgtagataatatggcgttatagatagtttaataccaacaaatagataagatattcaaatacatttg

SEQ ID NO: 19548 - DNA, 313 bp, Glycine max
agtgacactatgaaactaagcttaaagagaggctcaagaatgaaacttcaagatcactgagcaaactatgcaagcccaaacaaccaaagggaacaactatgatggtggcaagaataagaaaggaaagggaaagggaaagtggaagaacaataagtggaaggggtcaagtaagggctccagcagttctggaaatcataaccaaaatgaagaaactaacaagaaaagtggagggaatcacaaagtgggcaagaagaaattcaacaagaaagggattcagtgttataacggtcagaaatagggacattttgcagat

SEQ ID NO: 19549 - DNA, 280 bp, Glycine max
  unsure (1)..(280): unsure at all n locations
agcttcaagatttaacttttcaagatatttangactctagtaatgtatccgtcctacgattccatcaagtttcacgaatctggaggctagaccaatcacggatcaagattctatacgcgagacggaagggtcactatacgacttggtcatgataatgacacccaaagtgttgcaaaacatctagtgagtggtcctcgattaccgagccctatcattgtgatgagaactgacttaccacggcgtaatcgattaccatactcatgtggtcgattaccagtgt

SEQ ID NO: 19550 - DNA, 167 bp, Glycine max
tcacgagatgaataatgactcaacaaatgtatcctcatcggacttatttactactccaatattcacatctatatctcggtgtaacagcactgaccttgtaggatgtcccttgtgtgggataatggatgggctaacaacgtacatcatcttagaagggatgccaaaga

SEQ ID NO: 19551 - DNA, 287 bp, Glycine max
agcttgcataataagaattttcttggtatagccataatctggacagcattatagccaagccttttaattcgaggcaatacatcatctctaaaattgacatatgtgttgatttttggctcctgcaccacatggttcacaaaattgttaatagtagaagtagaaaaagaactgatactatacataggaactttcttgaacatcatagatttaatctctaatactaaacaaaatattctattattcaaattcaattaacattgactgtacaaatgagaccaatgccttca

SEQ ID NO: 19552 - DNA, 294 bp, Glycine max
tgacttgatatttgtataaatttgttttaaattaatcgaacaaactactataccctattctctacatccaattgagacaaatttggttttcaatcttctaaacaactactgaaaaagggaggcatagattacaaaagtaatgcatcagcagcaacagtaagcatcgacaatttaacaaagaaaggctttaaaagctttttttttttttactttctgttggggttgttttgtgctagatgttaacctattggcaagtgcaccaaattgtcgcatgtagtaaagtaaaatggaagt

SEQ ID NO: 19553 - DNA, 277 bp, Glycine max
agcttctagttaaatggttttaccttgaattaattcctttgatagcccttttgagccttgtttccctttccttgttttgaagctcactacaagccttaagtgaaaaaccatgatatcaccatatccttaaggaattttggagctttggaattgttttgggaataagtgtggggggtttttgtttcattggacaacttgttttgttggctatgcttcatgatgtattttgggccatacttgatgtacattgtatattggttaaatgttggacatgctg

SEQ ID NO: 19554 - DNA, 285 bp, Glycine max
tgaagacaagacaatacgaggtatctttcttgggtatagcaatatctctaagggctaccgtgtcaacaacttgcaaactaagaaactcgtcattagtcgagatgttgtagttgatgagtacgcttcttggaattgggataaagaaaaagtggagaagaacgttcttatacctgctcaactacctcaagaagaaactgaggaagaagacccaggtgaaccaccttcaccttcacctccaccacaacaacaagatcaagaactatcatcaccagagtctactccaag

SEQ ID NO: 19555 - DNA, 290 bp, Glycine max
agcttggcggtaaccacttccctcttttcccctataaataggggaaagagggcaaagcaaattcgttcagcccttctggtatttaggattcacttgaaattagtgacaaaaattgttttcgtgaagaaaatccaagccgaggtgcttccgtaacgcttctgagacgtttccgtgagcgatttcgtgaagattctccaccgttcttcatcgttcttcgttcattcttcgtcctacttcggtcttcaaccggtaagttcccgaaatcaaacctttcaattcattctatgtgc

SEQ ID NO: 19556 - DNA, 308 bp, Glycine max
aggagtgtgcgatttgaagcaagacttttcgatgtatctttcttggggagagcgaagcctccacgggataccgtgttcacaacttgcaaacctagaaacctcgtcacttgttaatgaggccgcaatctgtagagccacgccttctgggaaatgggatccagaaaaacggtgaaaaaacgcctctattcgcgcgccactactctgggacgaaactgacgcgtatctatgagttgaaccacgtcaatcttcaactggcccccatctatatgatccagaactctcataatcagaacctcctccgggaccag

SEQ ID NO: 19557 - DNA, 290 bp, Glycine max
agcttgcttctagagattgttcaatgtccatttttatcccataaacttcagaaattaaagtgtcgtcttggatttctaggttttaatagaaggctttaactaaattagagtaaacatgtaattttaaagacatgaaaggaataagattggagttttcaaatgcctgaaagcatttaaaactctcatttgaaaagaaatccatatcaatgaattttggatcaataatggaacgagaagagaagagatttgtgtaccgtatccgctattcttcagatgaaaaaaattaggcc

SEQ ID NO: 19558 - DNA, 317 bp, Glycine max
ctatccaatactcaagcttgaaggcaaactggatgcattggttattttggttacccagtttgccttgaatcacaaatctgtacctgtcgcaagggtttgtggtttgtgctcctctgctgaccaccatacacacctttgcccttccatgcagcaacctggaacgattgagcagcctgaatcttatgctgcaaatatttacaatataccttctcaaccttaacatataaatctaccacagcataacaattatgacctttccatcgacagatacaaccctggatggaggaatcaccctaacctcagatgggacatccctg

SEQ ID NO: 19559 - DNA, 291 bp, Glycine max
agcttgcaagtgtaatctttttacttgacttaagcacacaacacaaagaaaatgggttgtactagaactgaaaggtacggtcaaaagagtattccttatgaaatatatctcgattgagtcatcaaactatagggtattagcatcactaagaacaagaaatcacaaacaaccataatatctatgcaattaaggcaaaacaccatactacaagcatacatagaattataaggttcctataacaagtatataacatacatataagaataaagaattaaatagtcactaaggatg

SEQ ID NO: 19560 - DNA, 300 bp, Glycine max
tgtagggttaaagtctcacgattgtcatttgctcatgcaacaattgttagccgtggctatacgagacatcttgctaaacaaagtcaagttagccataactcgcctgtgctttttcttccatgctatatgtagcaaagtcattgatcctgtcaagtttgatgagttggaaaatgaggctgttggatcgaatggcctcagaataattaagaagggggggtgaattaattattcctaaaccattactaattaaaaatttctcttctaaggattttactaaattgttaagagaatgaggggtag

SEQ ID NO: 19561 - DNA, 292 bp, Glycine max
agcttttgtcaattttttttcaaactacataaaaattaattaaatatcaatatatatatatatatatatatattctcatcatttatcaaaatatacatatgtattattcacagtgtaaatgcaagttaaaaaaaatccaaatttacatgtttttttaaaaaaattgcaaaaaccggttgacaattcgagcccccaaccgaattttcaacgtgatttttttaaagaaaatttaatttttttaaaagattttaaaaataatataaattaaggaaattaataaaattgagaatat

SEQ ID NO: 19562 - DNA, 206 bp, Glycine max
tatagccaaatggaactaccttgaattttttcctttgatagccccttgagcctatgttcccctttctttgttttgaagctcattacaagccttaagtgaaaaaccatgatatcaccttacccttaaggaattttggagctttggaattgttttgggaataagtgtgtgtgtgtgtggggggggggggcgatcttaccacatttttg

SEQ ID NO: 19563 - DNA, 264 bp, Glycine max
ctttcccgagaagctagagcgaaagaacacacacccctcttataacaaactttacctccttgagaagttaccctaaaaagatgactaaagaagttagagcctagctacacatacctctcgtagatctaagctcacctccatgagatgacaagctagagcttagctacacaccccctataatagctaaggtcacccctatgccaaaaaacatgataatacaaaaaaatggcttactacaaagactactcataatgcctctaaata

SEQ ID NO: 19564 - DNA, 287 bp, Glycine max
ttttgggtttaaataaaaaggttcccctctttccctattattatattcaagctctgccacatgtccctatttgagtggagcaaaagggcccactttccctttgtactgtgacccacactcagccacaaaagtgagaaaaatctgacctttgaaacgctaaaatcctgcctcagtttgcatgcccgttctctggttctagtttctcgcgtttctttgcgtacctcggggccagttttccaatgtaagcaatatatatatatcaaaacgctcaaaataaaaccccgagc

SEQ ID NO: 19565 - DNA, 284 bp, Glycine max
agcttctcatgctcaacctcattagttttattggttaaatcaacactcttttgctcctcttcaatggaagcaaccctcaaaggggcactcactttcagcccccaattcctctccctgaggttgcacctcaaaggttgaaacttatgacctgccactaccttgtttgtgtccaaaaattcaacccttgacgtgctggacaaagcacccccaattctatgtctaggaattactggaacaagaggcttcaaaccacattctgataatatccaagttgccattggact

SEQ ID NO: 19566 - DNA, 264 bp, Glycine max
tgccaagctcaaagtcaaataacctggtgaggttatctaacaacttcgtggaacattaaattcttacaccacgaaagaatttgctgacgcaagagcacaatttgaccattatactctaatgatcattggcacaatacttcatatatataacagtaaccttccaatcataacatgtgctatgcttatggtgtaaacggcagatcatcttctggctttgactatcatctcatacaccatcgcttagaccaaatatcacactgaaat

SEQ ID NO: 19567 - DNA, 283 bp, Glycine max
agctttgggctttatctttcttctgagataaattaagattttttttttgagaggtagttaaattaagaatttacaacatacttttattatattaaattgtactgaacatacttttttgacagccatttattctgatagtgaagttgcttttataaccagttcaaagtttaagttgacattttctcttaatagcacaaagtgacataactaatcaaatttaagattaatgaaaaatatactttaacatatatcggggatcaataatgtcatcaaaataaagttt

SEQ ID NO: 19568 - DNA, 272 bp, Glycine max
ctctcgcacgctgaatctatgtgaacgtctccttttctgagtgaaacactggcataaacaactctggtctagggagggaggacgcttctgtacttttattcgaagggggacattttgatgtggcttcctcattctgtttctgggccatgggttcttattttgggtcaacctcatggatcatgcatgcctcatttaatcaatttaaagctcttatctatttgctaccttttaggatgggggatatccatataaattaaaaagatctcacgatt

SEQ ID NO: 19569 - DNA, 286 bp, Glycine max
agctttaacctcatcgtttttcacagtctttagatttgggagccaatccagtccttgtgttcggactctcagccacttatgatagccgccgatgatcccattactgcttcccctaagctctctgtcctttcttcacgccgcatcccatgccttgcgaactccttggagtaccctcgcgttgtggtcactgaaacctcatgcgatgaaaggcgtgatgctttcgtctgatggcactcctctcatgggacatccttcgcatgaagatagaatcctgattcttccttcc

SEQ ID NO: 19570 - DNA, 285 bp, Glycine max
aggaacttgaatactcagcttgcctgagagacccgattgtcatgcagccgaacgaactagttccgctccggagtatgatagtcaccgctttacgagtgctgtacaccatcaccgcttcgaggccatcaagggatggtcgttactcggggagcgacgcctccaactcaaggacgacgagtttactgatttccaggaggaaatagggcgccggcggagggcatcactgggtactcccatggccaagtttgatccacagaaactgcttgagttatatgccaatgcttg

SEQ ID NO: 19571 - DNA, 277 bp, Glycine max
agtttgagatgaggaagttttgaaaggtgaaacttcctgcttttattgttgatcacagagtggtacctggagatatgtcgcgggggtcaggagaccttggggacgtcaggtggagtgctattgcccaaaaccaagcttgaccaatcccgacccaacccgggcatagtcggtcagtgagaacctgtgatgtacctaagcaggcgagctcctggcagtcaacagataaaaggaaaacaagaccacaaagcaaggaggcttgtggtggctggccagctgt

SEQ ID NO: 19572 - DNA, 288 bp, Glycine max
tctcaaaataagatttatgtttaacttgtcaagtttcctattcacttcttctaatgaatcagctacaagtaactttctcagttcttccacggctgctcgagccttacccacatgagtgatcatgtcatgactggtttgcttgaggactgtaactttcatggttgcatcaaacaaactttggatatcattggcaaagatttcttgggctttcttccaaaaggaacgacatgatttaaatgatcgaaggatttccaagatatccggctcaattgattgccataacacggc

SEQ ID NO: 19573 - DNA, 277 bp, Glycine max
agcttggaggacaaaacttattagtgtacaagtgcttggtgctatggcataccgtgctcctcaacatttgtctcggtgtctccctaagattgtttccaaattgactaaggtataatatgaagcaaacattatttttcacttctaaattccttttaagctatagattgcattaccttaacccatctcagtatttgaaggttttgactgatacacatcctaaagtcagtcagctgggcaaatggccccttcaacacgttaatcttgacttacgaactat

SEQ ID NO: 19574 - DNA, 292 bp, Glycine max
ttggcgtatatatgttattgagttttgtggggaaatttcacaaccacaagacacagacaacaacagaaaatatatatacacatacaaatgaacctcttataattttataacttaagcaaggattcttgtaaaaagatttcggagtaaaaaaaaaaaggaaaaaagaaaatgtaactggcaagatttcatgagttaattgttttgctctttatcttgcccactgttctcttcagggctgctttcctgcgcatgaataaccgtagcggttccgcaatcctcattgtgtttcacc

SEQ ID NO: 19575 - DNA, 279 bp, Glycine max
  unsure (1)..(279): unsure at all n locations
agcttgataaatccatatttatgncaaaacaagcctcccgtctgcggtaccttacacactatgagatactttcctcatttgcacctgatgaaactcccatggatcaatgcatatactacaaagtcactgggagccaaataggttatcttgactatccgtctatgatatttcacttgaagccaatgatcctggtttgctacatgagacgaagccatctctatctaagaactcagacatgcaggatgtgcgtgatgcatcctatgacatcagccctagtat

SEQ ID NO: 19576 - DNA, 277 bp, Glycine max
tgaaagctcatatacagacgcaacacattatgctttagactcgccaacgaagcttattttgggacgaggaatttgaggactatgatgtagggaatatgtggatctcataagttgcggaagatttataaactcattctggtggattgtgatgacatatatcacgggcataacatcctatggcaatgaaaggtcttgaatgaccagaaccaatttttccccgcgacttatgacatataatgtgatgccaaatatcattagaactaatgcgaacatagat

SEQ ID NO: 19577 - DNA, 289 bp, Glycine max
agctttaagcaaattcatttgacatttacttttgactcggatgtccgattgagtcatttaataattcttgacgctagaaattgaatacagaagctctcaccaaatttaaatgacaataactttttactcagaagtctgattgtgtcccgtaatatatctagatgctcaaaattgaaaacagaagctctgagcaaattcaaacgacaatagcttttgactcggatatccgattgagtcatttaataattcgagacgctcaaaattgaatacagaagctctaagcaaattc

SEQ ID NO: 19578 - DNA, 301 bp, Glycine max
ttcccacagtcctaaatgacatttcattctaggattaactcactttaacctccaatttctactgaatccagatttagcctttcaaaccctcaaagcatcacacttttccactcataacactacattctcactttctaaccctaagttaactatacccttcatccctagcagttttccatcagcaatttcagcacataaacatcacaagcatcatcataaaaaccctaaaacagaatgggtaagcttgactcacaccatatggcaagttcaacatgctttcaacaaattccttcacaaataa

SEQ ID NO: 19579 - DNA, 290 bp, Glycine max
agcttccatcaagtggtattcagagcaccagatcttcaagtaggtgctccttaaacctccattaattttttttctttaccttcccttccattgttgtttcttcatttttctccatgtatctcctcacatgtcttgttctaaatgttgttaacatgattctttagagtttccgccgattaaacttgctatagaaactagatttgattttctatggttcaaatttcttgttcttgttcttgaaccatgaattgtgttgagtttacgttcctttgagttttgtcttgttattt

SEQ ID NO: 19580 - DNA, 302 bp, Glycine max
tgtagaatggccagacatgatacatgttagggtttggtttggttcaagggtaaaagggatgccccacattatttccatgacacaaatgcaaaaatgatgatttggaaactttatgcaaaactggtcatgcatgcacctatgtggacactcaagtgtcaaatttttatggtcatgtgatgctagggctcaggattcattccatctattttagtcaacccaatatttccaaaatatgttcttttatccatttgtgcattcatccgagtccattttgggcgtccgggaaaattttcacagcattc

SEQ ID NO: 19581 - DNA, 292 bp, Glycine max
agcttgttaaaaggggttttgaaaataaacttaatgaaaataaaagtacacaaaaaaagtagggaccactaagggtgcatagaatgaattgaaagattcgatttcgggaacttaccagttgaagaccgaaggacgacgaagaacgaacgaagaacggtgaagaacaatgaagaacggtgaagaatctccacgaaatcgcttacggaaacgtctcgaaagcattatggaaccacctcggcttggatttttttcacggaaacaatttttctcactaatttcgagagatttctcg

SEQ ID NO: 19582 - DNA, 186 bp, Glycine max
tatagccaaatggaactaccttgaatttattcctttgatagccccttgagcctatgttcccctttctttgttttgaagctcattacaagccttaagtgaaaaaccatgatatcaccttacccttaaggaattttggagctttggaattgttttgggaataagtgtgtgtgtgtgtggggggggggg

SEQ ID NO: 19583 - DNA, 293 bp, Glycine max
agcttaaagtatgcccgattcattttttcctatgagatgttgtcgaagtattggcgatcagaattgccattccttggattatagggttgaaccaagctcatgcttttacaaaaaggttcatcaagtcaagttgaaatatggaagtaaccgtcttgcaaaattggggcaaaagatgaattgagtcacatcactgcttcgtctactgccaaacatatttaggattattgatgtccttgttacttccagtttcaccttgacaaagatgtcatggaccatgttgaaaatctaaattg

SEQ ID NO: 19584 - DNA, 301 bp, Glycine max
tctccctttttctgcttctagagctcttttccctaaataggcactatggctactctggaattttgtgccctggccattctgtacaagtgtgtagaagctaacatagaaggtgtaccctaattctacacaagacaggctttaaataggctctgaattcaaaacgttgcgcttagcgccaccctcacgcttagcgtgagtaaggggaattgggcttagcgccagtctcgcgcttagcctggctaaaggcacctgctgcgcttagtgcactaatctcgcgcttaaggcgcgactttgatactga

SEQ ID NO: 19585 - DNA, 282 bp, Glycine max
  unsure (1)..(282): unsure at all n locations
agcttctctatatatcgtaaaangatcaaaggtactaaagatacaagatacaacccttatttataacctcctaaaatatattagtccaaaaaggcacacaacgaccatgttgaaatccaccatgaccacgattgaaaagttgtgacgctgaaactctaggacgttgttgattaactacgaccctcattggttgactagaaccatggtggaatttaccatggttgtcagatggttggtgttgttttggaaggcagttatccttttgtcatggttatgttgctt

SEQ ID NO: 19586 - DNA, 293 bp, Glycine max
tttgggcgcccaatgaaaattttagattcaagatacatgaaaggaagatttaccaatgacataccaagaaaactattaatgtcccttatccctcatctaacaaaaggatttcaccccttcaaaaatcttacactttgcaagactgagaatttggcctaatgcttcacagtatattgaaaataagtccataagatgacatagactacactacatacctcctcaaaacaccataaggtcatcaacataaaaaaaatggctaataggattgaagccccttggagaagccattggaa

SEQ ID NO: 19587 - DNA, 285 bp, Glycine max
agcttatatagtcctaattttaaacttaatctaacaaaacataaaaaccctaaaaatctaaagctacagttgaagtcttctaccctaaagttaagacaagaaaaagagaaaaagaatcatggaacttacttggatggtgtatggttgatgcttcaaagttgaaaatgcacaaagaaagcacagatgcaaaatgtgcaattttttggagagagagaatgcagagacgaggtttccgtaatctcgcaaatctaagtgtaactgctgttacactcacttaagcaattt

SEQ ID NO: 19588 - DNA, 293 bp, Glycine max
taatcaacctgatatcaaaattctaatcatggcgaagattcaagccatcacaaaccagttaatcctatatagatgcaatgaacatgaaatttaaaagggttgggttgccttccaaaaagcgctcgtttaatgtcattaacttgacgcatcttactttatggatctggatcacatttggttccaaccttcataaacatctccttccatcctttattgacctttgaacagacattctggttgaccaaatgcttttcttgatcagacaaatcaaatttgatcttttgatcaactac

SEQ ID NO: 19589 - DNA, 285 bp, Glycine max
agctttgacattgtacattaactaaatcatatcattttcctgtcaaagtcttattagcatgaactaaaaagataataacattagctcgtgtacttgtcatatcaatttcctcttcaatttggtcttctattttgtacttgtcatcttggttactcttccaaggtctaccattgatccaagtaagctccttcttcatcttattagtagtggtagcagttacatgcatgcatgagagaagcacttttctactacattattttaaaaagctccaaagaaggacattta

SEQ ID NO: 19590 - DNA, 294 bp, Glycine max
tgtaggattcaccccaaattctgatgttatatgctaacttgctcccatataatgcaatggtagccataacccctgccaaggttcctcaacccccatttttttgaggatatggctcgaacgcaacatgtgcatatcatggaggagttctgggacattccattgagcactgtatgaccttgaagcgtaaggtgcaaagtctaactgatgcgggctggctgaaattttaggagaatcgcttgtgaatcctaacattgacaagcaacaccacacatggggcaattttgaaagctgttc

SEQ ID NO: 19591 - DNA, 282 bp, Glycine max
agcttctcgatttattatttgcctatttgggactttcgtttgaaaagttatgaccatttgaatttgtccagagctttggttgtccaatttcgagcgtctcggtatattatgcacctgaatcggacatccgtgtgacaagttatgaccattggaatttctcgagagcattcgttgttcaatttggagcttctcgatctattatgcgtctgaatcggactttcgtgtgacaagttatgaacatttgaatttctcgagaccatacgttgttcaatttcgagcgtc

SEQ ID NO: 19592 - DNA, 254 bp, Glycine max
tctcgatatattatgcgcctttttcggacttccgtgtgacaagtcatgaccatctgaatttcttgacaccatccgttgtttaatttcgagcgtctcgatatgttatgcgcctgaatcggaaggccgtgtgacaagttatgaccattttgaggatctcgagagcttccgttgatcaattcccagcttctcgatatattatgcgcctgaatcagacttgcgtgtgacaagttatgacctttggaaattctcgagag

SEQ ID NO: 19593 - DNA, 288 bp, Glycine max
agcttcaatggtttaatgttttaagaataaagctacgtgagagagggagagaaaaggcttctgaatttctgctttggctgagtgaggagagagaaaagctttttggttttaaaataaaaagggttttcccttttttccattattttattcaagctctgccacatgtccctattcgattggagcaaaagggcccactttctctttttgactgtgacccatactcagtcacaaaagtgagaaaaatctgacctttgaaacgctaaaatcctgcctcggtttgcgtgtcat

SEQ ID NO: 19594 - DNA, 296 bp, Glycine max
ttaacctcatcggctctgacagtctttatattggggagccaatccaatccttgtgttcggactctcagccacttatgatagccgccgatgatcccattactgcttcccctaagctctctgtcctttcttcacgccgcatcccatgccttgcgaactccttggagtaccctcgcgttatggtcactgaaacctcgggcgatgaaaggcgtgatgctttcgtctaatggcgctcctctcatggggtagccaagctgtcttatggcgaggacgggattataattaatacaaccccttgg

SEQ ID NO: 19595 - DNA, 258 bp, Glycine max
agcttctccttcaattttttataaatagggggagaaatgaagtgaaaaagggttgagccccttaagcacttctctctctttcgaatttgcttggaaaaattgtttccgtgaaaaaaatccaagccgaagcgctttcgaaacgtttccgtaacgtttccataaggaatttcgcgaaggttttgaccgttattcgacgttcttcattcgttcttcatcgttcttcgatcttcaacgggtaagtacctcgaaccaagcttt

SEQ ID NO: 19596 - DNA, 287 bp, Glycine max
tcttggttggaattaaaaaggagcctatcaacattttgcagtatgctgatgatactatctttgtaggacaagctgcgtgggaaaatattcatgttataaaggccttattaagaggatatgaattagcttctggtttaaagattaactttgctaaaagtcagattgggataatagggggtggagtcaattggtctttggaagcatccaatattctgcactgtcaacagctggaatatcctttcctctatttaagcttacctattggggctaatccttctaaccagctg

SEQ ID NO: 19597 - DNA, 278 bp, Glycine max
agcttattcatgtcatggttgtcaaaatcatgatctgtcttataaaatcatttgattttaacatcaagcaccccttgacaatctgaatcttgagttgaatcgctggagagtaggatcacagagggattgcttttgtccatgtttaatcatgggatcatttatcctggtgaggcagaagacggacaaaatcacaaggttggggtcatatgatccagtttgggcaaaacccctttttctccttcaaacaatttcctttccatatgtgactatgtgacttc

SEQ ID NO: 19598 - DNA, 293 bp, Glycine max
tttctcatagatattgatggatgtatattttttttttgcaaacgtgcataagaaaaaaatgaaaccaaaagaaaagagaaagaaagacctcgaaggtcggcatgttatgggcataaggaagcacaaatcattcgtagagagcaaacatatcttttggaaacaagaaattgatgctaagagtttattttccaaaataaccgagataagaatggatggattcgttgaaccaatgaaagaacataatttggaaacgttgggtctacttgcgtaaatcccaagccttagtatcataa

SEQ ID NO: 19599 - DNA, 288 bp, Glycine max
agcttgtccttggtttagttatgattgacacatgatttgggacttgtaggattcaatttgggcaaaattggatgagggaaagtgtgatttccaaaatctgcactttatgcagaattttgctgtcaaataggtgcaacagaattttggctttgtgcagaaagtgttgtgtatttgctggttgtggaaagagtagtacagattgggttttggacgttttatagcagatcccaacggtcataatgtagttttatgtgctagagacttccagtaaaattttagagtcgatcc

SEQ ID NO: 19600 - DNA, 288 bp, Glycine max
tatccttatggcctccctgtggactttttcccttttgccaccccggagattgagccaggcccctacttttgaggggcaactgccaccttatgaaaactatcccgggcaagacaatggagaaggagatacccatcgtggccccctgctccacctcaaagatccatccccgcatgaactaccccggccgaacataacccgacatatctcggtctgacccacacctgtaaaagaatctgttccctttgcctatgatctgggaaagattgatgctcttgatgagaggttaat

SEQ ID NO: 19601 - DNA, 288 bp, Glycine max
  unsure (1)..(288): unsure at all n locations
agcttgtgggatnnngtttagtgtttttgccggagatgttgatgatagaaaaagtactaccggatttgtattttttatgggtgattgtgtttttacatggagttctaagaagcaaggcattgtgacactttctacttgtgaagccgagtatgtagctgcaacttcttgcacatgtcatgccatttggctaagaagattgttggaggaacttcagttgttgcaaaaggaaagcacaaagatctatgttgataatagatctgcacaagagcttgccaagaatccggtgtt

SEQ ID NO: 19602 - DNA, 273 bp, Glycine max
  unsure (1)..(273): unsure at all n locations
cactactcaagctttgcactcatttctacttcggcgacgatttcgtttattccccgcccagacctacttgaaagcctgtgggcagcaattcgggagcacaccttatttttttccctgcctnattgcattcatttaacgagtggctttctattacaatgatgcctctctggattcaagttgctcttttcttatttagttctaaaacatgaatcaccttataaacaggtccaaagccaccttctccaatcttattgttcaatcaaaaattgcctt

SEQ ID NO: 19603 - DNA, 288 bp, Glycine max
agcttatatacacatgttttgcactctcttactgaagtttggataaaatatattctttatccagcatttgattgcttgtcataatcattagacaaataatctcttcaggaaaaattactttagtctcaaagattcaaggcttactagtcagaatcattatcaatgatataaaactcaaagcataccaaaacaccagcagccatatcccatggctttagacgatattcccaataagcttctacaattcccaatgcaacatgacacatgtccacggcagctgcgccaagt

SEQ ID NO: 19604 - DNA, 302 bp, Glycine max
tcgagccattcttttctatgctgcagtttctgcatcagggccagctcttgatcatgcagagcttgtagaatgtggtgcaccagcggccggtaatgagcgttgaagaatttattcaataggtggcctggccaggagtccaaccttctcctttgggagggggtgaggcctccgcagcccaggagcctcagcaagatcagcaggaggacattccagaggccgtagagcctacacctcctgagccattcactttagagtctgatccggttgttgtacaggttcaggaggatgttacgacatcagag

SEQ ID NO: 19605 - DNA, 291 bp, Glycine max
agcttctaaactttgtacaagaatgtatctctgataccacttgttagacaagtggcctcagatatcttaagaacggggggttgaattaagatattccaaactgtttcccctaattaaaaatctatttcactttttactcaagttatgaattcccttaatgacaatcttcttaaatattaattcaaatgaagcaacttgaatatgaatataaagcaataataaataaaggagattaagggaagagaaaatgcaaactcagttttatactggtttggccacacccttgtgcct

SEQ ID NO: 19606 - DNA, 299 bp, Glycine max
  unsure (1)..(299): unsure at all n locations
tgagatgaggaagtgttgaagggtgattcttcctgcttttattgntgaccacagagtggtacctggagatatgtcgcgggggtcaggagaccttggggacgtcaggtggggtgctattgcccaaaaccaagcttgaccaatcccgacccaacccgggcatagtcggtcagtgagaacctgtgatgtacctaaacaggcgagctcctggcagtcaacagataaaaggaaaacaagaccccaaagcaaggaggcttgtggtggctggcccactgggaattttttggtaatatgtggatggt

SEQ ID NO: 19607 - DNA, 291 bp, Glycine max
agcttctccccgatttttttataattatgggggagaggtgaagggaaaaaatgttcagcccttctggtatttctaggtcactggaaattagtgaaaaaattgtttccgtgaagaaaatccaagccgaggcgcttccgtaacatttccgtaacgtttccgtgggtgatttcgcgaagattttcaaccgttcttcgacgttcttcgttcgttcttcggtcttcaaccggtaagttcccgaaatcgaacttttcaattcattttatgtacccttagtggtcctcatttgtttcg

SEQ ID NO: 19608 - DNA, 301 bp, Glycine max
tgtctctacatatttgaaggcaatggatttcttcttttgtagacgctccctattttgaaggtgaacttcatggactctcaaaatactcaacaactcatcccattcaatatttctcggatctcttgcttttggaatggttgtgatcattgattcccacaacttgggaaagttgtcctattttggatctaggtgatgaattgtttttcttgagtcttttatgccaaaaatgagttctttgagtattaaaagataggtttagccttaaatttcacttaaaccagagtttcctaacaaaatttat

SEQ ID NO: 19609 - DNA, 286 bp, Glycine max
agcttcgaagtgtgccgaattggacgagtcaagggtggaaagcatggttttagaggataaattgaatgcttgtcaaaggtcgaagagaagtttgaccgaacagttgagtagaacagaagaaaatatgttgacaatcattgactagtacaaggaaaaggtaaacctagctgctagtcatgggcaaagactagaggacgagcatgcaaaggtaccagctttgcaaatggaaaaggaagcaagagagaaagtgatagaatcattgcacggggaggcgatgaaatggatg

SEQ ID NO: 19610 - DNA, 296 bp, Glycine max
tataacccgaaggatcacactttaaatttctaagccacaaaaatcatgaacaaagacgctgacgaattattactcataataatttatatataaaaattctaattccaaaattactacacttaaactttaccttcaatttttagtctaacaagaaaaattattacttcaactaatacttttgtcaatcataaaaataaaaattatttatttgcttgctctattaaaattaaactagacattcatactttattctaaaaaaaattattactctaattaaataatttatgaaaaattcc

SEQ ID NO: 19611 - DNA, 285 bp, Glycine max
  unsure (1)..(285): unsure at all n locations
agctttattcttcttagtatttgntatacaaataagaaacatgcttatatgaatcctcttgtaacttcctcactgcttccctactcttagccaattaagttgtttacttttgttaacctcaaccttcatgacttttagttgtgcagccatcgctttagtcttctcacccgtttttgacatcgtctccttccaatggcgaacaacaacaagagatcagccaaggaagatcttgatagcatgcaaactctccaccgacccaacataatccatcatatcacaatgaaa

SEQ ID NO: 19612 - DNA, 293 bp, Glycine max
  unsure (1)..(293): unsure at all n locations
tattgtaatttctgatgggtgtttttgtttttctttcgtccaactaaaaaaaaacacaagcggattgtanccagaacaaaacaatattctcctatcgaagtttcagttgttttaaaacgatgacgcatattttagaattctacctttcgtattgattcaaactgtatactatattttagacaaatgcttattactttgacgtttagctctcattggaggttttacttttaaatcttaatttacaattcaaacatttattagttaacatagaaaatatgagattcgaatacatg

SEQ ID NO: 19613 - DNA, 285 bp, Glycine max
agcttgttgtttattggttacctatgaaatgattttgggaactggaaaacacttttttttttgtcttgaattgaaacaaaatgtccaagagactttttaggaaagatcttttggtcacaaagcttaaaactagtgtcttgttaaatctttgtggtattttggcttagggaatgtatctaaggctctcttacctagggaattaggattaagaaacttttattgactgattttaacctgagcttaaatgaagtatgtatgacacattaatgtgaaatgagagtaagg

SEQ ID NO: 19614 - DNA, 295 bp, Glycine max
tggatttccttttaggagggtatctattcttcctaagaaggagccaaacccagtcaccctcattaagaactagctcttttctccctctattacctttagttgaatacacctttgtttggttctctatttggttcttaaccctctcatgcaacttctttacaaactctgacctagattccccttctttatgtataaaagaagtgtcccgtgggaaggtaatgaggtctaacggtgttaggggattgaacccatagacaacctcaaacggggactacttggtggttctatgaactcc

SEQ ID NO: 19615 - DNA, 286 bp, Glycine max
agcttttggcatttgatttaatttggtgagagtttctctctgagttccttgttgaaccaatctcagacttatcaaggtaatccttctggcgtctatcctgacttatcttccttcatcggaagtggcgtcattcaaaatatccgtagcctatatcaagcgatccgctcctagtcaggttcacatcatctggtatcagagcttcggctcttgatacaggttctatcctatcctatcctattttttttctttgtaatttgtctaggttcgtgtttttgttcttgttctg

SEQ ID NO: 19616 - DNA, 287 bp, Glycine max
tcctcgtggcttctttgagattctagatccttatttacccacacccctctataaactaaattaaccttcttgaaaataattaccggataaaataacaccaacaatgtcatcaaacatcaaacctaattattaatatatatatatatatatatatatatatcagggtgttacactacccctatgaagaaggtgacctcctaatggttataagactccttggagatcaatcttgtgatctatctcaatcccaaagagagaacatctttcacacaagatgcaaaatttta

SEQ ID NO: 19617 - DNA, 280 bp, Glycine max
agcttggcttgttaaattactcttttacaaacttgataagctgatttagatttatgtatgagtacgtcttgatggagaggtcgggattttaaaaactgcagcccatgttttctgaaattatagctgtgtaattgtaaccaagattttgttaagtcctgacaatctcatatagacgcctggttgtacatagacctctttgtaaatcttacagtaaattaacttggaggagtctttggtgtattttgacatactgacatggtgtaacatattgtatgctccc

SEQ ID NO: 19618 - DNA, 293 bp, Glycine max
ttatacaagttttctacaatcacaatttccaaatgcaatgcagttcacagaatgtgtttcttccccatttagtaatatgtcaagtgaaatcattcacaatgaaatgaatcattttcagtttattctaatatatctggaaatgcaatgttgaacatacagactttatagatgctaatggatgttgacatgtgtttatttcaatttcaaagttcccagataagttcaaactatacagcctcaagctaaccaaacaaataaaaaattgcttaccagttgtacgaccacttgcatac

SEQ ID NO: 19619 - DNA, 278 bp, Glycine max
agcttaacgatcaactattttttgtataactactggtactgtttgcttttataatactcaagattgaaacgttccttgagacacgcactagcctctttatatagaggcaagcctgtctttatgaatctggtggacagaagggagaaaatcagctccctcctttacaaaaacaagctctaacaatttacaatcttcttaaggctgatcctttaaagaagttatcgggataatcatgattcgtgcattagaaatagctggttaaaaacaaactagaactt

SEQ ID NO: 19620 - DNA, 292 bp, Glycine max
  unsure (1)..(292): unsure at all n locations
tgctataggcatgctgtgctttgcaagcccttcacccatgtggggaatttgaagtgtgtgatcnncggcggcgatattttattttttctaagaaagtaatttttgaccattattaacctctaaaaagttatcaaaaacattataatgattttttcaagcaaactgccacaaagattattttgaaaaaactaatattaattgccacattattatttaatagagaaatataatgatagggatcaaaatcaaattaaaaaataaattagagattaacaacactctaataaaaatt

SEQ ID NO: 19621 - DNA, 281 bp, Glycine max
agcttctcctttattttgttataaataggggaagaagtgaagaagaaaagggttcagccccttaggcacttctctctctctcgaatttgctgaggaaaattatttccgtgaagaaaatccaagccgaggtgcttccgtaatgtttccgtgagtaattacgcgaagattctcgaccgttcttcaagattcatcgttcgttcttcgttttcttcagtcttcaacgggtaagtaccttaaaccaagcttttcaattcattctatgtacccgtggtggtccacat

SEQ ID NO: 19622 - DNA, 286 bp, Glycine max
tggttcgaggtacttacccgttgaagatcgaagaacgacgaagaacgaatgaagaacgtcgaagaacggtcgaaaccttcgcgaaattccttacggaaactcttcggaagcgcctcggcttagattttcttcacggaaacaatttttccacgcaaattcgaaagagagagaagtaccaatcgttgtcttgttttcatagcctcgtagtgaggaagaatgaaagaagcagttgattcttgcaaaaagaattttccaaggacgagaaatagttgaaggatttttttag

SEQ ID NO: 19623 - DNA, 289 bp, Glycine max
agctttgaagcataaaatttgaaaattaaattattgagcttttcaatatggtaatatatcaatcttcaaaagtcaaatcaataaactgaagtttgtacgcaataaagcataaagaattcagaaatacagtatttcctattgaagttgaactagaggagttatagttgtaatatcctttttaggaaagcaaaatcaataatcgaactacttccaaatcactaaatcatagattcatagcatacaagtatgcatctctgaccgctcagttgcatgatttcaccaacaatgc

SEQ ID NO: 19624 - DNA, 302 bp, Glycine max
tatattaataaaataataataacaaaattctacttttttgtgacttacctgaatcggaatatctcgcatggtgacccgagacacgtacttatttttgccgacaggctcacaaatttactgagatcaactaatacatttcaaatgatggctccttttgatcctgcttaattagtattagtgtaaatggatattgataagaaactaattgcaccattgtccattagaaattgttatgtactcttgattccttaattatcggaacatcaagtttgagggggattaccaaatcacttgtaagtata

SEQ ID NO: 19625 - DNA, 289 bp, Glycine max
agctttggcaaccttcattatcattctaaggagttacttgcaatgattaatctcttggatgtgaaggatgaggaagttgggctatctacagaagaaattaagaggagaaggatttgtttgggggagtatcacaaagttgctaagagacatgaatcccttgcttaccaaaaatcaagaaccaagtggatcaaagagggtgacgaaaatatgaaattctttcataataagatcaattggagaaagaggaaagatggtattaagggcctagaggtggaccgtgtatgggtgg

SEQ ID NO: 19626 - DNA, 300 bp, Glycine max
ttatgagaatccgcattcaaaagcaccttgaagtttcaattatatgatttttaattattaattaataatataattaattaactttttaaacattatttttaattttttttttcacaaactaaaagagagataaaagataatagaaggctttgagatgaaagaaacatatacttttaattgtggagtaattttgaaaaaaaaattgattattctattacttttaattgtttgataccatttgtcattaagatatccttcaataggaactttcttatttccaaccattgagagattaccctt

SEQ ID NO: 19627 - DNA, 292 bp, Glycine max
agctttagctatttatgctttcacgtttaaacctaactctgcagagaagaatggtatctgaaacatcatcaggaagtcttgtattcaacgatgcaattctacaagtattaatctgctgcttgtctctttctttatcttatttaataaaggcattttttgaaacctcacattgactagtgatgctaaaatagaatatatgagtggatttgagttaggtccaaaatttatagtagtattagagcttattctagggattgttattgtacctagtatataagtggaggcatgctta

SEQ ID NO: 19628 - DNA, 302 bp, Glycine max
tgcgagcgagtctcataatttagctttttatggacatttcttcaccatgtgcatgcttcaactctaatctctatctgtcacaccatttcccttctaccccatgttcagttgttcctcctattttcttcagcattgtcagaatcccaaagtcccaagcaaacacacccttcccaccgtttcattaacttcacactcagagacgacggtgtttccacgacaccatagcatatatagtagagataaataaattaacattcacgtaaactataacttacttgcaccgcaacaacccccaatgggtg

SEQ ID NO: 19629 - DNA, 358 bp, Glycine max
  unsure (1)..(358): unsure at all n locations
ccccccccaaaaaaattgaacatgagacctcgtactgcgatctgtgagtctaactggagggctgcaagctttggaccaaanccttttatattgatccttttcttcgaaggtccaatgggtccccgtttgtatccaaaccctcaaaattcaaaaccaaaccttttagcaagattcaacgaaagttacttttttctcgtatgttcgattgactcctgccgtttatcgagaatcttcactgtgagaaaataaacgctgagcattatcaaactacgctaactttttactgagatggccgcatggattccgtcatgtgttgagatgctcggaattgaaaacggaagctctgaatgaattgtaa

SEQ ID NO: 19630 - DNA, 301 bp, Glycine max
tccattttcaattacaagcgtctagatttattattggacacaatcggacatccgagtaaatagttattggcattagaatttactacgagcttctgttttcaataacgagcgtctcgatatactacgagacacaatcggacatccaagtaaaaagttattcctgtttgaatttgctacaagcttccattttcaatttcaagcgtctagatatattacgggacacaatcggacatccgagtaaaaagttattgacgataaaattttctaagagcttatgtattcaatctcgagcgccacgata

SEQ ID NO: 19631 - DNA, 277 bp, Glycine max
agcttcttatttttagcttatgaagaagaatttgtggccatatcatggactcctctaaggacaatagcatcatttcttgcactgaattgttgggagttggaagctatcttctcaatcagattcctagcctcaacaggagtcatatcaccaagagctccaccactggaagcatcaatcatactcctctccatgttgctaagtccctgtcgcaacctacccttcggcgggagggcgacgcgtgactcgcgggatgcgtgttccacgaaaggaatacgcg

SEQ ID NO: 19632 - DNA, 292 bp, Glycine max
tgcaaagctagatctgcagattataaatacattattcagcatgagaacacgattttcacacctccctctcaaaactccaccaaaccaccctataaaatcctcctacaccacccacgaccaccggtggccgtcacgagctgttgtgacttgctgttgaaccaccatatggagagaaatgttttaaacggagtggaatcctcagaatccatctcaaggatttggtggagaacaagctctcaattgaaaaaaatgtatcttttaagaaacagttacaaaaaaacttttgtatgaa

SEQ ID NO: 19633 - DNA, 284 bp, Glycine max
agcttcaacatttaacttctagcgtctcgttatattatatgactcaattagacatccgagtaaaaagttattgtcgtttgaatttgctcagagcttcaacattcaatttcgagcgtctcgatatatgacgggactcaatcaggcatccgagtaaaaagttattgtcgtttgaattggctcaaagcttcaacattcaatgtcgagcgtctcgatatgttacgggactcaatcacacatccgagtaaaaagttattgtcgtttgaattggctcagagcttcaacat

SEQ ID NO: 19634 - DNA, 274 bp, Glycine max
ttgagcaaatttaaacgacaattactttttactcggatgtatgattgagtcccgtaatatatcgagacgctcgacagtgaattttgaagatctgagcaaattcaaacgataataacgttttactcggatgtctgattgaggcccgtaatatatcgagacgctcgaaattgaatgttgaagctctgagcaaattcaaacgacaataactttttacccggatgtctgactgagtcctgtaatataacgagacgctcaaagttgaatgttgaagctc

SEQ ID NO: 19635 - DNA, 285 bp, Glycine max
aagcttcacacattctaagtacgtgattttcaaccatggaccatatgtatatatatagatgagagatcccgagttcaactcttccattaataaaaaattaacaattaacaattaataactagcatttgttgataaatatatgtctcaatctaccattccaccacctatatggaagcacattgtgacattgtgtgtatgttttaaggtgaagctatataaaggtatatgatattacatcatttatattataatttaaaaaatttatactattttttaaatgaaaaa

SEQ ID NO: 19636 - DNA, 294 bp, Glycine max
ttgggaagaagcagcaacagggctactttgaagatggtggtcttccaaaagatgtgccaaaagggcactttgcagtgtatgttggtgaaaacaggacaagatacattgtcccaatttcatggttggctcatacacaatttcgaagcttgctccaaagagctgaggaggagtttggcttcaatcatgacatgggccttacaatcccatgtgatgaagttgtttttgagtttcttacctcaatgattagatgagaattaagggaaagttgatagaagtacacttattggcattttg

SEQ ID NO: 19637 - DNA, 286 bp, Glycine max
agcttttggtcaatctgttgagtggtgtcttcatgctgcaaattgatggtttctgggtggaaaatcctaatttggttaagccagaaattctacagcatttgcaaagcagattcaaattaattgaagttatgtacaagcactgcagcttttacaaaaataagcactgcaacttatttaaggcagaaattttgcagcatctgcagtatgtgggtggaatctggtccagggtgttggactcaaagtatgggggatggaggaacttatatgaagaaggaagggcatggca

SEQ ID NO: 19638 - DNA, 297 bp, Glycine max
tgttaatttattagcttgagtttgatttatagatgatccaaccttaaatatatcatttatatgttcaaatattcttttattctcttttgctcttatttttatcttatcctctaacatgaaaatatatattaaatacttaattaatgtgcttaaaattattaaaagaaaaacacttccctgctcaagttatgaatgagataaataagccaatcttaagctttatatttttctaacaagtcaaactcaagatttaaatttggttgatttaaatgagtcaaacttgagtaccatattatt

SEQ ID NO: 19639 - DNA, 287 bp, Glycine max
agcttgttacaaatatgtttaacctactagcaaggaaaggcggttctagccatgtggtcgtgctgaataaatgacagctcagcggcagtcaatgaaggcctgtggttacgacgggtactgtttacctgtgaaaagagcatgcaatgtaagcgtgagatgcacgcgaatggggccacgtgtgcggcagacagcaacgcggttgtggcgtctaggtcatcaaagacaggcaatgatggtctctagtaggcaccgacgaaagggcgtcgggaaggcttccaaacaaggca

SEQ ID NO: 19640 - DNA, 262 bp, Glycine max
tattattctatataacaagcatttgaattttcatttaacgcacatattcaatcaaactgaatatctaaaaatgtccctttacatctttaaaatattgaaatattcaaattcaagtatttaacctatctgaatagaaaagcactggtctgtcaatacaagtggatcctctacaatactcatgatattctattaagtcaggttaagttgaatactcgccaatttgtaaaaaagatattaggccaatacctcgctgtttttaaaa

SEQ ID NO: 19641 - DNA, 281 bp, Glycine max
agcttgcatgtctcgttatacctaaaaacatctttgttttgtaatatctcaaattgggctaagcgtgcaggcacaggctaagcgagtcatgcattcccggtaagcctgtggtgctcgctaagcggattttgcaggaaatttcctcctgcaaaactctctaagccctatgtggcatgctaagcccaataatatctctgaagttgcaatttcatttttgggcttagcgcacaagtttgggcttagtgcgcaaaaaaaaaaatcaaaatttcttgtacttctat

SEQ ID NO: 19642 - DNA, 142 bp, Glycine max
cagctagtagaactatggtgtacccatcacatgtggtactaggaggcggtcgggcgaaggagcacaacaagcttaccacattcacaatgcgcgcatagacccacacatccactgttgcgcagctactactgagctcacgtac

SEQ ID NO: 19643 - DNA, 277 bp, Glycine max
agctttgatcttccaccttcgccgccaccatcatcttagacttatattttaatattagtactctgattttcagccttgtattttggctatattattatactatttgaacaatttactatttccctatttgcatggtatgtttaaacaaatattaagtatgttatttgactatgtggaatttataatttatctatgcatggttgtttgcttcatggtttcatggttcttgcttcttgcttcatgatttgattgatattttttatgaacattgtatgga

SEQ ID NO: 19644 - DNA, 289 bp, Glycine max
tttaaaagcaaactttgccactatgaattgatgacaggaaacaggtaatcgattaccagagagtacaaactctagttacttagaaaattttgagaaaaactctggtggaaaacagaactgtgctatgtttgttttatgaaaaatcttttcaatacttctgttgaaaagtcttcctgacttcttctgtcgaatcttgaattcatcatctcttgaatcttgaaatcaaacttctcttgattcttgaatcttctagataacttctcatgaatctcgaaattaatcgtgatcg

SEQ ID NO: 19645 - DNA, 278 bp, Glycine max
agcttgaagttcctcgatttgatggttttgaccctttgggatggaccttcaaaattagtcaattcttcgaataccacgcaacccctaaacccgaacgcctcgtcattgcctccttcgccatggaaggacctgcacttgcctggttccaatggttgactcctaatggctagattttctccttcacgccctgtaagctagatttgctccttcccagtacgaggatcccacgggttccctgttcaaattaacacagcaggggtttgccggagtttacctct

SEQ ID NO: 19646 - DNA, 292 bp, Glycine max
  unsure (1)..(292): unsure at all n locations
tgaacatcaaaacacacattataataattaagttntaattacccatttaatacttataattacaacatttttttcttttaatctttgtaatttaaatattaaaatattcaaatttagttcttgtaattacaatttttttattctcaccgtcttaagttttcaaactctgtttgagattaacataaattacaggagtcacatgcatcatgttaatttgtttttaacaacattagtcgacacttagtaatgatgactaaaatgtaaaaaaatcatagctagatgaaccataata

SEQ ID NO: 19647 - DNA, 899 bp, Glycine max
  unsure (1)..(899): unsure at all n locations
ggagcgatgaactttttgagnnnctagaananncncgaaaactttacannaaanaacaggctaacgcccataccccggggaagaaccaaaaatctctgnaggcttantggtcccccgcgaaaaagngggagaatattggatttgccgcccttaaaatgagtaagtggtttagagacctcaatgtattgggcttgaagaatacctccaactgccaaatattaatggtttggaccttggggtggtcaaatatctataaactacccccaccaaaactttttgaaagtctcatttccaatccaagtttttcttggctttcctccaaacttttgataaccttcatatttgcaccccaattagtgtgtccaaatgggcttgccatctatttcatttctggaatttatataagcattcttcttttgcgtagccttttgaaggaaaaagaaaatattcatcctcttttctgcgtttaccttcaaagggcaaaataagtttgaacattttttcccgaaatctgggccatcctaaaacccccctcatacaatatccttcccttaaaccctcgagtaattgtgtatgccataaaacatatatttggtgcaataacatcatactcataaattgggtgaatttccctcctctctaatattcttcccctttttgggggcgagaaaatacatgaagtcgtaacaaaccctttcaaattttttgtggcccacaaaagggccaagcgtcgcgaagattataacggctctggggaaataattcgccccgaaacaaacttaaataacccctcataaaaacataattgtaggaactgaacactggtccgcttaatgacgtcttaaaaccctcaacgtgataagcggccgctaatgggtggaccaccccctttaaaatcg

SEQ ID NO: 19648 - DNA, 312 bp, Glycine max
gagcttgttgatagaagtatatattgtcttgatcatgaattaatttatttcaatgaaagttaatactagatattttcacaaggcagaccttccagtaaatatatgctcccttatacccaaaatgctgggttttcgatgtccactacctcctctccggaattctttcaatacatttcttattttgaaagcttcttcataatagttatgcttgacaaaagaaacaataaattaggagaattgagttatacagaaagagctacttaattcatattaaattgaagtgcgaggaaaagttacctgattcatatctat

SEQ ID NO: 19649 - DNA, 159 bp, Glycine max
  unsure (1)..(159): unsure at all n locations
ctaagcattatcaactctttctttttgcttaggtcaaaactgctaatgcncttatancttttctcatcgaaaacaaccaactcagctgacatcattttccaataatgggcgataggaatgtccatttgcgtttgtaccctcgctgattgcaaaatgtat

SEQ ID NO: 19650 - DNA, 319 bp, Glycine max
  unsure (1)..(319): unsure at all n locations
agcttgaccaatcccgacccaacccaggcatagnctgtcagngagaacttgtgatgnacctaaacaggcgagctcctggcagtcaacatataaaaggaacaaagaccacaaagcaaggaagcttatggtggctggccagctatgaactttgattgatatgtgggttatggcctctggtaatcgattaccaaaggggggtaatcgattacaaggcttaaaaatgaagacagaaggctaagatggtctctggtaatcgattaccaagaggtgtaatcgattaccaagcttgaaaacgaggtcaggaagccatgagggcttc

SEQ ID NO: 19651 - DNA, 515 bp, Glycine max
ttgagccaaaatcctgactcaccatagaccttgacccatggtgagaatgcttatccttaccctcggaagcaaaaaaagaatagaggggaaatttccaatcaaagaaaaagagaaggaaaatttccaatgaaagcaaaaaagaaatgaaggaaaattccccaatcaaagagtgggagaaagcaaaaaaaggaaaagaaggaaaattccctaatcaaagagtgggagaaagcaaaaagaaaagaaaggaaaattcccaatcaaagaatgggagaaagtaaaaaaggaagaagaagaaggaaagaaagctcctgatcaaggatcgaaagacaccagaagaaatgtgcagagaggtctttggaccagacaatatctgaacagtacagaattgtcaccaaatgaacgaaaaaagaaggaaagggaaccacgacctaaaatagtcttctccctttattaccaaccaaaatcccgtgcgctagccacttttttttctcgccccgcactaaaaaaaaaaaaaa

SEQ ID NO: 19652 - DNA, 324 bp, Glycine max
agcttgcatgatttacattctccccctttctcaagcttattcttatattttcttgacatcatcaaaatcttcatcatcaataatcttaagaaggataggcttaaaatacagaagaagccacaacaatcaatttaacaatgttctttaaacatgcaagacacaattgattgcaaaaaattaaataagataagggaagagaagaatgcaacacagttttatactggttcggccacatcccgtgcctacgtccagtactcaagcaacccacttgagatttccactatctttgtaaaatccattacaaagtctgaaccacacagggac

SEQ ID NO: 19653 - DNA, 428 bp, Glycine max
tcttttacaacaatgaaaagagaaaatgaaagactgaagaagtacatgtagtgaggatgtctcctccacctctagaaatctcacaatcacttaagatctcatccaaagctccacaagatggtttcctcgtcaagctcaactatatctcagtctctccacaaccaaaaccaaaagctaactctctaaaaagctcacctcccttccaattttgagatttcagctttaaataggcaatcctgttggtggccgcgcgcttagcgcaaaatggctcgcttagtgcgcataagtgacttttggcttagtgccagtcttcttgctcaatgcaaaggattgcatgcggtgcgcttggcgagttgatactcgctcagcgtgtctgtacaactcatccttcttccagattcttctctgtgctcagcccacaatgggtg

SEQ ID NO: 19654 - DNA, 324 bp, Glycine max
agctttcacatggatgtccgattcggggacataatatatcgagattctcgaaatcgaacaacggaagctctcgataaattcgaatgggcataacatttcactcggatgtccgattcggggacataatatatcgagacactcgaaattgaacaacggaagctctcatgatattcgaatgctcataacatttcacacggatgtccgattcggggacataactcatctagacgctcgaaattgaacaacggaagctctcgagaaattcgaatggtcataagatttcacacgaatgttcgattcggggacataatatatcgatacgct

SEQ ID NO: 19655 - DNA, 497 bp, Glycine max
  unsure (1)..(497): unsure at all n locations
tgggtacaattctctcatcctatcctccaactcccatgtataatcaccctcatcggttccccaccgcaccttcaccaacgcgatctcctttcctctcaacgacttcattcttcggtcagtgatcttctgaggttgtgctttataagtgaggttatccttcacctgtacctcgtcctctgcaagaatatgtgatggatccgggttgtaccgtctcagttgagagacatggaacacagggtgcaaattcgataaactcggaggtaaggcgatatgataagctacaggcccaatcttcttcaaaatctgatatagacctagatacttgggtgtcaacttcctagccttgagagctcttccgaccccggttatgggagaaaccttcaaaaacacatgctccccttcctggaaatctagtggcttcctccttctatcataatagctcttctgcctatcctgagatgnctttatcttctctcgaatcaacttcacttgttcgt

SEQ ID NO: 19656 - DNA, 312 bp, Glycine max
  unsure (1)..(312): unsure at all n locations
agcttcttatccaagcaatgcttggtggtgaagctcctcttccttggcttattccctagtggatggtgcctcccctctcctcttctcctttgccttccgctgcatctccatggtgtaaaatcaccattgaaagacctcattgaagctcanagatccatccttcatagaagccccacaagcaagcttccatcaagtggtaatcagagcataagagcttcaagtaggtgctccttaaacctccattaatgttttgctttaccttctcttccattgttgattcttcatttttctccatgtatctcctcacatgtc

SEQ ID NO: 19657 - DNA, 352 bp, Glycine max
tatagtcattacttgttaagaaccataatctagagtctattgttcctttgataaagtgaagaatttgttttgcagccttgaaatgagtagtggttagagtctcgatgtattggctgatgagtactccagtagcatatataatgtttggtcttgtgtgtcaaatatcataaactacccaccaaactcttgaaatctatagcatccagttttcttgcttcgtcgaactttgataacttcattttgcactccatcagtgttccaattggcttgcatctatccatcttgaatttattaagcatcttctttgcgtagctttgcagtgaaatgaagatttcatcttctttctgcttta

SEQ ID NO: 19658 - DNA, 317 bp, Glycine max
cgactgccgcatgcaagcttataagaacaaaatttcctaaatcatttccaaatatgtatgtcaattaagaagcatcaacaagaatcaagccaaggctattgtgcaagcaatcaatgggggccaaacacacccaaagattatgatgatggatggctcaaattcttacaaagggaccactatcactttcaaattgagcttttcaaactatcatgacatgttgaggaaaaacaaggatttcaaatcacaagatgtcaagagacttatattttcaaaacaattacccattacttgaacatattctataaattaaaaaaaaa

SEQ ID NO: 19659 - DNA, 491 bp, Glycine max
taagggatttcctaaagtggagctgcagattgatacttatgctctgttatgagcatcaaagggaggaatgttggaagttctaatggcagaagactgataacaaccattagaaagttgatggcggatttcgaagggactcgtgttgttcatatataccaggacgtcaatatgtgtactgatgctttgactaatactgcgtatgacagtgaagtagattttgtgatgtttaatcagccacctgtatgtttaaccagacacataagattaaacgtattaatgttttagtcgttaaatttatggaatgaattttttttggggtgttcgggatgattgtaattggtttcattttcactgaaaatagaaagcggtgatgaaaatgtgtttagttggattctgaaaacatgtttagtgaaaatgaagatataaaccacccggaaaatgaaaacattaaatcctccttttaagtgttttttgagaacagatacttcatt

SEQ ID NO: 19660 - DNA, 315 bp, Glycine max
agcttggaatcaaagagaaacttagaatggctctatattagagtaaaaaaactgaaaaaaagactcaacaaaactctagctttggaacttgtcttcacactaattttcaattgaaatttccaattatagaataaattttgagccaaaacaacaagcacacttccctttcaccttttttttttttggatactgattttcctgccaacttgtgtgatttttcgtattttttccttttatccaaatcacttgtttccttttttataacttttttccagatgtctagaaaattaagtaaaaatttcagctcaaaattcg

SEQ ID NO: 19661 - DNA, 530 bp, Glycine max
tttcgtaaagcttacggtaaaatctgggacctagccattgtagaagtctccacagaggccattgcctccctcgcccagtattatgatcagccgttgaggtgctttacctttggggacttccagctgtcacccatggtggacgaatttgaagagatcctaggatgtcctctagggggaaggaaaccatacctcttctcagggttctacccctcattagccagaatttctcaaatagtccaaatctcagcacaagaattagaccgccaaaagcaagtcgaaaatggggtggttgaaataccgagaaaatgtttggaggcaaaagcaagaatcttggaagataaaggcgaatgggccctgttcatagacattttcgcactgttgatctttagaggagtcctctttccaaatgtggatgggttggtggacctagcagcgatttacgcttttcttgcgtatcatgaccacaaggaaagcccggtcattgctatgctagccgacctctatgacacctttgaccgaccaaagatgtg

SEQ ID NO: 19662 - DNA, 316 bp, Glycine max
agcttgtaataatcttagatagaaatgtttgattattttcttgagtggaatccctcttgtgaggagaaaatatataatctatgaggttaatcacaaactcattttctgtaaagtccaatagtggttggcaaaagagaagtctaatggtgtagctgatctagttgaagctaagactgaagcctattgagaaattgacaggttgttgaaacccaatgatttactggtcgtgttagtgaaatctcatctttaagggtgaggactagactagctcaaggttggggtgaaccagtataaaacctttgtacactcttccctt

SEQ ID NO: 19663 - DNA, 653 bp, Glycine max
  unsure (1)..(653): unsure at all n locations
tctaatatttataggtattcttcaacgagtgtccattttgtgcatctaatgcttgaattaaatgcatgtacttcttcatgttaaaaaatcacttttgttgctttcatgtagaatacttcaacaagaaaccactttcttagtgtcataacaggtttgtcacaccaaagcacgtcttttgatgtatttaagtaactttcagaacttgaacttcatttaagcttcataagattcgatagatcctagaaaaatgtcttgaaacaaaattatcaatgaaaaaaaaagatgaaaaacataacattgctatataagaagactaaaaaggtatttaagaataaaaaatactcaaatatgtttttttttcttgaaataaagttatatattttacttttgatgcttaaatattttttgcttcacttttagtatcggtaaatctttttttttatccctggtatattggcaataaattctttttggttatattcaatccttacatataaccaaatatnctattatatctaattttgcattttaatttctttgataatttattcaattgaattagtcctttaaaaatatttgatacggacaaattaaaaaagttaatttatcagaacaaaagtaatatttttgtattcccaaaaaaaatttttttt

SEQ ID NO: 19664 - DNA, 319 bp, Glycine max
  unsure (1)..(319): unsure at all n locations
agcttcccatgagtctccttaccatcattatatctttctctttcgggggaagaaaaccatcatcctccctttaactagaggaactatgagaactcttagatgactcattatccacctctccattctccaacacaatcatggtccttttgttaggacattgggatgcaatatgaccctttcccaaacacttaaaacatttaatggaactagttttattgggagggggttgagtaggagaagtangattacctcttgaagacttcttttcaagatgttgtgaagaagaaccatccttcttggaagtgtctttatctttcta

SEQ ID NO: 19665 - DNA, 480 bp, Glycine max
  unsure (1)..(480): unsure at all n locations
tcagatttgtgtttaagtagaaataaccatgngaatcttgagcagtcatctaccaatgtaagggaagatctctgcccctcatatgtagggtgggcatagggaccccatatatcacattagagtaaatcaaaaggtaaataagataaattgttagagttaggaaaggataatcttctaagtttagcaagtggaaaaatagaacaattagaagaaaagaaattaggagagaattgtaaactaattttattattcaaatgattgaaaactttgtcttatatatgaccaaacctagaatgccaaatatgagcatttttacaaagagtggaatttacgtgtgaattcataacagaaaaagtaaatttgcaatcatgagtgtccttgaggtctaggacataaacgccttagatgagataccctttaccaatcctcttgcaagcttgcttctcttgaatatcaaattcattttgggaaaaaatggac

SEQ ID NO: 19666 - DNA, 178 bp, Glycine max
agcttagaaggaacctatccaggtttgtaacggtcttttttgcagtgagagcagagaatccatagtgagcattgactttcagtatccattccactgcctcacgacgaagctgagaaagacaagagtccaaaagcgcattattgttattattattgctatcattgctattatcatcact

SEQ ID NO: 19667 - DNA, 484 bp, Glycine max
tctaatctggatttcttggattttgagaagtatctttttcaattaagattgtcaaataatagacagaaaaggttgtgttatcaactgaatataaagaagtcagttaaaatgaaaaaggttgttcagtagaatatgaaactaactgcgccataattcttaaataatataatattgagacttgagagaattcccagtgtggagaacgtataatggcttaatataaataaggttaagatgataacccaaattttgagaagtatgccagtggttcatcacgagcaggaccagcataaacaagtgaaccctctgttagcaagatgatgtcatcaaatttactatacactgaacctcttggctgatgtatcgaacaaattacagtatgaccatcttgtgcaagttgtttgagagtttccatgactttctcagcctggaaggcatcaagttcttggaaacacagaaaacaactttcatgacaaaaatatgt

SEQ ID NO: 19668 - DNA, 301 bp, Glycine max
  unsure (1)..(301): unsure at all n locations
ctgcagctgcagctacccagcgagctattgttaggatgaaggcctcctggacagagaccagagctgacgtggtgactcagcctaaacatacaaaatggcatttgcacccctttctttgtggtttttgttctcggatctaacaatcaagcattaaccctaaacgaaccctcggcctagtgctttaactggtgccaacccccataattcgattagcaatgataaaaacattacatccgaatgataaaagcatcatacccatatgaaattagggtctgacaatagctaggctcanaatcatagt

SEQ ID NO: 19669 - DNA, 548 bp, Glycine max
  unsure (1)..(548): unsure at all n locations
gttggagaaaccataaaaactaatgtaggttttttacaaaaatcaactgaggaaactttgccaagaatgcccattgtgaaacctttattcaaacctttcaaagttagtgagaaggctgaaagaaaaatttgggaacttagaagaaataaatccttaattgaacgcgtacgtgacaaccatagtgaattactaaacaagattggtaggttacttaaagacattccagataccccccaagcctcggaaaatacttccaaaatggtaacaagaagtacctccaaattaatcaatgttattaatgaagatagtgaccaaaactcagataacacaactgagataggatcagtgtctgaaaagaatataaatccaattaattccaaacactggagaacaccctccaaattatattatcaacgtccaactgcccctgaccttctattagaagacagaggtgaaaacaatcttaagagttttagtgcatacaacatctatgaatggaacatagatgcacanacggggtataacatcatgaatacacttcaacatat

SEQ ID NO: 19670 - DNA, 321 bp, Glycine max
  unsure (1)..(321): unsure at all n locations
agcttgcatccggtgcttgttgtcagggtgaagntttctatcctttttatcctgcncnnancttganttcccatttgcaccgtaccaaagtcaccgctttggtaggatgagaagaaacttccatgtgcagtaacatggaaggaggcaccagaattgacaatccaagaactatcatcacaagcaatgtttaggatattaccttcaccaacgagacataacaaatcttcttttgaaactatgacaggaggattcttctcttcttgcttctttgatgggttgacttggtctggcttaacgttactggccttttgatctctcttg

SEQ ID NO: 19671 - DNA, 401 bp, Glycine max
ctaagcttatggaacaagtgagaggtgggagagcaaaatttgactcctaaagatttgttttcactgcaggtgcaactgcagccaacgaactcttaaccttcatcctcgctaacccaggagatgctttactcgttccaaccccttactatcctgggtaagtaattaacaacaagctctttcatttaattagaaatactaactgacactttcaatattgattggaatttatcggaaatcaccattttttttagattctggtgctcctcatctaataattctcacttcttatatatattaaatgagaaatgaaatctattagaattgatttttaataaatcataaaaagtgtgagagagaaagtgtcatcttcatttactttatagtaaaaataaaatgacatt

SEQ ID NO: 19672 - DNA, 557 bp, Glycine max
  unsure (1)..(557): unsure at all n locations
gcttctcccctattttgctataaataggggaagaagtgaataagaaaagtgntcatccccttaggcacttctctctctttcgaatttgctgaggaaaattagttccgtgaagaaaatccaagccgaggcgcttccgtaacgttttcgtgggtaatcacgcgaagattctcgaccgttcttcaagattcatcggtcgttcttagttttcttcagtcttcaacgggtaagttcctcaaaccgagcttttaattcattttatgtacccgtgaggggccacattttgtttcgtgtattttattcttcgtttcatttacttttaatacccccttttgacgtgcttaagccatttatttaaaacatttctagcttaaatctaaaaataaaataaatttcaccgatcgtttggaatcgctcatccttaatgttggtaaaaagaattccatcttttagtcgagccttaccgcgttggagttaaaaagggggaatgatttcctatttattaaaaaaaatttttttttttaattattccaaaggaccatttggcctttctttttggg

SEQ ID NO: 19673 - DNA, 287 bp, Glycine max
tgtaggaattttcctcttcctaagggcactcttaaaatcattccaatactttactggaagatccccatgaatcctctcttcccttaaaagggaaattcacccatagtgggtatacacttgaaaacttagggtaaccaatggaacttttctcttttcgcttatatgatggccagcaaagagttgttcaaccttcattttccaatctacgtaagcctcaacattatcttttccatggaaatataggaggctaatgttaaccttttgaagccttctattcttttctcttc

SEQ ID NO: 19674 - DNA, 517 bp, Glycine max
  unsure (1)..(517): unsure at all n locations
ttgactctttctttgtagagttttgaagattcataagttgtcagttttagttcttccaactccaacagttgaatattcctgtgttccctggatgccttctcatcaaaattcagaaattttaaagcccaatatgctttgtgttccatttcaactggtaaatgacatgattttccatacaccagttgaaaaggagataagccaattggggtcttgtatgaagttctgtaagcccacagtgcatcttccaatttggttgaccaatcttttctagttgacgccactgttttctctaatatcttctttaattntctattggacactttggcttgcccattagtttgagggtgatagggggatgccaccttatgattcacatgatattgactcaacaccttttgaagctgagcattacaaaaatgtgaaccaccgtcactgatcaagatccgaggcaccccanattgagcaaaaatattcttctttataaaaattaccacagtcttagcatcatttcttggag

SEQ ID NO: 19675 - DNA, 322 bp, Glycine max
tgcggagttcatcggctctcacccggcgaggagggggtacttattagccgctgcaaaaaaggaggacatatccttgcgaagattctcagctgagcttgatattggggctgtaccatctggggtgaagttcacgcttgggtacgcacaccaaaaagtaatatatgattataccagcttttatgttctgacgctggttttataacgcttatatatatacattagctggatcagaaaaacagagaaagagacacggtcatttttttaagtatctagatcccactcttcatttaatgaatctttagactcaattgctcaaattttc

SEQ ID NO: 19676 - DNA, 627 bp, Glycine max
ttgatatcaattattggcacaagaagctcttaaatttttaaatcaaagaataaatgcattcaaaacaaaggatcatctagtcaagttttaaataacatccaattgttttccaattaataaagctagagagctttccttcatacaacacgtagtgcttgtccaagttacaaatatatgcatacaaaaaagtcaagacaacaaatacttcaaccaatctacttaagttcccatctacccatcttaaaccctaagccctatacttgtacttcagtcttaaagactttggctactgtagtcaacataaaaataaataaacaatcagaatatagcataggtatcagacataggacatcataaaatttctctagcattaacaataatctatggacactactatatagtcatcagttgatgagtcatatgttggaataaatttgtatgcccacgatccaagtcatcatgtaatcaattctaattttaataataaagcattattttattttcattggcatatttcaccatttgattaaatgggccatttgataatgtatttgattaaaattaaagacttgttattataatagagattatgataacgagaaacaagtttgttctaatttaaattaa

SEQ ID NO: 19677 - DNA, 177 bp, Glycine max
tgatgcctcagtcggggatggtaaaggaacaactgatttatgcgctccatgagaggttggctcaattggaagatagagatcttaatcatgaacattggaagaacacacggaacgaaggggtccctaaacttatccgtgaagaaggaattaaactattcatacctccaattaaaagaa

SEQ ID NO: 19678 - DNA, 429 bp, Glycine max
tatagagctttgtagtgggttgtaaatgaaataatgattttaatagtagaattaatatattcttaattgaaagagattaaaatagtacatatttattgaaataacacactcgacaaatagtacatagaatttattaatgaaaaaataattattttattcaaatataaaatttcaaaaaaatgcatttgactattttatcaaaataagaaattttgaaaataaagaaattcaatttctttatccaaatacaaaattctgaaaataatgaaatttaatttgtttatccaaacatagaattttgaaaatgaaagaatttcacatgaagcatttgaaatttttagaaattctaaaattagatttttaattgcctcatccaaacaaactctaaatgtaattttgatccccctatttttcaaatatgtaattttg

SEQ ID NO: 19679 - DNA, 110 bp, Glycine max
  unsure (1)..(110): unsure at all n locations
tgtagttttggcccattagaggataatgagaactctattaggttaacacgttataagaagactatggtcccccatatatcgaaccgtcacatatagtntctcttcttccc

SEQ ID NO: 19680 - DNA, 592 bp, Glycine max
  unsure (1)..(592): unsure at all n locations
ttaaaccatttaagccgttctcacctaatttataatttataaaatgaatttcaaccgatcatttgtgttgtaatctcgtttaatcactgttaaaatgaaatcttggttaaaccaaaaaaggtaaaataataataaaataatcaaaatatctttgaataaaataatcaaaaaaatcaattgtacgtttttctttgaaagtttccttgaatgaattgactaataaccaaagtgaaactaaggctaaaattaactcacaaatcaagctttgtccgcaaaagtcactcaacaccgttttaaggcccaatgccttaaacggtcctctttgcttttatcggttaacatgtgtcgcaacgtgccctttcgcgggcgagcgaaggcaaggcgcacgggtgcgctttcaaaggaggaaagatgcgcngaagtcccaccgacgttaatttgtggaaaacgtcagaaaaaccgaggaaaccagtcaaaatgaaaattctaagttcgggagttgttttacgtttgaggaagtatancacctctccgtttgtctaaaggacaacgcctatttttagattttggaattgtttatctacatttattt

SEQ ID NO: 19681 - DNA, 662 bp, Glycine max
  unsure (1)..(662): unsure at all n locations
ctcagcttatcattttttgaaggattggagaatttatatngtcgnattttttaaanacnnnngatttatattaaaataattaacgatatctttattttgatatcatatattttttccttataatgattttaaaataaaataatagaggagtgtatactatatatatatataacataacaactttagggatgtgttgatgattgaggttcgtcggaaaaccatgaatactaataatgacgtgttgtctctgaatctaagcatcatgaatcattaatccccaccgtcccggccccgagggctgaattggatccacataacacattcatttcccaccgtccgaaaagtgtgagacgattccctgaaataatgataaattaatcttataaataatttgataaattagtatggtagataatttagttattgaatataaaaaaaatatgataaattagtcttgtagataatttagtaataaattggtcactaaatattacaaattaataacaaattgatcataaaaaatataatatattatctaattgatcattaaatattacttttctctgatctcaaatttaagattaaaaaattgacacactagaaagtagtttatcatgttaattggcttaaatttagttaaaaatatttttgtctcaactact

SEQ ID NO: 19682 - DNA, 318 bp, Glycine max
agcttgtgccgatcccacatggttggattattctctcaaaatactgtgaccctggctggtctccctatgatattacctaatgagagtgacttgacttgctagtgtgtggtttgtcttgtcatgtactcctaggcgcctgacgaggtttttcactgacatggtaccacattgcatataggattgagtcttagtgtatttgttacataacgcttttgtattgttctatattgattgatttgatgatattgtgttttgactattgagtatgcgaatgttgtgaaaacgaatgagatgtgtggtgaaataacgtgagttatg

SEQ ID NO: 19683 - DNA, 422 bp, Glycine max
  unsure (1)..(422): unsure at all n locations
tgacaagaaagcagaacctggaatttntttgtgtatatctcaacttcaaaggcctacagaatctacctaccatagagcaacaaagtaatcatcagcagggatgtcaaatttctggagtcagatagttgggactggaaaaatgataagaggtccgagtttcaggaggagaatgaagatgttgatgaagaacccataagaggaaccagatcactttcagacatctgccaaaggtgtaatgttgctgtgatggagcctgacggatatgaagaagctacagctgatcagaaatggataaatgcaatgaaagaggagcttacaatgattgaaaaaaataaaacatgggagctggtggacagacctaaccacaagaaagcgattggtgtcaagtgggtttatagaaccaagctcaatccggatggttc

SEQ ID NO: 19684 - DNA, 308 bp, Glycine max
  unsure (1)..(308): unsure at all n locations
agcttgagttgaggaagtgtatataggtgaatttttttgcttttattcgntgaccacagagtggtacctggaaatatgtcgcaggggtcaggagaccttggggacgtcaggtggggtgccattgcccaaaaccaagcttgaccaatcccgacccaacccgggcatagtcggtcagtgagaacctgtgatgtacctaaacaagcgagcttctggcagtcaacaaataaaaggaacaaagaccacaaagcaaggaggcttgtggtggctggccagctgtgaatcttgtgtgatatatgggttatggcctc

SEQ ID NO: 19685 - DNA, 700 bp, Glycine max
  unsure (1)..(700): unsure at all n locations
tggccaccatgattgccggtggaagcatgtgtcattatcatgcttcgntgactttatgtaataatagaaagtgataacgatatttattatatgatgcgatcaagctcaggatgtgtttggatggatagaatgctccctagagaatatactgaaaatatctacatagtttcgtgtccacttaagtagtttggaacataattttaaaaatcgaattcctataatggaaccgatcaaattactgaatcattaattcatccatatgattcgatctttattaaaaaaataaaaaaattatatcctaatttaaaatattttcttaattcaaaacttgtgtgtcagtattacataatattgtgataaaaaattataattgattataaatatatctattgtaataaacttattatattattattaataaaatatacttattttgataaaantnatatatatatatatatatatatatatatatatatatatatatatatatatatatatatatatatatctatattaggaggaaggcctttgtgccttgtggtatccctgtttgcatgttggatttagttttcgtagtttaaaaggctattaatttatttagagatctttgattagaaaggggctctgaaacaaatttttgaacagttttggcccccactttttaatatttcaaagggaatattttttcccagggacg

SEQ ID NO: 19686 - DNA, 609 bp, Glycine max
  unsure (1)..(609): unsure at all n locations
ttacagcagattttagtaatgactctttaacctagaattttaataacttaatgccattaacctagggaattaaaaaaaacttaatggctgagtgtaactgaaattgtggcaaccaaaagtcacccccaacagccaacaagtcagccaccatttggtctcccaaaaggctgatgcctatgttgccaattgggcccttattacaacttgaactaaacctaactaaagcccttttagttgattaacccaaaacatatttttggtcagccaactttacaaggattgggccattatttagacaaactaaacactctaaaattgaaacaaagtggtgtcatttagtcctcctccatttgggccatgatacaactcacaaccttggacttttctccttgaaactagggcttgtattcaaacagtatggacagcacttgttgaagagcttccttggatttccttgctctagcccttgtcataggtcctccaagtggatccttgcccttgctcttggtcatgtcctcatcaggtgggccaatgtttttcaagccgagtaaatgagttcatgccagtgtcggncgtaacacaacttcgggtgagctcgcacgaaaaaac

SEQ ID NO: 19687 - DNA, 333 bp, Glycine max
  unsure (1)..(333): unsure at all n locations
gacctgcagcatgcaagcttggcaaatcaaatcactcctacattttatctctagcatgtattttatgttggnctcgtcctttgccacgggaagccggaaggtccgtatcaccttcttaattgtacacatggggcactgcgcccccaaatgcgcgagtaagaagagataattttccgggctctcgtgtccgtaaaatgcattcatatcatgcatcgcataagcatctcttcataacatcataatggacatatcctgcatttgtccgttatcatattccagcctcacattttgcatgagtcatggcatcatcatgcatatgcgttcaacaaactt

SEQ ID NO: 19688 - DNA, 180 bp, Glycine max
tatgcgcatatttccttacaaacgtgctctagccatgttattctattattcttgacaaatgcacgcatatacaatcaaggctgcttcgtttacctagattatttacacgtacttccaaggcgtattggatacttacgtcacacacctccttggctaaattcacacacatgcattctcaaa

SEQ ID NO: 19689 - DNA, 288 bp, Glycine max
agcttagcgagagttataggcattttgatctgcagaactcgctattctgtcttatatgagcgctaagccaaaccctttatgtgaaaaaaaaataattaaaaaaatggaaatttcaatttcaaattttggctaaacgcacggtgccctaaagcagcatctttcaaaaaccaaatgtctctctggctcgcttaacgctttggctcgctaaacgtgaggctaaaaaattgcttaagtgaatataacatcagttacactcacatttgcccaaatttcggaaacactttccct

SEQ ID NO: 19690 - DNA, 338 bp, Glycine max
  unsure (1)..(338): unsure at all n locations
tagcacctagaatttgaacgctccatcgactagcctgttaatgcngtgcaaagggtatcactactaaaaaaataagttttaacatcccgttgttaacatcagttatctgaaaaccgatgtcgttaagcacttacaacatcggttttcaaataaccgatgttaacaacttgatttagtgcgattttaacaacgattttaaaataactaatgttgtgagattnncttnnttgggtgaataagtgataatatattctctagatacaggataaanaataattcattattgacaaccgtatcatctgatggaatccaattttggccacccaaaatattttatt

SEQ ID NO: 19691 - DNA, 293 bp, Glycine max
  unsure (1)..(293): unsure at all n locations
agctttataagcgcgggtctggnggacaaaggtcaatttttcgctttttacgaaagagatgttccgagtacattggatttggtacgaccatgctcttcttgattttaactgggaaattggcgaagggaagaacgccccgacatttacgccaccagcataatgtaacctttaccggtttaaaaactttatagttaggcctagctttaaaattcttttgttaagcttgtgtcttttgtttaaaattataatacaaggatcttttttatttgttcctacgtctctacccattctca

SEQ ID NO: 19692 - DNA, 580 bp, Glycine max
  unsure (1)..(580): unsure at all n locations
tcttcttccacggcttattctctagtggatggcgccttctctcatcttttctcctttatcnnctgcttcaactccatggctgaaaatcaccattgaaagttcttattgaagctcaaagatccaacctccatagaagcttcttaagcaagcttccatcaagtggtaatcagagcacaagagcttcaagtaggtgctccttaaacctccattaatttacagctttaccttctcctccattgttgtttcttcatttttctccatgtatatcctcacatgtcttgtgctgaatgttgttaacatgattctttagagtttccaccaattaaacttgctatggaagctagattggattttctatggttcaaattccttgttcttattcttgaaccattgtgttgagtttaggttcctttgagttatgttttgccatttttttggctaaaacctgaaccataaaatttcttacaaaaaacataaaagtagaaaaaaaacctcaaacatctagaccagtgagtttaggggtcccttgagttatgtttttattgaatttttagacatctgggccaanaactagaaaaaa

SEQ ID NO: 19693 - DNA, 273 bp, Glycine max
ttacccggggacactactcttaaagcaaaaatgaggtataaccttctcccataaatacagacattaatgtgaatgtaaagcgagcttatgcgcatatttccttacaaacgttctcttggacaagaaattttattaaccgaaaaaaatgcccccatataccaacaagggaggcttcttacctaaattatttacacgcacttccaaggtggatttgttacttacatctcacacatttgcttgggttaatatacatacatgccgactctaagcatt

SEQ ID NO: 19694 - DNA, 452 bp, Glycine max
tctatataagctgaaccattttatcaataaagacaagttgagttttattcagaaaattagagtttatctcttttatcttagcgagagtgattctcctaaattcttgagtgattcaagaacaccttggctgtatcaaaagactttcacaacctttgtgtgttgccctcgctggaaagagtgattctttccttcctttcatcatcacccttgttctttcaaaccacaattccagaaaatccacctctgcccagaattatctcgtggccataactccaattttaagcactcaaattaagtgattcttgagcctaaattgaatttcaaaacgagacctttcacctcgttttggaatcacctcatttggagccctgtagcttcagttattgccatttctatatttctgtccagccaccacttaacctacgttttaccatcccattcatccattttat

SEQ ID NO: 19695 - DNA, 280 bp, Glycine max
agcttttcttctgatctttagagggaaagagaaggtttggatcttgaatttcattgtctccatgcaaagggaatttttctccctacatatattatgtcacaaatcccaatggtgggaatgtcaaaacatgagtccctaagggggagccaaatttcacgatgatccaaaggttaacgagtctgaggtcataattttactgggacaagtttgggtgtaagccggaaaaaaatggattttaagaagaccaagaagggaaaacaaatttgaaaggaaaaaaaaa

SEQ ID NO: 19696 - DNA, 428 bp, Glycine max
  unsure (1)..(428): unsure at all n locations
tttgtagtcctctttgatcaaaggttcatttataacatttctcaggccataatagggatgatagaaatagatctaaaccaaacagtctccctaatttatatttcacctaattacactatgaatcttagtgatttcatacaaaacataaacctagaagtccaaacaataggttttggaagaaactttgagggacataatttatacttggatattaacttcattggtagaataagtgatcaaatatcccctagatacaggataaacactaatccattagtgacaaccttatcatctgatggaatccaatttttgccacccaaaatatttgattcctccagaaaccaaaacaatcaatggcaaacacatattgaggctggatcctctaggagtgcaataaccactcccgggatcactatnnatacaaacaa

SEQ ID NO: 19697 - DNA, 455 bp, Glycine max
  unsure (1)..(455): unsure at all n locations
tcttgacggcctatccaccaacaggggtttttgctattttacttttactnccaaanccttaatggctgactctgtgttcttatggtttgacatagataccttcataaattgagccagagtttcttccagcttcgttgtttgatcatagagactaggcccttgttgttgtggcctattaaatggaccaccctggtctttgttgaattggtttccagggtgattcctccactctccctgctgtgaattatatggttggccatgttgaaacccggaatatccacctgcattgaaattttgccttggctagttccccatataattgacttcatgagctggttcttcattggggatatagcagccagaattatgagctccaccacagatggcacaccctgcaacctgcaaaatagtagatggtaaagattgcgcaaaatgtatttgagttggcaacttac

SEQ ID NO: 19698 - DNA, 80 bp, Glycine max
caacagcaaaaattattacagccaaacaaaacagggcaaaggcataaaactctgccccaaacaccaaccaaaatcacagc

SEQ ID NO: 19699 - DNA, 553 bp, Glycine max
tcacaagcaagcttccatcaagtgggatatgatcatttttttgtctttattgcaaaattgctttccgtaaccattaaaggttgtccttcttcttgggggtagatttcttcagtagattcttcgtcttttcctccttcaattacgtgatcccccctctctctttatctatctctttcttttcctccattgaagcttcctgtctaagcttcttatccaaggcactctcttggtggtgatgctccttcttctatggcttattccctagtggatggcgcctcctctcacctcttctcctttatcttccgttgcatctccatggtggacaatcaccattgaaggacctcattgaagctaaaagattcagcctccatagaagcttcacaagcaagcttccatcacttttgacgactgttaagtgagaatccttagcattggcctgataccttgcacataagtaagcacttagcatgacatatggtctatttttagttaagtagaagagtgatccaatcatacctcttatcttaactcatccactgatttacctttctca

SEQ ID NO: 19700 - DNA, 98 bp, Glycine max
agcttaacatttattttgaactacaatgattacaagattttcaatttagcatataatctcaagaaacaaattaattgtacatttgatgttaacaagtc

SEQ ID NO: 19701 - DNA, 663 bp, Glycine max
  unsure (1)..(663): unsure at all n locations
tttaagtgaaaggatgtgactcttcaccttttaatttttattttaacgnncaagggcactggtaatcgattatcaaaacattgtaatctgttacagccttttgaaaataattggaacgttgtaaattcagtttgaaaacattttcaaactcattttgctactggtaatcgattacaacaatatggtaatcgattaccagagagaaaaaactctttggtaaaaggttttgtcaaaaactcatgtgatattcaaagttttgaaaaactttataatacttatcttgattgagtcttctcttcattcttgaatcttgagtcttgaatcttgatcttgattcttgagatctttgaaccttgaatcttgattcttgtctctagactttcttcttgagtcttgaattcttcttgattcttatcttgaactcttgaattgttcttggttgatctttgagctttttgtcatcacctttgtcgtcatattttgttatcatcattgttatcatcaaaataccctttgaatcacctttgattcaccatgaagctttgcttctacaccatacagtgacaaacacacaaattaaatccgaaggacttttcttggcttgtaatgaggctgggctgcanacatttcatgggttttctaggatgcaaaagcttaagttct

SEQ ID NO: 19702 - DNA, 318 bp, Glycine max
  unsure (1)..(318): unsure at all n locations
agcttgagatgaggaagtgttgaagggtgaaactttctgcttttattgntgaccacagagtggtacctggagatatgtcgcgggggtcatgagaccttggggacgtcaggtggggtgctattggccaaaaccaagcttgaccaatcccgacccaacccgggcatagtcggtcagtgagaacctgtgatgtacctaagcaagcgagctcctggcagtcaacagataaaaggaacaaagaccacaaagcaaggaggcttgtggtggctggccagctgtgaaacttgattgatatgtgagatatggtctctggtaatcgat

SEQ ID NO: 19703 - DNA, 477 bp, Glycine max
  unsure (1)..(477): unsure at all n locations
gcttgaatgaggaaggttgaagggaaatccctgcttttattgnngaccacagagtggtacctggagatatgtcgcgggggtcaagagaccttggggacgtcaagtggggtgctattgcccaaaaccaagcttgaccaatcccgacccaacccgggcatagtcggtcagtgagaacctgtgatgtacctaagcaggcgagctcctggcagtcaacagataaaaggaaaacaagaccacaaagcaaggaggcttgtggtggctggccagctgtgaattttgtgtaatatgtggatggtggcctctggtaatcgattacaaggcttaaaattgaggacaggaggctaagatggtctctggtaatcgattaccaaggggtgtaatcgattaccaagctcgaaaacgaagtcaggaaacttagggagcctctggtaatcgattaccaccctgtgtaatccattacacagaggaatgggtcac

SEQ ID NO: 19704 - DNA, 290 bp, Glycine max
agcttcaggtttcaatttcgtgcgtctcgatatacttctggacacaatcggacacccgagttaaaagttattgtcgtttgaatttgatcagtgtttttggtttcaatttcgagcgtctcgatattttacgcggctctatccgacatccgagttaaaagttattgtcggtagatttttctaagggctttccttttcaattccgagcgtcttgatatattaacggacacaatcggacacccgagttaaaacttattgtcgtttgaattttcttagagcttgtgttttcaatt

SEQ ID NO: 19705 - DNA, 380 bp, Glycine max
actcagcttgagaaaactacgacaattttttaactcggattctaatcgagccctgtaatatatcgagacgctcgtaattgaaaacggaagctctaagaaaagtcaaacgacaataacttttaactcggatgtctgatcgagccctataatatatcaagacgctctaaattgaaaacggaagctctaagaaaagtcaaacgacaataacttttaactcggatgtcctattgagccctgtaatatatcgagacgctcgaaattgaaaacggaagctctaagaaaagtcaaacgacaataacttttaactcggatgtccgatcgagccctgtaatatatcgagacgctcgtaattgaaaccgaagctctagaaaagtcaaacg

SEQ ID NO: 19706 - DNA, 621 bp, Glycine max
  unsure (1)..(621): unsure at all n locations
ttgcctttagggcttggacctcattactttctttcgatgctttaacctcatcgtctctcacagtctttagatttgggagccaatccaatccttgtgttcggactctcagccgcttatgatagccgccgatgatcccattactgcttcccctaagctttctatcctttcttcacgccgaatcccatgccttgcgaactccttggagtaccctcgcgttgtggtcactgaaaccccgtgcgatgaaaggcgtgatgctttcgtctgatggcacttctctcatggggtagccaagctgtcttatggcgaggacgggattataattaatacaaccccttgttccatcaagggaacatttggacatccttcgcatgaagatagaatcctgattcttccttccttctagcgagggaacaaattaacagacgcccctccatgctagccaagagttggtcccaattcgcctttccttttttgatgcacgagcggtgaccttgtagcggatagacgggcctaccttcttggagaaaaaggtgtgaaacccgccacacatagagagccagtgcacaacaaacaattcttgtgccactcttttcacatncccggtcgaacgtgtcatacatg

SEQ ID NO: 19707 - DNA, 286 bp, Glycine max
agcttaacaaacttagaaatcaagtggtcataaattccgaaatatttggttagtaaatgcacattttttatctatatacaattgtttgttgcttgcttgaatcttgatttcaagtattgtattgtcatcatcaaaaagggggagattgtaaaagcaattgcctttggtgttttgatgatgatcatgatgatatgatgaaattgatgcaaatgggcttttcaagattaaattcaagacaatacttccagattacaagtcacaacatcaagatgatcactagtaaatt

SEQ ID NO: 19708 - DNA, 373 bp, Glycine max
tatgcgcatatttccttacgaacgttcacttgcacattttatcctatttacttataaaaatgcacccatatacaatcaaggtagcttcattacctaaattatttacatgtacttccaaggtgtatttgttatttacatcacacacgcctccttggctgaatttacatacatgcatactcaaagcattttggggtaccaaaaactgcacatgcgctcatcttggtatttctaatacccctacatatacaaacttcacgatgaatcttgactacctacacaataaggtgctacatttcatgcctttttttttcaaatttttgctacctaaagccacatgcaaaatcaaacatatttttcctttgctgactaaaat

SEQ ID NO: 19709 - DNA, 322 bp, Glycine max
  unsure (1)..(322): unsure at all n locations
agcttgccgccacggagttnttcgactatgctcttgtgtggtggttctagctacaaaaggagagagcaagaaatgaagagccaatggttgatacatggacggagatgaaaaagatcatgaggaagcggtatgtgccggctagttactcaagggacttgaaattcaagctccaaaaactaacccaaggcaacaagggggttgaggagtatttcaaggaaatggatgtgctcatgattcaagaaaagattgaagaagatgaggaggtaactatggctcgatttcttaatggtttgactaatgatatccgtgatattgttgagct

SEQ ID NO: 19710 - DNA, 384 bp, Glycine max
  unsure (1)..(384): unsure at all n locations
tgccacccagctcgcccaggcaagcagggntgcttcctttataagtctcagccttctggaggaatcttctggagggcccaagtgggcctggttgctatttgcacccccatttttactaagtacaccccctgccttttttttgtgattcttttttcgtaaaggtacggaaacttacgaatttcgtaacgatacttgttttctttccgtaatgttacggaaccttgcggattacataatcatcccctttttttacttacggaatgttacggaacctcactaattgtgcaacgatgcttccatttgatttccggtgtgtcacggaaccttacggattgtgcatcaatatcttcttttgttttccggcatgtcccagaatttcacaaa

SEQ ID NO: 19711 - DNA, 323 bp, Glycine max
  unsure (1)..(323): unsure at all n locations
agcttgtaacagtttgatttttgagcgtatctcctattttaacctttattcaaagntataaggagggggaaaggtccaaaaagagttagattttttctttggaaaggggcaaaaaattctcttgttaccaatgctatgaaaataaaggggatgcttgataatgcaagttgtcctttatgtttgggtagtcctaaaaatattgatcatgtttttcatttatgtgagcttgggaaaaatgtatggtctcatggtttccccttaacaatcatttggatgctcttaatttggatttcagatcatggcttttgagaaattcaaatccc

SEQ ID NO: 19712 - DNA, 487 bp, Glycine max
  unsure (1)..(487): unsure at all n locations
tgtggaaacaagggcgaggcattgtgttatagagatttgggactttgataattgaaaaagatgaagaaaacgaaggttcagagcattttttttaggaccctttgattgaaagatgaaaactttggaagaatttttgcttcacactcagatctactccactctcacttccttcaccttcttctccatcctttccctgctttaaagtcaaacaaggatttttaaaccttaaaaaaaccccaaccctgtgatgacctaattagaacaaaaacgagtgcgccactcgcccgagtcaactcaattcctatttcaccaattcataaaacatgtcttataataaatcaaatgactaagatccaaactttacattttctggttttatataggtttaaatgcaatttttgttgtcctccgtaaaaaaaaatacattgttgctgcaatttagattntttttcattttcgtttcatgcataaaaaatattattttaat

SEQ ID NO: 19713 - DNA, 547 bp, Glycine max
  unsure (1)..(547): unsure at all n locations
tgaagctcaaggaaaagcttgaagaagttntggctattttatgcctttctctcttaagnggcatttgtattggttgttatcttggttgtttcttcttagtacatttgatatttgtattgcatcatgcatcatcatggtttgtgtgaagaaaagtttctaagttagaaaaatttcttcagaggcaaaaacactattttaatcgattacaaccttattgtaatcaattacgacaagctgtctgaagcttatagagttgagtctcgtatcaaattaatcgattacagctatctcacaattgattacattattgttcgagacaatgactgatttattcaagagtctctgctttaatcgattacttctttctcgtttaagtgtttagaggtgaacaagaacactttaatgaaggatcatgtttaaggaaggattgattaaatgttgattacatttgattcatatatgtgtttgtgatacaatccatacaaaaagttttttaactcttttttttaaaaaaaagtacatttttttaaaacaattcacccccctc

SEQ ID NO: 19714 - DNA, 323 bp, Glycine max
agctttactagtgaggtcgtgcttatttttaaaccttttgctaaatctcgataggtgatcctttgtgataaaggaagctgacaaaattcatcatcatttaattgaacactcttcactccacaattttttttcctatgagacacatcacctatcttgattctttgcctccaaatgcattcaatcacactaatggaaactgaatatgttgaagcaactaattctttggtattttctttcaatttcctattagaattgtgctaatataggaaattagctatggccatacggtcttcattgcttaaaaacttatgttgaccatttat

SEQ ID NO: 19715 - DNA, 560 bp, Glycine max
tgtcaacaaatcagaagatataaacgaagaagggtcgtacaaaggaagcaaagacgagggctcaacgagaccatgttggttctgtgtcgccacaaccctcagcttatctcttctgctttgttgtggcacatggtaagcctcaaaaccctcagccatagaagaaaaaaaagctgaaaatgaatctctcttcaacacaagttagatagagagagaagagagagagagaatgaactgacgatgaaacgagatgaaggaactatagggtgtgtgtaattatggtgatgttattgtgaagaatgatagagagagaaagtggtttggtttttttttctatctatctatgttttggttctatgttgatcagtgttaagatagatacgtgagaaagtgggagattttaatgagaaaattgaggtatgggttttgtgtgtgtgtgtgtggtttttttgacagcacgcacactcaaattcccttggttggttctttctttgtttctctctcgctacagtgaacaaacacagagatcttgctttctttcttttcacttcaaaacaaggaac

SEQ ID NO: 19716 - DNA, 102 bp, Glycine max
aactctttactcagatgtcggatagacttccggaatacatcgaaaaccttgaaaatgaatgctgaagctttgagcaagttcaaacgacattaactttttact

SEQ ID NO: 19717 - DNA, 357 bp, Glycine max
tcggtattctatttcgagcgttccgatatttttgggtttcaataagacatccgagtaaaaagttattgtcgtttgaatttgctcagagctttggtattccatttcgagcttctcgatatattacgagactcaatcggacatccgagtaaaaatttattgtcgtttgaatttgcttaaagcttcaacattcaattacgagcgtgcggatatattacggtactcaatcagacatccgagtaaaaagttattggcgtttgaattggctcagagcttcgggagtccatttcgagcttctcgatatattacgggactcaatcagacatccgagtaaaaaggtattgtcgtttgaatttgctc

SEQ ID NO: 19718 - DNA, 318 bp, Glycine max
  unsure (1)..(318): unsure at all n locations
catcaagcttataaaacaaatgcctcattatttctttattttgtgnaataggacgcatcaacaagaatcaagccaaggctattgtgcaagcaatcaatggggcaaaacacaccaaatgattatnaagatggatggctcaaattctcacaaaggtaaaatcatcactttcaaattgagctttcaaaactatcatgacatgtagagaagaatcaaggatttcaagtcacaaaatgtcaagaacttttattttcaaaacaattacccatttcttgaacatatcctattattcaaagaaaaacatgcaaagtcgtacgtgca

SEQ ID NO: 19719 - DNA, 339 bp, Glycine max
  unsure (1)..(339): unsure at all n locations
tatatgtagtccttaaggtgaaggactctgctctttctcttgggcctaactgatgcatcttcacggctcctatcatataaggatacagaaaagcttgcatagtggccttcacaatgtaagtgctgcataaataatgaaaaaaaaactgaaattgtttatttacaatacttctattgcccctatagtggacaatgatatcaacaaaagggacaacgtagatagttcatcttgaagacttgaatacagtcttnttgttttaaattctaagagagtgatctattttaatgtacatgtacctaaacaatgtaaaaagcctctgtaattttaaagcaaggcaaa

SEQ ID NO: 19720 - DNA, 239 bp, Glycine max
accatcttcctttccatcattgggggtgccacttgggctggcaaatcccttcacctttgggcgtattctttaaaaaaacaatgcccccttttttgcacatgttttgtagttgcatcctatccgaagccattatactgacactgcctaacgaaggcaaccattatgtccttccaagagtggactcgagaaggttccaagtcagtgtaccaggtaacagctaccccagtaagactttcttg

SEQ ID NO: 19721 - DNA, 677 bp, Glycine max
  unsure (1)..(677): unsure at all n locations
tccatcaagtggtatcagagcacaagagtttttagtatgtgctccttaaacctccattaatttttttgctttaccttctcttccattgntgnttcttcatttttttctccatgtatctcctcacatgtcttgttctaaatgttgttaacatgattctttagagtttgcaccgattaaacttgctatagaagttagatttgattttctatggttcaaatttcttgttcttgttcttgaaccatgaattgtgttgagtttaggttcctttgagatttgtcttgttattttttgtggctgaaacctaaaccataaaattcttacaaaaatattaaagtagaagaaaacctcaaaaatctagagtgacttgttcacctattgtagttttgtcatagaagtcatgtctagtcatgaaacttgtcacataagatttcttatgttgtgctgaattntattttcttgtttctttgtctaaatcatnttttcatgagtgtatgaaattattttggcctattatttgatttgattcaaatatttcatgttaattagtccttaacatgttcattcaaaattctgagagtctttgatgtgaaccttttcttgaacttttangtttccttatgattgtgtctattgtgaaattgagttttggtgatngaattgctggctgaaatgttgat

SEQ ID NO: 19722 - DNA, 317 bp, Glycine max
agctttgtcctcagatctctcttgttggactaggctttatcttatgcagcccttgtaggtttagactaatttaaactaagcttcgtccgcaaatccctcatttaagactaggctcagcttaaacagcttacgtatgtttagactaatttaacctaagcttcgttcgcagatccctcatttaagactagacttagattaaacaacattatcatcacagtatattaagaaaactaaaacttaatccgtagatccctcatttaagactaagtttcaatcctgcttctatcaagttctaaggcaacaatacatttcccaat

SEQ ID NO: 19723 - DNA, 473 bp, Glycine max
  unsure (1)..(473): unsure at all n locations
tgatccttgaatcttgattcttgattcttgttatcattttttcttttgaatcntgaagggttcttgattctatcttgaacatcttgaactcattctttcttgattctatcttgaacatcttgaactcattctttgattaacctttgagctttttgtcatcacctttgttatcatcaaaacatctttgaatcaatattgattcatcatgaagctttgcttctacacatgaccctccagttagctgatcgctccatcgcaagaccatatggagtgattgaagatgttttggtgaaggtgaaacaccttatattcccagctgattttgttgtgatagacatagaagaggacactgatattcctctcattcttggtcgcccattcatgtctactgcaagctgtgtagtaaatatgggaaagaaagatgtgcaaatgggcatagaagatcaggaaatcagctttgatttatttcatga

SEQ ID NO: 19724 - DNA, 317 bp, Glycine max
agcttagagtagaactcatcatcccaattatgttaacaccatgagaactaaaaaccagcctaagtatgattaaagaaacagaaaaaacaatcacagaggacataaagataaaacagtcaagaaaaacataaattggataaatcaaaatttattattatgatataatatacatacaacaatttataaataatttttgtgtgtatttttctctatatcattatgacatgtaataaataatgtgtagaagagaagtagacacaaaataactattgtatgaatattattgagcaaataatatttctttcaaaattatatat

SEQ ID NO: 19725 - DNA, 427 bp, Glycine max
ttaaattttaaattcaaaatttgcaaatgtgtttcataaatgaatttgaccactagtaatagattacgtcctctggtaatcgattaccagagagaaaataccatatatttgaaatcacaaaatgcttttgtaagatatcctttggccaaacttgtgcatcatcaattgaggaatgcattctaagttctagggactaagttcatcatttttcttgaatttctgagttcttgacttggattaaacttgagaagcgcttatctttggcatcatcaaaacttcatagcatatatgcttctacacttaggatgctccatgtatgggccaatgtggtgaggtccttccgtagaagattccacggagccccattggttatagaatgaattgttcgcccgatatggagaagctggcgatctatatttggatttgt

SEQ ID NO: 19726 - DNA, 312 bp, Glycine max
  unsure (1)..(312): unsure at all n locations
agcttggaattcatgctcttatataattgattaaatttagaagaaagngatgaccacacctggctagtaaaggttttacattgtccctccaccttgcacctcagagaatctgtgttgatttcgtccaacaaatcctcagcgtctagaacagcatctttcaactcatcaagccatgccttcactgcttcattagtgatctgtttctcctcagcatcattgagcacagcattgagttccaacagctttatcttcagctcgtccaagagagaaacattcagctttctattggcaaagaaatctcgaaactccgca

SEQ ID NO: 19727 - DNA, 405 bp, Glycine max
  unsure (1)..(405): unsure at all n locations
tgtcctatgaaacatttatgctttacaatttgttaactttgatattatcaaattgtgaatttcttattcagttgccacgaccgataggaaatctggttaatttacgccacctggacatcagttacactaattttccagagatggcaacacaaatctgtagactacaatatcttcgtactttgacagtttttattgttggcaaacaagatggattaagtatcagagatttaagaaaatttccttatttgttgggcaagctttccattctgaacctgcaaaatgttgtcaatcctgtggatgcatttcgggccaacttanagaacaaagagcaaattgaggagcttatgctggagtggggaagcaatccacaagatccacagatcgaaaaaaatgtacttaacaact

SEQ ID NO: 19728 - DNA, 312 bp, Glycine max
agcttccgcttgaggggaaggctacgatgtgtaatatactcacactggagggggagatgtgttgagtacaagtgtgaggtaaagtcccacatcgggtaaaagtggaaaggttgagcaccatataagtgaggagaagacccataaacatgagccttaaggttttgggttagagtgtggtgtcaggcctccttatgtggtggctcgtggtccagaggtgtacccctcgaatctccccaacatcagagccatatgaatcatgtccaaagtattgggcgatggtgacacctattcttgtagcacaaacacaacaag

SEQ ID NO: 19729 - DNA, 493 bp, Glycine max
  unsure (1)..(493): unsure at all n locations
taggagacagcgcaaggccctggtattgcatctttgatgttactgggactgcatctagctgaagggtaacattagttggcgagtcattttttctgtgatcgactcctccaactagtccttgatttgttgagtcagctgctctagctcttcgcgagccctanaagaagacgtgcaggaggtccttggaaccaatccaaagtattgcttgatcgttacaccagctccggcaacacgcacacgaccggtgtgttctggtagcccaatggcaatagccagtacatcctgacatatatgggcgataaaggaaccctgtgacgcctgctcctccaataaatcctgtaaagaaacatttattggtttactcaatcacacaataaacataaataattacaattattaatttgaaagtgacttacaatcttgtcagcaatttgctttgctgcctcagacatcatctgaccaattttctttatgtgggtcatcttccatttga

SEQ ID NO: 19730 - DNA, 307 bp, Glycine max
agcttgaaaaggctagcataaacatgtcacggtttggcttggcttattgataaaacggatgccccacattatttccatgacacaaatgcaaaaatgatgatttggaaattttatgcagaactggtcatgcatgcacctatgtggacactcaagagtcaaaatcttatggtcatgtgatgctacggctcaagattcatttcctgtattgtaaatcaacccaacgattcaaaatatgttcttttatcaatgggagcaatcattcgaggccatttagggcgtccggggaagacttcacaacattcaccct

SEQ ID NO: 19731 - DNA, 776 bp, Glycine max
  unsure (1)..(776): unsure at all n locations
ctagacttgagtgcttgcattctaaacctaagcttnctcancaataaagcgcctggacttcaccgttctcaatttttatttttcnaaaaacaaagagagggcgtattagttacaaactggcgatttacaaaacaagtgtaatgacctactaacgaactcaacgtaactttcttcaaagaagtgccaaggcaagaataaagggctcccattcatttgggcctttttaagggggatttcggtgccgttccacattttgaaaggaacatcgacaaaaggaatgtagctcttttatttcgcgatcagcgcatgccttatgcccaccacgaaaattttcattccatttcacttccggccctccccatcaaaaaaagagtggagggagaacccttttacatacccaggtattatgtccacctacaccaagagggggtggcaagaaactaccctcttaacttataatggataagttcaaacaattctcgcatttttgtttctgaaaatttctatccctcttggggacaagaaactcctcccctttgaatggcctataattttaaaggggttcggttattaataaacctcttccaagggcttgctcccatggcaaaatgcatgggcaaaagagaatatggaattgaaaaacctctcattttcgagaaatgacccacccctcttcgtttccacctccttatagggactaatggtctaaaccctcgtgaaacaacccctaaaaattaattgttgttggcctttgtattgggtaagggggggaagac

SEQ ID NO: 19732 - DNA, 217 bp, Glycine max
caacaggggaccctatatgaatgtgaaacaaagtctaaaatttaagccaacatgttttacataaacacacaattggaagagacgctggttaagcacctaatcataccaccataaactacacccctgtggggatctttccagcatctgaaaaggacttgaaagagttcttctcgatgaggctgaacacaaaccagtcctgcatactttggtacttcaa

SEQ ID NO: 19733 - DNA, 479 bp, Glycine max
  unsure (1)..(479): unsure at all n locations
aactcaagcttttgccttctcctccaatcacttccttggatcccattcccccatcctattttgagncactcggtctaactcttgcaccgagatcttgaccacttttgccactctttccatggaggggtataattcgaaaaatagatgcggcttccttcctcctagtaggcatcccaagattgcttcaaactcctctatggttggtactaactgaaagtccccaaatatgaagcatctgagtgactggtcgtagtattgagcgagggatgcgatggcttcaacaaatacttctatcatggctaaatcccaaattttcccgtatgctttgtgaaaagcttgacgttgaacttgatccattcatttccctagcttttgcaagttggctagttctaggcccttgactttacatgattgaagctctttttaaaagagggctctcggttcgaccccatgtttgctagaatgaaaaatgtgatgat

SEQ ID NO: 19734 - DNA, 320 bp, Glycine max
agcttgctaccattaaaagagtcgttggagaaaataattttggttctcatttttcataagaccacacaacagccatccaccaagtttgccacctacctcttcttataccttccacttgcacaaaagagtgctgaaaaaaatgctgagatggattggaagggaacacactagtgatattcaaccatgatatagtctcccaccaaataggccgaatctttgtgcaggggaaaaataggtgggaaacctcctccttcattccttcacataaaggacatgatgcatccaagatctgcacttgtcttctttgcagattacttttt

SEQ ID NO: 19735 - DNA, 443 bp, Glycine max
  unsure (1)..(443): unsure at all n locations
tattgtctgaatatatgtttgacttaaatgaaaagagttatgacttttttttttcatgngngaatnncttgatgtggatgttgaattaagtggagttttgttgaacaaaagtgaaattatgagattttagattttaccaaaacctagttccgtaaaatccagatactggattcgttaaccgttggatcgtcttccaattttttctgaagcttcataagacatgtttctagagtctgaccgttgcgattttggaaaaaaaacaacatatgatatcccgctaagcgcaattccaatagagaggaagttgcgctcagcgcccagaggtgcgctaagcccaattccaacagagaggaagttgtgctgagcgcccagaggtccactaagcccaatttaaacatagaggaagtttcattgagtgcctagaggtgcgctaagcccaattt

SEQ ID NO: 19736 - DNA, 195 bp, Glycine max
agcttttggaaaatgatttctatacaaaagttagtcgtataaagcgactaacatactcctaggcgcctgttgggatttcccctggcagtactgtttggtccactttttctttatacaaatatgttcaagggaaatccggttggccggaaagccaaccggatcgtcaagtatttaaaattaaaatggatgaatccg

SEQ ID NO: 19737 - DNA, 560 bp, Glycine max
  unsure (1)..(560): unsure at all n locations
tgccgcccagcttgcccaggcgagctcagctcgcccattcgagcattgttgcttcctccaaaagcaacagccttctggaggaatcttctggagggcccaagtgggcctggttgctatttgccccccctttttactaaatgcaccccccttctatttttttgtaattctttttccgtaacattacgaaactttacgaattttgtaacgatacttattttccttccgcaaggttacgaatccttacggattatgtatttactcttttttagctttcaaagaagttacggaaactcacggattgtgcaaaaacacctcttttcaatttccgccacattacggaatttcacggatcgcgcaagcctgcgtccttttgatttctgagacgtctcgggacttcatttattgcatgtcatcaagtaataatccccggatgaaaatagggtatgacagttgtccctctttacttacctctcatcggagataagaggaaagcaaagataggacactgatttcgtccgccctgcctttncgggatgacaactctcgtctctactcctttt

SEQ ID NO: 19738 - DNA, 320 bp, Glycine max
  unsure (1)..(320): unsure at all n locations
agcttgcctgtccgatgcagcagtaatgatggccctttttatgttggggaacggntacgaacccggaatgggtttaggcaaagacaacggcggcataactagcctgataaatgccaaaggaaatcgtgggaagtatgggttaggctataagcccactcaagcagatataaagagaagcatcgcgggaaggaagagtggtagtcaaagctcgcggttgagacaagaaggtgaaggaagcccaccctgccacataagtaggagctttataagcgcgggtctgggggatgaaggtcaagtggtcgcgatatacgaagatgatg

SEQ ID NO: 19739 - DNA, 555 bp, Glycine max
tgagggagggtgttgagattataactagttagttgtattcttgtttattagtagcttgtatctgagaatataaatactttgtaacacacactttacaaatcaatcataatatttttttcttctttcatcttcattctctatttttctctcctctgtaactgaatcctaaccaactcaacaccattctttctcaaaatcgttattgcatcctttagggtcctttgataaatgtgtttggatctatgttctttggtaggtcccattctttgcattgaaaggtgtcctagtgaccttaatggggggtctctagtgacttatatggtttatatgatcattcttttactattagttgatctcaactaggcttctttttatcgattgactagcgtcaattagtcaagctaacccaaaaagccttgccagtattggggttatctgattaatagacgtttatttcgcattaaatttctttgggttcacttgaataattgatgaaggatgaagcaccaagttatttcctctgatgccttactaccaatcagatctgtgaactgg

SEQ ID NO: 19740 - DNA, 567 bp, Glycine max
  unsure (1)..(567): unsure at all n locations
tatgcaattgtgttatatccagagcaaaacatatttatgtctattccagtcaaacagaaatacttcttataaaagacatcggtggtgttaaaaaaaaaatataaagtgtaatacaaaactttccaacagataattcattcaatgtggtccaaaagttgtttagaagttaattttaaattgaaacattaaaattgaagtccaatgcaatttcaattattgagataaacatgataaatggtactttagctcttttattcagtgatccttgcatacataatgcacaccaggaaatttagcagcaaattagatttcagtcatttgcatcagtaatgttgtcttggatcaacgctgctacataccaatgtaatttgtaagcataagctaaatggtgttgctaatatactactctcttatcttataatgataagtttgaacattctccgcattntgtttcttgaaattgctatccagtctgtggacaagaaacttgccccatttgtatggcctaaattttgaaggggtttgctcatttattagctcctccaaaggcttgactacagtgtcatg

SEQ ID NO: 19741 - DNA, 316 bp, Glycine max
agcttcaagaaaaagatggcctcagcatactccttattttcagaagggaattctatcaatagacctccaatctttaatggagaaggttaccattactggaaaacccgaatgcaaatttttattgaggcaatagatctaaatatttgggaagccataaaaatagggccttatatacccaccacagtggaaagagtttcaatagatggtagttcatcaagtgaaagaataactatagaaaaacctagagatagatggtctgaagaggatagaaaacgagtacaatacaacttaaaagccaaaaatataataacatctg

SEQ ID NO: 19742 - DNA, 475 bp, Glycine max
  unsure (1)..(475): unsure at all n locations
tgtagatatgggacccacacagtgactatttggtttcgggcgatggtgcacaacaagttttccacatccacaatgcgcgcataaacccaccatcccctgttgcccacctccatctgagctcacgtactcccacgtagcccatatccttttttctctcaacaccgggtccccatcaatcctcccaagtttcctccaacatcaaagtaatacaacattcacacagcacaagctatcgcagccaagcaaaacagggcaaaggcagaaaactctgcccaataacaccaaccaaaatcacagcttttctcacttaaagaccccagtaacaatttcttcgatccaattcgttaaccgttggatcgactccaaaantttattggaagtctatagtgtatacgcctacattgtgaccgttgggatctactangaaacacccagaactcattctgcactactctttccacaggcaaccacacac

SEQ ID NO: 19743 - DNA, 316 bp, Glycine max
agcttgaagacaaaactatacgaggtatcttccttgtgtatagcaatatctctaagggctaccgtgtctacaacttgcaaactaagaaactcgtcatcagtcaagatgttaaagttgatgagtacgcttcttggaattgggatgaagaaaaagtggagaagaacgttcttatacccgctcaactacctcaagaagaagctgaggaagaagacccaggtgaaccaccttcacctccaccacaacaacaagatcaagaactatcatcaccagagtctactccaagatgagtaagatctttggtggacatatatgaaac

SEQ ID NO: 19744 - DNA, 583 bp, Glycine max
  unsure (1)..(583): unsure at all n locations
tgcaaattacgaatcacatgtnnagagatttctaatcttgaagtttactagggacaattttggaaaaaataaaaaaaatgttgggtgtattatcaatttgctagttgcgcaaagcaattggctcgtgatcaatagcataatcacatcccccacaaagtaataaaaactagaaatgggaaaaaattccgtttgtctatgatccattaagtctatctatgaaaaatttaatctaattttttctgttaaaaaaaaaaagacatgaattagattggatgaacattattaaatgaaaggataacaatccatcttgtcttattttcaaattcaatagactacttaatttgacattataaattagtattttggttggttccaaagagattttcttttatattcatagaaattaaacacagtaccacctgatcccagcatagagctagatcttcttggtgttccaataatanggttaatcaaacttgacttgaacggatccaaaaaaaggttgtgattggatgaaagtaatttaaataattataaaaagtatttaacttttaaaaaaattattttataaatgaattgaata

SEQ ID NO: 19745 - DNA, 250 bp, Glycine max
tcgtcccggacctaagcactgagctgcagctgcactaaaacattttatacttacatttgcccctatatggaggttatttttttttatcccatcatatcatgttaataaagttcacttgccatttaaggaccgatttttaagactaaacatgtgaggaaccattccgggcactgaatctatttgtcgtaactgctgaaaagagaatactataacctcttactatgttaaatcaattgaacacttaatcatg

SEQ ID NO: 19746 - DNA, 507 bp, Glycine max
  unsure (1)..(507): unsure at all n locations
ttggagtttccaagtgccaattcgncgtcttctttagttcagtcttcctctggcttcaattcttcagtgggctttccttctgtgtccagcatcttgggatgttcccagcctttgatgacagctttccaggttctgctatccagtgatttgaggaaggccaccattcttgctttccaatattcatagttgcttccatcaagaattggtggtctgttcactggtccgccttctttctccatgttcatcagaatttatctccctagatctcactctgtgatttcgagtgttggctctgataccaattgaaattctgataccaggggacagatgtcgtaccggatgtcacgacatcacgcttcagaacatgcagattatatgtgtccgtatgaacagattaaacaagtaaataacacaagagaattgtttacccagttcggtgcaacctcacctacatcttggggctaccaagcccaggaggaaatccactctcaatagtgttagttcaag

SEQ ID NO: 19747 - DNA, 112 bp, Glycine max
tctcttgatccgtcgctctaaattcaaacggttacaactttcgacaaagataacgcccatgcacctatactaaattgtttctctcaagactaaacatggtgatcacgccaga

SEQ ID NO: 19748 - DNA, 380 bp, Glycine max
tgaatccgacatgcgcgtgaaaagtaatttgttgtttttttccacaagagcagaaggcgccttatatgcaatgtgggaaaatgagaagcgccaataatggacttctctgcagtaagagatgagccggagaacaatctctctactttctaatgtggagggtaagcggtgcacttggaataaacacctcaatgagacattcgttcgaaataaaatgaccattatgtgaactgatgaaccatcgaatcacaatatcattccgctatacatatattaaccccttgtcttacaattctgattcattataagaacttcagccttgcaaaatagctgttcttgaacaacataatgacttatgacatattaaaaaccctattatataa

SEQ ID NO: 19749 - DNA, 314 bp, Glycine max
  unsure (1)..(314): unsure at all n locations
tgcaagcttgtgcctcttatctaactttttcaagtttttcttggngnatacttcgtgtttgtcatgcttctatctggcttgtcagacttcattccaaaatctggacatttcttccatctaaatgtagcccttggctcgctcgcgcagtttttccatgctactgagtggtttcttgcacagattgtctgtgaacttgtcaaggcatagtgcgaggagcatggaatgtaatgctacctcggggttgagattttggatctggacggttgtgtgcccaaatctgtccatgaattttctgctcattgtttacttgtcag

SEQ ID NO: 19750 - DNA, 546 bp, Glycine max
  unsure (1)..(546): unsure at all n locations
tgccaagacaacgcacacganctcttttnncttgttctttgacgnncgaacatatatcatttgtccaatcagtagaatcttgcgtgctttgtaaattttgtgaactctctgcttcaaccattttcttttttagttcatcctacataaatacaccttataaatacaccttatgaattattatcatacatcaatatcctgaatacttcaatatcactaaacaaaactcatctccacattagttactccccctcaccccataaccttctattagaaaattgagcaaaacaaagaaaaagtattgaaataaaaattaaaattcttacaattacaatagcagccttttcagtaacaatgcttccatcttttcgagttcgagtgtcaatataaatttctgccctagaagggtgcactcccttagcctttgtagtctaacattagttaaaaagatcaatcatcctatttgtattaagcaatttaaaaataaaaaaatataaaaaagggcaaaccatctcatgaattcggcttggaagattattggttcccatg

SEQ ID NO: 19751 - DNA, 314 bp, Glycine max
agcttagatgtcttttctaacttttaagtgattattttttataacaaagcattgcaaaaattattacctcacatggagctacatgccctgatacattcaggatttctgatctcttggaatttaaagacgaccagtgtataattgagtaactcgaaacaagatatgcatcatgctttgatgttgcccaaaccaagtttcttaactgcaaatgaaaaaatagaggtataacattaattttagttaactcattgatcatggcatactctgaatttttagaaggtaatagtaggataatttaattctattatatgcaa

SEQ ID NO: 19752 - DNA, 409 bp, Glycine max
aaaactaagcttaatttggacagcaagagctatacttttattacgccgccaaaccccgaagggagcagttagcattggtttaacagcagtcaaaatttgtgtgtcaaagaagtattggattggaccacagaaagatgtgattctccacgagcctgggaatagtttctttattgaatcgggaagaccgagaaatcataatatgaacaaacgggatacatataacattaaaatcacctgcatcatccagcgtgatctcgctctctcttgcaattcacctatggctcgaaactagggacaagatctactacatatcttgatatccttttgcatttctcaacttctagtatctgggattagaattatacttcagatttacactttttcccggaaaacccatttagaacgtgcc

SEQ ID NO: 19753 - DNA, 332 bp, Glycine max
  unsure (1)..(332): unsure at all n locations
ctgcagcatgcaagctcggttttgtgtttgtgtgcttcatcgacttttctctgattcttgntatttaattggctttcaactcactatgcagagtgtagagtagctcgttcagttgtttgatagaatggaatcaaagtaagagttggaacctacacattgagtttcagtacaacagcattaactaataactatccttataatacagtaggaagctttattgaatatttttaaggtctcacctagtctaggaacgttcagcttcattttttttgtgcttcacatgctaaggtttttgacaaaaagagtgtcatctatacattgtttaaattttt

SEQ ID NO: 19754 - DNA, 507 bp, Glycine max
  unsure (1)..(507): unsure at all n locations
tcaagctttctccactaagtttcctaatgccggaaatggcnntattgatggctttggtcttagatgcagggaagaatttctccaagaacaccctcttaaggtcatcccagctaaaaatggacctgggagcaaggtagtagagccaatcttttgccactccctccagagaatgaggaaaagcctttagaaagatatgatcttcttggacatcagggggcttcatggtggaacaaacaatatggaactctttaatatgcttatgaggatcttcacctgcaagaccatgaaacttgggcagcaaatgtattagtccagtcttgagaacatatggaacaccctcaccaggatattgaatgcacaagctttcataagtgaaatcatgtgcaaccatctccctaagagtcctctcacgaagtggaggttgagccatgttctcactatgaaaattagtagtgaaatgctcaaaaacagaatattcagaacacccttcacagaatgctcaaaatg

SEQ ID NO: 19755 - DNA, 327 bp, Glycine max
agcttccttaagaagattcctaaagaagctagagcttatctacacatacctctctaatagctaagcttacctccttgagatgagaaactagaacttagctacacaccccctataatagctaagctcacccccatgacaaaaaatatgaaaatacaaaaaaaagtccttactacaaagactactcaaaatgccccgaaatacaaggctaaaaccctatactactagaatggccaaaatacaaggcccaaacgaaagaaaaaacatattctaatatttacaaagataagcgggctcatacttagcccatgggctcgaaatctaccctaa

SEQ ID NO: 19756 - DNA, 437 bp, Glycine max
tcatcctcaaagaaggaagaaacaagttctgctgaagtatatcgatttttattccctttaccaaaacgaagatgattgttttggtatctgtttagattaaatttaatttcggtcacaaaaccgtctgtttgtaattaatgtgtaattaatgatggacaatactacctgtcctgtagccattaaagtcccggtcaaaactacttgtcttgtaacaaacagtcaaatagtcccggtcaaaactaccggcaactaccggtcttagatttttggctatataaggagtcctcaagtatgttgtgaggcaccctttcatttagccattttttcaggtttcggaagagaggtgctctgaaacaagatttttgtaagcgcttctttctagattcaataaatttctatttttcatccttctctcttctcccttcaccgatcctgtg

SEQ ID NO: 19757 - DNA, 325 bp, Glycine max
agcttaacagtttttttttttccttagtgcaaacttttcaaaatttttatcaaaataatcttcaaatgattcatattttagtgtattttaaatttttttgaatttttatctacatatgaattagttatcaaataattttttattaatgcaaaatttgataaatatgatatgcatgaaaggaactttcaatctaatatgaattttaaaataaaattattcaattaaaagttattaaaagttattaaatgatgtaatatttaatgcattacattcatgtcatttgatctctcctatatatttattaatttttatatattaataagat

SEQ ID NO: 19758 - DNA, 640 bp, Glycine max
  unsure (1)..(640): unsure at all n locations
tttgaaatctaactttgccactggtaatcgattacagttttactggttatcgattaccaaagtgtaaaaactctggtaacttagaaaattttgagaaaaactcttgaaaaacaaaactgtgctatgtttgttttttgaaaaatcttttcaatacttcccttgtgatgtcttcttgatttcttctcttgaatcttgaattcatcttctcttgaatcttgaaatcaaacttctcttgattcttgaatcttcttgatttcttctcatgaaacttgaaattaaccttgatcttgaacttgttgactgaatcttgaaatcattctttgggctttttgtcatcatcaaaactacttgaatcaacttgattcatcatcatgaagcttgcttctacaccatgaacataaaataaccatcatacggttatggacacaaattcaaacattacattaacttcaacatagtggaaagaaatataatttgcatgaaatactancactaagtaatgctaattttgtgacaaggacacgtcgtcttccatttccattaaatgtttactaaaaacaactaaaatttctattgacccaaattttttcagtagttagactgcactaacacccttagcacgtcatcgttggttttcagt

SEQ ID NO: 19759 - DNA, 323 bp, Glycine max
  unsure (1)..(323): unsure at all n locations
agcttttcaggatacactttagaattntccccgnatcttctccatatgctaaggccaccttcacgatttgaaatcaaataaagattggttggtggtgctttctcttgtgtccagcaatttctttggaagaacatgaaaattttagattttaaaatatataatatttaagtgattttttttttgcttttttatatttacaaaaaaattatttattgattgaaattcaaagtgaggtctatttaataaccttctcatgtgtagagatattcattttagtagacatgtttgtcacatgtgtttctacttgattaatttataatatg

SEQ ID NO: 19760 - DNA, 551 bp, Glycine max
taatcaattgaaaattgacggtgtgggattttccctgttctctactatgggcaatattccttggcacccttaatcatgttcaatttgttggtaagtttaggtcttttaatccaaaaaaggaaacttggttaccatgtgagagtaatttggataaatgaaaatagttttggatgttatatgcatgagtatttcaatgcttgcactactacgaaagtgtgttttttatgacaggcgttctacttttgtaattatgtgtctgaaaaatccttttatgatgcacattctaagacggttattgaaaaccgccttagaatgtgtgttcctcataaaaaattatgacgggttttattaaaatccgtcggtatctcaattgaattcaaaagcccaattaatacgagtccacgtgcaggcagcaaattaacttctgcgacctctcgagctcttgagcttccacgacctcttgagcttccatgaagccagctcgatctctcgaacttccgcggcggccctccgtcaaagtgcattatctctctctcacttgcggcatcgtc

SEQ ID NO: 19761 - DNA, 325 bp, Glycine max
  unsure (1)..(325): unsure at all n locations
agctntacaacaaatgccactttactccaagttntatattgatatgttaacaaggacacacaagtatattcaccaggaaaacattgttgtggaaggaaattgtagtgttgtgattcaaaagatccttccacccaagcataaagaccctgggagtgtaaccattccttgttcaattggagaagtcactatggaaaggcacttattgatctgggagctagtattaccataatgccactctccatgtgcagaaggttgggagagttggagatcatgcccactaggatgactttacaacttgttgaccgctctattaccagaccatatg

SEQ ID NO: 19762 - DNA, 464 bp, Glycine max
  unsure (1)..(464): unsure at all n locations
tgaagggcaggggcaagtataaaactgagnttttccctttatcagatgcactgattatggggattggcaagaagtccttaccgaaattaaacaaacagatcacttgcagcaaataccaagaagaattaccaacattggccaaccaaactcttggatgactaaaaaggatagactaccagtgaaaataacatgttcaagtgcaagtcatagagaagaagctaccaagcttgaaaggatgcacgatgagaaattattgaatcaattacataattcaactctcaaactcaggcacaagctcacaatcacacaaatgaagcttgcccatataagaaactcttgggaacaaaccaaaatgacaagagaaaaactgtttaaacgataaattatatcactcccggcacatttgtgcagacattgccgcacctcccaagaggcagggcatatgcacatgaaacccttacatg

SEQ ID NO: 19763 - DNA, 256 bp, Glycine max
gcgaactttgaccattgttcttccttcccgcgatgcttcttttcatgtccgcctgagtgggcttatagcctaaaccatacttcccacgatttccttgggtatttatcaggctagttatgccgccgttgttttttcctaaacccaccccgggttcataaccgatccccaacataactcgggccatcattaccgctgcatcggacagacaaggctgcccaaagagggagtccacggaggaaatgctgaccacctcaaa

SEQ ID NO: 19764 - DNA, 471 bp, Glycine max
tgaaggcaaactggatgcattggttaacttgtaacctatctggccttgaatcagaaatttgtacctgtcgcaagggtttgtggtttgtgctcctctgctgaccaccatacagacctttgcccttccatgcagcaacctggagcaattgaacagcctgaagcttatgctgcaaatatttacaatagacctcctcaacctcagcagcaaaatcaaccacagcagaacaattatgacctttccagcaacagatacaaccctggatggaggaatcaccctaacctcagatggtccagccctcagcaacaacaacagcagcctgctccttccttccaaaatgctgctggcccaagcagaccatacattcctccaccaatccaacaacagcaacaaccctagaaacagccaacagttgaggcccctccacaaccttccctcgaagaacttgtgaggcaaatgactatgcagaacatg

SEQ ID NO: 19765 - DNA, 316 bp, Glycine max
  unsure (1)..(316): unsure at all n locations
agctttcttggcctcgccgaatcatgattcttgacctatctgacattgntnggnaccaagcagctagtgatgttggagagattattgtgagttgtggtgaatatcccaacgtacctcttttgggtatgcgtggcggaattaactacaacccgcttctcgctcgacgacaatttgggtacccgattaagacaaaaccaaacaaccttgccttgactaatgaattctatcttaaccatggagatcattcgaacaaaagggaaagattcgcacaagcttggagcgctatccgcagactcaacagaagtcagttgggaaa

SEQ ID NO: 19766 - DNA, 429 bp, Glycine max
  unsure (1)..(429): unsure at all n locations
tctcacaccctttgacaatagaaaactattgggttttcttttgataaccacgaccatcgagttgctatgaaacccgcaaggttgggggatcattgggacccaaagactacaagtaggaactcttttcttcagccatggccaaaatgagcagtggtggcattctattcaaagaaaaaaggtagggatttcaaacaaccgctaaatgggtaaggtaagaggacactgtttggatactgattttggggggtcgctagcaaccctttctgtggtgtangtggtgagtgggcagcgctacaatgtggtgtgcggcttaccatgccatggagaggggtggtgtgtatcacatttagagaactgagagaacagagaaaatacgagaaagtgttgagaacagaaaaaaaagaaaactgatattattgatctgaaaaa

SEQ ID NO: 19767 - DNA, 273 bp, Glycine max
  unsure (1)..(273): unsure at all n locations
gggggcagcccatgaggaatctccttggaaaagacatctttaaattcctgcaataagggttgaacactangagaaacataaatagttaactgattagaattatcactctctctcttttgtgtatcactcttttcctcgggtgtatcactcttctttttcatattcctttgtggagcctcactattttctttctcttgttctctcttttctctcattctgatttggtcatcacacacttctctaggggatagaggtttaagagtaaacaaggaa

SEQ ID NO: 19768 - DNA, 499 bp, Glycine max
tctaagctttcgtgttaatttcgagcgtctcatataattgcttttgaatcgacctccggggaaaagttatgaccatttgaatttctcgagagctttcattgttcaatttcgagtgtctcgatatattatgcgcttgaatcgaacctccatgtgaaaagataagaccatttgaatttctcgagagcttccgttgttcaatttcatacgtctcgatatattatgcgcctaaatctgacttccgagtgaaatgttatgacagtttgaatttctcgagagctttcgttgatcaatttctagcgcctcgaatattatgcgcccgaatcggacctccgagtgaaaagttatgaccatttgaatttctcgagagctatgcttggtcaatttcgagcgcctcgatatatcatgcgcctgaattggacctccatgtgaaaagtatgaccatttgaatttctcgagaactttcagttgtccaatttcaagcgcccaatatattatgcgc

SEQ ID NO: 19769 - DNA, 317 bp, Glycine max
agctttacatcagattttagtaatgacttactaatttatatttaaaataacttaatgccattaacctagggaattaaaagaacttaatggttgagtgtaactgaaattgtggcaaccaaaagtctgatgcctgggttgccaattgggcccttattacaacttgaactaaacctaactaaagcctttttagttgattaacccaaaacatatttttggtcagccaactttacaaggattaggccattatttagacaaactgaacactctaaaattgagacaaagtggtgccatttagtcctcctccatttgggccatga

SEQ ID NO: 19770 - DNA, 457 bp, Glycine max
cggaccttcaaactaagcttattgctacaagccacttacaacatttgcccttttagactcaacataacgatgcacaggtcaaagttgagtatgtgaaaagattgtatgaccaagtaaaggtgcaaattgcaaagaagaatgaaagttatactaagcaagccaaatagaagcatcaccggatgacgccgatcgaacatttcctaatcgattgaatagaaaaaacaacagctgacatcggtcgtgaaatagccccgactgatatccttctgtcgacattgcacaatttcttttacaaacgctagccgataatgttttttatggtagaggaagttttttgttttggtgttgcataaaaaatttacaatgtatgtcggctgggttttttcgtgcgtgctcaaccgacgttttgtttcggccgaaactggcatgttcccatatattcggccaggaaaacatc

SEQ ID NO: 19771 - DNA, 318 bp, Glycine max
agcttggaaggtagtcatacctcacaaaatatatgtatgtgtgtttaggaagtaaaaataccttggatatgcatgtatgtaatttaggtagcaaaaaaatacctcacaaaatatacatatgtatgtttaggtagcaagataccttggatatgcatgtatatagcaacaatatatatgtgtatgtttaggtagcaagataccttggatatgcatgtatatagcaaaaatagctcacaaaaatatacacatgtttaggtagcaaaatacctcatgaaaaaaaaaaacacaaaacaacaaaaaaattaaaataaaaataaa

SEQ ID NO: 19772 - DNA, 593 bp, Glycine max
tcaagatgaatcaagattgattcaaagatttttgatgtttacaaagatgatgacaaaaagcaaagctcaaaagtcaagaacacttcatgataacaaagatgatgatctcaagaatcaaagaatgagttcaagattgaatcaagaacacttcaaggttcaagaggaaatttgatttcaagaatcaagtttcaagattcaagttccaagaatcaagatcaagattcaagactaaagattcaagaatcaagagaagactcaatcaagataagtattaaaaagtttttttaaaaaactgagtggcacatgaatttttctcaaaaaccttttaccaaagagtttttactctctggtaatcgattaccagattattgtaatcgattaccaatagcaaaatgtttttcaaaaagctttcaactgaatatacaacgttccaattgatttcaaaatgttgtaatcgattacaatgatttggtaatcgattaccagtatgtttgaacgttggaatttcaaattagatgtgaagagtcacatcctttcacaaaaagctttgtgtaatcgattacactgatttggtaatctattaccagtgatag

SEQ ID NO: 19773 - DNA, 314 bp, Glycine max
agcttggtccccaacgctctcttcaatctctcccaaaatctagaggtaaacctaggatctctattagatactatgctagatggcacaccatgtaatctgacaatcccacttatatacagggagctcaacttctccaaggaaaatatgatattaatggcaatgaagtgagtagacttagtcagtctatcaacaataacccagatagaatctaaacctctaggggttctaggtagtcctaccacaaaatccatggaaatactatccctcttccactagggtatctctaagggttgtaacttccctgaaggtctctg

SEQ ID NO: 19774 - DNA, 641 bp, Glycine max
  unsure (1)..(641): unsure at all n locations
ccgcttcatggctcanatttcaacctatatgtgggatagttttgtacaaaaggctactgtggatgaaagtgaaaagaagatggaactgaagctatcaaagaaaaaaatgaatgaagaaaaggaactaaagtgctcgaaatcaaaaaataaagaaaaatcaaaagaagaaaatttcgagtagaatggtgagaatatgaaactagactgtatttatgataactcacgattatgatttgagaaaccaatgtccctagatctgaaaaaagatggagtcacaagttccattagaggaaaccaatttgtggactgatggaaattgaagacctacttatgttagtaaactgctagattatgggcttcaaaaaaacattgtttctttactgtaggagttcaaggattgttttcatgagattattacaagatgcctggacttagcagagatttagtggaacataggctacctatttgtgaaggaagaaatcagtgaagcatgtcccaaggagatttgctcctaatgtcatgaaagctantaaagcagaaattggaaggctattgaatgctaaggtcactactagaaaaaaatggttttaacattgctactttaacatcaggtttttgataaaaaccgaggttaataaaaa

SEQ ID NO: 19775 - DNA, 305 bp, Glycine max
  unsure (1)..(305): unsure at all n locations
agcttgaggcgaaaaaggaaggtatcgtaaattatatgtgtactagggattaatttaaaaatctgaaggaagatttagtgactgttgaagatctttcntggtggatggtaaaagtgggcctaaagcccaatatcaaaaaaagaaggtgcctgcaaaaatttcaaaagataagaatagaatattgagggttgcacgggtttgggcttgaaatatgtggactaatctactccaaagtcacatatggaaattgtaatttcactatcaaattgatttgcagttcttatgagaaaaggcccaataaaatc

SEQ ID NO: 19776 - DNA, 484 bp, Glycine max
tgccacccagctcgcctaagcgagttagggtgtttcctctttatggcaccgccttctggggaacttcttggaaggcccaagtgggcctgatcgctatttgcaccccctgtttactaaatacacccccttgctttttttgctgattcttttttcgtaatggtacggaactttacgaaatatgtaacaatacttgttttctttccgtaatgtcacaaaaccttacggattacgtaatcatcccttctttggcttccgggatgttacagaactttacggattgcgcattaacacttccttttgacttccggcatgtcacagaactatacggattgtgcaacaatgctttcttttgactttcagcatatcacagaacttcatgaattgcctaacgatgagtgccaagtacctcgaagtggtcaaacgagggtcgcattccaacaacggatggtccccagacgaaattagggtattacaagtacatatc

SEQ ID NO: 19777 - DNA, 323 bp, Glycine max
agcttcttatccaaggctcatcttggtggtgaagcttcttcttccatggcttattgatgaggacatgaccaagagcaagggcaaggatccacttgaaggacttggaggacctattgatgaggacatgaccaagagcaagggcaaggatccacttgaaggacttggaggacctatgacaagggctagagcaaggaaagccaaggaagctcttcaacaagtgctgtccatactatttgaatacaagcccaagtttcaaggagaaaagtccaaggttgtgagttgtatcatggcccaaatggaggactaaatgacaccactttatt

SEQ ID NO: 19778 - DNA, 455 bp, Glycine max
ctttgggattgagcacctatataacagcaccagggtttgtttaatttgtttttgagaggagaataattttagggtttgcaattccaattttatactgttcatgtgcactgttcatgtagcaataaaattcattttctgcaatttcgttttctgcttcaatctgcaatttcgttttctgcttccaattgcaatttcgttctctactgattaatggaaggctaagtctctagtgttgttttctcttaaagatcaagcacaactctctttgaggctttgttattactatcgaattttgatcagtttttcctcttcaccaatagctctgtatttgttgctattaatccatgcgtgcttagtgcttgattaaatggctctgcgcttaatttacgtacatgcttaatgattagtttcgttcatgaataattggcgtatgtgtggcttaatcacatgaagac

SEQ ID NO: 19779 - DNA, 320 bp, Glycine max
agcttgacaagcacccaatcgcccttctgaaagttgacttcgtgtctattgctatccgtgaagtgcttcataaattgttgtgccttaataattttcttcccaaggcttctaaatatttcttcgtgattgactaggaaatcaactgcttcgatgttggatgttccagccaaatactgtggcatattgggtggtttcttgctaaaagtggcttcatatagtgaaatccagttccaacgtgcactgaagtattataagaccatccggtccacatcaagaaatagccccatgtcgatggatgatgatggacaaaatcctcaagt

SEQ ID NO: 19780 - DNA, 454 bp, Glycine max
  unsure (1)..(454): unsure at all n locations
actcaagcttttggtcaatctaaggagtggtgtcttcatgctgcatattgantcgttctgagtggaaaatcctaatttggttaagcctgaaattctgcagcatttgcaaagcagattcaaattaattgaagttatgtacgagcactgtagcttttacaaaaataagcactacagcttatttaaggcataaattctgtagcatctgcagtatatgggtggaaaaagagtgggagtggaaatttaaatggagaagacacttgtttgacagagagcttgagatagcatattgtttccgtaatgatgttgctggcagctgtattcatattcacaaaaaaagatgactggagaactttgacaaggactttgccttcacctacagctattggtcatctaacatagcatcgggattcgtcttggctgataaaaaaaaaatgtgggtggaaaaataagcact

SEQ ID NO: 19781 - DNA, 328 bp, Glycine max
agcttctgttcaaacttcaaaatctaagttgcaggtggtaaactcgtcaattttataccgcaatagcgccataccacaccagtgctataacgaacgcaacagccgctccttcaatccaccccacagcagaaggcatcgttgcggcaagtggccactattgactacatagctttagaatatcacaaatgatcccttatgctgatactaataggaacattccttaagaccaatgtctaccattcaacaacaaaaatataaaatggtattttctcacactaaggaacctatttgtattacagattcaatcatgttgacagtactagggctt

SEQ ID NO: 19782 - DNA, 494 bp, Glycine max
agaacactcaagctttgttgatacagcaacaagggatgcatcacgcatggcatgacatctttattttttgcctgtgagactcaaccactacctttgaaatttatgttatattagatatggggcaaaagaacgcttgaggcaccatgaggggtgagcagataacaaaatcagacatgatttgataagtagattgccacctaaaatgtcctcaattctcatcatagatatttctaaagccatgaatttcattagtcaatccccactttcgaggttcaacaattcaaccaatcaaacttttggacatgcagtttataatttatcccattggtccactccactttctagacatgacaaggcacattttagagaacgtgactttgatcttcctgaataatagtatgatattgttttgtgggaattctgtttaaacgaaaatggagctactctcaaagctggcaacttattttgaatgatgaacgatgattttttcccct

SEQ ID NO: 19783 - DNA, 322 bp, Glycine max
  unsure (1)..(322): unsure at all n locations
agcttctacttatgtggcagggcgggcctccttcatcttcttgtctccaacgngaactttgaccattgttcttccttcccgcgatgcttcttttcatgtccccctgagtgggcttatagcctaaaccatacttcccacgatttccttgggtatttatcaagctagttatgccgccgttgttttttcctaaacccatcccgggttcataaccgttccccaacataactcgggccatcattaccgctgcatcggacagacaaggctgcccaaagagggagtccacggaggaaatgctgaccacctcaaaagactggaaagcagt

SEQ ID NO: 19784 - DNA, 437 bp, Glycine max
tgagatgaggaagtgttgaagggtgaaacttcctgcttttattgtttaccacagagtggtacctggagatatgtcgcgggggtcaagagaccttggggacgtcaggtggggtgctattgcccaaaaccaagcttgaccaatcccgacccaacccgggcatagtcggtcagtgagaacatgtgacgtacctaagcaggcgagctcctggcagtcaacagataaaaggaaaacaagaccacagagcaaggaggcttgtggtggctggccagctgtgaattttgtgtaatatgtggattgtggcctctggtaatcgattaccaagggtgggtaatcgattacaaggcttaaaattgaagacagggggctaagatggtctctggtaatcgattaccaaggggtgtaatcgattaccaggcttgaaaacgaggtcaggaagc

SEQ ID NO: 19785 - DNA, 325 bp, Glycine max
tgcgagcgttcatcacttaatatggaagtaagggacaaggtttaaccttttccatataaggacctaaatgagctagtccaactttgtataagaggggagcaaccacttaaaagaaagtcttcttcaaaatcttatggctttcactcttatccaaggaattttgtgggttgcaccttcaaaacccaaaagataagggtaagaccatagaaaaacccacctcttagactagttcccaagcaaggactagcaattaaatgcttcaaatgtcttgggagaggtcacattgtctctcaataccccacaaagaaaaccatgattatgaggg

SEQ ID NO: 19786 - DNA, 524 bp, Glycine max
cactctagattgctcgatgctggaaggctgacatttcaagaggattgttcgaatgtttaatgggagtctcgaaggctaaaacagatagggaatgtctcaacctccagacggttcatattggaagtattgcatgtggctagtatgattgaccttgatggtgacaaaggaggttcttgtttaatgcatccagggacatcgcacgatgtggagacatgtccaatggcggaagaacggctacaaggaatgatgaacagggggcagattgaagtctgtagtgtgaagaaaggggaaagagatgtatgcatgcagtcagatgacagaaacccgagtaagcccaagcctttagtgatccacttcaccaaggacgtcaccactcagaggccccgaggcttccggccctttacagttaagacgtctgagcccttcccttataaaagtgataaggcggtgccatggaaatatgccacacaagggtccgatggaaggaaagacacgttcttcgtacgtgttaaggaggacttact

SEQ ID NO: 19787 - DNA, 317 bp, Glycine max
agctttagatgcttgtagataaaaataacacactttggctgggaacacattttattagtaaaaatgcaaccataggaccccaataccgatattgtatcatgtctgtaattgcaataaagcccatattagagtcagctacatttttcaaactcatggcaaagttaaaaactttggcaatttcaccttactgaacaaataatttataacaacatctaatttctcaaatgaagaccctacttaataaacggattggacaccatgtgtactgtgatgataatagagtcataccagtggttggtgtacccttacagcttctt

SEQ ID NO: 19788 - DNA, 549 bp, Glycine max
taactgttttgttaaatgacatatctaatctaaatcatttttgtgataacaagatttgtcttaaaccagttcaatcatatgcatcaaagtataaaaactttcataaaacaaaaaaatggttttgtggatgaaaagctggaaataacattctgagtacaacattatgacaaaaaacattcttagtattgcatttgcataacataaactgagattttcataataacaatattctgataaatttttttatttaaataatgaacatcaaaacataagaaaatgtgcattgacattaggttctcataatcatatcaaacatttcataatgagttttgtgactaaccaagtagagagtttagttatctaagtgtttgaacctctatgttaagactttttgcataccaaaataatcttgagtaaaagttcaaaaaaggtaaagtttcaagaaaggttaacaaagtcacaataacccctcattcttgtgatgttttaatcacttcaaccataaccaccaccagtgtcgtcgcaaccaccaccaccaacaacaccaca

SEQ ID NO: 19789 - DNA, 313 bp, Glycine max
agcttttaatacacttctttcaagatagtttggccggagctttagtagtttggtacactaatttggaagcttgccgtatccgtacttggaaggatctgattactgccttcctaaggcaatatcagtacaattccgatatggctctcgatcgcactcagctgcagaatatgttcaagaaagagggtgaaacctttaaagaatacgcccaacggtggagagatttggcggcacaagtagctcctcccatggttgagagagagatgatcaccatgatggtagacactctgccggtgttctactatgagaagctagt

SEQ ID NO: 19790 - DNA, 438 bp, Glycine max
tctaaactttatgcaagaatgaagctctaataccactttgttgaaaagtggcctcagttatcttaagaagggagggttgaattaagatacaaaaattattccccaattaaaaatttcactctctctttttggattaacaatgcatccttaatatgaattactcaaaagacaatcctaaataaacttctttaaagcaaaagatgaatagcaataaataaaagaagtttaagggaagagagaatgcaaactcagtttttatactggtttggccacgccctgtgcctacgtccagttcctaagcaacccgcttgagatttcgactatcttgtaaaatgccttttacaaagtctgaaccacacaaggacaatccttcccttgtgtcaaaaatccttacatcttaagagaccctcagtatcttaaccaaaatttcttttgaat

SEQ ID NO: 19791 - DNA, 318 bp, Glycine max
agcttgagattgctatgtctacatttttatatatagtgatagcaggatttctacccaccccatctacgtatgcttgtctcttagaaatgcatgctgcatctggacaaattgatcctgccatgaaactgtacaattcaatgactaatgtaggtttgaagcctggcctaagtacttatactgtccttttaactctactggctaataaaaagctggtggatgtggctgccaaaattttacttgaaatgaaggccatgggatattctgtggatgtgacagctagtgatattttgatggtttatattaaggaaggttcagttg

SEQ ID NO: 19792 - DNA, 546 bp, Glycine max
  unsure (1)..(546): unsure at all n locations
tagacctcaaattgatatttgaaacatgtttactttatttatagctnngntaatgaattttattttaattatttgcaatatttttaatttttttttacttaatttagttttatatggtccttcattaaaaaaataccatttaaattattttaagataattattttaaaagttactatataaaattctttaatttttttacttaatatactgtataaatttttttacacagtaaatacataactttttttctccacttataatagtgacaaacaatatttgtaaatattaaaagacgttacttttttctataaaattaaggacattactatcctgtaattatattttcttaagttttctcatttatgcaaattcttaggattgcgtaagaaaaagtatgaaattttgggccgaattgagttatattacaattatgaaccctaaaaatggataccaatttaaaactttttacaaatgtttgtcccaagaatctgaatgaaagtatcattatcgatcgaatcatatatttatatatgttcaccatacat

SEQ ID NO: 19793 - DNA, 316 bp, Glycine max
agcttaacagaaagtaaaagcggtttattaaatacacagcggaaattaaaagagtagggaagaaggagacaaacacacaagagtttttatattggttcagcaacaacccttgcctacatccagttcctaagcgacctgcggtccttgagacttctttcaaccttgtaagaatccttttacaagcaaagatctaaaagggatgtaccctcccttgttgtctttgaacctaatggatgtaccctccactagaactgatccacaagagatgtgccctctcttgttctcagacaacaacccaagtagatgtaccctttac

SEQ ID NO: 19794 - DNA, 472 bp, Glycine max
  unsure (1)..(472): unsure at all n locations
tcttatctaaggcactctcttggtgtgaagcttcttcttccatggcttattctctagtagatggcacctcctctcaccacttctcctttatcttctgctacaactccatggctgaaaatcaccattgaaggacctcattgaagctcaaagatccagcctccatagaagcttctcaagcaagcttccatcaggtattaaggtaaattaaatatttaattattgtatagaaaataaaagaaataaaataaagaaaagaaagaaaaggggaacaagttctttgtgaataaataaaatgtatgaatcatgtacattttataagttggtattttggaacagaaagtagtgataacttggttgaaaaaggaaaggatgggaaatgatgattcatttgaattgctagcttggttttatgttgctattctattctcaaggtatttttgaatatccagaanaaccaaaatttctttcaaag

SEQ ID NO: 19795 - DNA, 317 bp, Glycine max
agctttgagccaaaatcctgactcaccataaacctttgatccaggtgagaatgccaatccttaccctcggaagcaaaaaaaaagggagaagagaaagaaaatttccaatcaaagaggaagcataaaaaggagagaaggaaaatttccaatcaaagagaaagaaaaagaaaagaaagaaaactcccaatcaaagaatgggaggagaaaaaaaagaagtaaaaaagaagaaagctcctggtcaaagaaactagaagaaatgtgcagaaaggtcttttgaccggacgatatctgaacaatacagaattgtcaccaaatga

SEQ ID NO: 19796 - DNA, 196 bp, Glycine max
  unsure (1)..(196): unsure at all n locations
tcaaatcccccttcatttgcacttttaatagcttgataaaggngnnnttggagtctaggagcctacctttaccttgtgggaccttcaattctcagtgagggtggactattcctcacttgaaatctgtgggtgttgtataagcaaagcttgatggggaatcaactatgattcaaatgtgttttactgataacaatga

SEQ ID NO: 19797 - DNA, 447 bp, Glycine max
cggagatgatggtacagcgggtgaaccacaagcggaagtttcgtttggtgagggagccatggaaaaacagagcgtttggaatgatttcgtaaatctcagaaaactattgggaaatgctggtgaaaacacgaatgccaagcagatataaatttgaatgaagaatgtagaggggcgtgtgaagcaacggtcgaatttgctttgtggtgaacgtgctattaatgttaagtgattcgtttgggcacgttcagattgcagtagctgctataattcctctagcagacaaatgcccagcttgcccctcaatttttcaaactgatttgcatccaaagcctttgtgaaaatatctgctatttgttcctcagtgtcaacatgcttcagtgtgatcactttatcatcaacaagatctctgatatagcgatgtctaatgtcaatgtgcttggttctgct

SEQ ID NO: 19798 - DNA, 586 bp, Glycine max
  unsure (1)..(586): unsure at all n locations
ttgatatcgaaataagattgaatgtgaaagtgggtatttttagaacattgtgtaaggctatgttgggcgagagctgaattgttcctgaatgagtggcatgaacatattggccggtcggaagttttactgtgattgggttgattcgtctatgggagtgaaggttatgcaaggagctagtcacatgatctgtagcccctgaatctagtatccaggaggtggaaagcgcactggtagaaggtgacatacctaggtttattggagtattgacggtgcatgaagaaattgatgcaacctgtttgggttgattgggtgtcgtgttctcggcggatggctcctggattaaggcgagtagtgccttgtactgctcaggggagaagcgaacgaactcatgggactcatgatgctgagctngatcatcagtggctttgctttctactgtcactacgttgttcatggtggtcctttcatcgtaaggcttgtatcccggcgggtacccatgtttccgatagcagacatccactgtatgtcctaacttgccgagtgggtgcacgtttttccttccttgttactctaatttttccattgg

SEQ ID NO: 19799 - DNA, 325 bp, Glycine max
agcttaacaaaaggcatgcgaagtgggtggaattcctatagcaatttccttatgttatcaaacataaaaagggaaaaagtaatattgtagccgatgctctttctcggcgtcatgcattactttctatgcttgaaaaaaaattgattggtcttgaatgtttgaaaagcatgtatgaaaatgatgaaacttttggaaaaatttttaaaaattgggaaaaaatttcagaaaatggtttctttagacattaaggctttcttttcaaagaaaacaaattgggggtgcctaaatgttctactaaaaatttgcttgtttgtgaagcacatga

SEQ ID NO: 19800 - DNA, 240 bp, Glycine max
tgccaacccatggaagctcctaatatctaccacactttttggggcgggccatccttggatggactcgagcttctcagggtccacttggaccccatttctaccaactacaaactctaagaaaactatattatctacacacaaagtacacttatctatatttgcatagaaggagattttcctaaagactgaaagagctagcctgagatgtacctaaggatcatctaggctcctactgtacac

SEQ ID NO: 19801 - DNA, 316 bp, Glycine max
agcttgttgctgaaggggagggtaatgtcaggttttttaaattatctatcccagtccaacttagtcatgagacttgggtttggaaggcatacagcagaagaaattaaaaaaaataggagtagggcaaaaagaggaatagaggaaattgttagtcttaagaagcagatccaccagctacccaatctcaacctgaacaagatattaaagcctgcatggaaaagattgatcgccttaggatgctgattgagtccatgagtaagccttctggattttgtaccttgtccaataagggtaagagttcatccaatacctttgt

SEQ ID NO: 19802 - DNA, 508 bp, Glycine max
tgaaatgctacaaaaaatggccaaatgcccaaggagttttacaacttgctaacttttatttaaatgataactgataggcttgtaagtaggggcaaattattcctagattattacattttcaattggcttctacatataatgcaactcatgtttttggtagttttggagcattggtagtattgttatgaatatatgatattctatattagttgttaaatctaatttcgatttctcatatttgtgtgtatttataggttaattcatttattgtctattttgctattcatcaacttgcttttgtatttgacttgtttatgtaaataggtacggacttagagctcttaactttgagtatgcttcagtgtgtctacaaggtagatcattaaattaacctcttgttatgaacttatgatattctatattaaattgtaaatctaaatacggtttctcgtatttgagtgtatttataagttaattcatttattggctattttctattcatcaactt

SEQ ID NO: 19803 - DNA, 313 bp, Glycine max
agcttgtacttcagtcatccatatacctaattgaaatatattttacatggctattgttaacctacacttgtcgtaatggatataaattatcaattaataaaaaagataccttataattatggtacttacatcatccatagttgtagtatagatatgttcaaacatttgtagcctgatataatttctgttacatatgcacttgtaatgaaaaaggatgtgtgtacattaggaatcctaaattttggcccatcccatggcaactcaacgggcttctgataaacatcaaacaaactcttaatcaattctcccaatg

SEQ ID NO: 19804 - DNA, 614 bp, Glycine max
  unsure (1)..(614): unsure at all n locations
tttaccaaagagttnttactctttggtaatctattaccaggggcaagttttgttttcaaaaagctttcaactgaatttacaacgttccaatcaatttcaaaatggagtaatcgattacaatatattggtaatcaattaccagtgtgtttgaatgttgaaattcgaattcaaatgtgaagagtcacatcctttcacaaaaatgctttgtgtaatcgattacaatgatttggcaatcgattaccagtgataagttttgaataaaaatcaaaagatgtaactcttccaatggttttcatatttttgtaaaggttataactcttctaatgggattcttgaccaaacatgaagagactataaaagcaagaccttaacttgcatttgaagaacaattcattacaattattacaatcctttacaacctttgaatctctttgaacttcttcttcttcttcctttgtcaaaagctttctaaagttttctggttttctaaaacatgaaaacanaactgtgctattcatctttttcattcccttcttccttttgccaaaatgaaattgcccaggactaacccgcccgaattctttttggtgtctcttctctcccctttttcaaaa

SEQ ID NO: 19805 - DNA, 314 bp, Glycine max
agctttgagaaatttctaacaacaataactttttactcggatgtccgaataagtctcgtaatatattgagacgcttgaaattgaaaacaaaagctctcagcaaattcaaacgacaataaccttttactcagatgtccgattgtgtcccgtaatatatcgagatgctcgaaattcagaatagaagctctgagcaaaatcaaacgacaataacgttttactcggatgtccgaatgagtctcgtaatatattgagacgctcataattgataacagaagctctgagaaaattctaacgacaataaccttttacgcaga

SEQ ID NO: 19806 - DNA, 313 bp, Glycine max
tgccaacccatggaagctcctaatatctcccacactttatggggcgggccattctcggatgggctcgatcttctcacggtccacttggaccccatttctaccaactacaaactctaagaaaactatattatctacacacaaagtacactttctctatatttgcatagaggagcgtgtttctaaagactgaaagaacttgcctgagatgtcctaagtgatcatctaggctcctactgtacactacaatatcatcaaaataaacaactaccaatccacctatgaaatcccttaagacatgatgcataagcctcat

SEQ ID NO: 19807 - DNA, 320 bp, Glycine max
agcttgtcaaaatagaattgatcaacgtgatcctttctcctttatagagaattcttcatttccacgtcaataacctcctcctaaacacctttagaacaggttcccaaaatgcaaccctccttgggttcccaccaactaaaaagcccaaaaatttaaaaaaaatagttgcaagagaacaatgcaaaaaaattgagacccatagcaaaaaaataccataaacatttacgccatgaattttacttttcatgaaatttaccctcatccccgaaaccaaatcaaaggatctaagcaaaaatttaattgcccagagattctctcaa

SEQ ID NO: 19808 - DNA, 649 bp, Glycine max
  unsure (1)..(649): unsure at all n locations
tcctttccaaagactcgtaagggaaatcgctcaggacttcaataccaatctctacttccacagcagcgccgtctccactctccaagaagccgtagaggcctacctcgttgtgctcttcgaggacaccaacctctgcaccattcacccaaaagagttaccattatgccaaaggactgaggcctaccttgttgggctcttgtttattttcattgaatattgaaattttaatttttaaataaatatttaaaaatgaaaatttgaattttattgaaattgaatcactttgtccaaataagaaaattaaaatacaagaatttgaattacctcatccaaacaaaatatttacaaaaggaaaggaattaaaatcaaggcaatcaaaatgttatgaatttaaatttcttagaaatttttaaattcctcatccaaacacatggttagggtcatttntgtagagggaaaagaaatataatgnaaacaaattaagataaattcttaaattaaagtacaacgtaaaagtgtgaatatcacatcattataggatttatttaggtttttttggtccgtttctttgcattgaccgatgttatgagaaagagagaaaatnaanatatatatatatatatatatatatatatatatatatatatat

SEQ ID NO: 19809 - DNA, 574 bp, Glycine max
  unsure (1)..(574): unsure at all n locations
tttaagatgtgctcatttgtgtaaacattttctatattttggtagtagntcatgctcacgtaaccacaagctgcaataatgtgtgaacatggatagtgaagcgcagaataccttctgcattgacaatgatgaccatttaagttaactgcccacttttgtccgccgcgttgcgttatagggttgaaggtctcctctacttcaaaccttgtggagtggatatcatacacgcaaatgatgtgcgtacaagcttgttcttgatttttcctaagttctttaacaagcttcgaacaatatacttgtccttcatttaaaagtctttgggcttggtggccacgctcaacaaaatactttcgacacctacagtatattgatttgaccaatgttgttatgggaatgttgcgacaatcctttaaaaccttattgatacattctgagaggttggttgtcatgtggccatatcgacgtccttctctatcataagccatcgtccatttttcttttgaaatgcgatcaatccatgttgctatgggttgactcaattgacgaaatttgtctaaatttgatcaaaatgtgc

SEQ ID NO: 19810 - DNA, 313 bp, Glycine max
agctttgcctttagcgcttgcacctcatcactttcttttgaagctttaacctcattgtctctcacagtctttaaatttgggagccaatccaatccttgtgtccggactctcatccacttatgatagccaccgatgatcccattactgcttcccctaagctctctgtcctttcttcatgccgcatctcgtgccttgcgaactccttggagtacctttgcattggggtcactgaaaccccgtgtaatgaaaggcgtgatgctttcgtctaatggcgctcctctcatggggtagccaagctgtcttatggcgagga

SEQ ID NO: 19811 - DNA, 549 bp, Glycine max
  unsure (1)..(549): unsure at all n locations
tgaaccaaaaatcggtgagagtgtgaccttactctgttagtgaatgactaactatgaataatgatctttgcataaatctttgaattctagaatgatttgtataactcagaacatgataaaggccatggattgtatagacacaagctcttttgaccaaatagcttaccttgaatgattcttgtatcttttgctcccttgtataaagcttattgatttgtcaagaattgaaccctgaactttaaatgattatctcctaataccttgtttagattctaggagagcatgtggtttaaggcaaatttactctaaatttgggggaggaaagtcaattagaatgaaaagaaaaaggttaagcatcagcacacacaacaaataagttgtatgttaaaaaaaaagaaaaagaaaataagttgtgttgttacaaaaaggtcgaaagcaacttaagaaaagggaatagtgagaaagctatntgtacanaacaagaaaagatcattgggattagtctaggacttgtgctctcttanaatctaaaactttgaatcctagaaa

SEQ ID NO: 19812 - DNA, 312 bp, Glycine max
agcttggacgaaagacccattgttatcgcacaagcagaacaccatgccaaaagctctgcggtcctcaaaaaaagtcgcatcaacattgcatttcaacaaagccaggagctggaaggggccaatgggcttgaggttgggcaacaatggaagactactcagcttgaggctgggctttttgcgcattcctccactgactatacatctcgttagctctagccaaaatttggtcgacatagttgcttgcttccttctacagaaggtcatttggggctaaccagagactccataagatcatgcacacccgcgcaacct

SEQ ID NO: 19813 - DNA, 555 bp, Glycine max
  unsure (1)..(555): unsure at all n locations
tgacctatgaaactcagctatccttatggctgcctcgatttactctcgttccaccccggaagatttaagccaagcccctactttcgaggggcaactcccaccttatgacgattatcccgggcaagacaatgaggaaggagatacccatctcggtcccctgctccacctcaaagatccgtccccgcatgaactaccccaaccaaacatagtccgccatatcccggcttcacccacacccgtaaaagaatctgttcccttcgtggaagataagggaaagattgaggcgcttcaagagaggctgagagcagtcgagggcctcggcaattacccattctcaaatctagtggacttatgtctagtacccaatatcgtcattcctcccaagttcaaagtaccggactttgataagtacaaaggaatgacatgtccgaaagggcatcttcngatgtattgccgaaaaatgggggcgtattctgcagacaaaaagttattggtccatttctttcaagacaacttggccggagcagctgtagcatggtataccaatctggaaac

SEQ ID NO: 19814 - DNA, 143 bp, Glycine max
agcttgtaattgaagactaaagctctgagcaaattctttctacaacaaatcttgactcggatgtccgagtgtgttcagtaagacatctagacgctcgtaactgaagacagcttctctgagaactacctacgacattaactttt

SEQ ID NO: 19815 - DNA, 242 bp, Glycine max
tcagtgaccaattacgagcgtctcgatatatttcgggtctcaaacagacatcccagacaaaagctattggccttggacattacatagagcttccattttcaatcccgagcgaatcgacatattagacggctcaagctgagcagcgagttaaaagtgattgacgtttgatgaatctcagacgcatcgtgtcaagtccgaacgcctcgatattctatgggacacaatcggacatccgattcaaa

SEQ ID NO: 19816 - DNA, 314 bp, Glycine max
agcttgtagaattcaccccaattccagtgtcttatgctgactcgctcccatatctacttgataattcaatggtagccataaccctagccaaggttcatcaacctccatttctccgagaatacgactcgaacgcaacgtgtgcttgtcatggagaagccccggggcgttccattgagcatggtagggctctgaagcataaggtgcaaggtctaattgatgcgggctggctgaaatttgaggagaattgcgtgtaaatcccgacattgacaagagatgccacacatggggcaattttgaaagctgttgttaggtgt

SEQ ID NO: 19817 - DNA, 528 bp, Glycine max
  unsure (1)..(528): unsure at all n locations
taaccactaagtagaaagtatattttaaagttttactacttggnagaagcaacaaggcttaaccattaagagtagaagcaaaacaacaattcaatgcttaaccatccatgacaaaagcttaatcaatgcttaatcaccatggacaaaagcttacatcaacaaaatagaaaaatcacaaaatttgtcttctatgaggacttttgacaaacactttgtgaaccaacaataaccaagacttaacaactcatgccaaaagctaaaatcatcaaaacatgctaaaaggctgaaaacaataagccaaaacagaccaaatttcaatgaaacaatgaaaaggttattcaccaaacagttggtgtgcacctttctgaaatagtgcaggacttcaaacaatagtcaatatcttcaaaatcttcagtagcatttaatcaaataccttgtaggcaaactgagagcttaatggatgcannacaatatggttgcttatatgaggctttgactgttgctgccatgttatcaactgaaactaca

SEQ ID NO: 19818 - DNA, 65 bp, Glycine max
gagcttgagccaaaatcccaatttattatataccttgacccacggtgagaatgtcaatcctttcc

SEQ ID NO: 19819 - DNA, 345 bp, Glycine max
  unsure (1)..(345): unsure at all n locations
aggtgtacaagtgaacctatctattcctaattatgtgggccatcanatctatcatgtgtcgacagtaattgattagcccatgaatctccttgngggccgtacacactccggccatggctttcgctttggctaacagacgcaggaggtcttgacttccattcaaggtcaagacgaacctatccatccacatagtcgcttcttgatgcaacgcatcaatcacccttcctcttgcttctttttcggcatacaacttgtgcaaaatcctacactagcttttgtcatgggccatggactggttcaatccttctttgtattgccctatgatagctagcatgctttgttccg

SEQ ID NO: 19820 - DNA, 185 bp, Glycine max
  unsure (1)..(185): unsure at all n locations
agcttccctcacatatataaacccaaaatgatgactctntgaagacgaaaggaaaaaggagtgagctnttggtccaagtgagcaactttccttcaatcccacaacaaccacactataccatcatcaactcaaccccaaagccaaccaaaaatacaatcaaaaccccttaaaaacaaaattttcca

SEQ ID NO: 19821 - DNA, 105 bp, Glycine max
  unsure (1)..(105): unsure at all n locations
ctgctctgttatcacccagtatatcacattctcttcacagctcatgaaggtgaccattgataaaataggaacaaccttcttngaacttctaaccatgaactctaa

SEQ ID NO: 19822 - DNA, 349 bp, Glycine max
agcttaataaatctatatatggtttaaaacatgactcccgtcagtggtaccttaagtttcatgggataatttcttcatttggttttgatgaaaatcccatggatcaatgcatataccacaaggttagtgagagtaaaatatgttttcttgttttatatgcaaatgatattttaattacatgaggtgaaacaatttctttttaagaattttgacatgaaggatatgggtgatgcatcttatgtcatcggcattaagattcatagagatagacctcgaggtattttaggtctatcacaggaaacctatattaacaaaattttgagagattttggatgaaagattatctacc

SEQ ID NO: 19823 - DNA, 316 bp, Glycine max
  unsure (1)..(316): unsure at all n locations
tctgacattcaccacatattctttcttcttctatnttcagatagggaatgcctctaacagcacctttgtcaatgatattcttcatgcctcttaagtgcagatgtccaaatctatgatgccatattctgacttcatcttccttggatgatagacatgtggaggagtcactggtctcaagaagtgtccatatggaacagatgccctttgatctgctgcccttgattggaacttcactctcttcatttgtaccaagcattctgaccttgngaagtatacattgaatccttcatcacacaactgactgatgctgatctat

SEQ ID NO: 19824 - DNA, 280 bp, Glycine max
agcttgaccaatcccgacccaaccttggcattttcagtcagtgagaacctgtgatgtacctaagcaggcgagctcctggcagtcaacagataaaaggaacaaagaccacaaaacaagggaggcttgtgtgggaggctgcccagctggaaatcttgtgtgatatatgggttatggcctctggaaatcgattaccaagggtggttattcaattacaaggcttaaaaatgaagataggaggctaagatggtctctggtaatccattaccaggcttgaaaatga

SEQ ID NO: 19825 - DNA, 215 bp, Glycine max
agctttgagccaattcaaacgacatttactttttactctgatatctgattgagtcccgtaaaataacgagacgctcgaaattgaatgttgaacttcagagccaattcaaaccacaataactttttactcggatgtgtgagtgagtcccgtaatatatcgagacgctccaaattgaatgttaaactttcagccaattcaaccgacaatacttttta

SEQ ID NO: 19826 - DNA, 138 bp, Glycine max
aaccagctaacgttaattcgagcgttcgatagtacggactcatcatacattttttataagttattgtcgtttgcaatagctcagaggtccaacattcaatctcgagcgtctcgatatgtcacgggactcaatcagaca

SEQ ID NO: 19827 - DNA, 147 bp, Glycine max
agcttccctcacatatatgaacctctaatgatgactctttgaagacgacaggaaaaaggagtgagctttgggtccaagcgagcaacttatcttcaatcccacaacagccacactataccatgatcacctcaacccccaagccaacca

SEQ ID NO: 19828 - DNA, 298 bp, Glycine max
agcttgcaataggataagtgagactatgtactattgagttgaagattataaaacatctatggaggactccagttgattttgatcggcagtggtcaaatatttttattgaggctttcgtttatttattaatttactgtattttggaaaatgaaccaacttttgagttatttttgtttttcaaaatcaactcaagttttatgaaggtggttagagaaatcttctttcattgaatgggggatctggttaaacctaactttatttgaaagatgcttttatacataaaaattttatttttaaa

SEQ ID NO: 19829 - DNA, 376 bp, Glycine max
  unsure (1)..(376): unsure at all n locations
agcttctcaaggaagctacctatgtctataaatagaagtatgtgtaacacttgtggtaactttgatgaatgagagtcttgtgagacacacttcaaagttcaacttctctccttcttttcctccttcaatttcctgctcccccctctctctctctctctttcttttcctccattgaagcatcctctccaagcttcttatccaaggcaccttcttggtggcaaatctccttcttccatggcttattccttagtcatatgccatgacaataaacaaatctcagggccagtcactagaatgtgtcggattttacttgccctagtaatgtaggatttttcagcccttgtattttagggcacctagactagntttgtattag

SEQ ID NO: 19830 - DNA, 245 bp, Glycine max
  unsure (1)..(245): unsure at all n locations
gaacgtcgaagaacgggtgaaacctttacgaaatttctcacggaaaacgttaccgtaaacgtttcggaagcgcctcngcttagatattcttcacggaaacaatttttccaagcaaattcgaaagagagagaagtgcctaaggggctgaaccccttgcttcttgccttccttccctatttatagcaaaatatgggaggtggttgtcgcccatctcgcccaggcgagctcatctcgcccaggcgagc

SEQ ID NO: 19831 - DNA, 273 bp, Glycine max
agcttgttctaaatcgataagattttcatgacgtttttgctttaaaataccatttccttgtaaattacctttccaaatggttgtcctcgcaggaaatgtcttccgaaaagcttttcacaaaaagatctaagaggcacgtcgcggctgaaaggaccaatgtcaccctcgagtttgatagccaccatttcaggagcgccgagcaccagcagcgcttcgaggccatcaaaggatggtcattccacagaaagagacgcgtcccgctcagggatgatg

SEQ ID NO: 19832 - DNA, 267 bp, Glycine max
actcagcttctgctgggatatttggctcacctcgacttgcctatattgtcgtcgaattgaaaggctggaggttgaatctttgtattgtatattcttgacgctcggagcttggcaacctcttcttttgatttggccatctcttggatttcatcttttatctctagttccactcatatgttctcttcattgtgttgttcctggaacaacaacctcatcgacggttcctcgacttcgacagggatcatgatgtatgtgccttatgtgagt

SEQ ID NO: 19833 - DNA, 262 bp, Glycine max
  unsure (1)..(262): unsure at all n locations
agcttaatcaatagaattttgactttgtgagattttccctggactctactaggggcaattntccttggcatccttaatcatgttcaatttgatggtaagtttacgtcttttaatccaaaaaaggaaacttggttaccatgtgagagttatttggataaatgaaaatagttttggttgttatatgcatgagtatatcgatgcttgtttgcaacaatgaattataaaaaagtccctaccacataaaaaagggcttttccatttg

SEQ ID NO: 19834 - DNA, 175 bp, Glycine max
agctttctatcttttcattggtgtattttgatctccttttggcgctctaaattgtgggaatatgctcaaatatgtggggcacatttggtttgttttcttgctcgattgcgttcaattgtgggtttgtatgggatggccctaagcctataatgcattttgaagcaatgggacatgc

SEQ ID NO: 19835 - DNA, 261 bp, Glycine max
  unsure (1)..(261): unsure at all n locations
ctttaccttctcctccataggtgtttcttcattcttctccatgtatctcctcacatgtcttgtgctaaatgtgtntaacatgattctttataatttccaccgattaatcttgctatataagccacatttgattgtctatggttcaaatatcttgttcatgttcttaaaccatgagttgtgttgagtttaggtttctctgactcttgtcttactattttntgtggctgaaacctcaaccattaaattcttacacaaacatta

SEQ ID NO: 19836 - DNA, 204 bp, Glycine max
ctaagcttggtgaagtaacccgcttctggtgtggcatgtatcggttttgttgtcaaatagtgtagctgcaaacaaaatctttagtgtctaagtacatgtgtaggatcgagtggcctcagaataattaataaggaagggcttaattaattattcctacacccttactaattaaaaatctactcttctcacgcttttactatgttg

SEQ ID NO: 19837 - DNA, 72 bp, Glycine max
agcttgaaatagaacaacggaatctatccaaatactcttatggtcataacttatcacactatagaccgattg

SEQ ID NO: 19838 - DNA, 254 bp, Glycine max
  unsure (1)..(254): unsure at all n locations
gcttacagcagattntagtaatgacccactaacctagaataaaatatcttaatgctcttaacctagggaatataaaacaacttaatggctgagtgtaactgaaatngtggcaaccaaaagtcaccctcaacagccaacaagtcagccaccatttggtctcccaaaaggctgatgcctaagttgccaattgggcccttattacaactcgaactaaacctaactatagccctcttagttgattaacccaaaacata

SEQ ID NO: 19839 - DNA, 221 bp, Glycine max
aaccagctgctctgcggccttgagacccggacggcttattttcttcagagctttctagcacgggcgggttacaacggggactgaatccctgcgtacacacttgtcgccttcaccatccccttaccgctgcgtattcaagatgcccaccatcgactacaacatgccccctgaatgcatgccctatcggatatctctcgctcggcggaatcctcggtagggca

SEQ ID NO: 19840 - DNA, 265 bp, Glycine max
agcttcgtccatgtcgccagtcaactggcttttgtggtcaatactccaagttagcaaaaaggttctacgacccatttcaaattgttcaaaggatcggacctgtagcatataaacttgacttaccttcaacctctagaatccaccctgtcttgcattggtccttactcaagccttatcactctttactgaccacaacagaaacacccatccccttgcccaatgctgatgaagatttctaacccttcctccacccctctcactgtat

SEQ ID NO: 19841 - DNA, 142 bp, Glycine max
  unsure (1)..(142): unsure at all n locations
agcttagtgctaacatctgnggccttcaacattttagcttatttaacatccctatgaagaacactttgctctgtatcctcatgaagataccgaagtgccaaagccactcttagtgctaccttgaacctgtgtgaaaatttga

SEQ ID NO: 19842 - DNA, 258 bp, Glycine max
atgtaatagaagttcttcggcttgaggaagcatagccggagcttccactcgatatgcatgatcgttcttctccttctgtgatcacgaagacacatgcacggcccacttattattctgcgccatcgctacccttcactaacagccttggtagtgttggacgttcattggaccagtcaacctttggatgcatctactttggcactaagaacatgcgcttactatgtagaactcagtccgattatgttgtgaatactcctg

SEQ ID NO: 19843 - DNA, 568 bp, Glycine max
  unsure (1)..(568): unsure at all n locations
cggagtncattttgaagattancgnacatngcnacgncgacacanaaaagantacagctctgtagatttggtcttctccagtgaatagatctatgtgttttcttttatatgcacacttgatcatcctactacgacgactgttgaatctgcggcaaatgaagacggtgagaaagacggcgaaacacctgctgtgactaccattcctataccgccaatgatgctaccaacccagctatgtcattactcattcaataaacctccttcttaaccaccatccaggtctctactaaggccattcctaaatgaaccactaagtctgcctaccgtacttgcattgaccattacctccattatctcaactctttataaatcaccaacccagtattcaattttgcacccaacatctggcgatatacacataatacggtgggtatctaactggtccatgtctactgatactcatggtgccatatactgatggtttctaactccattttgtgagatgtacagtatgcaatgtcatatcgtggtaccgtggcactcttggagcgatgccttagctatggcn

SEQ ID NO: 19844 - DNA, 342 bp, Glycine max
agcttaccaggctctcatattgctttacttctatgaagccgcatatggtgaaaggagaaaattatagttgctggaatcaaaggaaatgagactgaatgcctatgaatcctctagaatttacaatcagaaaatgaaggcgtatcatgacaagaaattgcataatcagaacttccagccaggtcaacaagactctttaactctaggcttatattggtcctaaggtaagtgaaatcgaagttgttaggacccgttgtcattaaagaagtgagaccccatggagcaattgagttggaggatcctacaagaaccatcttgaaaaaatggatactcaatggacaacac

SEQ ID NO: 19845 - DNA, 361 bp, Glycine max
agcttattgtgtaatgataatttttatgttaaccttttattctttgagcataaggcagcgatggcgactcacccaacttgctagggattgtcctgctctggcttaatattatttgatcatgctctttagaacaatatgtttgtatccattgttcaatctcatcttaattgatatctctagtcactttcatggccacttgaaaatttattaccacaatatcaaatatctatgctgctcttggcttgtttttctttagagatatattgcaatattacaacatttcaaatgtccagcagcgttcttgacagtgtactttgcttactgatgataatgttatgaacatggggcttttctggaaaag

SEQ ID NO: 19846 - DNA, 372 bp, Glycine max
agcttggagcattggacttatatgttccaatttgagggggagtgttggaattacacacattgtatggatacttgttccaataaagaatagatattaatgtacctagttagtcacatattcatgtatctaggaattcacatgcatgtacataggtactaaaacttcattaatattcttgtaaatttcacattgtatttactccctaagtttatataaatatagatcagctgagtgggttaagcactcaagcatttcacaacctttagtctcttcaatacactcaaattgaagcccaacaaaccaaaaacaatatagagaaaaaaaacactgaaaaacattaggccaacatggccaaattcccctgaaactcta

SEQ ID NO: 19847 - DNA, 74 bp, Glycine max
agcttggctgatttacttttcgtttatgaaaggctcgaagcgggtctgaaaagaggctactttgatgatcctgc

SEQ ID NO: 19848 - DNA, 112 bp, Glycine max
agcttggacattcgtgtccttgtgcgcgtgcatttcattcagtttattttgaaaaatattcatttacttttattaactccctaacatcctttctacatattacgtagccgtc

SEQ ID NO: 19849 - DNA, 273 bp, Glycine max
  unsure (1)..(273): unsure at all n locations
ctcagcttcattaccagatatacanaaggtgttacaagtgaacctatctattcctaatatgtgggccatcaaatcatcatgtgttgacagaattgatagcccatgaatctccttgggggccgtacacactccggccatggctctcgctttggctaacagacgcacgaggtcttgacttccattcaaggtcaagacgaacctatccatccacatagtcgcttcttgatgcaacgcatcaatcaccctccctcttgcttctatttcggcatacac

SEQ ID NO: 19850 - DNA, 394 bp, Glycine max
ggcgaccttaagtcacctgaggcatgcaagctttagacgaaagctcaagtgtttatatctatccattttgagacaacaaatagttgaagatgatgacctatatatattagaagctttgaagaaatagatagaaccttaatcaccaacattcaaattcttttttgtagaaagctctttgtaaattattgcaaagctcaaaagcctctcaaaacactttgagtatcttgagaggaaagactaagtgcttagattggaaatttgtctataagacgattaagaactagttagtgtgccaatcaacaaacaaatcttttgatttgtgttaaatccaccaatagcttggtagggcaagattactgggtttttggcagcttggggtaaagcttgttaatgt

SEQ ID NO: 19851 - DNA, 369 bp, Glycine max
  unsure (1)..(369): unsure at all n locations
agcttgttagttccgttccgatcttatttatctcattaattccntacaggcacaatgtcattgtccaacactatgctctctcccattctcactctctttccatgcacaagtttcctccatttcttctttctcattcacaatcttgatggtgccattctcttattcaatcgcatgctatttctctttctaggaaaatggaattcaggggtatattttgctcattcaattattccatttctttattctcgaataaaaagttatagactcagtgactctcataccgtaatctaagaaatatgaactctatttctgattctggctatactggatagggtggatattttgctcatataatttagaattcaactc

SEQ ID NO: 19852 - DNA, 386 bp, Glycine max
agcttgtccataagctctctttatatgtaggagggaatgtgcctcttcctaagggcactcttaagatcattccaatactctactggaggatccccatgaatccttcgttccctaacaagggaagtccaccaatagagggcatacccttgaaagctaagggtagccaatggaacttttctctcttcgctaatatggcggcaagcaaagagttgttcaaccttcatttcccaatctaagtaggcctcaacattatcttttccatggaaatatgggaggctaatgttaacctcttgaggccttctatccttttctcttctttgggagtgatgtttagtatgtgaactatggcgccctctataatagtcactaagttcttcacttaaact

SEQ ID NO: 19853 - DNA, 366 bp, Glycine max
  unsure (1)..(366): unsure at all n locations
agcttgtctagtatgcctagatgtttctttgtggctttaattntgcgagttaatcattgagaaatttgtactttcttacaccacatacttgtatggcatgctcttctcttcactattttatgtattttggttacacatctctatccattcctttattatatcttgctataaatgcatttttaagcttcaacatgtctttctttccagggatggaagccattggttctgtggatgacctcttggatttttcattacacataggtgagaaagatgatgattgacgacaaacctatgaaagcctgtccttcacttaactcaaaatgcggagatccatcattgtttaacccataggttcaggctgatcca

SEQ ID NO: 19854 - DNA, 265 bp, Glycine max
agctttagaagcagtcacaagtgtttttgatttatcacctccacagccaggggcaatgcttggtcttacttcagtggacagggtgtctgcgtctgacccaaagtctgctcttgcattacaaagactaagtcaagctgctgtaagcattactatttattcagaagaccttactcattttttgggcttcggcacccaataaaaatgttgaaataatagtttttttttttggacacttggtgcttttaaggatgggttcttggggaaa

SEQ ID NO: 19855 - DNA, 339 bp, Glycine max
  unsure (1)..(339): unsure at all n locations
gagtcacctgcagcatgcaagctggtanccccgtattttttatcatagacttgctcagcataatcagataacgcatcaaacacaacacttaacatttatattttttcatctaattaaaataattaggagtcctgattcatctgaagacataaatgtctctttacttaacaaaaaagaaggaacaaaagcaccaaagaagaagttgatgaatttgtagaagcatatgttgtatgaagctnttgatgatgccaaaaagatgaaagctattcaagattgatcaaagtcaagatcaaggattcaagagaaacgaataaccattagtccattgtatgttaaaag

SEQ ID NO: 19856 - DNA, 380 bp, Glycine max
  unsure (1)..(380): unsure at all n locations
agcttttatggaagttttatcttttagcttcaatggngattgtccaccatggagatgctggggaagataaaggagaagaggtgagaggaggtgccatccactagggaataagccatggaagaaggagcttcaccaccaagagagtaccttggataagaagcttaaagaggaagattcactggaggaaaagaaagagagagaaaggggggagcatgaaattgaaggaggaaaagagggagagaagttgaactttgaagtgtgtctcacaagactctcattcaccaaagttacaacaagtgttacacgtgcttctatttacaacataaggtagtttcttgaaaaactttcttgagaagctagagcttagctacacacaccca

SEQ ID NO: 19857 - DNA, 284 bp, Glycine max
ctcgggaacccggagctactgttgtcttttaccccgttctaaatcactttcttttgtatttttgctacgtcgacttcaattctacatcatttcttcttttataaccttcttatctatatcttttagtttgaagtcgactccaatttcaaccatcttactcttttactactacgtttctcatctttttacttacttatgacttatgatcagtaattgttaccgacaattttttattaacttttatcctctttcttcattttaattattatttatataatttgtaa

SEQ ID NO: 19858 - DNA, 358 bp, Glycine max
agctgtaacaccagtaatggtaattactctttccgcggcccttggatgtccagtttgaccattctggcctccaccatttcactctttcttgggacgtgaacaatctctttgagtgtgacccttttgaccataattaaatcatgtcgcgcctatttcaagacaattcgaggagatgtgccctggcttaccacatctgtaacaaatgataagagcggtgaatgttttgggcttgctaccactaccacctgcatatcccctagcaacagtcctatagatgtcatggccgttaccatattgcttacggggtaaccaatatggtattgctcaatggtgaggcccatttcttttgttcctgatt

SEQ ID NO: 19859 - DNA, 394 bp, Glycine max
  unsure (1)..(394): unsure at all n locations
ccccgccccaagggggatgaggaaacctaccatttcccaagcaagcacggtgttgagctgcagccccganacacgcccaccaacgagaggagcgaagaggttttcaccaccgacggaccgccgaaaaacaacagggaaggacacggaggaccaacccacgccaaaccaaaggcgacccccaggagaaaaagggaagaagggaccaccgaaaacaaaaagacggcaaacccaacgagcacaaaatcccaaaccaatctcatcaccgatctcatactcccaaggaccatacggcgcccgaggaaaaaggggaagcgcggggaaaggaggccccacaaaaacccgaccacaaaaaaacccaattaaacacggactaaaaacaccgaaaaacaccccg

SEQ ID NO: 19860 - DNA, 358 bp, Glycine max
agctgggacttagagtttttcatttcttgcttactttttattaactatataattatttctgattctttttagttttttttaaacctttttattaaatgtaaaaaacacgtttcaagaatcactaaacgtatgaatcaactaacgtaaaattattttaacttaattagaggtttcaaattcaagtcttatatatacaattatgataaatatttgaagaaaaaaatttgatatttataatagtcctacctcaattcaaatatgattgctcccctgtagaccagacatgtgatttataaaaaaaacacggctcacgacttttttttggtgaaagctctttaatatttattaactataatat

SEQ ID NO: 19861 - DNA, 255 bp, Glycine max
atacagaatacagatcccttctgcataatgggcaagaaccatgtctgaagagccacttatctatgcaagggaggtgaaacatgtgatggcaatgaggcaaacttcttactgtctctccaagcataaagtcctatatattgcacaaatgcacaaatttcatatatcacaatacacaatcttagaaaacatatagttcaagggatacacatctagtggtattgacgatgtaaagtgtaaaactaacctgcagcaaac

SEQ ID NO: 19862 - DNA, 331 bp, Glycine max
agccttgagtttcaatcccaattttccataaaccttgacccaaggcgagaacgccaatccttccctcagaagaaaataaaaagagaaaatccccaatcgaagagtgggagaaaggaaaaaaagaaaggaaattcccgaccaaaagagccggaggaaacagaactagaaaatccctaaccgaagagtgggagaaagcaaaaaaaaaaaaacatcctgatccaaagatcggaagaaaacagaagaaatattcagaaaggtctttggaccagacaacatctggacaaatatagaggtgtcaccaggcaaacaagaaaagaaaggaaaccccgac

SEQ ID NO: 19863 - DNA, 257 bp, Glycine max
gcatatggcgaaccggaaaattggacttccgccacccaatcttctcagatgctttggctccgatctaacaccagaaatccgacgcgaagtctaggtgtagcaacctctctccttccctcaggccaccgaccttgcccggctgcaggaggacaaaaattaatgatcgtcgaaagggctcccaacaaacccatttttcaagtcctccacaacaccatgcccaatcttttgcccaactaatcttcccaaaaccaaaaccc

SEQ ID NO: 19864 - DNA, 315 bp, Glycine max
agcttcacggttcgtcaaagatcttctctttttcacctaatgagtgagtcttttttagtttctttggttgttcctggtttctaaatttgtttatttgtttttggcctttttttttgttttgcgtgtgttgttatttgttatttttataatcgtgtagattgtgccttgttgttgttatttggagtggtcttttagcttatatggtcttggccctgtctggttttggttttatcattggtttgtttttattgcttggtattgcgactgcaagaaactgattacgtaaagctcctctttgccctttgatgctttttt

SEQ ID NO: 19865 - DNA, 338 bp, Glycine max
agcttgtagaatggctagacatgattcatgtcagggtttggtttggttcaaggataaaagggatgccccacattatttccatgacacaaatgcaaaaatgatgatttggaaactttatgcaaaactggtcatgcatgcacctatgtggacactcaagtgtcaaatttttatggtcatgtgatgctagggctcaggattcatttcctctattttagtcaacccaacgtttccaaaatatgttcttttatcaatttgtgcattcatccgagtccattttgggcgtctgggaaaattttcacagcattcacccttcaggtgtatacacatttttttaaaaa

SEQ ID NO: 19866 - DNA, 121 bp, Glycine max
aatgcactaagcaatcactacgcatggcttcatactcgatggtggaggactcatgactgaatatgcaattcatggggctcctagagagggtgagaatggagaattgcactaaatgttagtg

SEQ ID NO: 19867 - DNA, 297 bp, Glycine max
agctttaacaaaagtcttcacaatttatcttttcacagcagaaccctagcaagaatacccatcatatctgccaaaaccccatacccacgaagatcaaaggagaaagaagtccacccaaacctgaaattttcgaagtcctactcgtagccacgcacttcacgacccagaaaatgctctcctttcacgatttggggcataaatgagcaccaaaggttgaatctttgtgtggagcttcaatggtgaatggggggaggaggaaaagcatcctgagggaagaggagaaaaaacttttgaaaa

SEQ ID NO: 19868 - DNA, 262 bp, Glycine max
  unsure (1)..(262): unsure at all n locations
cacctgaggcatgcaagcttgtgcttgtgagaacntggattttctattagttatgtcttactgcgagcgcccaaaatattcttttagttttattaattgttcctatgaaactctgtatgttttcaatgtcgtatggctttggagattccactttttcgcaaattccactctcttgcgcatcaattcaaaattccaattaaatagctttgcggtgtgttgttcaatgattcaattaatgattgagtttgggtcttgatttttg

SEQ ID NO: 19869 - DNA, 147 bp, Glycine max
  unsure (1)..(147): unsure at all n locations
atatctatangatcagagagagcttaacatgaggcatatgagatggttatagttccttaacgagtaggattttgagcttagctatcacccatgtaaagctaatgtagtagctgatgccttgagtaggaaatcccttcatgtgcctgc

SEQ ID NO: 19870 - DNA, 380 bp, Glycine max
agcttcatcctcagatttctcttgttggactagactcagcttaaatagcttacgaaagtttagactaatttagcctaagctttatcctcatatccctcttgttggattagacttagaccaaacatcattattgtaatagcatatttgaaaccaaaacttaatccgcagatccctcatttaagactaagtttcaattctacttcatccaagttctaaggcaacaatacatttccaaatgctaaagtcacctaaccaggcacacaaatggttgatcagaccaagagcatacacaatttaagcactaaaagaagcattgaacacaagaaacacaatcaattagatattaaagtaattacatcagatgttctttagaaatcccc

SEQ ID NO: 19871 - DNA, 334 bp, Glycine max
agcttggctgatataattttcacttaccatttgagcaaagcgagcctgacaagaggcaaatttaatcatgctgcttgaacaaatgagaaaactggtgcaaataaagagggggagaacgcataagaaacccatgctgcgactgccattcctatacgggcaagtttcccaccaacccaacaatggcattgctcaaccaataacaaccgcttctcttacctaccacccagttatccacaaaggccattcctaaatcaaccacaaaacccatcttccacacaaccaatgctaagcaccacctttagcacaaaccaaaacaccaaccaaggagggaatt

SEQ ID NO: 19872 - DNA, 290 bp, Glycine max
agctttgaaattgaattttaactttgcgaagatcgatgaacgatgaagaacgaacgaagaatgacgaataacgttagcagaattgatcacagaaacgtcacgaaatctgatagctaaaggggctgaaccccttcccctcagcctcctccgccattttatagccaaaataggggaggaggttgtcacccagctcacccaggtgagctggtgcttccaccagaaaaatcctgatgggcccaaggcttgaggaacaccccttaattgataattcccccccattttgagttttt

SEQ ID NO: 19873 - DNA, 170 bp, Glycine max
atcaggcacgcacagtcacacccaagataagcaccaactagcaccaatggggacaaccagacaacaacaggaacctgaagaacactaacaaagaacacatccacacaatcaaacaatccccaacgttctctaaaaacccacatggaggtaactcacccttacgaaaaccc

SEQ ID NO: 19874 - DNA, 333 bp, Glycine max
agctatgaattcattctatgcacttttaggggtcgatccttgctttgcatgtcttcatgttaattcttctaccatcagagatctttgactttgatttaagtgagtttcgaccgagtgtttaaaccgaaatctcacttaatcaatgttaaaacgaatttccaccgagcgtttgtgttgtaatctcgctcaatcaccgttagaatgatattcagctgatcatttgtgctataaccgcggctaatcatcaaaaaaataactttcatccggtcgttcactttgaaagatctcttttaatgagttggaaaataccaggtgaaaccaaaactaaatcac

SEQ ID NO: 19875 - DNA, 354 bp, Glycine max
  unsure (1)..(354): unsure at all n locations
tactaagctcacaggagttcataatgacatacanaataacccttatttgatactctaaggatccctacacatgtctcatttaacccannatgcaataaactcatcccttatctctaagcgggctcaccggtgcagctggcaaggatatcaacgtctctagtggttccctaagatatctgaaattgttcctctgtttgctttgatagggtttccaagtgttagagagaaggagaagaaattggagccttcaattcactgtatatgttcaatgagaaattctccctccatagacattactttacaaatccaacactagacatgtgttgaaaatagttccaaaggtggtgtccaaat

SEQ ID NO: 19876 - DNA, 384 bp, Glycine max
  unsure (1)..(384): unsure at all n locations
agcttgtacacgccatatnagcatgattaactactatgtgagtaatnnattntctattttccatttttcttgtcaacactcatgcctcgatatccttaggaccccactaattatcccttttcttttgccttgcaaagcaatttgaacgccttttccagtttacccgaaggattgaggacttgatgttcactgttgcacctgaagaggtttgtgtgtataatgctgtatttttaatcttccaaaggttcctgctatacagcatctagtcatgtctagaattctacttatcaaacaatatggttgcaatgtttcttagtttctctggttgaaattatgaggttctagatatagatggggtgagggattaaagagaatgaaacattg

SEQ ID NO: 19877 - DNA, 102 bp, Glycine max
gatcgttagaccacgcacagcgcctttttttgacaaaaacccgacatgcggcactgaatgtggtcctctaggcaagcgcaaggaagacgcaactatcgaccg

SEQ ID NO: 19878 - DNA, 389 bp, Glycine max
agcttacaaatctattttaagtcctagccctttaacgaaataaaataaaatttggacaagataagataagattggataaaataaaatctagatgaaataaaatatggataagataagatttgataaaataaaattgtctgttctcttcaagtccaagcccaattatggattcaagcctaattgtttataattctcttgaaattaaattaaaaacacaaaattagtcaagtaggcccaaatgataaaactacataattaatttgacaattaaggctaatcaataattaaaatggtgacaaaaaaggttaagaaataggagaaaataatgacacatcacccattaattaacttccattaaatatgtttgtagaatttagagagagaaaata

SEQ ID NO: 19879 - DNA, 541 bp, Glycine max
  unsure (1)..(541): unsure at all n locations
aatgacgctagcgcatggcacacgccatgcncagctnacccttcgtccaaacatagatcaaacctatctacttgaaagttctcatgctctagccctcaccacgtgtctcgcacctctatatgccatctccttccttcctatatcaatcccggtagctagccattatatgatcagcattgtagctcatgctatcgagataatatagcatgtgttgacccttatctatacatgctatgcaactgcatctatatctcttcatacaatagtgaatactcaacaaatatcatggctgatgtctgtactgtcatcagatagtccgtcattatctacgaccactaaatcggtctncatcatgtacatctctatactcttcacttctacctcttaacaacaatacctatagccttgaggcatgtctatggtgtaccgtgtgagggtctctgccgtgcatagccatatcatctatccatgagcatgtaaccttgtattctcaacacccacttactcttttatgttgttcatatgcaattatattatgtcc

SEQ ID NO: 19880 - DNA, 314 bp, Glycine max
  unsure (1)..(314): unsure at all n locations
agcttcaaaccacaacaacacaaattctaggtatcccaaacccctcaatttgatggattttcatggtttgagaagtgaaattgagaatgaggtaaatttgaagcaaactctcacctcacacaagtctataagtactaacgtaacaactcaaacgatatgtatgcacaaaacaaaagtcaatcaaaacgaaacaaacgttagcccctcagttaaacaaaaataaaatgatatgtaacagataaaagaggaaacataanaagagaatatggatctagggatctcccaatcatgtggctccgcatgccacccggact

SEQ ID NO: 19881 - DNA, 116 bp, Glycine max
tgaaaagcatggtagagaactgagcgagaagaggaagccatcctgagagcatgagatgagtctgtgagttgatgtgatgctctacatgtggaggagacatgcccactacttgcatt

SEQ ID NO: 19882 - DNA, 96 bp, Glycine max
cacaaaccgagaggagacacgggagccatattaaaccccccccgaccgcggccaggcacctccacaccccaagggcatagggcgcaacacgacaga

SEQ ID NO: 19883 - DNA, 287 bp, Glycine max
  unsure (1)..(287): unsure at all n locations
actaagcctaaagaggagatatgtctgtttagagacagcatatacctgattgtatgatgtttatatatactagaagccttgaagacatgaagcatgtacttgaagcactcattatttcattctttgtgtaaaaagctctctaagttaattcttgtaaagtttanaaaaactcaaaatacttcgttcatcttgagagaaaagactaagtgttgaaattatttatccgtctgtaagacaatatattgtagtcattgtgtaatcaaaccaacaaatctttctatttgtgt

SEQ ID NO: 19884 - DNA, 370 bp, Glycine max
  unsure (1)..(370): unsure at all n locations
agcttatatacaaagaggcaagaattatggactttaactaaccncgcggagctaactaacttgtcccaaacttgttaagcatgctaagagttactgcgcagatcacgacaacttacattcttgtctaaggaacgacaatatctctttaacaaaagttgtttaacaattttatatataccacatgtcgatatatataactctcttaaatatgtcctggacaaaatgcctaaaattgccccgaacgattggatcgggaccatgccagaataaaccaatcccactgagaaaacccattatgccttgatcttgcgtccctgggtactccccccaactgactgcaactcctattcgtcttttatatctacggata

SEQ ID NO: 19885 - DNA, 388 bp, Glycine max
  unsure (1)..(388): unsure at all n locations
tgactaagtttcttgtagaatctgtgatgttagccattccagaaccacattccaggaagaaaacaacatgcaaggataataaagccatgaaaatagatgcccctcagagttttgtcacctttgtttatcaaaccaaagtagtagaattgttacgaagcataacagtttcatggtgcaaggaccccatagatcatgtcctttccatgagcgtcgacaacactttggaagagaacaagtacacctgcaagattgatttgggatccggacagtcttgtggtaaaaagggtcttagatcatttgatatagcatgtgcaagagtagacattctntgggatcttcggcgagcagaaatcttcgctacaagtccacagccttgttcaggtattac

SEQ ID NO: 19886 - DNA, 79 bp, Glycine max
aaaaaattggtttaaaaaaattgagtgtgttttacaaggtcaaagccatatatggatgattgaggacttgatgataact

SEQ ID NO: 19887 - DNA, 269 bp, Glycine max
gacaagactatacgaggtatcttccttgggtatagcaatatctctaagggctaccgtgtctacaactggcaaactaatatactcgtcatcagtcgagatgttgtagttgatgagtgcgcttcttggaattgggatgaataacaagtggagaagaacgttcttatgcccgctcaactacctcaagaagaagctgaggaagaagacccatgtgaaccaccttcaccttcaccgcatgaacaagatcaagaactatcatcgcttgagtctac

SEQ ID NO: 19888 - DNA, 344 bp, Glycine max
  unsure (1)..(344): unsure at all n locations
agcttctgacagnagtgatcataagattataattcttcagatgggcggcgagcgctgaaggcagtttaaatctgacttgactaggaaatgggcacttgcagtcgacaaggacggtgcggacgacattgtctgtgaaaaatatggcattagcaaggagaaatggactcagttttgtcagacccacagagacccctcatgggaggtatgtactttggcattttaagtggtttccacaacaaaatcacttcttataatttaatggaataatcattttcattaatggtaaacttttgcaagaagtaccgaaaaaggcacaagccttccagaaacaaaacactgccccc

SEQ ID NO: 19889 - DNA, 211 bp, Glycine max
  unsure (1)..(211): unsure at all n locations
gcaacaaaataattaagctgaaattgtctgatactgtaatgtatntgagtaacaacatttataaaaacataaaagaaataaacaaactaaaagtcgcgtgcatggtctatgtgcattatcttcggtcggaaaggacctcgtcatcccatataaacttctttcttaatacaacttcacatacgtgttcntcaaatctgaagaacaatattac

SEQ ID NO: 19890 - DNA, 241 bp, Glycine max
agcttgttggatggatatgttattatcttgttcgagggacctaagatgtctattttcttgcatgagtagttatttatgtatggttttatatttcttacgcactatggctttatgttgatgccaaagggggagagaaaaatggatattctggaaatcaagatattatatttgcaaaactgtaaaattaagtataaattcaaaaagaaagggggtcaaaggttcattttattggtaaacaaca

SEQ ID NO: 19891 - DNA, 285 bp, Glycine max
caacatcaaaaaggccaaagtgcatcaaacatgaataactcaaaacatacacaaagcataatggtgtaaacaaacatcaatatggctcaaacatacatatagaaaacatgaatcaaaccaaattgaaacgcacaccacgtagttagatatcacaaaccatcaacatcaagttcaggcgtactaagaagatatctaaaaaaacactaagtgctcaaatgtgataataatatagccaaatacacggctagaaatcaaaatactaatcacaatagtaatgtctaaact

SEQ ID NO: 19892 - DNA, 248 bp, Glycine max
  unsure (1)..(248): unsure at all n locations
agcttccatcaagtggtatcagagtatcaaaagcttcaagtaggtgctccttaaacctctattaattttcaggtttaccttctcctccattggtgnttcttcatttttctccatgtatctcctcacatgtcttgtgctgaatgttgtgaacatgggttttttagaatttccactgactaaacttgctatagaagctagatttgattttctatggttcaaattccttgntcttgntcttaaaccatgaa

SEQ ID NO: 19893 - DNA, 319 bp, Glycine max
  unsure (1)..(319): unsure at all n locations
cattctatttctatctaagaaccaaattattaactccattcaaaatgggctttgttactgtcaactatttgagggccagatgaatcatgttccacaaatcttatgtcactgttatagtagttcatttcagttgtatataatttccctgtgatttgctcatgatgtgatatgtgtatttgaataaattcttatgagcttgctcaactcatttgcaattctttntgtttgaagtccgtgaatcataaaattaatgtttgtaatattattgtctggctaaatgcagtgcatacagagcactatacattctcaactggatcta

SEQ ID NO: 19894 - DNA, 309 bp, Glycine max
  unsure (1)..(309): unsure at all n locations
agcttggtttattttatttgatccttattgnaattacactctacaatgcaacattgatttagtatgtatttgaagtgatacaatgaataggtgttaagtgccaaacttgattacaatatgtattctatcatgcctctcttggcttacaagtattctctaggtcacttctagcacaacccttagagtcccatgaatttaagaacactcaagtattattttatcattgagctactcttggctttctcanacaatcgtttgaaatagaatcagagattctaacactcacagagtgtgtntacagtgaaaatc

SEQ ID NO: 19895 - DNA, 320 bp, Glycine max
  unsure (1)..(320): unsure at all n locations
ttggagttcaaaagactctgtacatttctcttggcaaaaaatgaaacatgatgttatcaagtntntttctaattgcattgtgtgtcataaggcaaagttcaaagtcatgcatcatggtttgcatactccattgtcaattcctacctccccttggacctacatttccatagattntgtgcttgctcttccaaggtccaagagggacaaggattccgatttcttggttgtgataagtttccaagatggcacacttcattccatgtcataaggtggatgatgnctgtcatgtagcggatctgttcttcacagaagtaatgtgt

SEQ ID NO: 19896 - DNA, 342 bp, Glycine max
  unsure (1)..(342): unsure at all n locations
agcttcatgattactggtcaggcttatctaatgnatattagntggtggaatatacaatgctaacaaaaagtaggatttaatagttaaaggaaaatggtacgaaatgtaatttcaccattattcaatttataattctgaaaggccaaccattagttcattacaaagtaattacatgtttttccgtaacaagaaagttgcttggctccaacagattttgtggtagagtcatttcatcatacaggttgcgggcaacaaaaataaaacaaaagctttcaacccacaaacatcattaattcacacaatctaaccatttaatgtgcttcatttgaaattaaacgaata

SEQ ID NO: 19897 - DNA, 131 bp, Glycine max
  unsure (1)..(131): unsure at all n locations
ggagagtgtgaatgaaaatgatgaatcagcattgtcattggtggtagtctgagcacacacnttgcttatcctgcggttccatagtttatgactagttaaactgtgatacactgccaagtttacctctcaca

SEQ ID NO: 19898 - DNA, 586 bp, Glycine max
  unsure (1)..(586): unsure at all n locations
cgggtncgtttgtcgtccttgnacctgctacanacanaccaagctgtagaagaccaacgagggctcattnaagctctacagagtgttgtctgtagttattggcacccacatctataatggactcgcagaagcaaaggttggcctctgtgctctgacgcccaaacaggtgatgaccaagatcatgaacgtgtctcttatttctatctgcagcgatgttatatccattgatactagcctcgataggttcagtcactctatctgttcagagggtacaatgtcctgacatttcattgttcatgtttcccatatgatagaacatatgtgctcaccatctcaattaatcaagcgcgataacgcaccttatgtgcatattatctctactacaacgtattntctcaccatacactaacctcaatctatgcgtccgtgaatataactctaatagcgatggcataatcgtatctagacctggatgcatcgattgttacactcactatttgccatctcctcgaatatatcgctgaacactacaatccttcactcttatatcccttactacaacaccaactatgtctagtgcaattct

SEQ ID NO: 19899 - DNA, 524 bp, Glycine max
  unsure (1)..(524): unsure at all n locations
cggtancaattgatgccttatacntngtcananacacancnaagacnggccacaatagttgtactgttntntcatcatgataatgaacattgttcagttttttttattccanattaggatctagggattgtatacttctataggtctactcaagatgaagtcacattgatatgccagttccttatacattattgataatcgaatgtgacgatatccgagtgttcatatgcgactcttttacattaggcgcactagcgcatgtatcgtccttacaaatgcattctctcaacanaaacaaggtaccatcttatccttccgctataagtccttacacatatctgatcctgacgaactaatactcgtaacatcgctccataagacacaaattatgaccttcgctgtggatgatccatcaatcagcatatgataaactttatccttctaattacacagatttctatcaaatccaatctctgtgaatgttacatatagctcctctcatccgctgacatgttctcatggcg

SEQ ID NO: 19900 - DNA, 252 bp, Glycine max
  unsure (1)..(252): unsure at all n locations
actctnccttagggaatactttcttctcttcatcatgtttattctctgttacatctctactcctctatcggagcctatacccctttgctagtgtaaggcccgctaagactatgagaggctaaactcttagttatggcctgacagaccctaatagccaaaagatgtattgtacactttatatttatcagtgccaacagtgttttctttctatatacgttcttaactttatttcatgcatgattcgttcttgca

SEQ ID NO: 19901 - DNA, 121 bp, Glycine max
acccattcatggcctgtgttccgcaacaattggaagagacatagatgaagatcttacttcagaaatggagttccttgcgctgtcattccctacttaacatcttaaactctattaataaatc

SEQ ID NO: 19902 - DNA, 283 bp, Glycine max
  unsure (1)..(283): unsure at all n locations
cctcagacaaagatgattcttgatgcctcaactgtggtactatgatgtgtgagagctcgaaggaagcaatagttatcattgactccattccagccagtgactatcagagtcaccatgatatggctatgattcaaagaaaaggtataatggagcatgatactaagaatgcgatgctgtcttagaacaaacctttgactcagctaatagaggccttaaccaattagataggcctactatctcaacaattncaacancgtggatcacatcaaacacactatgctca

SEQ ID NO: 19903 - DNA, 187 bp, Glycine max
ggcctttacctggggggataaacaaaacaagcctctggttgctccaagaaaaccttactaaggaccctgctttaactcaccctgctttcctaaaacttttgagctagaatgtgatgcccctggatgggagcaggagccggattggtacagggggggccccctttggcgtattttagaggaaaaactt

SEQ ID NO: 19904 - DNA, 548 bp, Glycine max
  unsure (1)..(548): unsure at all n locations
nttgaaaccctgaatgttcgntntgagacnnnnananntncagcaagcangccagccnnanangnnggtgtacaagacggtgtagcgngtttctgttagncacacaaggcnatataaaccacagcgtgactaanaacacgggggaataaccccgccagaacacacaaggccgacaggagccgacgctctctacgttctctctatcacttntcgactatctctttctaagatgggatcaaagcctatcctaggtccattcaaagggccacccaccatgtgatcctacatgttgaatcaagatcctccttactcttcatgtgtgatctggcaactcaccatntaatttcaccacttctatatgcaccatttcaagctcttgccttaaccatcaattgtctttgaaatcatcttcacgtgtcattttctgtcttgccttcgatataatctgatttgatcgagtctggctggtgaagactccctatttgctgctctaaangttctgacttgccgtgaatatctatggcacaagatgtatgttgagaattccg

SEQ ID NO: 19905 - DNA, 585 bp, Glycine max
  unsure (1)..(585): unsure at all n locations
ctcgactttgattgacgtngctagtancgnncnncnnnnnnncnnaagcnngccncnagaggtccaggaaagacaaggcggccgaaagatcnagtanncttcccggagtacgacagtcaccgctttatgagcgttgtacaccagcagcgcttctaagccatcaagggatggtcgtttcttcgggagcgacgcgtccagctcatggacgacgagtatacttgatttcangaggaaatanggcgccggctgtgggcaccactggttactcccatggccaagtatgatccacaaatagttcttgagttttatgccaatgctttgccaacagaggagggcgtgcgtgacatgagatcctnggttangggttagtggattccgttcgatgccgacgctatcagccagctcctgtgatattctattgtatttgaagaagcgcatgaatgccagtattgtcaaacgatgaaccgtgcttatgtgttcgatgatgaggccattagcccagcttctatgtatacctgtgcangatttttccngactgctgctgaaacnggtcggatcatctcaccacatgacaccctgctcaan

SEQ ID NO: 19906 - DNA, 221 bp, Glycine max
agcttctatttataggttcactcctattttctctacaattgcatcacctttcaatgagctggtgaagaagaatgtggcatttacctggggtgaaaaacaagatcaagcctttgctttgctcaaagaaaagcttactaaggcacctgttctagctcttcctgacttttctaaaacttttgagctagaatgtgatgcccctggagtgggagttggaacttgat

SEQ ID NO: 19907 - DNA, 368 bp, Glycine max
  unsure (1)..(368): unsure at all n locations
gctctctcaagagagcttctcaaggaagctacctatttctttaacagatgcatgtgtgacactcgttgtgactttgatgaatgatagtcttgttagacacaactcagagttcaatctctctccctctatcttcgttcaatttcatgctcccccctttctctatctctccctctgtcgttcctccattgaagcatgctctgcaagcttcttatccaaggctcatcttggtggtgaagctccttcttccatggcttattccctagtggatggtggctgcctctacctcttatcctttgtcttccactgcctctccatggtggaagatcaccatataaggacctcantgagctcaaagaccagcctcatag

SEQ ID NO: 19908 - DNA, 472 bp, Glycine max
  unsure (1)..(472): unsure at all n locations
gcgcgaagcacccaaggaaagaggaggaaaagaaagcacctcaactnancgaaaaaagagggnaatgaatcgatactgcanaacncnnnnnnnnnnagnaannaagnggacaaggaagaagggaattttagtgaagaaaaagaagggaaggaggtgaaggaaaggaagggaaagaagggaagaagagaggggaggggagaaacaaagaaaacaacgaagaagggaaggaagaaggaaggaagaacagaggaaagaagagaaggaggagggagagagagaaagagaaagaaaagaggaaggaaagcaaaataaactatcgacacaatcaaaaatgacctacaaagaaagagaggagggaggggggaagggacgaaaaagaaaaggaaggaaggaagaaagggggggaaggaaaaaagagaaggaaagaacgaaagaaaaacattacgacaccaacgaagcatagagaggacag

SEQ ID NO: 19909 - DNA, 462 bp, Glycine max
  unsure (1)..(462): unsure at all n locations
nttctttctgatcatagnnactgcgnncntngcanggncncnggcgatnctntanagnccacctgcangcatgcgaagcccccatttattngtttctctcttaanncccctacaaacggcgtcaccctttcaatgagtctggtgcaataacaatggtggcatttacctggggtgaaaaacaagaaccacgcctttgctgttgctcaaagataagcttacttaagcacctggtcctagctcttcttgactttccttaaactctttgactataatgagatgcccttgaatgggagctggagctgtattggttcaaggggggcaccctcttgcctattttaggggaaaaattccttgggcccccctcaactacccccctcatgaaaaagagctttttgccttaaataaagcccctcctacatggggacactacccttgttcccagggattccccttcttagggcg

SEQ ID NO: 19910 - DNA, 150 bp, Glycine max
  unsure (1)..(150): unsure at all n locations
accacnaaaacgacgagaaggagcagaaccacttgaacacacgaaccggccaaacccgagccacgaagggagggcggaaagaaaaaaaacgacaacaagaccgcagcaaggaaaacaaacaccaaaaaagggaaaggcaaagacaaaacg

SEQ ID NO: 19911 - DNA, 471 bp, Glycine max
  unsure (1)..(471): unsure at all n locations
aacgcacaatgaaagaagaaaagacgaagagaaacaacaaaaaaagaacgttgaatcgacctgcagacnccnnnnnnngggnnnagaangnaagaaaggaagttttaagaaagaaanngaaagaaggggagtggagggaaagaaggaagaaagagaaaggaaggggagagagagaaggagatgaagaaaaaagaaaaaagagaaaaaaagaaaggaaggaagggagggaagaagggaagatgggatggaagaaggagaagaaaggaaggaagaggaagaaggaagggaaaaatgaaataaaggaanttttgaaatantaaataaaagaaanttaaagatntaagaagaaagggaaggagggaagaaagaaaggaaaggaagaaaggagagaggagagaaaggaaaggaaaaaaggaaaggaaagaagaaagaaaggaaagaaaagaaacaaaagaagagaaggagagaagg

SEQ ID NO: 19912 - DNA, 316 bp, Glycine max
  unsure (1)..(316): unsure at all n locations
ctaagctattgataactcctctgttcttatggcggatgtatttatattttgcttataaagactattaaanaatgtgtagaacctttcattttctcaaagtgttataagacatgttaattagtaatggagaacaaatttgtctttggcatgatgtttggattgaaaatgatagtctaaaatatttgttcctccgttatttcaaatcatttggcataaatgagagatctctctcatgtgtttatatttctccatttctcaatagatcttgttaagctaaatcaactcacgatattctatcacattcttagttgtagtc

SEQ ID NO: 19913 - DNA, 274 bp, Glycine max
agcttaacggtgatcacgagcagtcctatgatcacctgttctacttgtgaaagtcacccctaagaacccataataagatctgctaaacaacttatgacatatctgaagatacatgtacatgcataagaatataagcattaccactacaccaacaagtaccagaatgggactcattccactccattaatgcagataatgcatcagggaagcctaagtattgttagatagacttatgcttaataaacctattgcaaccagttacttatattaaaag

SEQ ID NO: 19914 - DNA, 352 bp, Glycine max
  unsure (1)..(352): unsure at all n locations
gcatgcaagctggtgcaaagcaagccaccccttcatcttatctctagcangcancgnatgagggtctcgtgctttgtcacggcaagccggaaggtccatatcaccttcttaattgtacacatggggcactgcgcccccaaatgcgcaagtaagaagagataattctccgggctctcgtgtccgtaaaatgctttcatatcatgcatcgcataagcatctcttcataaacatataatggacatatcctggatttgtccgtatcatattccggctcacattttgatgaagtatgcatcatcagcatacgcgtccacaaactttttgatcagcaaaatgcctacctattggttca

SEQ ID NO: 19915 - DNA, 192 bp, Glycine max
ggaaaggaagagaatttgaggacaagaggaggagaaaaggaaaaaaggagagagagaggaaaaaagagaaggagagaaggagaaaagaggagagaagaagagggaaaaggagaggaagagaacaaaaaaaagttaacaagaagagcaaaaaaaaacaagacacaaaaggaggagaagagaggagagaaaaaa

SEQ ID NO: 19916 - DNA, 521 bp, Glycine max
  unsure (1)..(521): unsure at all n locations
atgtntnnnaaatgaagcctaggtaacgttgcacannccacacncaagcnngagaanggctcgacatgatacatgncagggctcggtatggatatatgattttatgtatgcnccacactattatcatgacacagatgctaaaatgatgatttggagattctatgccagactgggcatgcatgcacctatgtggacactcaagagtaaatttctaagtcatgtgagctgggctaagactaattctttatttaaatcacccataggtccaaaatgtctctatccttcttgctacatccaatccattcaagcctctggaaattcaactttaccccttcgatagaccatctgctaaattatcctatcataatatcttatattaactgcgcattagtctttctgagctgtcgtctttagcaaactctctatcccttcctaatctttcttcaatactcatttcgtttcgtccgcagagtcactccttgaacgggtactgtactctatgagtgtttataagctatccc

SEQ ID NO: 19917 - DNA, 347 bp, Glycine max
cggtaccaccatcttctgaagaacccgtatttgttctatcatgattcatcgcgcgcgcatggaaggcaactcactgtctatcctccccttatgcatatctcggagattcagctctcttacacaatctgtgctgttctgtcgagcctatagatggctatctgctaaggagtacatacggcttcagatggatagaaaggtcaattatatataatacgctgcccaaaaatcacctcaatactccctaaattaacttctctcccccttcccgctcacttcaggattctcgtatgaccctgcctaacaagccgccttagtagaaatatctggccagacactttttcttagct

SEQ ID NO: 19918 - DNA, 392 bp, Glycine max
  unsure (1)..(392): unsure at all n locations
agaagaaagagaagaatgggagaaagtagacgaaaaagggaaaaaaggatannggaanaatgagcgaactgaagtcnannnnnncagngaaagaaagnagaggagggagagtggattatttggaaaggaggaggaaagagaagaagagaaaaaaagaaaagaaaaaagagaagaaaaaggaagagaggaaaaaaagaaaagagagaagaaaaagaaaaaagaaaaaatgaaaaggaaaaaagaagagaaagaaagaaaagaagagaagagaaagaggagagaggaaagaagaaaaaaaaaaaagaagagaagaaggaaaaagaagaagaagaaaaggagaaagagaaaagaaaaaaaagaagaaaaaaaaaaaaaagaaagaaaagaaagaa

SEQ ID NO: 19919 - DNA, 574 bp, Glycine max
  unsure (1)..(574): unsure at all n locations
nttgaccccgatggacgntctagtaacgngcnnccnnnnnnngnnnagctngccctgccttntcctctaanggggaaaggagggaagaactctttttgttaaccctcctgcggtctgagattcactaaagattagtgagacaaattgtctacgtgacgaatatcaaagccgaggcgcttctataaagcttccgtgacggctccgtgggcgatatcacgaagatatcaaccaggcttagtcgatcttcataatacttctgtctccaaccggggagagcctgaaatcgaatattgcaattcaatctatgtgtccttacggggcctcatcagatcatcgtgcttgtattaccattgcatatacttatcgtagcccgctttgacgtgctatagtcatgtattcaagacagtttctcgcctgatcaaacattaaatacatatccaccatcattcatatcgaacatccttcaattctgttaaatgaatgccaccgtctggcatgccgaaacacagttaatcctaaacgatgccaaactgatactatatctcaatatccttctgatatacacagataaccc

SEQ ID NO: 19920 - DNA, 382 bp, Glycine max
  unsure (1)..(382): unsure at all n locations
atgaaactgaactgaggcctcganaccncacctgaggatgcagcntgagccattaaacgattttttttttctttatacncgacgagcccgtagatccgagaccccgaattgaatgtgaactcagagcgaatcaaacacaataacttttaccggatgtggattgagcccgcatagacgggaacgtcgaaatggaagtgcagctttgagccaatcctccacataacttttaccggaagcttgaatggagcccgaatataccgaacgcttagaatgagggcgaacttctcgactatacaaaaacataacattatatcggtggtgggtggggccggaataattggcgcctctaagttgatggggagccgtacgcactcttacatac

SEQ ID NO: 19921 - DNA, 274 bp, Glycine max
  unsure (1)..(274): unsure at all n locations
tgtgcttcaatgttcaattntgagcatctcgatatattatgcacctgaatcgggcatctgagtgaaaagttatgtcatatgagttagccgagagcttcgttgttcgatttcgagcgtctcgacatattattggcctgaatcggacatccgagtcacaagttatggcgggttaaactctccatgtgcttccatgtgtaattttgagcatctcgatatattatgcaccttaatcggacatctgagtgagaagatatgccatatgagatagccgaga

SEQ ID NO: 19922 - DNA, 314 bp, Glycine max
cttttattttgatagaatcaacttgatcttttgagttaaacccttgggtgttctgtttcatcaattattattggttggaatggtcaaactttcgttctctattaaacagctttcaaacagaaacactactataacgtatcccgtaaggaaaatagatagaaatccaaacttttaacaaaagttaggatgcataaccattcaggaaaggaattctaagttatatttcactataattataacatgtatgggggcgtacacaccgcgaaaagaagtttgatatcttttatcatgtctgtttaattgacaggattttt

SEQ ID NO: 19923 - DNA, 288 bp, Glycine max
tccgaggcatatgaggttcaactcatttctcattttttttctcctttttgctgtgtctcttaaatgtgctatgattgtcaagaaatggagtttttttttgtgattgttccaagtgattttgtctgcggttctttgcacaagctggctttccatgtcttgctttgaggaacccttctgatcacttcctcaggtgcatgaattctgactttgacataggcacggccactcttatatggtccatgaaactcaagggattcaccgttgtatgctgtcttttgactctcaata

SEQ ID NO: 19924 - DNA, 345 bp, Glycine max
agtcccaaatttgttactagcactaatggcattttacaaatttgcagactggggccctttagttgatgttgatgggttttgtttcttgagccttgcatcaaagtatcaaccccgcgaagattttgtccatgttgattcaagaaagaccacctctatattaaaacattaatttgactggattttatcctttttctaaactccctgttcaagtaattggacataaagtaatttaatagtaatataagaattaatagtattccatttttgttatggaatacctgattgatttgccaaatagaattaatagtaatataagaattctacttagagtagattactcctcta

SEQ ID NO: 19925 - DNA, 297 bp, Glycine max
ttcagctgaatttacaacattccagttgatttttaaaatgttggaatcgattacaatgatttggtaatcggataccagcgtgtttgaacgttgaaattcaaattcaaatgtgaagagtcacattctttcacaaaaaaactttgtgtaatcaattacactgatttggtaatcgattacactaaggataagtacaaaaaagttttccaatacattgtgtagcacaagaagttttcacaaaatcattacctaagagttttactgatgtaagctccatttgagcttgtaggcctaggatct

SEQ ID NO: 19926 - DNA, 315 bp, Glycine max
taatcgattaccagagagtaaaactctttggaaaagcttttgtgaaaacttcatgtgctactcaatgtttagtaaaaattctttgattgagccttttcttgattcttgaatcttgatcttgattattcttgattcttgattcttgaaaacttgaaacttctcttgaatctttctcttgattcttgaattgttcttgactcaatcttgaaatcattctcatgggctttttgtcatcatctctgttatcatcaaaacaccttgaatcaatcttcttcatcatcatgaatcaatcttgattcatcatcatgtagcaat

SEQ ID NO: 19927 - DNA, 295 bp, Glycine max
ttgtggtggtgcaaggtactagcactactagattataggccttttacgatgattgtaacgtacatttaaagacagtcttagaaaaggatatccttctaagacggttgttagctaaaaaccgtcttagaaagtacacattctaagacggtttttataagatgatttttatgtaaggaccatcttagaaggatacccttctaagacgatcattagctaaaaaccgtcttaaaaagtatttctaagatggttttttaaagaaccatcttagaatgcatttttttttcaaaagttagaa

SEQ ID NO: 19928 - DNA, 423 bp, Glycine max
ggtcctttgatggtgattttccaccatggagatgcagcgaaagacaaaggagaagaggagagaggaggcgccatccactagggaataagccttggaagaaggagcttcaccaccaggatgagccttggataagaagcttggagaggatacttcaatggaggaaaagaaagagggagagaaagagagagggggggagcacgaaattgaaggaagaaaaagggagagaagttgaactttgtgttgtgtctcacaagactctcattcctcaaagttacaacaagtgttacacatgcttctatttatagactaggtagcttccttgagaagctttcttgagaaaacttccttgagaagcttctttgagaaaacttccttgagaagctagagcttagctacacacacccctctcataactaagcccac

SEQ ID NO: 19929 - DNA, 293 bp, Glycine max
ttgatctaccaccaccgccgccaccattatctttgttttctattattattagtactttgatttctagctgtgtatttggctatattattatgaaatttgaacaatttagtatttcttttatttgcatggtgtgattgaaaaattatgaattatgtcatatgactatgtggtttttatatatttgatctattcatgtttcttgcttcatgattggtttatactctttaatgaatgtcttgtgtatgattagtagtgtatgtatgtttttttcttgttacgcactttggcttttt

SEQ ID NO: 19930 - DNA, 465 bp, Glycine max
gttatcaaacataaaaagggaaaaggtaatattgtagccgatgctctttctcggcgtcatgccttactttctatgcttgaaacaaaattgattggtcttgaatgtttgaaaagcatgtatgaaaatgatgaaacttttggagaaatttttaaaaattgtgaaaatttttcagaaaatggtttctttagacatgaaggctttcttttcaaagaaaacaaattgtgtgtgcctaaatgttctactagaaatttgcttttttgtgaagcacatgaaggaggtttaatggggcattttggggtccaaaagactctagaaacattacaagaacatttttattggcctcatatgaaaaaggatgtgcagagattttgtgaacattgcattgtatgtaaaaaggcaaagtctaaggtaaagcctcatggatcgtatactccattgacaattccggagtatccttggattgat

SEQ ID NO: 19931 - DNA, 292 bp, Glycine max
tggcaagaccacaacatggatgggcattactcgggctatggttgacaggttgtctagggtgagcatgatttatgtctcttcaggtactggaatatcttatgtgagaggtccctggttttaaccattttgacctttttgaccgatagacaacacattcgggatacatgtttcattttactccaagtgagcatatgttatacacgtgtgtcatttgtttacacatgttgcttcacgaaaggacatgtcttaaagacatgttacatggtttgtgggaattacatcatggcacggg

SEQ ID NO: 19932 - DNA, 356 bp, Glycine max
  unsure (1)..(356): unsure at all n locations
aaatgtccggctgattttcccctttattatactaaaaggtatatttttgtgattatattattattttatctctttttgatatacaacatggatacggcacgaccgaacggtcggaatttattttaaccaaagtttacggatcatacaattcaaacgttcggtggaaatttattttatttttaagttaagcgagaaatgacttaagtaaaatggcttaagcacgtctacagggggtataaaccgtaaatgatatgagaataaaaatacacgaaacacaatgtggaccaccacgggtacatagaatgaatcgaaaagctcggttcaaggtactacccgttgaagatcgangaacgatg

SEQ ID NO: 19933 - DNA, 289 bp, Glycine max
catgcacataatgactgactaacgctttgttgcgcaagacactatgaaaactattaaggatgcacccatattcaatcatagcagctattgtacctatattatttacatgtactttcaaagtgattatgaaactgacatgacactcatgttcttggctaaacttacgtacatgcatactcaaatcattttggggtgcctaaaattgcacatgtgcacatcttggtgtttctaacacctatacatacacagacttcatgatgaatattgactatctacactatagagtgct

SEQ ID NO: 19934 - DNA, 311 bp, Glycine max
aaagggttaatccccttatgcacttctgtctctttcgaatttgcttggaaaaattgtttccgtgaagaaaatctaagccgaggcgcttccgaaacgtttccgtaacgtttccgtaaggaatttcgcgaaggtttcgaccgttcttcgacgttcttcgatcttcaacgggtaagtacctcgaaccaagctattcgattcattctatgtacccgtggtggaccacatagcgtttcgtgtatttttattctcgttttatatacttattataccccatgttgacgtgcttaagccatcttatttaagtcatttct

SEQ ID NO: 19935 - DNA, 292 bp, Glycine max
tcaacattgattactaatgacatccctttgtctgaatgggcatacaaaggaaggatcatacacatgcatattccttcatatctagatatagtaacacgtcatcaaccaaaggttgatccaaccaacttggtcctcctagctccttattcaattatattggttgtgtgattctattacaaatacctttatgaaaaagcggatggagtatttattactattgttttcatactactaataatttataattacaactagaaagtttttattaaaaactatttagctttaattctta

SEQ ID NO: 19936 - DNA, 222 bp, Glycine max
cctttgttggtgaataattcaccctggatatgcaacgaatgacacaggacaatatgagataggaggcgccaatcactatggaataagccttggaagaaggagcttcaccaccacgatgagccttggataagaatcttggagaggatacttcaatggaggaaaagaaagaagtagagaaagacacagggggggagcacgaaattgaatgaaaaaaaagggaaa

SEQ ID NO: 19937 - DNA, 390 bp, Glycine max
gttgtccagcctttgtttactgttggatcttctcgaaatttggtctgcagcttcacaagacaattgtcaacgatctgaccgttgggatctttcataagatgtctggagtgtgctcgaagcgtcagctcccgagagcatttcttatttaagcacttcagcctttgctttcgcgtagcttacaaaaaatgtcatttcttcttctttctttcttccaaagccatttctaaagtcccaagaactttctccatcacccacagccaccacaaaccatcgttgttctccattgaaaccccacaccgagaggaacccttcaatcgaagcataatcttccaacttggcttgcggtttcggtagagaacgaaaccctaatctgacctttcgttttctttc

SEQ ID NO: 19938 - DNA, 290 bp, Glycine max
tgtaggattatggggtacccttcacatgtggtactaggtggcggtcgggcgatggtgtacaacaagttttccacatccacaaatcgcgcataaacccaccatcccctgttgcccacctccaactgagctcacgtactcccacgtagcccatatcctcgtttctctcaacaacgggtccccatcaatcctcccaagcttcccccaacatgcaagttatacaacattcaaacagcacaaactatcacagccaagcaaaacagggcaaaggcagaaaactctgcccaaaacac

SEQ ID NO: 19939 - DNA, 436 bp, Glycine max
ttggattggaattgtccatgtggatttgcatgaaatagagtatgtgattatcaatttggggaaatgggattaaggtttacgaagaatgaaattggttcttcttatttttgtttttgtggcagttaaaagttgccagtatctaaatattataaatggtgttaactttaaattgatttgaatcaatttaaatagataaaggattaaaatgaattttttaaaagataaataaataaattaaatcaaaaaataaggtaaagaaaaaaaaactatatgacaattcttaatttaggttcccaacactaataaattaagagcatatttggattgttggtaggattgttcacacctacattttaagaaggaacttcatcatgcttatgtgatacaacattggactttgtgtatttgaagtacaccacaaatcgaaacacacact

SEQ ID NO: 19940 - DNA, 287 bp, Glycine max
ttacaacaaaaatatttaattctttaaatttattattatacaataattagagagaaaagaatataacgagtaaattattattttagcttctaaaagtgtaatgccctatcacattagtttcttaaactgttttttaaaaacaaaatcatgaaattttcaattattcatctaagtctttaaatttaacaaacagcaacagtaataatgcgaaaacccatccaatcaaatacagaaagctatatccatgtatttccttaaatcaacccaaccatctttaattcaaaaaa

SEQ ID NO: 19941 - DNA, 420 bp, Glycine max
attcaccaataaatgtgtctttgaaagatcaaaatataaaatttagtccccaaaagtataaaatgtgtgacaaatatatccggaggttaactgtcatctgtcaccattaataaaatagtctatgtgacacagatgaataaatttgtcactgaaatgattacaaacatgatcatctctaattgccaacatagggacatatttgtcatataatattttcttgactgttcgtcttcccactctctggaaatatgaatgggtaaatagtcatatttgtccctaaatgtgtaactcgctgagtcgctggcaaatgtgttcgataaagatgaaaatacaaaacttagtctctgaaagtgtaaaaagaataacatatatattcggtcgtaactcttgtccgtatcattataaaatagccaaattcga

SEQ ID NO: 19942 - DNA, 286 bp, Glycine max
tcaacatcagaccacttccagggtgctggaactacttcacatggacttgatggggcccatgcatgttgaaagccttggaggaaagaggtctgcctatgttgttagggatgatttctccagatttacctgcgtcaactttttcagagagaaatcagacacctttgaagtattcaaagagttgagtctaagacttcaaagagaaaaagactgtgtcatcaagataattacgagtgaccatggcggagagtttgaaaacagcaagtttactgaattgtgcacatctgaa

SEQ ID NO: 19943 - DNA, 267 bp, Glycine max
ttaacgcctggggattttaccatgtggttgacctacttatcagggcgctgatggtgaccatgcttggtgaatcccccagtcgtaccaggtgtgtctgtgtggatctgtagcattattacataccaaccttctttggtcctatggaagagcttcatgacgcccaagaagcggtttccgaaaatcctacacaagccatcaaacctttctatagtgatgcaaaagcaggcggttggcgtgtctaaccgagaataaaatggcagcagccat

SEQ ID NO: 19944 - DNA, 384 bp, Glycine max
ttctcaagctttaaattatctttggaatagattttgaaatctcttcgtaggtttttataagtttttaagagaatcgatgagtgagataaaagttcatgataggctttcctaagagactcaaggtcataaaaaattacctcattgtcctagtatgattcggatccattagaagttgtgtctgctatcaagcatatgtttgtttcttcatcgtcttcatcaaacgaggtgtcatccaggtcttcccacatgcacataagccttttgttttctatagtcttaaggaatctcttcttatcttaaaatttctccagattaggacattctgacttgaagtggtcaaagcttttgcactcatagctgactatggagctttcgtctatcctt

SEQ ID NO: 19945 - DNA, 297 bp, Glycine max
tgcctcaaagaggtccaggaaggacaatgcagccgaaggaactagttccgctccggagtatgacagtcaccgctttaggagcgctgtacaccagcagcgcttcgaggccatcaagggatggtcgtttctccgggagcgacgcgtccagctcagggacgaccagtatactgatttccaggaggaaatagggcgccggcggtgggcatcactggttactcccatggccaagtttgatccagaaatagtccttgagttttatgccaatgcttggccaacggaagagggcgtgcgtgacat

SEQ ID NO: 19946 - DNA, 371 bp, Glycine max
tgaccacaagtggacctgaagatatgtcggggggtaagagaccttggggacgtcaggtacggtgctattgcccaaaaccaagcttgaccaatcccgacccaacccgggcatagtcagtcagtgagaacctgtgatgtacctaagcaggcgagctcctggcagtcaacagataaaaggaacaaggaccacaaagcaaggaggcttgtgtggtggctggccagctgagaatcttgtgtgatatatgggttatggcctctggtaatcgattaccaagggtgggtaatcgattacaaggcctaaagatgaagacaggaggctaagatggtctctggtaatcgattaccacggggtgtaatcgattaccaggcttg

SEQ ID NO: 19947 - DNA, 298 bp, Glycine max
tcatgactaaatcaaatcaagaaaataacttatgaatcactggaaatatgtctaattcaagattgagagaaagtcgtgacgattatgtccttcaatctgcaaccacttttgacaaacaaactgttgtaattttaatgtttatttcaaaagaattttttttagacttagttaaagaatattataaattatttataactctcaatttctttgtctcaggttttctttatattggtttaatgttcatttgacttattcaaattcttgcttaatggtttaacgttaaaatgatggtcaggtg

SEQ ID NO: 19948 - DNA, 441 bp, Glycine max
  unsure (1)..(441): unsure at all n locations
gattggtttaaacgaattgtttgagattattagacttttcaatttgaaacttaaattcaaagaagtatttgtttggtgtcctagtaggaaactttttttgggttgatgctcacccaaaggggaatcgagattaaccctaaaaaatgctcactcgtcttagatatgagaaatgtgactagtgtgaaggaggttcatgtgctaactagcataacaacttaacttgcttagtttttatcaacatcttaagaccagacacaacctttatgtcaacgactgaagaaaaatgatgaggttgtgtggcaagaagattggaggaagttttttctataaatagggcaatgagaggctctgttagggttttgtgctattanggtttcccacgtcaattgcgtgcatccatgggagaaactttcgttccatggtgtacggtggtccacattc

SEQ ID NO: 19949 - DNA, 291 bp, Glycine max
tataataagacataccagcattttattgaaccagtccaatgaccacaatattgggcccagacacagtatacacaccctgttccaccatgtcataccctaatttcgtccggggacctttgcttgatgacatgcgacctttctttggtccttgtgaggtgcttggcacccatcattaggcaatttgtgaaattccaggacatgccggaaaaccaaaaaatattgatgcacaatccgtaagtttccgtgacacaccggaaatcaaatggaagcatcgttgcataattaagtgag

SEQ ID NO: 19950 - DNA, 246 bp, Glycine max
cccgcttatttcgctttcatattgatgcaacatcgttgcatgacacttagggtcggctgcgactactactgctgcacgcgttggctcacaatgactggcataacatcctgcaatgcacatctcaatttgttatcgcgggcaaagcttaatctgggaggagatcatagaccaagctgcacgatggttgttatctggtcgatccctggttctttacgatcaagaacgctcaagagatcatgtctatca

SEQ ID NO: 19951 - DNA, 235 bp, Glycine max
tgcgatcaacatccatagccgatggtttccacttaagggagcagtctcccaatctggtgaccatagtcctgtgccatacatagctggaacgctaacagggatagcctactccagagctggtcgaccctcagctgaaattctgaatgcctaagaaggacaaggattgcccaaaaactatgctcagtccttagaatgacaatctccggtatgcgatccccgtgcaacaggcactgtt

SEQ ID NO: 19952 - DNA, 448 bp, Glycine max
tcgattaccaatagcaaagtttgttttcaaaaagctttcaaactgaatttacaacgttccaattattttcaaaatggtgcaatcgattacaagattttggtaatcaattaccagtgtgtttgaacgttgaaatgcaaattcaattgtgaagagtcacatcctttcacaaaaatgctttgtgtaatcgattacaattgaaattctgatactggggacagatgtcgtacaggatgtcacgacatcacgcttcagaacatgcagattgtctttgactgtatgaacaaattaagcaagtaaataacacaagagaattgtaacccagttcggtgcaacctcacctacatctgggggctaccaagccagggaggaaatccactaaaatagtgttagttcaaggtctaacagccactgtttacaaccttctcacctaaccactacccgtgcaatc

SEQ ID NO: 19953 - DNA, 290 bp, Glycine max
tgtctatcgcacttccaatgacaaacatcacctttagctcaaaccaagagcaccaaccaagaaatgaattttgcaatgagaaaacctatagaattcacccctgtcctgtgtcctatgctgacttgctcccatatctacttgataattcaatggtagccacaaccccaaccaaggttcatcaaccttcatttctccgagaatacgactcgaacgcaacgtgtgcttgtcacggagaagcctcggggtgtcccattgagcattgtagggctctgaagtgtaaggtgcgaggt

SEQ ID NO: 19954 - DNA, 399 bp, Glycine max
caccctcaagcgggacgtcgtcgcgccgcacgccggtggagatgttacccgccttctgggagtccaccagattcaaggtctttggaggcagcgttagggtttgcttttcccgcctaagagtcgagaaattggcgctctggggccgccgcgccacgaagggggacgagtggcgggggatcgataacctttttctgggaatggggatggaatctgtcgtgggtttctgtttgaagggagggtcaatgttgtccccaggggctctggggtttattgttggaaattggtaatgttgtgttggataaatattgattgtggtttattttggatcaatgagtgcatgattatgaaatgctgatgtttgattcagtctatacagtgccttgtgtatatacatttaac

SEQ ID NO: 19955 - DNA, 292 bp, Glycine max
tctaatggattttatttattattattatttcatggctttaattgaaatacgtgaataatataaaataaaacacgtcgctatcttattataaattatttaataactataaggccagtaaacttttataatatcacagattttatcattgatattttctttcacaaattttattatttaacttttaatatttttgtaaagcatatcattcaatttttttattctctgtatttttccactaaaattggtaaaaaatgatgtaagaaatcactttgttagatttttgtatattgag

SEQ ID NO: 19956 - DNA, 372 bp, Glycine max
tcatgatgatgaatcaagattgattcaaggtgttttgatgataacaaagatgatgacaaaaagcccaagagaatgacttcaagattgagtcaagaacaattcaagaatcaagaatcaagtttcaagtttcaagtttcaagaaccaagattcaagactcaagattcaagaaccaagattcaagactcaagattcaagaatcaagaaaagactcaatcaagataagtactaaaaagtttttcaaaatattgagtagcatatcaagttttcacaaaagctcttaccagagagtttttactctcgggtaatcgattaccagtagcagagttggttttcacatgctttcaaactgaatttacaacgttccaattaat

SEQ ID NO: 19957 - DNA, 291 bp, Glycine max
ttacagatttggtcttcgccagagaaaggatcgaagtgggtctgaaaagaggcaaatttaatcatcctgcttgggcgaatgagaaaactggggcaaatgaagaaggtgaggatgagggagaaacccatgctgtgactgccattcctatacggccaagtttccaaccaacccaacaatgtcattacttagccaataacaaaacctctccttacccaccacccagttatccacaaaggccatccctaaatcaaccacaaagcctgtctaccgcacttccaatgacgaatacca

SEQ ID NO: 19958 - DNA, 280 bp, Glycine max
tgaccgaaccgggaagaggttctcctctaatattttgtgctcacgagcaagcactgtctgtattatacattatacttattcgatgaaaacgcgagcatcgtgcaccagatcgacgcctcaaaatgcatctcaatgcgatatagcatgcttacgccattacatggattggactcatgccccatgccaggttctgattacatatgagggaatccctccatttgtacattttatgcaccgttaatcaagagtggtgatcaacgaacacgggttctaatgctta

SEQ ID NO: 19959 - DNA, 291 bp, Glycine max
tgactgcgacatgagtaggggctcattttgctcatcacccaatgggagaaataggagctacccatatagcaaaagactctcttcattactacaaagaggataaaaggtgggaagatgacttccacaacaagaggagaaaaatcttcctatatgaatgcctctcatgatgtgaacataggacactaaccatactcttcgatacgcactaactcggccatccctttacataaactaataattggccttttgctaccagatcttccctcacggatctgctgactggaggattga

SEQ ID NO: 19960 - DNA, 467 bp, Glycine max
  unsure (1)..(467): unsure at all n locations
tcgaatgacatgttatcctcatcacgatctcatcacattctacacagtctcaccatgaccaaaccgggaagaggttctcccctcttcttttgtgctcacaaacaagcacaatcttatatacatcaaactcatttcatgaaaacacgtgcatcgtgcaccacaacaacacatcacaatccatagcaatgccataaaacattctcacccattccatgaattggactcatgccccatcccatgttttgttacattatatgttatccttccttctctcaatattatgcaaggtttatcatgactcgtgttctccaagcaaggctcctaaggcttattctatgtccaatccctgaaaattacaactgcatgtatgtgtgtatatagtctttgctgagtattttgctatgattgaattaactatggactgtgatttaattaanaatcatagtgttaagtgattttactaatga

SEQ ID NO: 19961 - DNA, 291 bp, Glycine max
tgattgcaacatgagtaagggcttatcttgctcatttccaaatggatgaaattggagctagccatatagaagaagactctcttcatagctacaaagaggataaaaggtgggaagatgacttccacaacaagaggagaaaaatatacctctatgaaacccaatcaagatgtgaacaaaggacactacccaaactcttcgatatgcactagctaggcaatccctttacataatctaataattggtctcttgctaccagatcttcccttacggatctgctgaagggaggattga

SEQ ID NO: 19962 - DNA, 300 bp, Glycine max
attgcgttccatcatatatgccgacgctcgaactctattgtttgggctatgatccaattctgtgaacgattaccttttgcccggatgagtgacagagtgcccctatataacgagactctcaggataggatgtcggggctacgatccttttcacatgacatttgcttggtactcggatggctgttggaggcccgacatatatcgagacgcttgacatcggatgttgagaccgctgtgccggttcccacgacgcttacggtgtactcagatgtctgatcgataaccgtgatgtatcctgacg

SEQ ID NO: 19963 - DNA, 274 bp, Glycine max
tctacattcagatccgagcgtgatcttattttttacgaccctaggcgacatccgaaaaaaaatttattgactcctgaatgtgctcaaatctaccacattcaattatgagcgcatcgctatattactggactatctcagacatccgaataccaagccatggccgtttgaattcgcttggagcttagacatctcggtttctagcgtgtcgatatattacgggactcaattatacatccaagtagtgggctatcgtccctagaatttgctcaaagct

SEQ ID NO: 19964 - DNA, 329 bp, Glycine max
ggtggaagtctccacagatggcattgccttcctcgcccaatattatgatcagccgttgaggtgctttacctttggggacttccaactatcacccatggtttaagaatttgaagagatcctacgatgccctctagggggaaaaaaaccatacctcttctcaaggttctatccctcattagctataatttctaagatagtctaaatctcaacgcaggaattacaccatagaaagcatgtcgaaaattgggtggttggaataccgagaaaatatttggaggcaaaagcaataatcatggctggtaaaggcgaatcggccccattcatagata

SEQ ID NO: 19965 - DNA, 283 bp, Glycine max
taattggagcttggatgcctatgatcttcttcatcaatggattcctttgcttctaggaagattaatggcagcggtgtggatattggaacagagagaggagacgccgcttaagggataacatgagtctagaagaagcttaccaccataggaggccatggataaaagcttggatgacgatggatatgaatgaacggagagggatataacagcccgaccttttgtgctctaaaggcgctctgagatctgacatttaatcttcaaatgatcatagcttagacaattg

SEQ ID NO: 19966 - DNA, 438 bp, Glycine max
ccatggcatgagtttcaaatgaataatcatcaatcatctttgaataatctatctttcaatcttctctcaacatcattcaatatctttcaactctttctacacaattttctggttcatttctcttcatctttctaaaagtttttgttcaacactttctcttcctagaaaagttcattgatctaaaacttgtgctattcatctttttcattctcttctccctttgccaaaagaacgaaggactaaccgcctgaattcttttgtgtctctcttctcccttacaaaagattcaaaggactaaccgcctgagaattcttttgattcttcccttccccttaagcaaaacgcctaagatatcttttgtttcccctttacaaagattcaaaggactaaccgcttgagaattctttgtcccaacacattggagggtacatcttttgt

SEQ ID NO: 19967 - DNA, 286 bp, Glycine max
ttgatcgaaccctagctatgaccatctaagccatttccggctaccattgtaagcttcttagaaatctattctgattaaagctttcttcttgccaaccgcaacaagacttcaccaggtaaacccaatttgaactgtagatcgagcttttgtttttgtgcttgagaagctactccttcacttgcggttcttcttcttcagtttgattcgattcacactacattacctttatttattttttaatttttaaataagtgtaaggatgcattttttcattacgtctttgttg

SEQ ID NO: 19968 - DNA, 379 bp, Glycine max
  unsure (1)..(379): unsure at all n locations
gaaaatctgatcatcatgctttgataaatgcaaaaataactagggcaactgaagaggatgaaaatgaaggagaaacccatgctgtgactgccattcctatatggccaagtttcccaccaacccaacaatgtcattactcagccaataacaacccatctccttacccaccacccatttatccacaaaggccatccctaaatcaaaccacaaaacccacctaccacacaaccaatgctaaacaccacctttagcacgaaccataacaccaaccaaaaaggaattttgcagcaaatagcctgtaggattcaccccaaattccggtgtcatatgctatactnggtctcatatctactcgataattcaatggtagccataaccc

SEQ ID NO: 19969 - DNA, 298 bp, Glycine max
ttgtgtaatcgattacactgatttggtaatcaattaccagtgattgcttctgaataaatcaaaagatgtaactcttcaaaaggtttttgactttttcaaattgggtttaagtttttctaaaagttataactcttttaaatggtcctcttggccagacatgaagagtctataaaagcaaggctttgttttgcattttcaatcattcattctatcaatcaatctttttcaattcattctttacacaagaaagttttccacattgatttttgagtctctatgaacttcttcttcttcttcc

SEQ ID NO: 19970 - DNA, 438 bp, Glycine max
  unsure (1)..(438): unsure at all n locations
ctcaagccctccaagagaaagaaaagagtgaaatgggagtgttttgaatgttgtggtttagctttgaatcaatagtattgagtttatgactctctctcttctttatatttgcattacactacttcctaaactcccccacttcatcccctatcactcaaggcccaatagtttcagcctaactactctaaaacttactactatttacaagtgaaacaaggttttcgcataaataatcatcatacatgcaaacatcaaagactgtcatatcataataaattaattacatgcatttaactttaaatttaattattcttataatctaattaaaacacttaatcagatattacaaaaaaacaacataatgttacataataaagcacctcatnaaaaatttaanagtaccatatatatatatatatatatatatatatatatata

SEQ ID NO: 19971 - DNA, 299 bp, Glycine max
ttgatgatatggtcttcaccgacgaaaggatcttagtgggtctgaacagaggaacatctgatcatcatgctttgataaatgccaaaaaaaactagggcatatgaaaaaggtgagaatgagggagaagcccatgctgtgactgccattcctatacagccaagttttccaccaacccaacaatgtcattactcagccaatagcaaaccttctccttacccatcgcccagttatccacaaaggcaatccctaaatcaaccacaaagtctgtctaccgcacttccaatgacaaacaccacctt

SEQ ID NO: 19972 - DNA, 450 bp, Glycine max
atttagctgacaacactcaccaagcacaaattgtatttgtattcaccgagatcagaacctctaacagaaccaaaagcgaaaaagagaaactaagagaaaagaaaagtttgactatcctcacagacacttaaagtgagtttagaacttaaatgcgaattgctgagagaagcaaatcaggaatcaggaatcaaattaattacaaaaaaaaaaaggaagagatactcacgctcgcggctaacttgtttgagactcttgtattcagcgccataagaggaggacgaatcggaatccgacattgacatggcggcgaccttggtctctgtgccctaaaacctccaaccggtgatggatcgcgaactgagagagagagagagagagatcgccgacgaaacggataatctgatcaggctgcgaaaacggaaacggtatcttcaatgtgaatgaataaac

SEQ ID NO: 19973 - DNA, 294 bp, Glycine max
tgctggcctcaggcgctgtggcaagagttgtctccttctttggacgaattatcttcgcccagacttgaagagagggctcctcacagaggcagaggagcaacttgttattgatctccatgcccgtcttggcaacaggttttttgttcttcgcaagcttagctacatgcattgccttctttttgtgaacaattctttcatgaacacagtttttataagtatgaaaaactgattttttttgttatttattattttagtacatcttggacttgtaagtgtccgtgcctgctgtagacc

SEQ ID NO: 19974 - DNA, 474 bp, Glycine max
caagggcatcaggccccctactaatcgagctttcatcaagaagtactgcgtccccaggcaggcgcacggcgaaacaccacagccgtctggggatggccagcagcgggcaacagacgcaccgccatcacctctagagttcaactcagctcatccacaaaaaggttagagcgttgcttacgacccatgtccgaccaataggcgaccaagtccaaagccaaaggtaagcaaagtactaggtccgtgaccgacaagccatcatgcgtccagatcaagacgttaaagaagcgctactaggaggcaacctagtgactattaaatctctgcttgtttgatcacctgtgtttctcaagtaatagtaggacacacctagttgctcatgatcctaggaatttaaataaaaccagcataagcctcggaggtagtcatacctcacaatatatatatatatatatatatatatatatatatatctat

SEQ ID NO: 19975 - DNA, 295 bp, Glycine max
ttaacctcattgtctctcacagtctttagatttgggagccaatccaatccttgtgtccggactctcagccacttatgatagccgccgatgatcccattactgcttcccctaagctctctgtcctttcttcatgccgcatcccatgccttgcgaactccttggagtaccctcgcgttgtggtcactgaaaccccgtgcgatgaaaggcgtgatgctttcgtctgatggcactcctctcatggggtagccaagctgtcttatggcgaggacgggattataattaatacaaccccttg

SEQ ID NO: 19976 - DNA, 458 bp, Glycine max
  unsure (1)..(458): unsure at all n locations
gggagagataactgaccaaatcttttcatggctattcttccagaagaacgctcccctgatgtagtttcgtttatagcttggaccatctcatttttgctgacatatccatccttgttcttgtctaagaatacaaatgtatcaaccaaagtctcaaatgtgccctccagctttggcatcccaattcgtgatttctagggaagtcatggaaaaaaattcgaagatgtagcaaaacatggaaattcaaggtttattgttatcaatgcaagcatgatgaaattctaggctgccctgaagaaatgcatgaaatgtccataaaataaaataaaaaaggaatgaacatatagaatngaattgttcataaagtacaaacatcttctgaatatagaaatgatggcgcataagctgcaaaagacagaatccgattcaatctcaaaagtaatgttacaacccaactaatc

SEQ ID NO: 19977 - DNA, 289 bp, Glycine max
tcttcaaggatggttgctcgattcgtcttcaatgttgtataatgctcatacctaggtccctttggaaaaggctcacacttgtcgtgtttgtgtcgcttgttcgacctatgcgagttggtccttgtgctaccttcccttttgtcacatttatgttcaacctatcgaacttcatttcaaaacctcaacatttcttccatctgaatgtaccattggctcgctctcgtaactcatccatgttgttagaaggtttcttgcatagactgtcgacaaacttgctaggtcatagggc

SEQ ID NO: 19978 - DNA, 362 bp, Glycine max
agattgtatgtcatttttgttttaagaatagtatcccactggtaaaactaactttccaaatgtttgccttcgcaagaaatggccccgaggaagcttgcctcatagaggtccaggaaggacaaggcagcagaaggaactagttccgctccggagtatgatagtcaccgctttaggagcgcggtacaccagcaacgcttcgaagccatcaaggggtggtcgtttctccgggagcgacgcgtccagctcagggacgacgagtatactgatttccaggaggaaatagggcgccggcggtgggcaccactggttactcccatggccaagtttgatctagaaatagtccttgagttttatgccaatgc

SEQ ID NO: 19979 - DNA, 293 bp, Glycine max
tcttagttttagatgatgcatatgggtttgtagctacctcatgcactcctctaatgactatggcatcatttctggcgctaaacttctgggagttggaggccatcttcacaattaaatttctggcttcagcaagagtcatgtctccaagggctccaccactggcagcatctatcatacttctctccatattactgagtccttcataaaaatattggagaagaagctgttctgaaatctgatggtgagggcaactggcacatagtttcttaaatcgctcccagtactcatacagg

SEQ ID NO: 19980 - DNA, 297 bp, Glycine max
ggatggaaagagcttgattataacttatgaggaagataggaagcttaattaagaactatgtccttggcaagtaaggcttgacttcttccaagctcatacatatattattaggtaaatagtcacttttgtctctaaacgagtaattcgctgacaaatgcgttgtttaaagatacacatacaaaagttatttctcgaaagtgaaaaacgtgcaatacatatattcgactgttaacatgtctgttaccattaacaaaataacctacgtgacatataggagacgaatttatcactgaaatg

SEQ ID NO: 19981 - DNA, 290 bp, Glycine max
ttgtgtaatcgatcacactaatttggttatcgattaccaatgattgtttctgataaatcaaaatatgtaactcttcaaaaaggtttttgactttttcaaattggttttaagtttttctaaaagttataactcttctaaatggtcttcttgaccagacatgaagagtctataaaagcaaggctttgttttacatttcaataatcttaaacacatattcatacaatcctttacaagccttgagtctctttgaacttcttcttcttttttgcaccaaaagctttctggttttc

SEQ ID NO: 19982 - DNA, 441 bp, Glycine max
tctaaaaagaggcaaatctgatcatcttgttttgataaaaaaaaaaaactggggcaagtgaagaggatgagaaggagggagaaacctatgttgtgactgccattcttatacgaccaagtttcccaccaacccaacaatgtcattactcagccaataacaacccttctcattacccaccacccggtcatccataaaggccatccctaaaatcaaccacaaagcctacctaccgcacttccaatgacaaacaccacctttagcacaaaccaaaaacaccaaccaagaaatgaattttgcagcgagaaagcctgtagaattcaccccaattccggtgtcctatgctgacttgctcccatatctacttgataattcaatggtagccataaccccaaccaaggttcatcaacctccatttccccgagaatacgactcgaacacaac

SEQ ID NO: 19983 - DNA, 291 bp, Glycine max
tttaaatgaacattcaggggaaacatttggttaagctgaaactgggaataaatcactcatagtgtataaaaactcacacaggcaagtgttttaccctaatcccaaaccataactgcaccatgactttattttgcacacggtttcctatcgaatcaaaagatcataagcacgatcacagaccaatagggttttctcgagggtagtgtttttggagaggaaactgggtgtttcggtcttttcctctttgtttaagtgggacgggatatcgccagtcaagaatgactttgaatg

SEQ ID NO: 19984 - DNA, 474 bp, Glycine max
aatcacagtttacttggtgccaacttaaagtgcataaaaaagttaaataatgctcaaaataggaaatcctagcttaaatcttaccctttccttgatgtcacccaaagtcggcaagtacaacttatagaattcctctttaaatgcaaccacaaacctaaataaagtttagaaaccaacaagagtaagacaattagaatttgtgtgatttgtataaatttaagggacaacaacatacatgtactatattatagtattttcacttttaaaggactaaagatgaattattgaccataattgatatattagcatttgtatatcactaactcgctcttacttagtatgtctctcaacttgcaattacaaattcattgcaactcagcatttgtgtaggttttaaatacctgatatagttaacaattgtatgatggatcaagcttaatgcttctaaagtctaacaacacgttgcaatgatgc

SEQ ID NO: 19985 - DNA, 290 bp, Glycine max
tgcatacaagattctccttgtctggctcttcataaccttctggttgggtcatatagatgtcttcctctaaatccgcatgcaagaatgcagttttaacatctaactgctccaagtgaagattctctgcagctactatgctcagaataactctgatggtagtcatctttacaaatggagagaagatctctgtgaaatcaattccttgtttctgctgaaaccctttcaccacaagtctcgccttgtatcttcttctaccgttagattcttcctttaacctatagacccaccta

SEQ ID NO: 19986 - DNA, 364 bp, Glycine max
gctgaacatgctggcctataccattcttttctatctcgggaccagcacaatatctcctggagtgtccatctctgccataattaaaacatgccgaaccgatctcaatgcaatcatcggagacgtacctctggttaaccgcataatgtgcacctggagctgagaggtgaatagctttgttctagcgtaccacgtggcccggatcatgcccctgcaccagacctgtgacagtcatggcggccaccataacgcctatggggttctgaaacagagaccttctcgatggagatgcccagagcatctgcccctcattcaacatgtgctccaacactaggcctccctataagaggagggatgctcccggatt

SEQ ID NO: 19987 - DNA, 273 bp, Glycine max
tgacccgttcccacatggattgaacttattaccgcattccgtacgcagaatcagttcgaccatggcttggcttcctaccggccttaacgactgaacatggctaaaagggaacacgagtattttagaaaatactctcaccgttggtgacacctcacaaaggatgtcattcctcccatggccgatagcgatatggttactatgatagtggataccttgcctgaatttgactatcagataaaagtgggcttcactccacttacctgaaatgacggg

SEQ ID NO: 19988 - DNA, 362 bp, Glycine max
aacacagcagctttcggtgaaccaaccccataatacacagaaatcactaactaatactagagctccctctactcttacagatggagatgccccatcatgctcaacttcaccatctactaataactgccagatatctccgaatctgatgaaaagaaatcaacaagtatcagccacattaggaggaccttcggtagttgaacccaccaatcatctgatgcaggagcttcatagcaagtctgagatgcagatcaaacatgaattgcccagtgtaagaggaactgatcagctgaagttcacagggactgttgctgatcagatggaagcttcttctggaacatcttactgtattgatcctaataata

SEQ ID NO: 19989 - DNA, 288 bp, Glycine max
tatcatacctggtgagttgtgattgaatgactgtacaaaaaatttcactatcaaatgtataactatttttatctttttttaatcaattttgtaaaataaattcatgatcaaaataatatatattttatgtattgtatattttatcattaattaaaatgaattattaacacacaaataaaataaatttaattaaaatatataaaaatttctatattttatatatatttgaccaaaaaatattttaaaagtgtaactataaaaacttatacttaaaaatttacagcaagt

SEQ ID NO: 19990 - DNA, 425 bp, Glycine max
  unsure (1)..(425): unsure at all n locations
tggcatgaggcattccaccgttgcagtcacatctgcattagcgtggagcaaatctgtgacgacattggcactaccgcattccatggcaggtttgaaaaacctcgtgagctggggttttatgcatgtagatatggattcggtgaataggttgtgagatatgggaattttggagacgaggaactcgacaagaggagaggaatagactgaggcatgtgaatagaagaggagaggaacgggtgtgaggtatgtgaacaggagaggagaggaacatgcgcaaagggaaatagcgagagtgtaaatgaaaaagaaggtccatgacggttttcttggaaaaccaactttgagtatataattgcaaggatgatattgacaaaaaccatttttgaaaagatgttttgaagacggttntacaagaaccatctttg

SEQ ID NO: 19991 - DNA, 285 bp, Glycine max
tggacaatcctcaccttacaagttgattttgtgggtttgaggtagggtcttaagtccaaattctaaaataatatcagagcttatcttagatctattctttggtcacctgcatcttagccctggatgtaacagggtgtgttggaaagccgccttttttttttttgaaaggcagaaaatatatatatatattaataagaaaaaactacagtaccaggggtactgatgataaacatacaaaggcagctgtgctgccagcctcccaaaaagagaacaaaaacccttcac

SEQ ID NO: 19992 - DNA, 370 bp, Glycine max
tttctgataataaaagatgtaactcttcaaaggtttttgactttttcaaattggttttaaggttttctaaaagttataactcttctaaatggtcttcttgaccagacacgaagagtctataaaagcaaggctttgttttgcaatttcaatcaattaattcattctttcaatcttgaatacttttctaatcaattctttacaagccttgaatctctttgaacttcttcttcttctttgtaccaaaagctttctgaagttttctggttttccaaaccttgaaaacttgtgctattcatcttttcattctcttctccctttgccaaaaagaattcgccaaggacctaaccgtctgaatcttttgtgtctctct

SEQ ID NO: 19993 - DNA, 297 bp, Glycine max
ttgactacccttcagatacaatactttcaggcatgaagttgggattgaacctcagaactggtattgaatggagaatgacatcttggaagaatcccaatgatccatccccaggagacttttattggggtcttttgctttataattatcctgagttttatctgatgatgggaacagaaaagtttgtgagagttggaccatggaatggcctgcatttcagtggcataccagatcaaaagcctaacccgatttatgctttcaactacatatccaacaaggatgagaagtactacacttata

SEQ ID NO: 19994 - DNA, 451 bp, Glycine max
  unsure (1)..(451): unsure at all n locations
aatggttgcaatatattgcactattttattgtaaattctgttcaacatgacccaaagtcaagttttagagaaaccgaatgcaaaaccaaccatattttcatttcctaaaagcaaaacaatgtcgttatgaatctaaaatgctttttaggccactcaatcaaatattctccatcttttttttgaaagaaaaacatccatctcttatctcaaccaccaccattgaaactgaactgatcacactcccaaggaaacaacactaaaaccaatttctcatcttatgttgaagacaaacttctataatgacgagtaatttattcacaaaatttatcatgcactaaaaattgcaaaatcatttatgaatttcaaaacattttcttatagcagncaactaaagagaaccaaatatattttgtatgtgctcattgtgaaagtcatactatacanaacacat

SEQ ID NO: 19995 - DNA, 295 bp, Glycine max
tctacttatgttaaagaattggccgctatcactgccgccgtgaagaaatggagacaatacctccttggccatcactttacaattcttacagaccatcgaagcctcaaggagttaattactcaggttatgcaaacccctgaacaacaattatatttagccagactcattgggtatgattattctatccaatttctttccgggaacactaatgtcatcactgatgccctatcatgaattcccacaacttagactagtgcctttctcttattatcaatgcctaattttgtgttcctgg

SEQ ID NO: 19996 - DNA, 423 bp, Glycine max
aagggatgccccacattatttccatgacacaaaatgcaaaatgatgatttggaaactttatgcaaaactggtcatgcatgcacctatgtggacactcaagtgtcaaatttttatggtcatgtgatgctagggctcaggattcatttcctctattttagtcaacccaacgtttccaaaatatgttcttttatcaatttgtgcattcatccgagtccattttgggcgtctgggaaaatcttcacagcattcacccttcaggtgtatacacattttttcaaaaactagttatgatcagtgaatttttttcaaagaaaagttggaagtcatctcttttcaaaagcatgttggtttttcagcttgacaacttatattccttttttctccctttttcttttcattatcaattggttatttacttttctt

SEQ ID NO: 19997 - DNA, 295 bp, Glycine max
tgaggacacatgaacgaaaatgcaatttatggtgctccgaaaaagggatgagaatggagaattgcactaagcaatcactacgcatggctccaaactcgaaggtggaggacacatgaatgaaaatgcaattcatggggctccgaaaaagggtgagaatggagaattgcactaagtgttagtgtttggctctactgagctttaaaagattggctaagattttgttaaaacataagcacttagacaatgaaggaaaactggagttgctgcacatgatgtccaacgttatgtcaaggaa

SEQ ID NO: 19998 - DNA, 402 bp, Glycine max
  unsure (1)..(402): unsure at all n locations
gacaaaaaaaaacactaaccaaaatcacaaactaataggatgaatatgacaagaggaccataaaaaaatagaaaatgcaacacacacagggttttgaaaccttcaacatgaagaaagatgaaaatctaaggttgcgaaatgtgagacttttttcagttttttgatcattctacccctccctttttttacactgttttgttttgttgccattgccattgccgcgttgcatatgaagtttcgaacatatgtcactccctggttggcggatttcaactccccatttaatttcacttaataatcggaaatgtcctctctctccccgtttctccgccacgtttattgttattattgatgggtgtggtggtgntattattattattattattattattattattatta

SEQ ID NO: 19999 - DNA, 294 bp, Glycine max
tgggattgcatttgggcatctattttgactttcctatgccgcctctacatacataaaacagccccaccatcccaattttgcaaaaatcatattcatatatcattggggcatttcaccaagcacttggtgggcgcacgtttggacacaaattgcaagagaatggggacaatgtggcatgccccattgcttcagaatacaacataggcctaaggccttctcattcaaatccttaactcaagaaatcaagcatggattcagatgcaaattccttcacgaattttgcaaaaaatgagc

SEQ ID NO: 20000 - DNA, 474 bp, Glycine max
  unsure (1)..(474): unsure at all n locations
atggatcttagttcattagaatggtttgaaagcatccgagcatacattgtatgtcttcattttctttcatagagaagagttcatacttatgagtgaggagattgagtttgttcctctttacttgtgacgttccttcatatgttacatccagagtgtctcacatttgtttggcacttctaaagttgtgtaccttggtgtattcttcttttgaaagatcacacaacatcacattctaagccttggagtttagcataaatctgagtctttgttcctccatccattgacctctaggaatttcattcagttcatcatcatatggaatataatccccattntccaccacatcccatagatctgtatgaatcaattcaaaggggctatcatatgcttcttctattaatcatactttacgcctctnaaaagaggtggcccatttggtggagaatccctcctccatctctttgaatattggat

SEQ ID NO: 20001 - DNA, 291 bp, Glycine max
ttaaggcacttgtaaatagaaactgattcttgcattctcttggcaaatagctagggcttgaatcaagtagctatgtatcatacattttaagcaagagaactaccgcaggcagctatccagatgacattgtgacttgtggtaatggtttgttcactattatcttggccctctctaatccttgtaagtagaattcaaagtcagttgaagaatgaatgtcatcctctgttccactgtttgagtctgcatcattccccattgttgctgagttagtagcatcacccaattcatagt

SEQ ID NO: 20002 - DNA, 389 bp, Glycine max
  unsure (1)..(389): unsure at all n locations
tgcgggggtttgacccacgcgggcgttgaagaaacggcatgggcatctttttccttcctctttgcccctgttgccccgattcttttggcattcgcactcgtggaggaaatgtaatcgaactttcctcttttcaatcctacctcgattctttccccggcgaatactatgtccgcgaagctggacggcatgtaacctactagctcctcatagtggaacactagaagagtgtctaccatcatggtgatcatctctctctcaaccatgggaggagctacttgtgccgacaaatccctccaccgctgggcgtattctataaaggtttcgccttctttcttgaacatattctgcagttgagtgcgatcgggagccatatcggaatngtactgata

SEQ ID NO: 20003 - DNA, 293 bp, Glycine max
tttctttcacaatcaatctgtttactttctaacaattctaaatgcaagttcacattcttgttctttctttgttcgacatgcacatttgctcaaattcatgaaaggaaacacaaattccatcaaaatcacgcattcaatttaaaacaaagtcatacacccatttttcacaaaaagataaaagtgtttcactaccatgtcatcaaaaattaagttaaactgttcaaaatgcttcaggataagcatactaactatttatatatagaactagcagtatatatagacataaaggaatc

SEQ ID NO: 20004 - DNA, 423 bp, Glycine max
gagattttctgcccgccaagtgtcctcgctcgattccttgtttccaacccttgaactttcaaagctcaatgagaggaaaaagaacaaaaatgtttagtgctccaagctcgattacttgaaagtcttgaacgggttaggaatctagatgttgctatgatgccttttgaagagcttgttgttgatcctaggaagaaaggttgcttcaaaacatggtcatttttcgtcttgattttttctttttcttttttggcattagcatttaacttaattatggcttggaatattgaattttcatgtgttttgcctgaaatccagattcaatccgagaatgtttgttcttcaaacctggctttgtttatgcatccttccccttttgactacatttccattcatgtgaattctttctgagagtagaaaggatga

SEQ ID NO: 20005 - DNA, 292 bp, Glycine max
tgtgtcggcttgtggggccacactggttatccgcttcaatggtgcccttcctagaccacttcgcggggagcttcttcgtagccaattctaggttgcctcctagtagcacttctttaacgtcttgagccgaacgcgtgatgacttgtcggtcacgggcctagtacttttgcttacctttggctttggacttggtcgcctgctggtcggccatgggtcgtaggcaacgctccagcctttgtagatgagctgaggggctttggaggtggtggcggtgtgtttgttgcccgctgcc

SEQ ID NO: 20006 - DNA, 473 bp, Glycine max
  unsure (1)..(473): unsure at all n locations
taatattagaggactagtggaaggcttttcaaaggtcaaagaggagtttgtccgaacaattgagtaggacggaaggaaacatgggggccatcattgaccaatacaaagagaagctaaatctagcttcaacccatgaacaaaggctagaggacgagtatgcaaaggtatcggttctgcaagtagaaagggaagcaagggagagggtaacagagtcattacacagagaagcaatgatgtggatggataggtttgctttcaccttgaatggaagtcaagagcttcccagactgctagcgaaagccaaggcaatggcggacgtgtactcggctcccgaggaagttcatgggctccccaattattgtcagcacatgatcgattngatgcccacataattaggaaccactaaggcgtttggtattttgctttaataaacattnttgttccttaataaaaatgaaattggtcaatcctat

SEQ ID NO: 20007 - DNA, 290 bp, Glycine max
ttgagccaaaatcttgactctccatataccttgacccagggtgagaatgtcaatccttaccctcgaaagcaaaaaagaaaagaaggaaaatttccaatcaaagagaaagcaaaaagaaaagagggaaaatttacaatcaaagagaaagcaaaaagaaaagaaaattcccaatcaaagaatgggagaaagtaaaaaaggaagaagaagaaggaaagaaatctcctgatcaaggatcgaaagaaaacagaagaaatgtgcagaaaggtctttggaccggacaatatctgaac

SEQ ID NO: 20008 - DNA, 465 bp, Glycine max
  unsure (1)..(465): unsure at all n locations
attatttcaacacacaaagagctcctaaagtttcaatgatgcaatctaatctattactaaatgtggtaatcgattatctcgagtcacatagacttccttctgctgaaactggcatattgattactaaaaatggtaatcgattaatttgatgaaacttgccaagtgagttttcttgcttgttctaacactttgaaatttattgctaaacttgataatcaattacacaatgttgaattcattgcttctaaaaaacttagagatcaatacatttatcttatcatatttgacttctactatggataagagaactaagtctaaaacactcaacatgcatagcttaaaaacatacaacacaaatgccacatctttataaacttgtttggcattgtaaaattattanaaccaaaagatcctaagactaggacttaagtcttcaatttctttgattcaacatgtccaactcat

SEQ ID NO: 20009 - DNA, 290 bp, Glycine max
ttgcggatttggtcttcgccagtgaatggattttagtggatctgaaaagaggaaaatttaatcatcctgcttggacgaatgagaaaactggggcaaaaaggaaggaaggagatgcccatgccgtctcttcaacacccgcgtgggtcaaaccccagcaaacacctcatggtacccatcagtacgcgcaacatcacccgagcttctcggctcataccgggaacacctctagttcaacacccgtgcagcctaaggcacccacccagagggaagctccccaagttccaactccg

SEQ ID NO: 20010 - DNA, 336 bp, Glycine max
cacggatgtccgattcgggcgcataatatgtcgagaggctcgaaattgaacaacggaagctcttgagaaattcaaatggtcataacttttcacacggatgtccgattcaggagcatcacatatagagacgcacgaaattaaaatggtcataactttgcacactgctgtccgatataagcttatactctgttgttccactcgagattatacatcgtacactctctagaaattgaactggccgataacttttcacacatatgatcgattcgagcgcatactatgacgagaggctctggcttgaataacggaagcacttgagaaattcaacaggggata

SEQ ID NO: 20011 - DNA, 287 bp, Glycine max
tgaatcggacatccgtgtgttaagttttgaccatttgaatggcacgagagcttccgttgttcaatttcgagtgtcactatatgtgatgcgccaaaattggacattcgagttaagtgttatgaccatttgaatttctcaagagcttccggtgttcaattctgagcgtctcgttatgtgatttgcctgaatcggacatccgtgtgaaaagttatgaccatttgcatttctcaagagctatcgatgttcaatttcaagcctctcgacatattatgcgcccgaatcggaca

SEQ ID NO: 20012 - DNA, 350 bp, Glycine max
gtgtgggtacgtattttttctttccttatttttgtttttgtgtttgagtgtgatgcgtacacaatgtgtagctaacatttttgttcaatttccatcttctccttcacacaaatgcaacattatgttgtgggtgagttttctttaatttttctctttggggtactagagtatgttggcagcaatgactaggcaagtcaggacagtcatggttaagcaagctctatgggttacctttgggtactactcatggattttaaatttcttccagttgagcggaaaattaccatgtggaagagactcacactcgacgaggagattgttaaagtacaagtgtgaggtgaagtctcaca

SEQ ID NO: 20013 - DNA, 287 bp, Glycine max
tttaattaagcaaagtcaaaattgaataccctaaaaatgaaatttcccaaatctgaatggaataatgtgccctaacccacatcgcactgatcgttgaagagaaaaagaaatgaagagaaaaattggggaagcgaaaaagagtgaaagtgaaaggtatagtgaggaagatggagtgttcgggttatgtctagtggattgtgatgttggatcgattgtttgggtttgaagaatgaacggatcattgtggccaagtcaaatacttggccttgatcacctttctacttctc

SEQ ID NO: 20014 - DNA, 408 bp, Glycine max
aataccgacccagttcggagtgaaaacggtctttcccgaaaagggagtgtctttattcgggatgcttctgtagggtgggaattacttgctgggagggatacctcgacccttgttagcgctgaaacgcgattctgcgaacgtgagtttggttggctactgcttatacaggtgccctcatagtttctttttctgccagggtggtcaacagagatacttggctcagcgtaatagatttagccccttcctcaacttaacttcgaacacgaaacctctttgattatcacttctagattctctctttttataaaatttattttgatgatctatggtgagggatctagtctatactttaaatgcgacacattcatgagagggtgtgggtcatcgctaagatgatcgactgccaga

SEQ ID NO: 20015 - DNA, 284 bp, Glycine max
tcacataccaatttgggcattatagttacttcatttacttttggatacaaaggcttcattagattaaaattaatcctcaaaattaagtgtattatttataatttaagaagtaatttgatgtattatttaagaattttttttaaaaataaaccctaatatcatcttagaacattaatttagatttaattaacttaactccaaaaattaacttgtggaatcatgatgtgaggattacctcacttatatactttatattgatattatctctcatgtgagatataagt

SEQ ID NO: 20016 - DNA, 353 bp, Glycine max
tgggttttgacccacgcaggtgttgaaaaaacggcatgggcatctccctccttcctttttgcccctgttgccccgattcttttggcattcgcgtttgtggaggaaacgtaatcaaactttcctcttttcaatccaacctcgattttttccctggcaaacaccagatccgcaaagctggatggcatgtaacctactagcttctcatagtagaacactggcagagtgtccaccatcatggtgatcatctctctctcaaccatgggaggagctacttgtgccgacaaatccctccatcgctgcgcatattctttaaaggtttcaccctcttttttgaacatattctgcagttgagt

SEQ ID NO: 20017 - DNA, 294 bp, Glycine max
ttgagacgcatgtgatcttttggcatcatcaaaacatcggcttgatcctttgtctacattttgttgtgcgaagattggcagagaactgagcttgaagaggaagccattctgagagcatgagatgaatctacgagtgattgggaggttctagaggtggaggagacatccccactacttgtatttctgcaatccttcatttttctcttctctttgttggaaaggaagcttcccagatatggagagctaaatcctctgttagttcttccttgtaggtacttgatgtaaataccttta

SEQ ID NO: 20018 - DNA, 442 bp, Glycine max
ttgaccacagagtggtacctggagatatgtcgggggggtcaagaagaccttggggacgtcaggtggggtgctattgcccaaaaccaagcttgaccaatcccgacccaacccgggcatagtcagtcagtgagaacctgtgatgtacctaaacaggcgagctcctagcagtcaaccgataaaagaacaaagaccacaaagcaaggaggcttgtatggtggctggccagctgtgaatcttgagtgatatatgggatagggcctctggtaatcgattaccgagggtgggtagtcgattacaaggcttaaaagtgaagacaggaagctaagatggcctctggtaatcgattaccaagagagtgtaatcgattaccaggcttaaaaacgaaaccaggaagctaagagggcttctagtaatcgaatacaaaggggcataatcgattacc

SEQ ID NO: 20019 - DNA, 297 bp, Glycine max
ttgagcaaattgaaatgacaataactttatactctgatgtccggttgagtcccgtgatatatcgagacgctcaaaatttagatccgaagctctgagaaaattgaattgacaataactttatacacggatgtccggttgagtcccgtaatatatcgagacgctccaaattgaaaacggaaactcttagaaaattcaaacgacaataactttttactcggatgcccgacagagtgtcgtaatttatcgagggatgctccaaattgaaaacgaaagctcgtatcatattcaaacgacaat

SEQ ID NO: 20020 - DNA, 346 bp, Glycine max
cgagtaaaaagttattgtccgttgaattggctcgtaggttcaacattcaatttcaagcgtctcgatatattaccggactcaatcagacatgtgagtaaaaagttattatcgtttgaattggctcataggttcaacattcaacttcgagcgtctcgatatattacgggactcaatcagacatccgagtaaaaagttattgccgtttaaattagctcataggttcaacattcaatttcgagcgtctcaatatatttcgggactcaatcagacatccgagttacaaagttattgtcctttgagtaggctcagaggttcaacattcaatgtcgagcgacccgatatatta

SEQ ID NO: 20021 - DNA, 290 bp, Glycine max
ttgagccaattctaacgataataactttttactcggattttcgattgagtcctgtaatatatcgacacgctcgaaattgaatgttgaagctctaagccagatcaaacaacaataaccttttactcggatgattgattgagtcccgttatataacgagacgctcgaaattgaatgttgaagctctgagccaattcaaacgacaataactttttactcggatgtctgattgagtcccgtaatatatcgagacgctcgaaattgaatgttgaacctatgagccaattcaaacg

SEQ ID NO: 20022 - DNA, 468 bp, Glycine max
  unsure (1)..(468): unsure at all n locations
atgggcgaagggcttttcgaaacgtggaaaaaagattgcttcaacatctgtgaaagcactgcatggaaaaaaaaaggaaaggaaaccaatggtcataaaataatggattagtgaaatatgtagatcgattatttttttttctgataaatattctctttcgatgggaattttgttcaaaacatgattgcttactaaatgttactctttttttcaacaaacattccaagtaacaaattaaagattcataagaagaaattttaatgttaaggattgaactaacatctataattaatatattgaagttaagattgaattatttcattattatttgaatattattatttgcataaataatttttttattagattttatttatctttcgatcaaactttaaattaatccaaatattttttttgataaatcgaaggattcagataataaaaaataaaanaaaattcaatcttaat

SEQ ID NO: 20023 - DNA, 294 bp, Glycine max
taagtacgaggaaactgccatgccattcgcattcccaaaactggacttgtttgcagcacaagctcaagtgcaacggcagattcctttgccttttctccaacaacagaaaggaggtatctactgtttggttttccttctccttgcatttgggaatgggctctatgctaaactttccacaacacttgctcttgctcaattctctttactgcactttttagcatttcgtggcactatttgtccaatcatggtttttacattccttctctaactttttttataatggcttatcaattg

SEQ ID NO: 20024 - DNA, 478 bp, Glycine max
  unsure (1)..(478): unsure at all n locations
ccttctatgagcacaatcaccaaaactcactctcccaatgaataatgtccttcgagaagaagaggaaaagataagcaaaggtttttggagaaagtgaaatctggaatatcttagggtttagagtagtttatgacacttgaaagtctccctctcacacctaggcttctactatacacacaacaacccttcctctcataacccaaaagtcaatccatttaagctcaaacacactaaaactcactaactcacataaaacacatataatcaagtcaacaagcacattaattaattaattttaaacacttaattaaatntaatttatcttgttattaaattaaatcacttatacaacaattaataattaatctcgacattacatttggattcctctcattcgagtctgtatttgatttattcatatatccctcatgttggaaacatgtgaagagtcatgttagtcggttaatacgactaactt

SEQ ID NO: 20025 - DNA, 292 bp, Glycine max
tgattgaacagtgaattgattgaactttgtatacagtggcttttttggtatgaaatgagtgtttgaaaatgatttgactgagcaaatgtatgaattgaatggattgggatgattagatgattgtgttgatcaagtttgcagtcattagaagagaatgagcatgtgattggaagtatgtttgaaaatgttagttggttgtcagattgattgtgaaggaatgcattaaccgtatccaggtgagagtgtgatctttaaattttgagataaacgactatcatttagtactgatttt

SEQ ID NO: 20026 - DNA, 449 bp, Glycine max
  unsure (1)..(449): unsure at all n locations
ctcccatatctactcaataatgtaatggtaaccataatcccagaaaagattcctcaaccaacatgtgcttatcatggaggagttctggggcattccattgagcattgtatgaccctgaaacataagatgcaaagtctaattaatgcaagctggctaaaattcgagaaggacaattgcttgtgaattctgacgttgtcgagcgatactatgcattatacttggggcaatttgaaggttgttgttagatgtctccaatgactcattaggattttcaagtttatgccattactataaacaacagtcacaatgctaataacatggataaatttgatggccttgtctctcattctctcacaattacatctttgcatatntattccttggaatgtgaatatacgttggtggcttgtatggtaagtgacttgtgctctttgagtgtcttcaagtct

SEQ ID NO: 20027 - DNA, 291 bp, Glycine max
tatcatattgcaacttttcaatcttggttcgtgttgaactgaagttgaagaaacacagctagtatttggtacatccctgttcacaatagtaacttatttttagatgatacaataacattctaaaaatcctttgtcttgacttcaacaaatcaaatagtatcttatgtcagttatgggtttcttgccaataatatcactatagttatttatcttttcttttgtgacttatattattttgtttcttctttcctaaatggcagcattagatgttaattattcaagctcctcgac

SEQ ID NO: 20028 - DNA, 482 bp, Glycine max
aatccgatccttggttaatggatatttgaagatgtcagcaatttgatccacagaagaatacatgacagatttggagcaatttggattcaacaagctcatgaatgaaatggaaatccaaagcaatatgtttggacctagtgtgtataacaggattcttggtcagaaaaatggcgctgacattatcacataacaataatggaggacgtctaataggaacacaaagatcttgaagcagttgtttgatccacaacagctcaccagcagtgtatgcgagtgaacaatacttaacttcggtgctagatcttgcaacaactcgttgttttcgagaagtccacctgataagattggatccatgaaagatggcatatccatactaagacctgctatcttcagtgtctaaaaagccaccatcattctgaataagcgagaagagattgagctcttgtaggtgtgaaatgaatgcagcgatgtgaggttccttt

SEQ ID NO: 20029 - DNA, 288 bp, Glycine max
tacaaaatggtgttatcaatgtttctttaattcagaatttaaagaaggagctgaatgacttggaagctggtagcaatactggaattctatctcaagctgaggtggatttaaagaaatccttgcaggaatgatagtttgagttcaaacttagcaaatggaagcagaaaagcctatccatgggaggaaggataactgtcattaattctgttttaacagctcttcccatctaaatgttgtccttctttatagtccctaaaaaagtaatgcacaagctagtctcaatccaga

SEQ ID NO: 20030 - DNA, 438 bp, Glycine max
gagcaaaaattatgataaaagagagagaaaaacagatagaaaaaaactagaatatttgcttggaggaattactttaaaaaataattaagtgttggtttaaatattcttaaaaatatgagctttttttagcttttgtaaaaaaaattaattaaaatatttaaaaataaaaatgaaaacaggtgcattaattccaatttattattatttatcattattaaaaaaagttagatattttaaaatagctcagcgtaaataattttaaaaatgattaatattttttaaaattttaaatgaacgaacaaataaaagaaattcttaaataatatacaaatgagaagaaaaacatatactattttttttactaatttgctcgacgataattgttagtttgattgggttgaaattatcggacatcttatgatagttgatttatataat

SEQ ID NO: 20031 - DNA, 207 bp, Glycine max
tttcctattgttctgagcatttgaccttaactgagaaattcatttgctactgttcctaatgggtgttccattccttacccttgcctgaaagttccttttgtcaatggagagggagagactttcctgaatgactacactgaggattttcatactgttgacccatttttttctgtgcattccattgaaagatatctatggccaaaggtc

SEQ ID NO: 20032 - DNA, 392 bp, Glycine max
gcatatatgcatgcagtccacggataggagcggtgttgcgaggcccaaacccttggtgatatacttcaccaagagcacagcttcgcaaaagctcggacacctcttagcagctagacctgttcctttcccataccaaaatagccacgcagtcccatggagatatacacctccgagggggaaggaagaagaagccaccgacgtcagctcgttgtcggctaaggtaacaaatatcacgggactgagtggtgtgacccgtagcggtcgtgtgtttgcacccccggatctaccagtctaacccgcgaatgtcaaggggaaagcaaaggtggtggaggaacaagatgatgaaatagccttcgcttcgaataaagatattccggcaaaaggccttccgg

SEQ ID NO: 20033 - DNA, 286 bp, Glycine max
tgcccagagaaggagtccactgaggatatgcttaccacctcaaaagactggaaagcggtttctaatgactcctctgcggcttccacataaggcatataggatgggcagctcaccaagatgtcttcctcacctgatacgatgaccagatgcccttccactacgaatttcaacttttggtggagtgttgagggaacaactcctactgagtggatccacgggcgccccaacagacagctgtagggggggttaatatacattatttggaaggtaacttgacaggtgtgag

SEQ ID NO: 20034 - DNA, 397 bp, Glycine max
tccaggtaaccaaaaaagatcattttcccctgccattcattgatcaaatgcttgagcgcttggcaagtatgtctcattacaatttttttatggttcttatggttatttacaaattcatattgctcctgaggatcaagaaaacaccacattcacctatccctttggcatttttgcctataggaggatgccctttggcctatgcaacgcctctggtaccttccaacggtgtatgcttagcattttcaatgattttttacagagttgcatagatgtgtttatggatgattatactgtttatggatcctcttttgatgcatgtttggatagtctacatagagttcttaataaatgcattgaaactaaccctgtgctgaatttctgaaaatgtcacttcatg

SEQ ID NO: 20035 - DNA, 287 bp, Glycine max
tcatgatgatgaatcaagtttattcatttagttttgatgatgacaaaaagcccaagagaatgatttcaagattgagtcaacacgttcaagatcaagattaatttcaaacttcaagaaatgacatctagaagaatcaagattcaacacaagatgatttcacatgggaagtattgaaaagaatttttcaaaaacaaaacatagcacaattttgttttacacgaagtttttctcaaaattttctaagttaccagaattttactctctggtaatcgattaccagtttcctg

SEQ ID NO: 20036 - DNA, 393 bp, Glycine max
gctagctagtctataaataagaagcatgtgtaacacttatggtaactttgataaatgaaagtcttatgagacacacttcaaagttccacttctctccctcttttattccttcaatttcgtgctccccccttctctctttcttttcctctattgaagcatcctctccaagcttcttatccaaggcacattcttggtggtgaagctcattcttccatggcttattcaatattgggtgatgcctcctctcacctcttctcctttatcttccattgcatctccatggtggaaaatcaccattgaaggacctcattgaagctcaaagatccagtctccatagaagcttcacaagcaagcttccatcaagtggtaatcagagcacaagagcctcaagta

SEQ ID NO: 20037 - DNA, 286 bp, Glycine max
tataagaatgagaaatgaaattttgtttccatgaatgagaagtttgcacaaatttataaggaaaacaagaagagaaagaagattaagagtctcttaccaaagttttgatggaagaaacctcaagaacacttgtatgaagcttggaagttgaagaaaatggacccctctccctcttggttgagcttgtgcaaatggagaatgaaaggtttccaaattggtttttcaaagaataagaagataaggtgaaagcttaaggtgacaagcagatttgacaacgtgaatgatc

SEQ ID NO: 20038 - DNA, 410 bp, Glycine max
cttggtttatgtttattaacctttaatcttttttaaagataacttgcggcactaatgatcggttaaaacctactttaaaaaagggaagagattaccgatgatagaaaaggagatgaaggtgcacaaaatgccaaagaagacccctaagggtgcatagatcatgttcaaattcttaaaatcaaacactaaacgaatgatgaacgaagaacataaagcgaagaatgatgtagaggttgatcacgaccgtgatttggcagtgcctcgaccttgttttcctcttctttctctcaattccttcacttctgtacctttcaaccccttcctcagcccccttcacgcctatttatagcaaaaaaaggcatttggtggacctgcagctcgcccaggcaagctggttacctaacatggga

SEQ ID NO: 20039 - DNA, 284 bp, Glycine max
tgtgctggccaccagtggtcgtgggtggtggaaaagttgttagggtttgggtgggcattttgagagaagaagagtgaaaaatcgtgtttttcatggtgaagaacatatttttcgtggtgacatttcacgctgactgcaatttctctgttgattggaattgggcttagcgcgttgatcttgttaagtgagttttctcctcaagttggaattgtgcttagcgtgcttgtattagtaattgagatgtccaaaagtattattttgaaaatccaaatggtcaaagcatg

SEQ ID NO: 20040 - DNA, 481 bp, Glycine max
  unsure (1)..(481): unsure at all n locations
cgttgaccacagagtggtacctggagatatgccacgggggtcaggagaccttggggacgtcaggtggggtgctattgcccaaaaccaagcttgaccaatcccgacccaacccgggcatagtcagtcagtgagaacctgtgatgtacctaagcaggcgagctcctggcagtcaatagataaaagaaacaaaaccacaaagcaaggaggcttgtgtggtggctggccagctgtgaactttgtttgatatgtgggttatggcctctggtaatcgattaccaagagtgggtaatcgattacaaggcttaaaaatgaagacatgaggctaagatggtctctggtaatcgattaccaaggggtgtaatgtagatgcaattgcctttggtgtcttgatgatgatcatgatgatatgatgcaatngatgcanatgggcttttcaagataaatccaagacaatacttcaagattacaagtcacaacataa

SEQ ID NO: 20041 - DNA, 292 bp, Glycine max
tgaaggtgtgtaacccaccatttttcataatagaacactggtaatgtgtctactatcattgtttcatttctttctccgtcattgagggaaccacttgggctgccggatccctcaacctttgggcgtattctttgaaagatccatgccccatcttgcatatgctctatagttgcatcctatccagagccatatcagaattgtactgatactgcctaacgaagacaaccattaggtccttccaagaatggactcgggaaggttccaagttagtataccaggtgacagctgccct

SEQ ID NO: 20042 - DNA, 418 bp, Glycine max
  unsure (1)..(418): unsure at all n locations
gaataagaatgaaaattagaaacgggaaagaaaagctgggttgcctcccagtaagcgctcttttaatgtcactagcttgacacatcatcctgttatctaggatccaatagagttcctacttcaaggaccttcttctcaagtctcctttcctccatcacatacactttaaaatagacattttggccaggtggatctttgtcctcatggaacaaatcaaagctgatcttctatgcccatctgcagcatcttctttcccatgtccgccatgcagtttgcagtatatatgaatgggcggccaagaatgagaggaatgccaacatcctcttctatgtctatgacaatgaaatcagctggaaatataaggtgtttaaccttcaccanaacatcttcaatgactccatatggccttgtgatggaa

SEQ ID NO: 20043 - DNA, 297 bp, Glycine max
tggttaaagaaggtgtaattcaagacatttaagtctctacatttttcacggatggaagttcataaacactaggtataaggctcaaacccgaaaggttccttatactgaaatacaatatcacatgctctttgttttatgtttctaaacaaattgtgttttcttaaaacattttaaaattttaaattatgtgggggaatgttagtaaatatttgttttataatttcaaatttataaaaatatattacttatattaattttttttataaaataaaatatttgttttataatttgttacct

SEQ ID NO: 20044 - DNA, 464 bp, Glycine max
  unsure (1)..(464): unsure at all n locations
aagatgatgacaaaaccaagaatgatttcaagattcagtcacaagttcaagatcaaagataaatttcaagtttcatgagaagaaataaagaagattcaagaatcaagagaagtttgatttcaagattcaagagaagatgatttcaagattcaagagaagaaatcaagaagacttcacaagggaagtattgaaaagatttttcaaaaaacaaacatagcacaattttgttttccaaaaaagtttttctcaaaattttatatgttagcagagtttttactctctagtaatcaattaccagtttcttgtaatcgattaccagtggcaaagtttgatttcaaaagcttttaactgaanttgcaatgttctaattgatttcaaaatggtgtaatcgattacaagatattggtaatcgattaccagggtatctgaacgttgaaattcanaatcaattgtgaatagtcata

SEQ ID NO: 20045 - DNA, 295 bp, Glycine max
ttttaaaatgatttctttacaaaagttagtcgtataaagcgactaacagataacaacttgtttttggccaacaaagcgtcctgtgatgaaagctccaacaggtttcttttggttgggatgtgtgctccatcacgcaagattgcttggtcactagcagccatattctcaatcaattccatggcttctttagggtcttcaattttattttcccccctacaaaagcatctaaaagctacttggattgtggccttaaccagtcaatgaaaatattgagctggactagttctgaaaatcc

SEQ ID NO: 20046 - DNA, 265 bp, Glycine max
ggcgcataatatatcgaaacgctcgaaattgaacatcggaagctctcgagaaattcaaatggtcataacttttaactcggatgtctgatttaggcgcataatatatcgagacgctcgaaattgaacatcggaagctctcgagatattcaaatggtcatatctattcactcgggggtgcgatttaggcgcataatatatcgagacgctcgaaattgaacatcggaaacctccagaaactctaacgggcataaattttcacttcggg

SEQ ID NO: 20047 - DNA, 293 bp, Glycine max
tggatttccttttagtagggaatttattcttcctaagatggagccaaacccagtcaccctcattaagaactagctcttttcttcctctattgcctttagttgaatacacctttgtttgattctctatttggttcttaaccctctcatgcatcttctttacaaattctgacctagattccccttctttatgtataaaagaagtgtccagtgggaggggaatgaggtctaacggtgttaggggattgaacccatagacaacctcaaaaggggactgcttggtggttctatgaacc

SEQ ID NO: 20048 - DNA, 419 bp, Glycine max
catttttgttttaagagtagcgtcccactggtaaaactaactttccaaatgtttgccttcgcaggaaatggccccgaggaagcttacctcaaagaggtccaggaaggacaaggcagtcgaaggaactagttccgctccggagtatgacagtcaccgctttaggagcgctgtacaccagcagcgcttcgaggccatcaagggatggttgtttctccgggagcgacgcgtccagctcagggacaacgagtatactgatttccaggaggaaatagggcgccgacggtgggcatcactggttactcccatggccaagttcgatccaaaaataatccttgagttttatgccaatgcttggccaacagaggagggcgtgcgtgacatgagatcctgtgtaaggggtcagtggatcccgtttgatg

SEQ ID NO: 20049 - DNA, 289 bp, Glycine max
ttagccttaggttgttccatgttgctgctccctctatctctaacaatttactcattgtgtttctttcatttgttcttagagttttgttggttaaggactggcataggagaacatcaaatggaggtatatgttgccctattttataatctccttttattctcatggttaatggttaatgtttgtgtttcatgttctgatatctcactatttgctttcaatgtttgatgctttatatatcttattttgaatttttaaatctatggttttgataggcctttcatttcattta

SEQ ID NO: 20050 - DNA, 454 bp, Glycine max
agataattatgtgagtgaaaatttaggcaccaaaaaattaagttctcttagaagaaacaagaatataaatgtgatcctgaatacacacagaaaagtcaaaagcatatcaaatataatgcaagttgctaaagaaaaaatattcaaaactacataaattaaataataatacagcccatattacttcctctatcggcagttaaataacttctaatttcttttgtcagcaatttcaatttgaatctaatggggatataaataacacacaatgataatcaaactatcaaagtcaacctttggtggtaaaggaatttatggattgaaagaagtttgacacaataaactcctaaatcacacagaacactgtaaactcccacccctggtcgcttctattatctgttcacgaactcattatttaggaagttatgtaagacttcagcttttaaactcatttttt

SEQ ID NO: 20051 - DNA, 292 bp, Glycine max
ttgtaattcagacccgagtctccaaatatgaaaatgtagtttacaatttacgagacggggtttacttcaattaatctgtaaaagaggtctattctgtcatacgttatcatatgattacttgggtataaaaatattgcctaggttttaaaaaagaaagaaactaaaatatatcattgaagtttaattctaacaaatacatctaggtgagggttaaatctaattaaatactctaaaaaatttatcatctaattcataagtcacaaggaaaaagaaactctgattcatctaaaat

SEQ ID NO: 20052 - DNA, 225 bp, Glycine max
cttaaatgaaaaaccatgatatcaccttacccttaatgaattttggagctttggaattcttatggtaataaatgtttgtgtcgagtggggggcgctacttctatgaaccatatttaatttcttctttcctcctaaatacacttttaaagacacatttttgcccatagtacttttttcctttgaacaaattaaacttaaatttttttcccctatccccaatttttt

SEQ ID NO: 20053 - DNA, 291 bp, Glycine max
tggaattcgaaaatttgagcttcaatgaaagagacacttactagaaaattgagttctttggaccaatctcaatgttttaaacctatcacaaaaatatacctttttcattaaattggtcttgttttactctagacaaaatttgcaacaactttttcgttggagtccttgtgaaatgaggtcaaattaaggcatatttgtggcatgcaagacgattgccttattttgcaaattaggtctagcagtgtgttttttccttaattttgagtctttatggtgatcttcctaaaatgg

SEQ ID NO: 20054 - DNA, 448 bp, Glycine max
caattctattcttagaaattgacctaagcgcttgtgccataatgctcctgagtttgtattatcaattctatgcttagtaccacataattctatattaaaggattcaccataggaagctacagtatcaagtaaatatagattatcattaaccaagagtgaaccagttccaataatatcttaattaaaagacaatctgaacacattgtttccaaatgaacacaaataatccaatttgtccaaataagaaactgaaaccaaattctatctaaatgacggtacaacaaaaatgtctttcaaatccaaataaaaaccagtacataataataatctaaagttccctatagcttccacttccaccgatttaccatctccaacatagattcatctttcagaatcaattagcttccggtagcttaggcaacccctcattaaaacacttatgttagta

SEQ ID NO: 20055 - DNA, 289 bp, Glycine max
ttaacctcatcatctctcattgtctttagatttgggagccaatccagtccttgtgttcggactctcagccacttatgatagccgccgatgatcccattactgcttcccctaagctctctgtcctttcttcatgccgcatcccatgccttgcgaactccttggagtacctttgcattggggtcactgaaaccccgtgtaatgaaaggcgtgatgcttttgtctaatggcgctcctctcacagggtagccaagctgtcttatggtgagaacgggattataattaatacaac

SEQ ID NO: 20056 - DNA, 472 bp, Glycine max
  unsure (1)..(472): unsure at all n locations
gtgctccttaaacctccattgttgtttcttcatttttctccatgtatttcctcacatatcttgtgttgaatgttgttaacatgattctttagaatttccactgattaaacttgctatagaagctagatttgatttcctatggttcaaatttcttgttcttgttcttgaaccatgaattgtgttgagtttacgttcctttgagttttgtcttggcatttttttttgtggctgaaacttaaaccataaaattcttacaaaaacattaaaatagaagaaaatctcaaaaatctagagtgacatgttcacctattgtagttntttcatagatgtcatgtctagtcatgaaacttgtcacataagatatcttatgttgtgtagaattttatctttctcgtttctttgcgtaactcatttgttcataagtgtatgaaattttttagcctattattttatttgagtcaaatcttgcatg

SEQ ID NO: 20057 - DNA, 288 bp, Glycine max
tcaacatcagaccacttccatggtgctggaactacttcacatggacttgatggggcctatgcaagttgaaagccttggaggaaagaggtatgcctatgttgttgtggatgatttctccagatttacctgggtcaactttatcagagaaaaatcagacacctttgaagtattcaaggagttgagtctaagacttcaaagagaaaaagactgtgtcatcaagagaatcatgagtgaccatggcagagagtttgaaaatagcaggtttactgaattctgcacatctgaagg

SEQ ID NO: 20058 - DNA, 346 bp, Glycine max
cctggtaatcaattaccaaagccttgatatcttggaaacactttattttgaggcaaaagcttgatgaattaatcttgaagcaatgtttgtttgttgaagcaaccttgtattaatcttgaagcaatgcttaaccttttaatatttggtgaagtaatcttgaaagcaaccttgtttgattattctttggcatcatcaaaatcatgtattcatacattcacattctcccccttttttgatgatgacaatcattatcaagtgaattcttttcggcatcatcaaaacttgcatgattcacatttgttaatcttgaagcaatgcttttttgttgaagtaaacttgtattaat

SEQ ID NO: 20059 - DNA, 286 bp, Glycine max
tctcaaggaagctacatgtttcagtcttggtaaaaatgatttccagccttcgttacccgttggatcgtctccaattttggtctgcagcttcacaagacacttgtgcatgatctgaccgttgggatctttgagaagaattctggagtgtgcacgacgtttccatgtccgagagcattgctcacttgtgcgttttaagccttgtagtccaagtagctttggaaaaacgccatttcttctcctttgtttcttccaaaaccatttccaacgtgtcaagcttcttctccat

SEQ ID NO: 20060 - DNA, 469 bp, Glycine max
attttgacatatcatttaaataatagcactgtacatccatgaccataactctaagctgaatgcagagcaagaaaatccaaacataccttcaggtcactaaatgtttcagttgctataaaacgaactgaaatggggaagaatgctgatggttcggcttgtggaacaacaaattccattgacccactggcaaatatatttagtcaggcaaaacaagttcaaaaataccatgacaataatactgcacatgttagctcttaaaagcatcacactatcaccccaaatttagcatacctgcggtttgaattatcaatcagaaggacagaccactccaaaaaggaattccttgagtcatacctgcaaagccaaattataggagattattaagagagacagaccgaaatgtgaaataaaatgatctcaaaatatatatgataaacgtcatcacatgatgattctgggagtggagggg

SEQ ID NO: 20061 - DNA, 287 bp, Glycine max
tgtgcaccaatgcacactccacgagactatccgagtaaaaagtggagcctgggatgacaatggcatttttatttacacaacattaaatcatataaaatattgcctccccaatggagatagtgggataattaaaacattggatgtcccaatttatattacaaaggttgttggaaacaccatcttctgcttgggtcgggatgggaaaaacaaagctataactgttgatgcaacagaatatatctttaagctttccttgttgaagaaaaaatatgatcatgtaatgaaca

SEQ ID NO: 20062 - DNA, 461 bp, Glycine max
gatgaactaaggcaaaatctcaatagaagtcaattcttgggctagtcttttcaccttgtgattgattacactaattggtacttgattacactatgaaaaacttgcttttcttccaaaaccttatgcaccaagtcatcatgaatgattatccttaagcatgtagaagttataaaagtattctaagcacacacatgcctaaatagaacactcaatacaatgccacacctataaaatatgttttggcacgtaaaaagataaaaatcaaaacctaagctaagagatacaagattcttcaatctcattttcctaagcagaaaacctttgtgaggtgaaaatttgtatatgtgcagtctaaaacatagaatccctttgatattgtaactccaacaattggtggcaaggtcaaaatccagtgttattggtctagttgaggctaggttggaagtccaatgggagtagtg

SEQ ID NO: 20063 - DNA, 282 bp, Glycine max
tatgaggcaccacaaggtcagtgtatctctcccaagcctcttgggaagtgaatctggatctatcaaatctggcttgggtaggtgtgagggtgcctttcttttcctagaagccatctgcaaaatataagacaaaacacaatagattagtacaggcttattctcaagaaaatagaaaaatttaaactaaaaatagagctgagcgcttagcgcagcatgctgagcttagcgcgccttatgaaattaactcaagcgctaagcacggcaagctggcacttagctcga

SEQ ID NO: 20064 - DNA, 432 bp, Glycine max
  unsure (1)..(432): unsure at all n locations
accttctaagcccaaaagatgaataagggaaaagaatagaaaaagaaaaaagagcaacctttaatggttaaggaggagtgtaatgaagtaagtgtctcctccaagaggttagctaagaaggaaagtcattttgcaataaagacaaacattaaagaaacttcccgtcttagacaacctccacatcttcttctttgtaaaagaacacttgttagcactgctatacctcttgagcttgtggttattccttaagtaaaggagttgttgggtgagggtttagttcataagagcttaaatccttgtgctttgttggtacccanaataggtattatgaggcacccaatccctatgataggtgatatgatgaatgtcttgagaggtgcaaccctcttttgaaaatcacccatgcattcaacatcttcatgaatcacatac

SEQ ID NO: 20065 - DNA, 296 bp, Glycine max
ttaccagctgggcgataaaatcatcatagacttcttgctgtaactctgcagtcttaaacttcaattgcatgtgtgacaacatttgctcttttaagcctttcgggagtctatatttgtttgcatattgtaatattctattgaaggtattcctctatgaaggctagtggggaaacaaattagttttgggtatagccattcttaagcttttataggaccaaaagtgcttcgatggggtatatttgcccaatccatgcacctttctaataaattcttgtccaaatctggctttggttaag

SEQ ID NO: 20066 - DNA, 432 bp, Glycine max
aatgggaagactaaggcaaccaataaagtcatactgggagagttaaaaaagtgagtcaaaagggctaaaggtaactgggccgaggaactacctgtcaagtcgttgatgaccaaactcaagtcgagaaaatgaagaagaagaaatgaatgaaggactcgcctaagcatgagaagaaactggttaagtctatggaggggcagaatgaagtcgataatgctgaggtagagatttttaaccttgataggcccaaggtggtggaagtatgcaaagcagccgaagggcttgtggtgatattaaaagagggcgcatgggaaaaaaggctgagaaagagaaagaagtagaggtggctaaaaagtcaattgcgactaagaacgataagatgacggaggtcgctcagaagttgacttcaatcagttttggggatagttcgag

SEQ ID NO: 20067 - DNA, 296 bp, Glycine max
tgtctggacgaacacagggacagccattatttatcaccaaacttgaagtctgttcttaaatgcatgatataataattttatcatgagattgatctatttatttctgcttttaatttgaccagtctattttaatatccctgtatggcctttttggtcttgcttttaacactatacattgacgtaattttgtcatcaactgttgagctctttgttgcatgatcctgatgcataattcctttgcaacagggttacaagaattcttccacctctgacacttatgttcaagaagttataat

SEQ ID NO: 20068 - DNA, 465 bp, Glycine max
  unsure (1)..(465): unsure at all n locations
ctcctataatgactatggcatcatttctggcgctaaactgctgggagttggaggccatcttctcaattaaatttctggcttcagcaggagtcatgtctccaagggctccaccactggcagcatctatcatacttctctccatattactgagtccttcataaaaatattggagaagaagctgttctgaaatctgatggtgagggcaactggcacatagtttcttaaatcgctcccagtactcatacaggctctctccactgagttgtctaatacctgagatatctttcctgatggctgtggtcctggaagcagggaaaattctgtctaagaatactctcttaaggtcatcccagctcgtgatggaccttggagcaaggtaatacaaccagtcctttgccactccctctaatgaatgaggaaaagccttcagaaatatgtgatcctcttggacatcntgggggttca

SEQ ID NO: 20069 - DNA, 293 bp, Glycine max
tcaagctaaggccaaactctcgtgcatgcagaggcttattcaagaaaaatgccaaactccctaataaatgtgatttcaagcttaaataggtgggttggtctgtgctcatgcgcttagcgtaaatctggatcgcttagcgcacataagtggattgtggcttagcgcgcttctctcgcttagtggataagctgaagcggtgcgcttgatgacctggagcggtgcgctcagcgaacctgacagctcatcttcttctggattcttcctcgcgcttagtcactgagtgtcgcgcttaa

SEQ ID NO: 20070 - DNA, 459 bp, Glycine max
  unsure (1)..(459): unsure at all n locations
ccatttcctagttaaccatgcattaggtaccatgttcaattattttgttttgttgttgtgtgtgttttttttaagaaatgggtttatgatcccaacatggttggctcatggtgcctaacacatgcaactaagaatgtagtgtgaagtttcacgctttcccttttttgtttttgttttgtagagcaaaacgcaaggatgagcaaacatgaaaacaaatggtatgcaattttgcagatcaaaaagtttgttgaacgcatatgcatgatgatgccatgactcatgcaaaatgtgaggctggaatatgataacggacaaatgcangaacgatatgctcattatgatgttatgaagagatgcttatgcgatgcatgatatgaatgcattttacgggcacgagagcacgataaattatctcttcttacttgcgcatttgggggcgcaatgccccatgtgtacaat

SEQ ID NO: 20071 - DNA, 294 bp, Glycine max
tcctcggggccatttcctgcgaaggcttaaatttggaaagttagttttaccagtgggacactactcttaaaacaaaaatggcatacaacctcctcccataaatacaaacatcaatctaaatttagagcaagcttatgcgcatatttccttacgaacgttcacttgcacaagacatcctatcaactaagaaaaatgcacccatatacaatcaaggtagcttcattacctagattatttacatgtacttccaaggtgtatttgttatttacatcacacacgcctccttggctgaat

SEQ ID NO: 20072 - DNA, 425 bp, Glycine max
gattgattcctttcttgattcgaaatacagtattatttggaaagagtatgagcaggttctagcaaaggaggaagttcattggtatacaaaatctaaggctaaatggcttcatttgggggatcgcaaccccaagtcctttcatggtgtgactattatccgtcgaaggaggaataggtatgatatgattaaagatggtgatggtaattgggtggtggattccgagaagttggaggagatggctactaagttctataaggacttgtatacaaaggatttcatatatcttcctttggtgacatctcatgcgtttccaaaattaagggatgaggccagagaggagttaaggaggattccatcactaagagaaatctattataccatcaaacaaatggggagtctcaaggcttcttgccctgatggattct

SEQ ID NO: 20073 - DNA, 292 bp, Glycine max
tatgctgcaaacatttataatagaccctctcagtagcaaaaccaacaacagcagaataattatgacctttcaagcaatagatacaatccaagttggaggaatcatccaaatctgagatgggcaagtcctccacaacaacaacagcctatccctcccttccagaatgctgctgctccaagcaggccatatattcctcctccaatgcagcagcagcagcaacaacaacaacaaagacaacaagcagctgaggcccctcctcaaccttcagaatatgcaatttcagcaagagaca

SEQ ID NO: 20074 - DNA, 436 bp, Glycine max
aattcatttttgggtcccttctcaaatggggttattttctaatatgttgtctctattttagtcttacgagtttatgaattattgattgatctttacaaaatcagaaaaaccgtggatgaactgacttctcttcctttatgaattcgttgtctttgaaataaaaataagtttcaaatataattttcttattactaaaatttacatacattatacaacttataaaatgatactcgtcgcttcatttaaatttagtttgtctttagtttaattcttaccagtgtgcacattgacctataactactcttaccagtttaatattcaatttaaatttgaagataattcaagttacttcaaaagttccttggccctacaaattaaatattgtgcgcgtgtactaaataattgatataacacaatcatgctgcacatgcaacag

SEQ ID NO: 20075 - DNA, 292 bp, Glycine max
tgtgaccttcctcatctcaatctttttcatctatgcccacatgaataggagtattatattcaagtataaaaattcatactggggaaacaagcttatatgtgaattcacctctgtctacctccaaccatcttcattaagcgcttagatgtacttgctttctttgatttcgaatgcaagcaaaaaaatatatctgtgtctttgataactgttaaatatgagttatttcataataaaaatatattgaaaatatctttgaaaatatttatttaacagttatttttttgcttaaatg

SEQ ID NO: 20076 - DNA, 472 bp, Glycine max
gaaatcaagagacacatacacattctttttgaaattctgatactggggacagatgtcgtacaggatgtcacgacatcacgcttcagaacatgcagatcgtatgtgtccgtatgaacagatttaaacaagtaaataacacaagagaattgttaacccagttcggtgcaacctcacctacatctgggggctaccaagccagggaggaaatccactaaaatagtgttagttcaaggtctaacagcccctgtttacaaccttctcacctaaccactacccgtgcgatctctacctaagagccactcttagatatgagaacctgcgctcactccctctcaaccacactcccgtgtttacaaattaatcaaagacacaccagagatcaactctgaacaaaagagatcaactctacacactagagatcaactctacacactagagatcaactctacacacaagagatcaactctacaca

SEQ ID NO: 20077 - DNA, 291 bp, Glycine max
tgctctaaatttacattgatgtttgtatttatgggaggaggttatatgccatttttgctttaagagtaatgtcccactaaaactaactttccaaatgtttgccttcgcaggaatggccccgaggaagcttgcctcaaagaggtccaggaaggacaaggcggccgaaggaactagttccgccccggagtacgacagtcaccgctttaggagcgttgtacaccagcagcgcttcgaagccatcaagggatggtcgtttctccgggagcgacgcgtccagctcagggacgacga

SEQ ID NO: 20078 - DNA, 419 bp, Glycine max
tcaccatggccactacgaattctgtgtgatgccattcggcttgtgtaatgctctatcgtccttccaagccactatgaacaacatctttggaccatacctacacaagttcattattgccttctttgatgatatattgatttatagtaagacctttccagagcatattgatcacctcacaaaagcttttgcagtttttctcgaaggaagcttcttcctcaagctcactaaatgtacctttgcccaacaacaagtgtggggcatattgtatcccgacagggcatagaacctgttcccaccaaagttgaggcaattcaggcatggctagttccgcggtcaacgcgcggattatggggtttcctggactttcagtgttctatcagcacttcaccaagggctatgcatccatcatagctcctttg

SEQ ID NO: 20079 - DNA, 288 bp, Glycine max
tgaaaccggcatattcacagtttttgtctcgttatcaaagaattgaccaagcagtggacatgaagcagagttcaatgattcaatactaaaaacatttaactcgaatgacacgttgatgtccttggcgtattggatcaaattctctctagtgaaattgagctcaacctcatcacaagtggagggtgacacaatggcagtgaccttgagtgaaggtgccccactactcctcaaggcaagctcttgcataaaagatgaccactgtactccaaacccaatatcaaaatcaat

SEQ ID NO: 20080 - DNA, 431 bp, Glycine max
taactaagttgttattatgtgccaacatttttgtgtttcaagcccattacaagacacactagatcctatccctattacagaacctataacttgcactcaatggtccattacttgcaatgttaccaatctgattctgatataataatgaagacttgaatagtgatgatgattcttgtatcaccccagcttttacttggaaatcctcgaaagtcatttccacaagtgtttgctaccttttgagtagtggctcattcccgacaaggctattattagcttcattgtagtgtggttggcttttgtggatctgagaccaaatttcatccacagttttcttgcaaattgggggagggacagataatggttgggaaatagtggtgggttctgttgctactacacttttaccctttgcagcttcatcaagggtgggtagt

SEQ ID NO: 20081 - DNA, 287 bp, Glycine max
tgcctcaaagaggtccaggaaggataatgcggtcgaaggaactagttccgctcctgagtatgacagtcaccgctttaggagcgctatacaccagcagcgcttcgaggccatcaaaggatggtcgtttctccgggagcgacgcgtccagctcagggacgacgagtatacggatttccagcaggagataggtcgccggcggtgggcatcactagctacccccatggccaagttcgatccacaaatagtcctcgaattttatgccaatgcttggccaacagaggagggcg

SEQ ID NO: 20082 - DNA, 270 bp, Glycine max
  unsure (1)..(270): unsure at all n locations
gtcctgcgggacgaagtccaacatgatgttacgacacttatcatcgaaatactgccatggtcctgtctgtatgaccgatttacgcgcataatccaaccataaaatgtggcacccagttcggtgcataataacctacatcgtcgggctaccattaccaggtatggtatatacttatttaacgttcagtcacgttgaaccgccactgtctcgatcttgaactgaactccctccgtgcaatccttcttaaatctccttttatacgcaacgtcn

SEQ ID NO: 20083 - DNA, 434 bp, Glycine max
tccaactttgtataagagtggagcaacaacttaaaaaaaatctttcttcaaaatcttatggctttcactctattctaaggaagaaccaagccaaaggaattttgggggttgcaccttcaaaacccaagaaagataagggtaagaccatagagaaatacacccctaagactagttcccaagcaaggactagccacattaaatgcttcaaatgtcttgggagaggtcacattgcctctcaatgccccacaaagaaaatcatgattatgaggggtcaagatatttatagtagtcaaaaggagactacttctttcccttactcgagtggaagtgaagatgaagtaagggatgaagagtgtagtgaggaattctacccccatgaagaggtgacctcctaatggttagaaaggctcttgaggtcaatcttgtgatctatc

SEQ ID NO: 20084 - DNA, 286 bp, Glycine max
tatccctagaggtgatggactttttcatgtcttggtgaggatcaataacaatgcctataggttgaacctcctagaagagtgtggagttaacaccacttttaacatttctgatttaattccttttgcaggtggagctgatactgaggaaaaggaaccaacagatttgaggtcaaatcctcttcaagggggaggggatgatgcaatcctccgtaggaaggaaccagtcactagagccatgagcaagaggagaggattgggctagagctattgaagaagaccctagggt

SEQ ID NO: 20085 - DNA, 383 bp, Glycine max
tttctcgagagctttcgttgttcaatgtcgagaatctcgacatattatgccgctcgaagtcgaacatccgtgtgaaaagttatgaccgtttgagtttctcgagagctttcgtcgttcaattccgagcatctcgacatattatgtgcccgaatctgaccttcgtgtgaaaagttatgaccatttgaatttctcgagagcttccgatgtttaatttcgagcgtctcagtatattgctagcctgaatcggagctcagtgtgaaaaggtatgaccattttgatttctcgagagcttccttggttcaattccgagcgtctctacatattatgtgcccgaatctgaccttcgtgtgaaaagtaatgaccatttgaatttctcgagagct

SEQ ID NO: 20086 - DNA, 284 bp, Glycine max
tctatagaagggtcgttcctaatttctctacaattgcatcacctctcaatgagctagtgaagaagaatgtggcatttaactggggtgaaaaacaagagcaagcctttgctttgcttaaagaaaagcttactaaggcacctgttctagctcttcctaacttttctaaaacttttgagctagaatgtgatgcctctggagtgggagttggagctgttttgttgcaaggtgggcaccctattgcttattttagtgaaaaacttcatggtgcgacccttaactacccc

SEQ ID NO: 20087 - DNA, 227 bp, Glycine max
attctcatctacgtaactgacgttcaatgctaggggttttacacaagtttgtggaaagatcaatactctcgactatggtctgtagccattatttttaactatgcaggtctagctcaatacactatattaacatacattctagacattgtgatgtcatatgacattttataggaatcttattgaaaactcgcataactgacttatgaagcatattctccataacaaca

SEQ ID NO: 20088 - DNA, 294 bp, Glycine max
tggattacaaactgcaacaagacttactgatgatgttttgacggtttcagtaacaagaattggttgcatcttgccaacatcatctgcaacatcctttttggacaaatcaatcactgaatttacctcatgagttgaccttctttcatctttataagcataattctcctttagatcttcagcaatagacaatgtatttgtcagaccaccatttatcacctcacaaacttgggtgttctgattagcacaagcctcagcttgatgtttgggcttctcagattgggaaaggcttccacc

SEQ ID NO: 20089 - DNA, 447 bp, Glycine max
tctgtggctgtcttactggtttagccccatcctctaaatttatccgatgcatacatgtggatgggctaataccaggaatgttcgctagggtccagcctatagccttcttgtgcttcttgagaactgataatagcttctcctcttgctcatcagcaagggaggtagatgtaattactggaaaacttttgctatcatccaagtaagcatattttaaatttgatggcagaggcttcaattctggtgtgggcggctggataatggtagaaagagatggtttctcagcctgtacctcaaaaataaagtcagaggtatgtgtatttcctgaaacatggttagttctatctgactctagaaaatcaatctcaagaggtaaaacatcaccagacatgtaatcaatatcaatttcagattcactctcagcatccaattcatccatatgatcaacta

SEQ ID NO: 20090 - DNA, 291 bp, Glycine max
tgggatgtgttcaagcatatagcaaatcctatctatatatctgcaaaatcattttcaggatctgataacttcttatcagacgttagttcatcattgaatttaacatggatggattcttctacaactaaagttcttgtactaaaaacttatatgctttagatgtattagataaaccaagaaaaatccctttgtccactttggaatcaaacttagcaagttgatctttagtgttcatgataaagcactcacatccaaatggatgagagtatgaaatattgggtcttcttcctc

SEQ ID NO: 20091 - DNA, 458 bp, Glycine max
  unsure (1)..(458): unsure at all n locations
ccgaaaaaatgcacccatatacaatcaaggcagcttcgttacctagattatttacacgtacttccaaggtgtatttgttacttacatcacacacatctgcttggctaaattcacatacatgcatactcaaagcattttggggtaccaaaaattgcacatgtgcacatcttggtatttctaatacctatacatacacaaacttcatgatgaatcttgactatctacacaataaggtgctacatttcatgctcttttcaagtttttgctacctaaagccgcatgcaaattcaagtatattttcctttgctgactaanattgtattcaaattaaaaggtatacattttttggtaatgtatcttctttacataacatgcaacatatttatgtatatttttttgtgagacattctgactaccaaaaattatatgtacatacatccaagtattttgctatcata

SEQ ID NO: 20092 - DNA, 293 bp, Glycine max
ttgaatgctctattcaatggagttgactagaatatcttgagactgaccaacacttgcacagtggccaaagatgcatgggagatcctgaaaatcactcatgaaggaacctccaaagtgaagatgtccagattgcaactgttggccacaaaattctaaaatctgaagatgaaggaggaagaatgcattcatgacttccacatgaacattcttgaaattgccaatgcttgcactgccttgggagagaagatgacagatgaaaagctggtgagaaagatcctcagatccttgcctaa

SEQ ID NO: 20093 - DNA, 359 bp, Glycine max
atgtcatggtaaccataatcccagataagattcctcaaccaacatgtgcttatcatggaggagttctggggcattccatcgagcattgtgtgaccctgaaacataagatgcccagtctaattaacgcaagctggctaaaattcgagaaggacaattgcttgtgaatgctgacgatgacgagcgattctatgcattatacttggggcaatttgaaggtcgttggtagatgtctccaatgactcattatgattttcaagtttatgccactactataaacaacagtcacaatgctcataacatggataaatatgatggccttgtctctcattctctcacaattacatctttgcatatttatt

SEQ ID NO: 20094 - DNA, 282 bp, Glycine max
tatcatatcgcaacttttcaatcttggttcgggatgaactgaagttgaagaaacacagctagtatttggtacatgcctggtcacaatagtaacttatttttagatgatacaataacattctaaaaatactttgtcttgacttcaacaaatcaaatagtatcttatgtcagttatgggtttcttgccaataatatcactataggtatttatcttttctttagtgacttatattattttgtttcttctttcctaaatggcagcattagatgttaattattcaag

SEQ ID NO: 20095 - DNA, 477 bp, Glycine max
  unsure (1)..(477): unsure at all n locations
gtgaattgggacgcatcaacaagaatcaagccaaggctattgtgcaagcaatcaatggggcaaaacacaccaaatgattatgatgatggatggctcaaattctcacaaaggtaaaatcatcactttcaaatttagctttcaaaactatcatgacatgtagagaagaatcaaggatttcaagtcacaaaatgtcaagaacttttattttcaaaacaattacccatttcttgaacatatcctataattcaaagaaaaacatgcaaagtcgtacgtgcacacaaaattgacccataatattaaactaaaaatccgatgaaactaacaacattaacaaattaacacaactaacaaattaacaaaaccaacaaaactagcaaaatcaaagaacactcccncccatacttaaacaacacattgtcctcaatgtagcacaattaaaagttaaaaacattaaatcatcaaagagaattggacagt

SEQ ID NO: 20096 - DNA, 290 bp, Glycine max
tccatcaagtggtaatcagagcacaatagcttcaagtatgtgctccttaaacctccattaattttttgctttaccttctattctattgttgtttcttcattttttttctccatgtatctcctcacatgtcttgtgctaaatttttttaacatgattctttagagtttccaccaattaaacttgctatataagctagatttgattttctatggttcaaatttcttgttcttgttcttgaaccatgaattgtgttgagtttaggttcctttgagttttgtcttgttattttt

SEQ ID NO: 20097 - DNA, 293 bp, Glycine max
gagagcattttctgagccgtgaagtgcgtggctacgagtgggacttctaaaatccaggtttgggtggacttctttctcccttaaatttcgtgggtatggggttttgggagatatgatgggtggttttgttagctttctgctgtgtgatgattatttgtgaaggcatttgctgaaaacttgttgaaatcgccatgtttggatgagttagacatacccattctgttttagggtttttgtgatgatgtttgcgatgaacatatgctgaacttgctgatggaaatctgttatagacg

SEQ ID NO: 20098 - DNA, 286 bp, Glycine max
tcgattcaggcgcataatatatcgaggctctcgaaattgagcaacggaagctctcgagaaatttaaatggtcatagcttttcactcagatgtccgattcatgtgcataatatatcgagacgctcgaaattcaacaatggaagctctggagcaattcaaatggtcgtaacttttcactcggagatccgattcaggcgcataatatatcgagacgctcgaaattcatcaacggaagctctcgagaaattcaaatggccataacttttaactcggaggtgcgattcacg

SEQ ID NO: 20099 - DNA, 428 bp, Glycine max
agaggtttagaaatattaaaaaaagagacaacatcatttttatttaaaaaccaatgttatctacacatttgacaacatcagttttcaaaaaccaatgtactagcaacatcttaaaaactgatgttaagtttctgctagtaacatcagttttttgaaaattgatgttaggaagttccatttaattacaaaaatgccaccacaaataatttcacattagtttttcttgtaaccaatattaaattggtgatgttgattgcatattttgtagttgtgatatcatgtatcataactgaaaacaagtgctcaaagctaagaaacaactgatttgggaggacattatggtatttccactaaacaatctacgttatagtaattcaatgtatttagcttgcattatgttttcattcactaactgttacataccattt

SEQ ID NO: 20100 - DNA, 288 bp, Glycine max
ttaacctcatcgtctctcacagtctttagatttgggagccaatccaatccttgtgttcggactctcagccacttatgatagccgccgatgatcccattacggcttcccctaagctctctgtcctttcttcacgccgcatcccatgccttgcgaactccttggagtaccctcgcgttgtggtcactgaaaccccgtgcgatgaaaggcatgatgctttcgtctgatggcactcctcccatgaggtagccaagctgtcttatggcgaggacgggattataattaatacaa

SEQ ID NO: 20101 - DNA, 360 bp, Glycine max
atattcatcttttcatctcttctccctttgccaaaaagaattcgccaaggactaaccgcctgaattctttttgtgtctctcttctcccttttccaaaagaacgaaggactaaccgcctgaattcttttgtgtctcccttctcccttgacaaagaattcaaaatgacacagtctgagaattcttttgattcttccctttccctaatacaaaagtgttcaaaggactaaccgcctgagaattcttttgtatccccattcacaaagtatcaaaggtttaaccgcctgagatctttgtcttaacacattggagggtacatcctttgtggtacaagtagagggtacatttacttggggttgactg

SEQ ID NO: 20102 - DNA, 286 bp, Glycine max
tcagaaaactatagaagataatgctacggcggtcgcttccaatacaactagggaagcggaaccggttctacagcccgcaataaacttgggccgagacagaaacatgatggttttcggtcggaggtatagtcctcaagcctacccttatggtttgcctccggacttcaccccccctaccgctccagacgatttgagccaagcccctacctttgaggggcaactccctcctcatgccgactatcctctgcaagaagatgatgaaggagatgcccatctaggccctcta

SEQ ID NO: 20103 - DNA, 449 bp, Glycine max
gtggcggtcaggcgatggtgcacaacaagttttgcacatccacaaagcgcgcataaacccaccatcccctgttgcccacctccaactgagctcatgtactcccacgtagcccatatcctcgtttctctcaacaccgggtgcccatcaatcctcccaagcttccccaacatccaagtaactcaacattcagacaacacaaaccatcacagccaagaaaacagggcaaaggcagaaaactctgcccaaaacaccaaccaaaatcacagcttttctcacttaaagaccccagtaacaattccttcgatccaattcgttaaccgttggatcgactccaaaagtttactggaagtctctagtacataagcctacatcttgaccgttgggatctactagcaaacatccagaactcattctgaactactctatccacagccaattacacacaagca

SEQ ID NO: 20104 - DNA, 282 bp, Glycine max
tcataatgaatcaagattgattcaaagagttttgatgataacaaagatgatgacaaaaagctcaaaagtcaagaacacttatgataacaaagattatgatctcaagaatcaaagaatgagttcaagattgaatcaagtacacttcaaggatcaagaggaaagttgaattcaagttccaagaatcaagatcaagattcacgaatcaagagaagactcaattaagataagtattaaaaagttttttcaaaaactgagtagcacatgaatttcaaaaccttttac

SEQ ID NO: 20105 - DNA, 458 bp, Glycine max
gaccatgctatgagcaagttaatgctcaactatgtggagttcaagcttaaaattttttatttgagtaacatttggaaaagtaggggaaatcccattttgatcactgtatattcctcgtgttttctttcttggtccataagtactcttttatttttggcatttggtcatatttcatctagttattaacttactaggattgtcagtgacttgagaataatgtgtttggaaatgtcagtgacttttttccttctacaaggtgctggattgctgtttttaataatagttcacttttgatgttgctttatacccaccaatctggaacagacacaacgtgcttcctggaagctctgtgattacttgcagcatgatatggccatagccctcagcttgtacgtggtagggttatgtaatattgagctttggtagacagagtaattatagaccaaatgatgaaatgc

SEQ ID NO: 20106 - DNA, 287 bp, Glycine max
tatagtatcaatatatcagtaagttatgtacgttgcggttagcttctacatccaaagacattttttttgcacaatgaaaactttctagaagccaagtaggattgcaacatatgtcatttgttatgagataaagacatcagtccttacagtgacattgacattcaactaattgttaagaaaatgattgatgtcttcaataatctaataacagtagaaatactagaattaaaggcaaatggttcagttacaacaagagttaggacttgggagagggggagggcaaccct

SEQ ID NO: 20107 - DNA, 455 bp, Glycine max
attagtgggatgtgcggaataagaaagacaactcttgatcgtgctttatatgaaagaatctctcatcattatgatatttgttgctttattgatgatgtaaggaaaattaatcaagattccggtgcatcattgacgtccaggagaaccctgatgccttggaaataattgaataagtaattatacttgaatgcgtagtaattctcttggtaggcctttggtgccagttccaacatgttattgacgctttattagatagtataagtagtgtcatcccgttctactactattacgacaaaaaaaaaatataaatgcattttgcaatatctttacataagtttcaacgaagttatttgaatcgtaagattttctatttctgacttttaaacagctattttcttgtaacctatgctagctgatagtgacacttgcgatctatataaaaatggtttcctttt

SEQ ID NO: 20108 - DNA, 285 bp, Glycine max
tttcgcaaagcttactgtaaaatctggtgacctagccatggtggaagtctccacagaggccattgcctccctcgcccagtattatgatcagctgttaaggtgcttcacttttggggacttccagttatcacccatggtggaagaatttgaagaaatcctatgatgtcctctaaggggaagaagaccatacctcttctcagggttctatccttcattagctagaatttcaaagatagtccaaatctcggcgcaggaattagatcgcggaaagcaagtcaaaaatgg

SEQ ID NO: 20109 - DNA, 369 bp, Glycine max
gctcacccccatgccaaaatacatgaaaatacataaaaagtctctactcaaagactactcaaaatgcccttaaatacaagtctaaaatcgtatactactagaatgaccaaaatacaagacccaaaagaacgaaaaacctattctaatatttacaaagaagagtggacccaaccttggcccatgggctcagaaatttaccctgaggtccatgagaaccctatgaccttctttagcagctctagcccaatcttcttggagtcttctatccaatacccttgtgggtaggattgcacttgatgacccttctctcttctctaactaaattctcaaatggcgttgttgggttggttagttttcccccctcggacc

SEQ ID NO: 20110 - DNA, 365 bp, Glycine max
aatccatcttgggcctttttcccacaactctcataaatgggagagaatgttcatctaaagcatacaagtccctaatattatcaaatcctaaaatttgagctcctagggagtaaaacaatgtgtgtctcctagagagggcatcagctaccacatttgtttctccctttttgtatttgataacatatggaaattgctctaggtactctacccattttgcatgcctcttgtttaacttgctttgccctctaatgtacttaagtgattgatgatcactatgaatgacaaattccttggaaacaaggtaatgttcccaagtttggagggctcttattaaggcataaagctctttatcataagtggggtag

SEQ ID NO: 20111 - DNA, 410 bp, Glycine max
tgaaggataacttgatgccttggtcaacctagtaactcagcttgccatgaatcagaaatctacacctgttgcaagagtttgtggtctatgttcttctgcggatcaccatacagatctttgtccttctttgcagcaatctggagtcaataagcaacctgaagcttatgttgcaaacatttataatagacctcctcagcagcaaaaccaacaatagcagaataattatgacctttcaagcaacaaatacaatccaggttggaggaatcatccaaatctgagatggacaagtcctccacaacaacaacagtctgtccctcctttctagaatgttgttggtccaagcaagccatatgttcctcctccaatgcagcaacaacagcagcagtcacaacaaagacaaccagcaactg

SEQ ID NO: 20112 - DNA, 396 bp, Glycine max
  unsure (1)..(396): unsure at all n locations
agcttatncatnngaaccccatctttcnnnnttgttgtctctcaatgaatggattctccattatgtttttcacttgaggctctaaagcatttaatgcttgcattaaatacacatccatttttcatgtaaagtctatgctgataggttgacatgtcttatacttcagtaagaaagtcacttcttccatcggagcaagtctgcaccaacagagcgcgtcttttgataaagatcaacacttctagattgtagactttatttattcttcataggattcaatagattctagaagaatgctttcttcaacaaagaatctcagatataaagtattaaatgaaggttttaaaggactacttaatgttatgcgcaattgtcctatatagatgtatcttcaaaaaa

SEQ ID NO: 20113 - DNA, 412 bp, Glycine max
tgtggctctcatcattcatttaccaataattatagactaggatttaaaaaaccttctcttggttatgtttatgaaggcacgcaaatgaaaataatgtcataaattttaggaataaaaaagaattttctaagccttacacaaatattattaaggctcgatgggatagacatttaaagctcaatcttcatgcaacaacttactggtttaattagatattcaggtatatgagaagttcgttaagaagaataaggtcgtagaattagttattgatttacttgagaaaaatagttttataggaagacttgactcaagccattagtgagatggatgtgtatttgaagtgacaagaaatttttggtggaccaagtgcctttagtgaatcaaagacagcctaacatgataagcactaatt

SEQ ID NO: 20114 - DNA, 400 bp, Glycine max
  unsure (1)..(400): unsure at all n locations
agctntaatatgcaaagaataccaagaaangttnctcatctgacttagcatcaaactttcctaagttttcatttccattgtttaaacgaaacacttgcaaccaaaaacatgaagatgcgagatgtttggtttcctatcaatgaacagttcatatggagttttctttaaaatgggtcttattaaagccctattcatgatatagcatgtagtattaacggatttagcccaaaaatattttggaagaggagtatcatttaataaggttctagcaatttcttccaaagacctatttttcctttcaacaactctattttgttgaggggttctaggtgcagaaaagttatgttcaatgccatgcttatcaccaaataaatcaaattctttattttcaaactcaccc

SEQ ID NO: 20115 - DNA, 414 bp, Glycine max
  unsure (1)..(414): unsure at all n locations
ntaagaggatgctttaatggaggaaaataaagagagaatgggttatcacaaaattgaaggaataaaatagggagagaagtggaacattgaagtgtgtctcataagactttcattcatcaaagttacaacaagtgttacacatgcttctatttatagactaggtagcttccttgagaagctttcttgaggaaacttccttgagaaacttctttgaaaaaacttccttgagaaggtagagcttagctacacacacccatctcataactaagctcacctccttgagaagtttccataagaagattcctaaagaagctagagcttagctacacatacctctctaatagctaagctcacctccttgagatgggaagctagagctttgctacacacccnctatgatagctaagctcaccc

SEQ ID NO: 20116 - DNA, 406 bp, Glycine max
  unsure (1)..(406): unsure at all n locations
agctttgaccaccgctattactcccgcgatgcttnctttatatctgcctgagtgggtttatagcctaaaccatacttcccacgattcctttagcatttatcaggctagttatgccgccattgtctttgcctaaacccattccaggttcgtaaccgttccccaacataactcgagccatcattactgctgcatcggataggtaagcttgcccagagaaggagtccacggaggaaatgcttaccacctcgaaagactggaaagcggtttctaatgactcctctgcggcctccacataaggcatagaggacgggcagctcaccaagatgtcttcctcgcctgacacgatgaccaaatgcccctccactactaatttcaacttttggtggagtgtagagggaacaacccc

SEQ ID NO: 20117 - DNA, 427 bp, Glycine max
  unsure (1)..(427): unsure at all n locations
agcttatccattactganaatcaaaacaacaaattaaataatccccatacaaaatcacatattctcggaaagtcaacattaagagacgaataaaaaagaattaaagaaaaaatatcataaaattagttgtagccttttcacatgaaatcaagtattgaaaagagaatataaaccaaggaaaactaatatgaaacagagaaaaaaagagaaaatataattataaatttcataaccaagaagtgaaaaaataaatatccaagtgaaagatccacattagaccaaataaaaacaatttatatttttaaaaataagagaaaatctgaaatatataacaagaaaaaagaaaaaagtaaagaaaaaggcatagacacaaacatgattgttagaagaggaacaaatttaaaaccatcgagaataatgttcctat

SEQ ID NO: 20118 - DNA, 278 bp, Glycine max
aaaaagaagtgctctagcaaagccaccacggtggtgacaattacaatttgcgctctaagcaaggggcaaagaaaaggcagaaagagagaacctatgagaagttggatggtgtacatttaacgttcgatctatcaccgacataagatgacgctggtctagatgtggacaacattgacgaggaggagggtgtcttcgctgacgcaagatccacatatcaaaatctacttctttgtttgattttgatttgaacttgagtctattgcctattttttcttttg

SEQ ID NO: 20119 - DNA, 392 bp, Glycine max
  unsure (1)..(392): unsure at all n locations
tgcttaaccttaagataattttaatatgtacttaactgtctattattcaaagcaaaaattataatgattgacaatccatgccatgtagaacctagaaagtacatagcaaattttgaaatgcatatatttacactgggcagaaaatttataatatattctttaaattatagttcttatttttacagctgcataaattattaaaaaataatatgattttcggggagaaagacaaaaaaattgaggatacttggagttcttagatggtgtgcatgtacagaattgctgagtgaaatacaaaacgagaggaaaatgaaaagaaaaaatagagaanaataattctgggaatgaaaagggtaattagttcgtagcaaagaagaaaaaaacagtagcag

SEQ ID NO: 20120 - DNA, 390 bp, Glycine max
  unsure (1)..(390): unsure at all n locations
agctnttatattaaagcatgatgnnnnttattgtattttatctcactgatttaaaaaaatatttttgtaaattttgacgccttattttgatccgaatatgttttaataagttttaattgataatagtgaagtgaatgtgaaccttttacccgtgtgaatttagttaccgatatttttatatattctatttatttatatatatgtcgggatagagggtgttacaatagttcaattatttttttacagaaatgtttaaatactagttgattatcataactacaaaaataccattctatgtcaggttttctacatcaattgttaaataaccgacatggaaagtgatgtantgacattttttacaaataattgcaacttatttaaatcgattat

SEQ ID NO: 20121 - DNA, 389 bp, Glycine max
tggtatccctcagattattcaggtcagtgtatgccatcagctgtgtcgtatgctcgactccttttgtccttttactgattctgagacttgcggcataacactctcttgctgtcatgtggtcagcctggacgacaataattcttcccatgataggcattctgagtatggtagaagcttgccctatggtggttttccctactggtgtcttgttgccatctgcagccattaatggtggtcaaaggagaagatttcccttgtcccatggtgggcgtcaaattctcttaccaagtttgaaagaaccttgtcatggtggtgatcttccatgagctcctccacgaacaagggtggagatacttgcaaagacactctgacgctcaagtttgaagcat

SEQ ID NO: 20122 - DNA, 361 bp, Glycine max
  unsure (1)..(361): unsure at all n locations
agctatgccttaggagcccattnnntcccatactcaatttgcaataccgtcttgcaccagcttcattaatcttaaaataaatcgaggctaaaaaaaagacaaatttatctgatatcatatgcaaatatatatatatatatatatatatatatatatatatgaaaaatagtaaagatagggcctctaagtggtgtagatataaaaaggtatatataactaattgacatacctttaaaattgtttcagagcaatcatcaaattaagctgtaggtacgcctgaaggtccagaccatctatcataatccataggatataagttgcaatcagctgctagagttacaagacatcttgcaggcaaggc

SEQ ID NO: 20123 - DNA, 405 bp, Glycine max
tgcttctacaccaagaaaaaggtaggggaaaaaaatttggaataagtagctaaatcccaaaggaatagaggagcaatggggaataagtggaaattaagcacaagtagtaaacccaaaccctctaatatcaacaaaatcaaccaaggctcccaaatcaagtcctcataacaagacctcatttattcaacttcacttcttttcttcttctctttttttctctttttttttttgaacagtacgaatttgtagaatttgcagcaattgaatttttttttcattttattttccttatttttttaacagtacgaatttgaagattaaagcaagaactaggcaatatatatatacatcaagcatggccaaaataaaacattaagcatggccaaaaattatatcttccaatga

SEQ ID NO: 20124 - DNA, 396 bp, Glycine max
  unsure (1)..(396): unsure at all n locations
agcttgaatcaaccagcattctnngnnaactaagtcactattgactctatacaaataagaaagatttgttgtttgtgctgcacaatgactaactccatgagcgtcttacaaacgaatatacaatattaatcccaacacttagcctattctctcaagataatcaatgtgttttgagattttttctaaactttacaagaatttacggatatgtttttgcataaagaatttgagtgaatgctcgtaaggttcataacctttcttcaaagcttatagtatttataggccttcatcttcaagtgatcgttgtctcataacggatgaatttcttcacttaagcttcgtttgatgcttatggttgttgaagcatttaatgcttgcattatatgggcattattt

SEQ ID NO: 20125 - DNA, 403 bp, Glycine max
ttgtataatcgattacactgatttgataatctatttctagtgatagtttctgaacaaatcaaaagatgtaactcttcaaatagtttttgactttttcaaattggttttaagtttttctaaaggtcataactcttctaatggttctcttgaccagacatgaagagtctataaaaacaaggctttgttttgcatttgatgatcgatcttttccaattcattctttacacaagcaatttttccacattgatttctgagtctctttgaacttcttcttcttctttctttgtcaaaagctttctaaagttttctggttttctaaaccttgaaaacttgtgctattcattcttttcatattttctccctttgccaaaaagaattcgccaaggactaaccgcctgaattc

SEQ ID NO: 20126 - DNA, 401 bp, Glycine max
  unsure (1)..(401): unsure at all n locations
agctttgagccaaaatctgactcactttaaccttgacccagggtgagaatgtcaatccttaccctcggaagcgaaaagaaagaagggaaatttccaatcaaagaaaagaaaagaaggaaaattccccaatcaaagagtgggagaaagaaaaaagaaaagaaagaaaattcccaatcaaagaatgggagaaagtaaaaaggaagaagaagaaggaaagaaagctcctgatcagggatcgaaggaaaacagaagaaatgtgcagaaaggtctttggaccggacaatatctgaacaatacagaattgtcaccaaatgaacaaaagaaggaaaggaaaccatgacctaaaatgatcttctccctttgattaccaaccaaaatcccgtgcgctagcgactntttcg

SEQ ID NO: 20127 - DNA, 412 bp, Glycine max
tcggaagaaagtaatgaggtacaagccctaatggcttagcttgaaagagcccgggtagtcgaagagaagttcaagtccatagccatcaaagtctgaaaagggtatgatgaactaagggacgtcaatatggccaccgctgaagccttggaacgagaaaccaagaaggcccgaaaggaagaacacgaccaaagcaaagttttgaggggttttatatggcagaaatagtgagctcaagctccgaagaggtgaaaggaatcatcatgggtcaaaggcatgatcttgaaggacgagctaaaggcttgccttatgtcgaaaagaaatttgtcccaacagttaaagcgagactgaagggaatatgtgggccatcatcgatgagtgcaaagagaagctaaatctagcggcgactcacgag

SEQ ID NO: 20128 - DNA, 342 bp, Glycine max
agggtttagtaattgaggctacaacatataacacaagagcacaatgattagagaaatatatttctatgcatcagtttgtttgttagaaagacccaacatatctacctactactatcattttatttatcttgcattctatagttttttttagcatacaagtttagtttaaattctgtttgaaagtatctcttatacatgttctcccaacaatgcttcgattctgaacttaattcaggctaacattagttccctgtgttcgatactcggattcatccgttttaatttttaaatacttgatgaccttgtgcgctttccggtgagaaaaactgctcattgaaaatt

SEQ ID NO: 20129 - DNA, 387 bp, Glycine max
tatatttaaaaaaatacagggcatccttgccttgtataagcagaggacaaaacaaaaaaataacaaaataaactttcatatagattttagtcacaactatatatatatatatatatatatttctgcctttgagagcgtagctgtacgttgcatatttatttcttgattgaagctcactcgatttgattagttttctcatccttattacagtaagcttttatgattttcatatggaagtttattcatactttgatgatcacattaaagatgccatggaggacataaaaaaaatgcattttccctgtgaagtcctcccttgctatgtaatatattttttattcatcatcagccatgttatgtaataatcctatttcatattttgatatg

SEQ ID NO: 20130 - DNA, 389 bp, Glycine max
  unsure (1)..(389): unsure at all n locations
agcttctactatgtggnngggntgcttccttcactttcttgtctccaacgcgagttttgaccactgttcttcctcccgcgatgcttcttttcatgtccgcctgagtgggcttatagcctaaaccatacttcccacgatttccttgggtatttatcaggctagttatgccgccgttgtctttgcctaaacccatcccgggttcataaccgttccccaacataactcgggccatcattaccgctgcatcggacagacaaggctgcccaaagagggagtccacggaggaaatgctgaccacctcanaagactggaaagtagtttctaacgattcttctacggcttccacataaggcatggaggatgggcagcttaccaagatgtcttccttg

SEQ ID NO: 20131 - DNA, 397 bp, Glycine max
tcctcggggccatttcctgctaatgcaaacatttagttttaccagtgggacactactcttaaaacaaaaatggcatataacctcctcccataaatacaaacatcaatgtaaatttagagcaagcttatgcgcatatttccttacgaacgttcacttgcacaagacatcctattaactaagaaaaacgcacccatatacaatcaaggcagcttccttacctagattatttacatgtacttccaaggtgtatttgttatttacatcacacacgtctccttggctaaatttacatacatgcatactcaaagttctttggggtaccaaaaattgcacatgtgcacatcttggtatttctaatacctatacatacacaaacttcatgatgaatcttgactat

SEQ ID NO: 20132 - DNA, 161 bp, Glycine max
ctttgatagcccctttgagcctattttcccctttctttgttttgaagctcttacaagccttaagtgaaaaaaccatgatatcaccttacccttaaggaattttggagctttggaattgttttgggaataagctgggaataagtgtgtgtgggggggggggg

SEQ ID NO: 20133 - DNA, 327 bp, Glycine max
aaggaccacaatattgggcccagacacaatatacacaccctgttcaccacataaaagggtccaaagaggaaggctaaagaaaaattgaaggagatctgtagatgaggacaatgtcaaaggacataagctaaagaggaaattggttgagtttacatgtggaaggtgtggccaaaccaatcataacattagaagctgtaaaaatattggagttcctgttaggccaaagaaatatgttgcaccatcaacttcaaatgaggatgaccacctattatctcaagatgaacaatctttgaatgatgctgaagatactgctgctcatgttcaaca

SEQ ID NO: 20134 - DNA, 216 bp, Glycine max
gaattctaagcttgctggctgcttcatttgtagatttataccttggctttatgtatgcaagcccatatagatggcaatgtcatgaaggcaaaatatactcttccttcaaggcaaaaagtttcaccacccccaaaggcattggctgatgctccacagagagacacccccaggactgataatgcttgtgcagatgtttacaaggatggaccaaatcgg

SEQ ID NO: 20135 - DNA, 349 bp, Glycine max
  unsure (1)..(349): unsure at all n locations
ggagaatgtgaatgtatgtatacatgattttgatgtgtcaaagaagaatcaaacaaggctcaatttgcttcaagattaatacaagattgtttcaacaaacaaagccttgattcaagatttcttcaatatcaagccttgtctcacaatgaaaggttttaagtcattcaaggcacatgtgagttgatttttgcggacaaagcttgatttgtgagttgattttagccttagtttcactttggttattagtcaattgatccaaggaaacttccaaagaaaaacgtccgattgattntttttattattttattcacagatatttgtgattatttatttgtatttttcaagatat

SEQ ID NO: 20136 - DNA, 147 bp, Glycine max
  unsure (1)..(147): unsure at all n locations
cgctctaaatntacattggtgtatgtatttatgggatgaggttgtatgccatttatgtgttaagagtagtgacccactggtaaaacaaactcaccaatattattatctttactggatatggccccaatgaagctagacttagcgagg

SEQ ID NO: 20137 - DNA, 399 bp, Glycine max
  unsure (1)..(399): unsure at all n locations
agcttcctcaaccacctcattagaatttaanncctgaagaatatgtctgtctttaatgaaagctgtttgtctttcatcaattaagcaggtataacctgtctcaacctgcttgctagaagcttagctatcactttgtacatgcagcctatcaaggatattggtctataatcatttagggactgaggatggttaactttggggataagagccaagaaagaggcattgctgcctctagggaaacaaccgttgacatggaactcatccacaaatcttctgaactctggttttagcacactccagaattccttaataaaattgaaattaaaaccgtccggcccagggcacttatctccaccacaactccacactgcttccttaagctcctggtctgagaaaggt

SEQ ID NO: 20138 - DNA, 164 bp, Glycine max
tcgaagtttttcaccttctcgctgagccgaactacttgcttttctagcgtccgctaagcacatcactcatgggctaagcgcgtggaagactctggaagattatatagttgtacaggttcgttaagcgcacctctttatctaactaagcgcaccggttcagttca

SEQ ID NO: 20139 - DNA, 407 bp, Glycine max
  unsure (1)..(407): unsure at all n locations
agcttaatattntttgtggttaataatcttttaagattttaagtaacttatttgtcaaatatgattataggtcataggttctgatggccgaatgatgtattctcgttgcttaatgtgagctgggatttatttaggagattacgactcattgattgaaaattgttaatattttcccttgattatataaatatacataaacgagtaacattagatttataaaatgaatcttttttttttataaataataaaattaacttttatgtgtgattttgaatgtgtttggataagacacgtataagagggatatatgaagtttaagttgcaaaaatttgagaaattaggttatacagagagaattntaaaaatttcatattgttatatttatataaaaagttgagtaaaaatga

SEQ ID NO: 20140 - DNA, 412 bp, Glycine max
cttggtgctggctttaaatgcaacagctgtttgtgggatgtaatgaaggatcttggggatcatacaaatgtgtggagttactgcattgatgactacccaccagagtccttggccaaccctttcatggagacctttggttggatcaacaatgttgaagatgcaaccaacttcaaacttccagatttgtttctcaagtaaggttatattgttgtagagaaattctatattatcttcagaagttttaagagttttgatacagttattaacaaattttctatgatgtatcaaattcattgttccaaaaatataaccgtatcaaaatccttagatttctctggatactatagcaattctttatattgtatcacattttaggagaaaaatgaaaaaaaaaatagaaaaaaggggcaac

SEQ ID NO: 20141 - DNA, 397 bp, Glycine max
  unsure (1)..(397): unsure at all n locations
agctcggtgttnnnagcgttnnnnnnnttgtacgcgtagattatgattatgacattcatatagtttttaagtatagtatttaaaagaaaagtggcaagaaagtagagctcatttcacctttgcctaaacctccagaggagaaaaaagaagaagaaataactacaacaagaggagaaaaaggaggaggtaaatcattcccccttatttggcttattgtctccattaatttctagattagacattaaattctctttttgtttctggtctgtgtataattaattattgtttagagattctaatattatataataatatttattgattattagcaatattgataatattggaattataaatactgagtttatattatataataatatgtattggatattag

SEQ ID NO: 20142 - DNA, 353 bp, Glycine max
actgaggcgtcgtagcacaccgtgaccacaagctctattcctcatgccctctcgatctttcacatactatgtatatttgagacggatagcctctggcacgacaatggcgctgagctaatgccacagggtgaaccaaatccgtactgtagccagatatataccccccagctgcaacgcgtcactaacactgtgcgagaactgcccgctttgactacggacgagcgcaaatggtgaccatacctgcctcggacacaagatttcatttataaccgatcatcgcaacttgaatgagatgatgacacaagttattcccactccttagcaattatactattttgagaagctgccggggt

SEQ ID NO: 20143 - DNA, 343 bp, Glycine max
  unsure (1)..(343): unsure at all n locations
agctagaagcaaaggaaaccacaannntttcagctcggatatccgattgagtcccgtaatatatcaagacgctcaaaatgaatacagaagctcttagcaaattaaaacgacaataactttctacacggatgtccgattgggcaaggtaacatatcgactcgctcgaaactgaatacaaaagctgagagcaaattcaaacaacaatgacttttacctcggatatcccattgagtcccataatatatcgagacgttcgaaattgaatagagaagctatgagaaaatactaacgacaataacttttgactcggatggacgagtgagtcccgaaaatatcgagacgc

SEQ ID NO: 20144 - DNA, 399 bp, Glycine max
ccgcttgttgggcaacaatggtggatgaagaagattgagatatgcaacgtgaggtagagggagagagagctgtctgaaatatttggggctgagtgaggagagagaatacagctttttggttttaaaaaaaaagttttctctttttctattattttatttaagctatgccacatgtctccatttgagtggagcaaaaagggcccactttctcttttgattgtgacccatactcagccacaaaaagtgagaaaaaatctgacctttgaaacgctaaaatcctgcctcgatttgcgtgtcgtttctctggttctagttcctcgtgtttctcttgcgtccgtcggggccagtttttgaaagtaagcaatatatatatatatatatatatatcaaaacgctcag

SEQ ID NO: 20145 - DNA, 245 bp, Glycine max
  unsure (1)..(245): unsure at all n locations
gctgcagcgaaggcaagaaagttcantncttcactcggatgccggatacaagcgcataatatatcaagacgctcgaaatgaataatggaagctctcgagcagttccaatggtcttaacatttaactcagagggccgattgaagcacatagtatattgagactctccacaatgagcagcggaggctctcaaggaaaggaaataggcataacatgtaactcggaggtcgaattgagacgcataatat

SEQ ID NO: 20146 - DNA, 377 bp, Glycine max
tccattttcaattacgagcgtctcgatatattacggtgtacccaattggacatgcgagcacaaagttattgtcgtttgacttttctcagagcttttattctgaatttcgagcgtctcgatatactacgggacacaatcggacatccgagtaaaaagttattgtcgtttgattctgctcaaagcttctgatctgaatttccagggtgacgatataccacttgccaccatcggacatccgagtaaaaagttaatgtcgtctgaatttgctcagagcctttgttatcacatatgagcgtctggatatataacgagactcaatcggacatccgagtaaaaagttattatcgatagaatttgctcagagcttccattttcaa

SEQ ID NO: 20147 - DNA, 386 bp, Glycine max
  unsure (1)..(386): unsure at all n locations
agctntgagncaaagaaacatcantttcttttactcagatgtctgattgcgtcccgtaatatatcgagacgctcgaaatgaatgttgaagctctgagccaattcacacgacaataactttttactcggatgattgattgagtcccgtaatataacaagacgctcaaaattgaatgttgaagctatgagccaattcaaatgacaataactttttactcggatgtctgattgagtcccgaaatatatcgagacgctcgaaattgaatgttgaacctctgagccaattcaaacgacaataactttttactcggatgtctgattgagtcccgtaatatatcgagacgctcgaaattgaatgttgaagctttaggcaaattcaaacgacaa

SEQ ID NO: 20148 - DNA, 407 bp, Glycine max
tcaacattcaaattcgagcgtctcgttatattatatgactcagtcagacattcgagaaaaaagttattgacgtttgaatttgctcagagcttcaacattcaatttcgagcgtgtcgctatattacgggactatatcagacatccgagtaaaaagttattgtcgtttgaatttgctcagagcttcaacattcaatttcgagcgtgtcgatatattacgggactcaatcagacatccgagtaaaatgttattgtcgtttgaatttgctcagagcttcaacattcaagttcgagcgtctcgttatattatacgactcaattagacatccgagtaaaaagttattgtcatttgaatttgctctgagcttcaacattcaatttcgagcgtgtcgatatattacgggactcaa

SEQ ID NO: 20149 - DNA, 323 bp, Glycine max
agcttgtgagcgctaagcctctgtgtttttattagttcctctttaaaggcatcgaagtttgtgtggtacatgaccatattggctctggaaacagctttctcgccacaccatatcaggataccttatgtgccattatgatctgctatttgttaaccgtttttgcaccatcttaattactgattagtcttaattgacgaattaataatgcaggtttatgatttgggcctattggactaatttagtgtttttaatttagtttaaggagaatgataagcaattgaactcgaatacaaaattaggcttggactttaggaagagaaaca

SEQ ID NO: 20150 - DNA, 409 bp, Glycine max
gtgaaccataaccggtgagagtgtgaccttatactgttattgaatgactcgctttcagtaatggtctttgcatcaatctctgaaatctaaaatgaaatgtatgaatgaggacatgatgaagtccataattgtatatacaaggccaattgaccaataagcctaccttgaaatataattgtatcctttgcaccctctgtgagctgaattacattttcaaaattgaaccctgaacttaaataattatctccatataccttgtttagattctaggagagcatatggctcaaggcaaattgaccccaaatttgggggagtggagttgactgggatgtcaagcaaaaggtatatcatcatcacacacaattaataagttgagtaataaaatagcaatcaatgaatatgtgtggca

SEQ ID NO: 20151 - DNA, 399 bp, Glycine max
  unsure (1)..(399): unsure at all n locations
agctttgagcaaaatncnnnctacttataccttgacccagggtgagaatgccaatccttaccctcggaagcaaaaaagaatagaggggaaatttccaatcaaaaaaggaaagaaggaaaatttccaatcaaagagaaagcaaaaagaaaagaaaggaaattcccaatcaaagagtgggagaaagcaaaaagaaaagaaaggaaattcccaatcaaaaagtgggagaaagcaaaaagaaaagaaagaaaattcccaaccaaagaatgggagaaagtaaaaaaggaagaagaagaaggaaagaaagctcctgatcaaggatcgaaagaaaccagaagaaatgtgcagagaggtctttggaccagacaatatctgaacagtacagaattgtcaccaaatgaa

SEQ ID NO: 20152 - DNA, 379 bp, Glycine max
tcctcggggccatttcctgcgagaacaagcatttatatgttagttttacaagataatgcttatcttaacgcaaaaaaaaatgtcatgctaatccctccggtttagaacgaactcatacgcacgtttaaagtaacacatttatgcacatgcgtatgtgtagaatatcctactatttatatcaacatagaggccatccaacacattctagttgtcatacatatatatgcatttgaaaagaacacacattctcacgctcaaggcattgcgtcaaaatttacacttaactatgttctaaacatttgctatcacaaactacctacacacacacgaaatatatataccatacaaactttcattgtttcactcacacttatgcata

SEQ ID NO: 20153 - DNA, 305 bp, Glycine max
  unsure (1)..(305): unsure at all n locations
agcttgccaccagctctcccantgtttctggatgcttcctccagaagcaacagccttctggaggaatcttgtgatggcccaggcggacacgtttgatattcgcaccccaatgtttactaatttcaccggacgccttcttaggtgagagtttattgggatcgttacggaaactaacaaatatcttcacgaaactagttttcttgccgtattgttactgcaccctgaggattacatactaatccttttatgtgactgaccgaatggcacggaacctcactaattgagcatggatgcttcatttgata

SEQ ID NO: 20154 - DNA, 393 bp, Glycine max
tgccacccagctcgcccaggcgagctaggttgcttctcttcataagcaaccgccttctggaggaatattctggaaggcccaagtgggcctgattgctatttgcacccccatttttactaaatacaccccttgttcttttttggtgattctttttccgtaacattacaaaactatacaaatttcgtaacgatgcttgtttccttttcgtaatgttccgtaatgtaacgatgcttgtttcctttccgtaatgctacgtaatcatcccctttttgccttccggaatgttacagaactttacagattgtgcactaacacttacttttaatttccgacatgtcacgaaacttcacggattgtgctacaatgctttcttttgacttccggcctgtcacg

SEQ ID NO: 20155 - DNA, 224 bp, Glycine max
ggtgggcaagaaccaacaagaaaaaaaactcactaccacaatatgaaaagaggaccgccgatttggagacacacaagacaagagaaaagtggggtagcatcgaattcctaaaagatggtagaatcacgcctccaataggaggggcatgtgcggagacaacttgtacaagcccgagcaaaaagaacagatcaactgggcgggcgcccaacagctagcagtagagg

SEQ ID NO: 20156 - DNA, 541 bp, Glycine max
  unsure (1)..(541): unsure at all n locations
gacgcacaggataacgtaaccatatgttgtgagtggagaataaactgtatgtgaatacaatacgcaatgtgaaggaaaaggaagggttgatttgtggacctcnagngacccggnanagncaacctgcaggctagcgactgggatgggangaaanagagagaacgannnttccaaaatataatcaataaagatcaacaaagtatggactttagttgaagctcaaaggttggttgtaaatgggtctacaagaaaggattggagcaaattggaaggttgaaacctacaaagcttgccttgttgccaagggatattgtcaaaaggaaggtataaattatgacaaaacttttctccgtggcaatgcttaaatcaatctagattctttttgctatagtagcatactatgatcatgaaatgtgaaatggatgtggaaaatgactctccttaatggtgggctaaaagaatatgtgtatatgacacaacctgagggattcacatgcttgattgatcataataagtgtgtagaagtngaagcattcatttg

SEQ ID NO: 20157 - DNA, 482 bp, Glycine max
  unsure (1)..(482): unsure at all n locations
cacccacccaacggaggaagaaagaagcaaggacggaaagcaggaatcgcaggaagagaggggattgattctgcatcccatgccaanannaccggngcagcagcaaagaagggaanaagggtcttcnnnnactaatcctcttcacaacagggggtgtcacaataacacgaggctctaaccattaagcaaaaaacaaaatatgtgaaaaaaaaaattaatattggtatatataacactaaaatttaaatgggatggacgacatgaaattacataaaaactctggggatcgatgtgggtaaatattaaagcaccaaaataaatgcacaaactttattatgtaaatgtacatacgcattaaatatacattagaaattaatgcatcagaattaattatcacaaaatttattatataaattcacatgtgtattaaatatacattagaaagtctagtgatatatataacgacattagttactttataa

SEQ ID NO: 20158 - DNA, 392 bp, Glycine max
agctcgcaattttaggtcaacatggataaaatttcctaacctataaaatcatgtaggcagtttcacattttctcaataacaggggaattcagtagtttttacctttgtggtcgaaaaatgcccagtaaaacttgtagccagataacaccatatagtgcaactcctaatctttgatgactattgttgaagaggttgtagaaattttttatggacatgattgctacagctgtggcaatgtaatctgaaactaaagtatgacaattatatacttgtggtatattttaatgttaaattaatttttaaattttacaatttataggtcaaattaatcttttaacatttacaatttatgtcccataaaatttaatgggagaatattattgcacattttt

SEQ ID NO: 20159 - DNA, 396 bp, Glycine max
  unsure (1)..(396): unsure at all n locations
agcttgaagtgaggaagtgagaaggtttanatttctacttttattcgttgaccacagagtggtacctgaagatatgttgcggtggcaggagaccttggggacgttaggtggggtgctattgcccaaaaccaagcttgaccaattcccacccaacctgggcatagtcagtcagtgagaacctatgatgtacctaaacatgcgagctcctggcagtcaaccgataaaagaacaaagaccacaaagcaaggatgcttgtgtggtggctgaccanctatggatcttgagtgatatttggtatatggcctctggtaatcgattaccaagggggggtaatcgattacaaggcttaaatatgaagacaggaagtaaagatggcctctggttatctattaccaa

SEQ ID NO: 20160 - DNA, 409 bp, Glycine max
  unsure (1)..(409): unsure at all n locations
tcattagaggcttcctctagaagcttcattaagaggtttctttcacactacaggcatcttctcaaagatcccaacggtctggtcatggaaaagtatcttgtaaagttgtagaccaaatttcgagaagatccaacggttaacgaaggctgggcagcgttttaccgatgcagctttatgtagctntctctagaagctgtcattaagaggcttcctccagaagcttcctcgtggcttctttgagaagttttctcaagaggcttctttgagaagctagatccttatctatccacgcccctctattaactaaattaacttccttgataataattatggatgaaaattacgctacaaataatcaaacatcatacattattactaataatatatatatatacatatatatatatat

SEQ ID NO: 20161 - DNA, 368 bp, Glycine max
agcttctatgagaagctagatcctatttatcctcaccctctattaactaaatgaacttgcttaaaaataattacggatgaaaataagcaacaaataatcaaacatcaaacataattactaataatatatagatatatatatcagggtgttacagtaaggagtaagattctggtgaggagccgccgagccgacgtgatgacgttggcgttattttgggagagagcagcgtatagaaatcaactcctccggacgtggatattaagctttattttgctgagttaaagatgtaaaactggaatggtaatatatatatgaacatatttaattgtcgttatgtgtatgacatgtaccgaattattgtttctatg

SEQ ID NO: 20162 - DNA, 390 bp, Glycine max
taagcttgcatttactgcatttcaagataaaggatgcatgcatctgcatctttaaaatcatgttcataaatgcatatacttctctgtatataccaatttcccaaatctaatgtcttatcttttaagtttaagatggtaggccctctcaaagagtcaacctcctgctatctcataaggttaagcccttgggtacaagttcatattggcttatttcattatgactcaaagtccttgcctatatctttcataggactcaaattccttgcctttatctttcgtatgactcaaagtcctcacctatatcttttatatgactttaagtccttgcctttatctatcatatgactcaaagtgcttgctttatctttcacaggactcatagtcctttct

SEQ ID NO: 20163 - DNA, 399 bp, Glycine max
  unsure (1)..(399): unsure at all n locations
agctncatataagcgaacccccggtaataaacacaagttgagttttattcagaaaattagagtttatctcttttatctagggagagtgattctcctaaattcttgagtgattcaagaacaccctggctgtatcaaaggactttcacaacctttgtgtgttgccctcgctggaaagagtgattctttccttcctatcatctccacccttgttctttcaaaccacaattccagaaaatccacctctgcccaaaattatctcgtgaccataactcccatttcacacactcaaattaagtgattcttgagcctaaattgaatttcaaaacgagacctttcacctcgttttggaatcacctcatttggagctctggagcttccgttattgccatttctatattt

SEQ ID NO: 20164 - DNA, 339 bp, Glycine max
tgaatcggacatccgtgtgaaaatttatgactcatttttatttctcaagagcttccgttgttcaatttcgagcttctcgatatgtgatttgcctgaatcggacatacgtgtgaaaagttataccaattgaatttctaaagagcttccgttgttcaattttgagcgtttcgatatgttatttgcctgaattcgacattcgtgtgaaaagctattaccattggaatttttctagagctgccgttggtttatttcgagcctctctatatattatgcgaccgaattggatcttcgtgtgaatagatctggtctttagaattttgtgagagtttcctttgttta

SEQ ID NO: 20165 - DNA, 365 bp, Glycine max
gaattgggtcttgaaaaagcataacaagactttctctgattggttaaagatacaacctttgctgatgaaaatgtttcagaaacattaagaaagctagcagatgggcctaaaggaaatgttataacttggcacggatacgacataaacaagtattccttttacacaaaagcacaagacgactaaagtacaatgcaaaacagcggggtcaccctaagggctgaatcttaacactttgcaagtgtgcatgatgacaatccttgtgtagcttccatcccttactttgggttcattgatgaaaattgggagctccaccgtgtccaaccgattgtatggtgtctcacatgtatatgtgcggaccgatgatg

SEQ ID NO: 20166 - DNA, 379 bp, Glycine max
tcctctctaagcttcttatccaagacactctcttggttgtgatgcttctccttccatggcttattctctagtggatggtgtctcctcttacctcttctcctttatcttccactgcaactccatgactgaaaatcaccattgaagggccttattaaagctcaaagatccagcctccctaaaagcttctcaagcaagtttacatcatgagatatcatgtagaaccactccatgtagtctgctgcacactgtccaagtgcaacacatatctgacccaccaatgcaaggtattcagaaaactgaattcatctatcatcgatatactagagatggagcagtatggtgatggaatcctaccccccaagagcattcgatagaagac

SEQ ID NO: 20167 - DNA, 424 bp, Glycine max
  unsure (1)..(424): unsure at all n locations
gggatcctcaaagtcccctgcggcatgaagcttcttatccaaggcattttnttnaaagctccttcttccatggcttattccctagtggatggcgcctcctctctctcttctcctttgtcttccactgcatctccatggtggaaaatcaccattaaaggacctcattgaagctcaaagatccagcctccatagaagctccacaagcaagcttccatcagactcctatgcacatttggaaacattcattgaaatctgtaacactgtaaagattgcaggcatgccagatgaagccatcagactcaacctattttcattttccttggcaggagaagccaagaggtggctccattcattttagggtaacagtctatgagtgattacaggtagtgatcacaccattctacgtgattaattgcatcaaccg

SEQ ID NO: 20168 - DNA, 327 bp, Glycine max
  unsure (1)..(327): unsure at all n locations
cagctngaaaagaggaagtgtagaagggtgaaacttcctgcttttattcgttgaccacagagtggtacctggagatatgtcgcgggggtcatgagaccttggggacatcaggtggggtgctattgcccaaaaccaagcttgaccaatcccgaccccacccgggcatagtcagtcattgagaacctatgatgtacctaatcatgcgagctcctggcagtcaacagatataaggaactgtgaccacaaagcatggaggcttgtgtggtggctggccatctgtgaatcttgtgtgatatatgggttatggctactggttatcgattacca

SEQ ID NO: 20169 - DNA, 392 bp, Glycine max
  unsure (1)..(392): unsure at all n locations
agcttagctgaattcgatcgaatngttttatcttagctcaaccttggccagcttagcggaccaaatcagcctcaaatgcagggttgggcgctaagcgctcaagacttgtggcttagcgcatgaacagagatgcgcttggcgaaaggactgtttctcataaaatgttttctaagttatttttcagtcctttttcaaagaaattgaaacccttatgttaaacattcaaagattggatgatatactcctatgtacagattacatagtgtcataccctaatttcgtacagggaccatccgttgttgggatgcgaccctcgtttgaccacttcgaggtacttggcacccatcgttaggcaattcgtgaagttccgtgacatgcccgaagtataaaaa

SEQ ID NO: 20170 - DNA, 406 bp, Glycine max
  unsure (1)..(406): unsure at all n locations
tctggtgggacatcttgacttgctttccaatctgacattcaccacagattctgccttcttctattttcagattgggaatgcctctaacagcacctttgtcaatgatnttcttcatgcctcttaagtgcagatgtccaaatctttgatgccatattttgacttcatcttctttggagaatagacatgtggaggagtaactggtttcttgaggtgtccataggtaacagttgtcctttgatctgctgcccttcattaggacttcactcttctcatttgtcaccaagcattctgactttgtgaagtttacattgaatccttcatcacacaactgactgatgctgatcaagttcgcagtcagtcccttcaccagcagtactatgttcagactaggaagtccatcatggac

SEQ ID NO: 20171 - DNA, 363 bp, Glycine max
agcttctcccccacttctatttttttgagaagtgaagcagaaaagggttcagccccttatgcacttctctctctttcaatttgcttaggaaaattgtttccgtgaagaaaatccaagtcgaggcgcttccgtaacgtttccgtaacgtttccgtgagtgatttcgcgaaggttttcgaccgttcttcgacgttcttcactgttcttcgttcttcaacgggtaagttttcgaatccgagactttcaattcatttcttgttttttttcagctttcatctttatttcgtgcattgtcgatttcttttcttctgactttaacgcgcttttaccgcttatttaagccattatctcaccctataaatga

SEQ ID NO: 20172 - DNA, 407 bp, Glycine max
tgaggactataccttcgaccaaacacggccgtgtttctgtctcggcccggatttaaagcgggttgcagtactgactccgcttccctaaccgtactgaaggcggttgccgtggccttatcctctatggttttctggagttttaacatgacctccgagatggaagccatttgatcttttaaggccgatagatcggccttcatctgttcctgcacgccctcttcattatccatttttctggatcgagtgttataggggtgccttggtgttttcttagttatgatgaaattcctaaagaaataaacaacggtgagcatgccaccaaaacatgagtatgcaaatggatgatcggagcacttggatcgaccccaaggttttttagataacatgatgagttcagaacttctcat

SEQ ID NO: 20173 - DNA, 329 bp, Glycine max
ctcaccaaataagtacttcataaggaggctagctcctctgttgttgattttttttttttggtgtttgtgaaacattaggaagctgtaacaccatacaaaataacgttgatatgtaatggccttcaagattgatcttgttgagattactggctcattgactaacaacattggcaactttggtttgccggaaagcattgacttgtcccactacaatttatcagaggaaattcctcaagctattagctcattgctgagtctaagagtcctcacacttgaccaaagcaggttttcacacaacataccttctgggattcttaactgccttgatt

SEQ ID NO: 20174 - DNA, 376 bp, Glycine max
tgcatcttactatagggttttctagaacctaagactcttagatagagagtttcaaaccaaatgtgcccctcgacaatccaagtggggaactaaaccagcagtactacgaacactttcaacaaaatgagacctaccttcatctttctaagaagaagcaacaagactgattttaaaatataaactcccctaaaaaacaaagccatgcgttgtttagaaacaagtagttgttcaattgtccaatacggattaaaagacatacaaaaaccatcaaataatggcagttctaatcagtgacgttcatcctaatagaaagtattcacatcagtcaactagttcatggtataagatttaacaacaaggttttcagcttatgata

SEQ ID NO: 20175 - DNA, 394 bp, Glycine max
  unsure (1)..(394): unsure at all n locations
agcttagctcacacacccatntatttctaacctcacctccttgagaagcttccttgagaagctagagcttagctcacacacccctctaataactaagctcacctccttaggaagagaagctagagcttagctacacacccctataatagctaagctcacccccatgacaaaatacatgaaaatacaaaaaaatcctactacaaagactactcaaaatgccctgaaatacaaggctaaaaccctatactgttagaatggccaaaatacaaggcccaaaagaagaaaaaaaaacctattctaatatttacaaagaagagtggacccaaccttgacccatgggctcaaaaatctaccctaaggttcattagaaccctaaggccttctttatcagctc

SEQ ID NO: 20176 - DNA, 398 bp, Glycine max
tcaagaataatggcctcagcaaacttcttattcccataaggaaattcaataaataggcttcctatttttaatagagagggttaccactattggaaaatccaaatgcaaatcttcattgaggcaatagacttaaacatttgggaagccatagaagtaggaccttatgtacccaccatggtggctggaaatgcaacaatagaaaaacctagagaagagtggactgaagatgaaagaagattagtgcagtacaatttaaaggctaaaaacatcattacttctgccctaggaatggatgaatattttagggtttcaaattgtaagagtgctaaggatatgtaggacactctacaagttacacatgagggaaaaactgatgtaaaacgatctaggataaatac

SEQ ID NO: 20177 - DNA, 360 bp, Glycine max
  unsure (1)..(360): unsure at all n locations
aggagaagatgtggaggttgtctaagaagggaagttctttaatgttatctttattgcaaaataactttccttcttagctaacctcttggaggagatacttacttctttacactcttccttaaccattaaaggttgntcttcttttctttttctattcttttcctcatcccatttgagttttatttgcacttgatccttagctacctgtgaaggtgtttgaggatgcaacacaaatttagtgccaagatgggtgagggtaatctcattagttagccattgtaaatgatcttcctatcaaattgccatggccttcctaagagaatatgcnctgctttcatgggaactatatgacaattaact

SEQ ID NO: 20178 - DNA, 394 bp, Glycine max
tgcacttgaggaaggaaagatatttgcagctaatgaacaactttcttaactatttgtccttcagattttactgtttctttttgctaatatgtaaatataaatagtataaggctatggcttatggacatgatcttttttacccctaagattgttgggagttgggttgtaaatgtacgtgactagagcgtaagaaaattttgataggtctataattcaaaaaggctcaaaggtaattcaattcacaccccctttcttttgttactctcttattccaaaaattagtttttaaaagggtaaaatatgtttttcatctttgtaaaattgacaaagttagtccctctaaaattttgggaattgctaggggcacccaacaagattgttggtgcacccagct

SEQ ID NO: 20179 - DNA, 361 bp, Glycine max
tcatttaattactaaaatagtttagcatagaactatagatttgccagagaacaaggctcccacccactagggtagatatatgtagtcttaccctcacaagtgggaaactgtttccatgatttcaacctgtgacctccaggtcacaaggcagcaacctgattgttgttccaagactcactctcatagaagtccaaattaagaagtctgaagtctgaacatgccacatgattgatgaaacaaaggaaccaaaagtacatatatccaaggaacaaagcttaggagttaagacttatatgcaactatgtaacagtaatcaatgttaatatgtgttatcatgaaaattataattattaatccaata

SEQ ID NO: 20180 - DNA, 400 bp, Glycine max
  unsure (1)..(400): unsure at all n locations
agctntactgctatggctagcagatctaactggacttctccctctaaatcctttatttgcacacaaaatgtcgaaaaccaaagctctaccataaattctgatttctgaacactccaataaataataagattaagctggtttgtagaagatttgtaattttaaactcactgcacaaacacacgcatagacacagataaccacacatatgccgcgctgcccatccatccacacttccatcttgtttggcagctgccacatacttgtagaaagttaaattgggtttaccataatgaaatagtacagacctgaccaatgtattgattgtatgcagttttacacagggcaagccatgtaccacctacattggaatcaacccatttaaaatttggctatgataata

SEQ ID NO: 20181 - DNA, 413 bp, Glycine max
tatcgaatagaagctcgttcttgtggcatgtcttatattgtgttttgttttcgatagaaagcttgaaaacggatgttgagtccaatgaggattgagttgaacgtgcttttctccccaagcctgcctcggactatagtacaaaaaattccgcataagtttgctaccatgtagctattgactaactaactacatatttctaaggattaaaaccacacctgtttaaattaaagaaacaaaaattatacaaaaagcaaaaacctacaaacaaaagtacttcttttttttttaaaccaaaaaacaaaagtacttagaaacggccaaattagtcgctttcattttttattattgatgcaacaaaagcaaccagcggtggcattgatgaacaactctggggtaatcaaactgctgaagga

SEQ ID NO: 20182 - DNA, 179 bp, Glycine max
agcttctagccaaaaggacaaccatgtattaattctttgatagcccttttgagccttgtttccctttccttgtattgaagctcatacaggccttaaatgaaaaaccatgatatcaccatatccttaaggaattgtggagctttggaatagccttgggaataagagcggggggggggggg

SEQ ID NO: 20183 - DNA, 426 bp, Glycine max
  unsure (1)..(426): unsure at all n locations
ttcagtcacctgcagcatgcaagcttgtgctaccaagaagcttacctttctctccnnctcgtttgcacaaatgaatgaataataattttggtcatagttttaaaatcagactctaacacaatgaacttgttcatcagattgatcatgtaattatgtaattaatctagtgtgatatgttgacacgattgattttatagttaaactaacatatcgattcacttaaatcaattgaatcaaaattaattatagtttaaaaaatataaaatttaataaaaatacaaaacaaaaatatgctacactcaaaaattaaagaaagacctaaaatttcttattaaataaacttatcattaaattatcataattaattattacacttatgttccagttaatacatatacttatatctatgttatctatactaactcg

SEQ ID NO: 20184 - DNA, 356 bp, Glycine max
ataaacataataagttaataacactccctaaaagtaaacagacacaatttgaccaaaatgctaggttgaaaatattataaaaattctgcatatcaacattaacaaggcaaaatgttgaaaattctattaacctcaaaagctctccaacggcaagcagtgaaccatgtatgctgtgcacgggtgcatttttacccaatccatcttgtgttgcttcaaacattcgatagtacctgcaataaaatagaaataagggattcactctccaataggggcatattgtgcaataaatcattaaagcaaaaaaagcatgcgataagatgaaagtgtgtataaatgaaatgtccaaaaggcattaa

SEQ ID NO: 20185 - DNA, 356 bp, Glycine max
tgagaggtctgtgatggtttgatccatgcgggtgctgaagtgacgcatgagtatctccttccttcctttttgccccagttgctccgatcctcctagcgttggtatttgtggaggagatgtaatcgaacttccttctcttcaaacccactatgattctttccccggcgaataccaagtctgcaaagttggagggcatgtagcccacaaatttctcctagtaaaacactggcgaggtatctaccatcatggtaatcatttccctttcaaccatgggaggggccacttgtgctgagaggactcttcgacgctaagcatacttgttataggactggcttatctttttaaccatgttcaac

SEQ ID NO: 20186 - DNA, 179 bp, Glycine max
tgccactcagctcgccctggcgagcgaggttgcatttcttcataagcaacattctctactggaggaatcttcttgagggcccaagatggccatggcgatattattacccgttccttatctgaatacacatcctgccttcttagttgattctcatatcgttcaactcagagactttctat

SEQ ID NO: 20187 - DNA, 380 bp, Glycine max
  unsure (1)..(380): unsure at all n locations
agcttcccaacagcaagcttttttnttaggcacagcacaagctatcacagccgagcaaaacagggcagagccagaaaactctgctctacacaccgacaaaagcatagcttttctcacttaaagaccccagtggcattgccttcgatccaattcgttaaccgctggatcgactccaaagttttactggagatctacagcacataggcctacagtgtgaccgttgggatctactagttgacgtgccgagctcattctgcgctagacgttccacagggtaccacacacatgacatttttctgcactgagccaagattctgctgcacgtattttgacagcaggattgtgcttaactgcctacttcgaaaatcacactttctctc

SEQ ID NO: 20188 - DNA, 378 bp, Glycine max
  unsure (1)..(378): unsure at all n locations
tgtagggttaaagtctcatgattgtcacgtgctcattctacaatagttagccgnggctatacgagacatcttgccaaacaaagtcaggttagccataactcgcctgtgctttttcttacatgctatatgttgcaaagtcattgatcctgtcaagtatgatgagctggaaaatgaggccgcaattatattgtgccagtaggagatgtattttccccctgctttctttgacatcatgaatcacttgattgtgcatttggtcagagaaatcaaatgctgttgtactgattatctacggtggatgtacctggtagagcgatacatgaagatctttaaagggtatactgagaatctatatcatccagaagcatctattattga

SEQ ID NO: 20189 - DNA, 396 bp, Glycine max
agcttgatagagctacatcacatgactcttattggcacagaacaagttgctttctaagcaactggaaattctaacagaacacttggtaagctgccaactaagttgtctatgggtcaacctacacactcttatattttgcaggttacaagttgtaccatctgtggtgaggctcatgaaacaggccaatgtactcccactgaagaaaacactcaagaaattcattatatgggaaatcaacagtgacaagggtatactcaaggaggatttttaggcttccagcagggtccatataatcaacaaggatagtggaggacacaccctggcaatcagttcaacaaagacaagagtgggccttcaaacaggccaatcgaacaaggacctaacatattccagaga

SEQ ID NO: 20190 - DNA, 404 bp, Glycine max
  unsure (1)..(404): unsure at all n locations
ntctagcttttcattggtgtattttgatctccttttgttgctctaaattgtgggaatatgctcaaatatatggggcaattttggattgttttcttgcttgattaggttcaattaggggtttgtatgggatggccctaggcctataatgcattttgaaacaatgggacatgccacattgtccccgttctcttgctattgttacctaaacgcgcgcccaccaagtgttcggtgaaatgcctcaatggcattagcgcatgacttttgtaaggaaacaacccatggggcgttttggtttgtacatattttctttttttgggacatgtattcattcccgaaaaaggctatagtaattgccccacatatatcccaggcctaggaaccgaagttttatgcaaaagaacaca

SEQ ID NO: 20191 - DNA, 399 bp, Glycine max
  unsure (1)..(399): unsure at all n locations
agctttaaaggcacaaaaatgtaacttncttggcagttaagccttatttttggcagtttcaactacctcgcttagcgcgtgactcgctaagcgagcacaccatgacatttgagttttcacactaacgcacttagcgggcaaacttgcttagcccaatgcaaaaatttgaatttccagagaagaaattgggcttagcgcgaagagtcgcgcttagcgagttcggcagctctgattggcctgcgactctcgcttagcaagccataggcctgcttagcgaattatcatgttccctgatgcagtagtggattgcgcttancacatccctctcgcttagtgttattccaatccagagaagaaattgggcttagcaagctgacccgttgggcccaattcttataa

SEQ ID NO: 20192 - DNA, 415 bp, Glycine max
taagggtcttgcaacattctccatggacagccaaactcatgatcattgaattccaagagcacaagtttctcaagctgccaatctcattgaacaccttccaagcaacatcaatcttaccacattttgcatacatctccaacacagcattgctcacatataaattcttaaagaacccattcttccttgcgtatgcttcaaccctctgcccaatctccagtgctccaagatttgcaaaagctggaaaaatgcttgccaaggttactgcattgggcatcatccctttctcctgctccatcctcaggaacaaccccaaagcctccccgtactttttgctccgcgagtaacctgatatcatggtggtccatgacaccacattcctagaaggcatcaatctaaacaattccaaagctacatc

SEQ ID NO: 20193 - DNA, 373 bp, Glycine max
  unsure (1)..(373): unsure at all n locations
actcttgataagaatccctcaggttgtttcatgtaaacctcttcttctagataccattcaagaacgccgttttcacatccatttgatgcagctcaagatcaaaatgagctactaatgccagaattactcgaagagagtcttttttagatacaggggaaaatgtctctctgtaatcgattccttctccttgagtgaatcatttagcaacaaggcttgccttatgtctctcaatgttgccttctgagtctttctttgttttgaagacccatctacatccgatggcttttacaccaacaggcaactcaacgagatcccaaacttggttagatgccatagaatccatctcattcctcatagcattataccacatatn

SEQ ID NO: 20194 - DNA, 373 bp, Glycine max
tcactctatgttgttatcaacaatgaaatgttgtcattgagaaccacacagagtatgtcctggacgaggtgcataggggaattttttggaatgtacactataggccgcaacatgcaacgagagttatataagccaaaagccaaatcaagttcctcctcttcattgtggactacttcatcaagtggatcgaagaaaaaccactggtaaaaatcacagcccaaaaagtgtaaaagttcacatggaagaacatcttatgtagatatgagttgcctcaagccattgtgatggacaacgaaatacaattcactaaaaaaggctacggagagtttctcaagcagctcgacattagcaatttggcatacttggtagaaca

SEQ ID NO: 20195 - DNA, 393 bp, Glycine max
  unsure (1)..(393): unsure at all n locations
agcttcaagattatggcctnatcatctatcttgtttcccgagggaaattctataaatagacctcccatttttaatgagtgggttaccactactggaaaacccgcatgcaaatctttatagaggcaatagatttaaatatttgggaagccatagaacaaggaccttatgttccctctatagtggctggaagtgcaacaatagaaaaacctagagcagattggactgaggaagaaagaagattagtacaatatatttaaaggccaaaaatattattacatctgccctaggaatagatgaatactttagggtttcaaattgtaaaagtgctaaggatatatgggatacactacaagtaacacatgaaggcacaacagatgttaaaagatctaggat

SEQ ID NO: 20196 - DNA, 395 bp, Glycine max
  unsure (1)..(395): unsure at all n locations
tgaaggaaaacttgttgtcttggtcaacctagtaactcagcttgccatgaatcagaaatctacacctgttgcaagagtctatggtctatgttcttctgcagatcaccatatagatctttgtccttctttgcagcaatctagagtcaatgagcaacctgaagcttatgctgcaaacatttataatagacctcctcagcagcaaaaccaacaatagcagaataattatgaccctntcagcaatagatacaatccaggttggaggaatcatccaaatctgagatggacaagtcctccacaacaacaacaacctgtccctcctttccagaatgttgctggtccaagcaagccatatgttcctcctccaatacagcagtagcaacaatagcaacaacaaa

SEQ ID NO: 20197 - DNA, 396 bp, Glycine max
  unsure (1)..(396): unsure at all n locations
agcttttctttcacaatcattgtctatngnctccaattctaattgcaagttctcattcttgttctttctttgtctaacatacaccttgctcaaactcatgaaaagaaacacaaactccatcacaatcatgctttcaattcaaaaccaaatcatacaccaattttcacaaaaagatagaagtgttttactgccgtatcaacaaaatcaagtcaaactgttccatatgcttcagaatgagcaaaccaactacccataaataaaactagtagtgtatataaacataaaagaaatactgtactgaaaccataatcataataataataatccataaagcaaaaagcatcatcaggaatttagaattcctgtgattggtcctaggtatcttgtgtctgaaca

SEQ ID NO: 20198 - DNA, 366 bp, Glycine max
ttcttgtctccaacgcgagctttgaccactgttcttccttcccgcgatgttcttttcatatccgcctgagtgggcttatagcctaaaccatacttcccacggtttccttgagtatttatcaggctagttatgccgccgttgtctttgcctaaacccatcccgggttcataaccgttccccaacataactcgggccatcattaccgctgcatcggacagacaaggctgcccaaagagggagtccacggaggaaatgctgaccacctcaaaagactggaaagcggtttctaacgattcttctgcggcttccacataaggcatggaggatgggcagcttaccaagatgtcttcctcgcctgacacgatg

SEQ ID NO: 20199 - DNA, 398 bp, Glycine max
  unsure (1)..(398): unsure at all n locations
taccctatttataccgtgtntgaaagagtggggtaatgattctgcagcaatttgtgtttctttagatttttcaatttagtccttgccacattggactcaaacttgccacattgggttgcttacgtggactgaggtgtgccaaatagacatttgactaacggaataaattagattttaacagcaaggacttatttgcataacggatgtaaagatagggactattttgaattaaaatttaagttaaggactaatatgcaaactggttacaatctcagggactaaattgcctattcactcgtctctgtgtgctatcaggcttttcgtcttacagacagcaaaaaagaatgtttatacggattaccactcgggtatttccgcccgtcagcgtgactcaaatg

SEQ ID NO: 20200 - DNA, 400 bp, Glycine max
  unsure (1)..(400): unsure at all n locations
agctngttccacctaaatagcaaggatctnctttttttgaggttgctaatttgttaaactctcccacacctaagtttggaccagtagtaaaagggtgaccaaagagttaactacaactccaattcttcattaccagtcaaataaactattgttttcttcgatagaccaaaatcattttatatgttggataacactattggtcacatagctgattctctccagcaagatgaataacaataaggaaaacaaactttctcaccaagccactaggagagaagccaatcattgccaagcaagttgcaagggatgtttcatgctcaatttcactcccactattggcaaaaatccatccatgccaatgtttatataaaccccgctctttntactccttggagattgt

SEQ ID NO: 20201 - DNA, 399 bp, Glycine max
  unsure (1)..(399): unsure at all n locations
agctntataagtgcgggtttaaacatganggtctttcgccacgatatgcgaggatgactccccgagaagatcggatttggtacggcatgtcctcctggtttccgactaggaaattggcgagtggaggacaacccagacgtttacacgacaagcataatgtaatcctttgtagctgtaaaactctccgggtgggcctaggctttagagtttccttttgttaaggcattatgtattttgctcttgaattgataatataaagatttttcttcatgtgttcttgcacctctacccattctcattcatttgcatgtttatttctttacgcttaaaatgccagatccgacgatgagtccctcgaaggtactaatacccgggacccggccgtcaatttcgagctag

SEQ ID NO: 20202 - DNA, 396 bp, Glycine max
tcaccaccatgagagtgccctggataagaagcttatataagaagctctaatggacgaagagaatgagagagagagagagagagagagagagagagagacagggggggatgggatttaaaggagattacggagagaagttgaactttgaagtgtgtctcacaagtttctcattcatcacagttatgacaagtgttacacatgtttctatttatagcctacgtagcttccttgagaagcaaggaaggtagcttccttgggaagctagaggggggctgctcacaccccttcaatagttaagctcacccccatgccagaatgcatgaaaatacaaaaaagtccttactacaaaaactactcaaaatgtcctgaaacacaaggctaaaaccctatactact

SEQ ID NO: 20203 - DNA, 395 bp, Glycine max
agcttgaagagaatgcattgtagttttttttaagggagaacaataagattatccaaaaggacaataggtcactggtgccgacccttgtacagtagataaagggaagccagtgccaaataaaaagtcccatggaagccttaaaactaaaagtaatgaactatggtgcaacaattcacaattcaacaagaaagtcttttcccactacatgaggtcagttacatggattaaatgccaccataatgttttattacaaatcatgtccatggagaagccattgacctctaaattcttcttaatggtttagcctataattattttcagcctcactttaccacataggactactttctaccctcttaagtggggcttctacgggtcttctgcatagatgccca

SEQ ID NO: 20204 - DNA, 416 bp, Glycine max
tcaacctttggccatcatttctgccccaaatcgcgaataggatgtcattttcggggtcgtgaagtgcgtggctacgagtgggacttcgaaaattcaggtttgggtggacttctttctcctttgattttcgtgggtatggggtttggggagatatgatgggtagtcttgctaggtttctgctgtgtgatgattatttgtgaagacatttgctgaaaacttgttgaaattgccatgtttgaatgagttaaacatacccattctgttttagggtttttgtgatgatgtttgtgatgtttatatgctgaaattgcctatggaaaactgttagagatgaaatgtagagttaacctagggtcggaaagtgagaatgtggtgttatgagtggaaaaagagtgaggctttgagagttggaaggt

SEQ ID NO: 20205 - DNA, 357 bp, Glycine max
ttatgggaggaggttactatgccattttgctttatagagtaacgtccactggtaaaattaactttccaaatgtttgccttcgcaagaatggccccgaggaagcttgcctcaaagaggtccaggaaggacaaggtggccgaaggaactagttccgccccggagtacgacagtcaccgctttaggagcgttgtacaccagcagcgcttcgaagccattaagggatggtcgttcctccggagagcgacgcgtccagctcaaggacgacgagtatactgatttccaggaagaaataaggcgccggcggtgggcaccactggttactcccatggccaagtttgatccagaaatatgccttga

SEQ ID NO: 20206 - DNA, 384 bp, Glycine max
  unsure (1)..(384): unsure at all n locations
agctttaacctcatatctctcacantnttagatttgggagccaatccaatccttgtgttcggactctcagccacttatatagcctccgatgatcccattactgcttcccctaagctctctgtcctttcttcacgccgcatcccatgccttgcgaactccttggagtaccctcgcgttgtggtcactgaaaccccgtgcgatgaaaggcgtgatgctttcgtctgatggcactcctctcatggggtagccaagctgtcttatggcaaggacgggattataattaatacaaccccttgttcccatcaagagaacatttggacatccttcgcatgaagatagaatcctgattcttccttccttctagcgagggaaccaattaacaga

SEQ ID NO: 20207 - DNA, 370 bp, Glycine max
  unsure (1)..(370): unsure at all n locations
agcttgtaggctacattacaaccattcttggctttgaacaccatgaggaaattcacacaaaaaactgaattagagacatgagttacaagatttgctaccactttcttaactttgcaaagattgcataagcaaaaggccaatcttanaaggatgtttaattcagatgaatggttgaagtctaaggcagctaaagagcccaaggggaagcaagcaacagatgttgttcttatgccatcattttggaatgatgttgtttatgctttaaaggctatggggcctcttgtaagtgtgttgaggttggtggataatgaacaaaaacctacaatgggtttcgtttatgaagcattggatagggccaaagaagcaattc

SEQ ID NO: 20208 - DNA, 396 bp, Glycine max
agcttcagcgtccattacatcgtttttcttcaagactattagaataacttggataaaggttatatttatattaactttttagaataaaataaaaaagaaaataaaataatttattacaagttaaaatcaaattatatatttttattttatagaagttatcttatttagtttctttaaaaactaattttaacttatataatttaattttaatttataaaaaaggtttaattcattttatttttttcttataagtgtttattatttttttatagatttaattactcatttagtatttataatttttaaattttagttctaaaatttatattttaatacctaaaaggtctctatcattcaaattctttaattaacggaatttaacaacaataacttttt

SEQ ID NO: 20209 - DNA, 398 bp, Glycine max
agcttgcttgcccctggtgacaaaaagtgctatgacgatgttagtctctgcgtgtcaacgggctcgcttgcctctggctgcaaaaggtgcggataaccataaggtacctccgcatgtcatcggactcgccgtctctggatgacaaaaggtgcagaagacgatgttagtctctgcgtgtcaacaagctcgcttgcccctggttgacaaaaggtgtagatgacgatgttagtctctgcgtgtcaacaagcttgcttgcctctggtgggcaaaaggtgcagataaccataaggtacccctgtatgtcatcggctcactgtctctggatgacaaaaggtgcagaagacgacgttagtctctgcgtgtcaacaggctcgcttgcccctggtagacaaaagtgc

SEQ ID NO: 20210 - DNA, 356 bp, Glycine max
  unsure (1)..(356): unsure at all n locations
ttatctaaaatnttgcattatgtatgaaagatcgtttctctttggcattgagatagatcacaagattgacctccaaggagccttctaaccattaggaggtcaccttcttcatgggggtagacttcctcactagactctttcaccccttacttcatcttcacttccactagaggaagaggaagaagtagtctcctcttgactactataaatgtcttgacccctcataatcatggtattctatatggggcatcgagaggctctgtgacctcttccaagacatttgaagcatttaatgttacttgtactttcttgggaactagtcttatgggtgggtttcaatattgtgtatcccttat

SEQ ID NO: 20211 - DNA, 333 bp, Glycine max
  unsure (1)..(333): unsure at all n locations
agcttgaacgaggaancgnnnaaggtgaaacttcctgcttttattgttgaccacagagtggtacctgaagataatcgcgggggtcaagagaccttgtggacgtcaggtggggtgctattgccctaaaccaagcttgaccaatcccgacccaacccgggcatagtctgccagtgagaacctgtgatgtacctaaacaggcgagctcctggcagtcatcagataaaaggaacaaagaccacaaagcaaggatgctagtggtggctggccagctgtgaattttgtgtgatatgtggatcatggcctatggtaatcggacaccaatggtgggtaatc

SEQ ID NO: 20212 - DNA, 395 bp, Glycine max
tgaacgtatgtaagacacatcttcttcaaccttggttattcttgactccatttcattaaagtgcatgtctacttgtagttccaaagtgtcaaacctttcaccaacaaaggtttgaagaccatcaaacctgtccaaaatctttgaaagaagagatgaatcttcttcatcatgtccttcttcaccaacatgtcgagcacccttctttacccaagagccatcatgttctttttgataaccaaaggatgctatgactgaagcgcctataaagaaggatctcttgattgaaacatagggttcaaaatcaagagggatgttgaagtgttgaaggaaaagggtaacaagatgaggataaggcaatggagcattcaatcgcaatgccttatgcatgcgatatc

SEQ ID NO: 20213 - DNA, 373 bp, Glycine max
  unsure (1)..(373): unsure at all n locations
cttataatgnttctgtaatctgtcaccataggcgaggttgtagccttcatcatgaactatttttgtactatctgttaattctcatgtatatatatatacagagatcagcggaataagagcaaacggacagataggaagtaagaatgcagtatgataaatgaaagcgaaatataaactgtaaagcagatatcaagggcacaccgagacggcttacaaacccatgtttgtgaaaataaagaaaccgaagcggcggcagagccacacaggatcagtgaggggagaagggagatatgaaaaacagaacttgcatttattgaaccgaaaataagctcacaagagtttttcctagcagagcttctatgttaaaacctgt

SEQ ID NO: 20214 - DNA, 398 bp, Glycine max
tgcataacataagcacagatagaaatattgaacgcataaaaacaacatcaaatagatagtaataatatttgcatcaagtatcagtagaatttcccaataaaagattctagccctccattacaagggagtacctttcacaaattggagaagggttttagagaaaataccagattacaaagcagtggggatgtctcctccacctctaagaacctaggaatcactcctatacctaaaatctacctaaaagttagggcctttttcttccttgctcagcttttcctctgttctttgttcagcactaggctcacgtagtctattcaaacctcctctcttcattctctgcaattcaggcttaaaaagggctttttgtccgcgaaggcgtgattagcgcgagtaag

SEQ ID NO: 20215 - DNA, 421 bp, Glycine max
  unsure (1)..(421): unsure at all n locations
taagtcacctgcngcatgcaagctngnaaggaatgtaggctacacgatganntttactttctggtcccaaaagagttaccaatgtcgtgtacagtgtaatgaaattattagctgaggttcactaataaagttttcagcaccatgtgaatattttttagtaagatttttagtttttttttttttttgcctgaaagaaatcattataaacacacatgtggaaaaagaagtggaacaaagttgtacagatattttcacctcaacactatttttgtttttatcctaatatttatcaccccttactttttataattatcagtcacccctcttactttaattgtaacatcattttcactgtttattttaatattttaatattttaatataacatttgatcgttaaaagccatgacaaacaagtcagc

SEQ ID NO: 20216 - DNA, 411 bp, Glycine max
  unsure (1)..(411): unsure at all n locations
tttacttcataaaattaaacatcccgttgctttttacacctaaaagttattgtgactaatatgtcctacccattagtaactttggtatatgttggtaaaaattggttcacaatagaatcttgcttgctttggtgtcactaaaactctagtagggtcttgagaagccacaaaaagagaataaataaaaccagtgggtgcccattacaaagttgtgacagtggaaattggttacactgtggtccaatatcagacacaagattaagagaagaataaaagggttgagagagatgtgccatatatgtgtattataactattcttgactntttttttctttctgattataaaaatatacatagtttataaacatattttcttttgagaatgatttttgttgcatatgtttttaacat

SEQ ID NO: 20217 - DNA, 373 bp, Glycine max
agcttgtttttggtttaaatagatttattcttttttatgacttgtaggatccaatttgagcaaaattggatgtgggcaagatggtttcgaaatctgccctattatgcagaaaattgttgaattgtgcaacagaatttttcaacatgtgcagaaaatgcttgtgcattgctggttatgagaaaggtagtacatattgggttctggacattttctagtaaatcctaacggtcaaaatgtagacttatgtactagaaacctccagtaaaagtttcaagtcgatccagcggttaacgaatcggaacgaagagaatgttactggggtatttgagtaaggaaagctgtaatatgtgaacgagttttgggcagagttttc

SEQ ID NO: 20218 - DNA, 405 bp, Glycine max
tgccgcccagctcgcccaggcgagcaaggttgcttcctccataagcaacagccttctggaggaatcttctggagggccaactgggcctggttgctatttgcacccccccttttactaaatgcacccccttctattttttggtaattctttttccgtaatgttacgaaactttacgaattttgtaacgatacttatttttcttccgcaaggttacgaatccttacggattacgtatttactcttttttagctttcgaagaagttacggaaacttacggattgcgcaaaacacctcttttcgatttccgtcacattacggaatttcacggattgcgcaagcctgcttccttttgatttttgagacgtctcgggacttcatttattgtgcaacaaaggacgccaagta

SEQ ID NO: 20219 - DNA, 413 bp, Glycine max
  unsure (1)..(413): unsure at all n locations
agcttcttattttcagatgatcaaatttttttgtactacctcatgcactttcctctaattgactatgggcattcattttcttggcgcttaaactgctgagaggtgggaggcccatctttctcaaataaaatttctggcttcagcangagtcatgtctccaagggctccaccactggcagcatctatcatacttctctccatattactgagtccttcataaaaatattggagaagaagctgttctgaaatctgatggtgggggcaactggcacatagtttcttaaatctctcccagtactcatacaggctctctccactgagttgtctaatacctgagatatccttcctgatggctgtggtcctggaagcagggaaatttttttctaagaatactctcttaaggtcatcccagc

SEQ ID NO: 20220 - DNA, 277 bp, Glycine max
cttactttgttcttatttattcttgattgcgtcatctgttgacatgcataaatttgatacaaaaatcaaaattgaataatcgatgaatatatctctcgatctcaacacatactaaaaggaaatgaacaaccaaaacataaataatggattaattatgtccactgatcatatttatgaagattttggtaaatatccattcaaaatgagtattttttttttaagaattggaatggtattggatatcagatgtaatggctaaatcatgatgatacatatt

SEQ ID NO: 20221 - DNA, 399 bp, Glycine max
agcttcatcttcaatccaagaaaaagtgatattgagacttaattgatttggatgaagatgatgatcttaacctttttgtaaaaagttcaacaagttcctcagaatcaaaggaaatcaaaggagaccaaattttaaacctaaaagaaggacagaagattcatcctctactccaaaatgctatgaatgcaatcaacctggacatctgagggttgattgcccgatcttcaagaaaagaatggagaaatttgaaaagaaaaattttagtgaaaagaaggtgaagaaggcctacatcacatgggatgacaattatatggaatcatctaaggattcaaaaaatgaagagataaacctgtgtctaatggctaaaagttatgaaagtgatgaagaggtaacatcttc

SEQ ID NO: 20222 - DNA, 402 bp, Glycine max
tggagtttccaagtgccaattcatcttcttctttagtccagtcttcttctggcttcaattcatcagtgggctttccttctgtgtccagcatcttgggatgttcccagcctttgatgacagctttccaggttctgctatccagtgatttgaggaaggccaccatccttgctttccagtattcatagttggttccatctaggattggtggtctgttcactggtcctccttctttctccatgttcatcagaatttatctccctagatctcactctgtgatttcgagtgttagctctgataccaattgaaattctgataccaggggacagatgtcgtaccggatgtcacgacatcacgcttcagaacatgcagattagatgcgtccgtatgaacagattaaacaag

SEQ ID NO: 20223 - DNA, 414 bp, Glycine max
  unsure (1)..(414): unsure at all n locations
gctttgtgaccttctctattaagatatacatttcttatcatattctgcaaatcctcatcagaggacacagaaaccaaagcatcaagatcttccccaggaagctgatacttgattgcatgaacctgattatatatttgtaatgctttctgcatgagctcctgccaagatatgtcctttcttattcgaagaatgcgtgtttggcctccaacataccttagctttccatcacatggtcgtggcaatattctaccaccaaagctgcaaagaaacttcatcatcattgatctatcataaactccaaaagagccatagccaggcacanattgtctattgtcctgattcaatgaagttcttggcattgatcgaatcgacccatagttgcttctgtctncaggtaatgatgtattcattcta

SEQ ID NO: 20224 - DNA, 399 bp, Glycine max
agcttgtctcacccatgagtctacttttctataactcgcaatttcaaggttctcgcaaacccaaacgtatcttcattactctctacctctccaaacactcacaaatgattcaaaaccatcccaatactcaacacaagtccaaaaaaacataaatcaaccatcaattaaacatatacaagatttcatcaagaattcccaaatcaaaagcatacaaggggcaaggactctaaaggaaacccaacaccaaattccaccaacccacaaaaatcaaacatgctttgaagcataaacaacccttccaatcagattaagcaatagaccataaggtagagttttccttacctattgtctacaagcttaggtcttgaaaaagaggagagaatgagaagctttctactc

SEQ ID NO: 20225 - DNA, 376 bp, Glycine max
  unsure (1)..(376): unsure at all n locations
agctcgcctgtccgagcagcagcannnttgctcctagttatgttggggaatggttacgaacccggaatgggtttatgcaagacaacggcggcataactagcctgataaatgccaaaggaaatcgcgggaagtatgggttaagctataagcccactcaggcagatgtaaagagaaccatcgcgggaaggaagagcggtagtcaaagctcgcggatgagcaagaaggtgaaggaagctcgccctgccacataagtagaagctttataagcgcgggtctgggggactaaggtcaagtggtcgcaatatacgaagatgatgttccgagtacattggatttggtacgaccatgccctcctgatttccagttgggaattggc

SEQ ID NO: 20226 - DNA, 333 bp, Glycine max
agcttctcccccaagctctattttttttgagaagcgaactggaaaagggtgcatccccttatgcacttgtctctctttgaatgagattagaaagactgcttccgagaaaaaaatccaagccgaggcggatccgtgacgtcaacgggagcgacttcgcgaaggtttacgaccgttcttctacgatcactgttcgctctacatcaatcttggagaataaactggtatgaaccttgatcgaggcggccccaggcacactatgtacccaaggtggttcacatcgcgtacagggtctctccactgaggtgttcattaactgagagatcccctctggac

SEQ ID NO: 20227 - DNA, 393 bp, Glycine max
agcttgcaaagccctgatggattgtattatctataagagcttggtatgaaagactaagtttattcttactctagatagtactctagagaaatagtggacacttcactattcagaaaggcttagaaaaaggatctgctgattatacatatatatgtgaatgacatcattttttatgtaacctctgaaaggatgagcaaggagttttctgagctaatgaaaagagaatgtaaaatgagcttgatgggtaagttgaagttctttataggacttcaaatcattcaaaaagattatggaattttcatgcataaagagaaatacatcaaggacctattgaaaaggttcataatggatgaagcgacacaaatggctaccggtgcatccttccactatcat

SEQ ID NO: 20228 - DNA, 401 bp, Glycine max
agctttggagaaccaagcaatcagattgcttacgaaatatagatgggaatagaggtaacaatggcggtaatgacggaccgggcagaaccgggttgagggagtaaagctcaatgttcctcccttcaaaggtagaagtgatccagatgcctacctgcaatgactacactgatgcgcagaaagtcaagctagcagcagctgaattctccgactatgcccttgtttggtggcataaataccaaagagaaatgttgagagaggaacagtgagaggtagatacatggactgagatgaaaagggtgatgagaaaaaggtatgtgcccactagctataacagaaccatgcgacagaaactccaagggctgtcccaagggaatttaaccgtggaagaatattataaagag

SEQ ID NO: 20229 - DNA, 399 bp, Glycine max
ggcctcaaagaggtccaagaaggataaggcggccgattggactagttccgctcctgagtatgacagtcaccgctttaggagcgctgtacaccagtagcgcttcgaggccatcaagggatggtcgtttcgacgggagcgacgcgtccaactcagggacgacgagtatactgatttccaggaggagatagggcaccggcggtggacatcactggttacccccatggccaagttcgatccagaaatagtccttgagttttatgccaatgcttggccaacagaggagggcgtgcgtgacatgaggtcctgggtaaggggtcagtggatcccgtatgatgccgactctatcggccagctcctatgatatacgttggtgttggaagaacgccaagagtgtcagta

SEQ ID NO: 20230 - DNA, 376 bp, Glycine max
  unsure (1)..(376): unsure at all n locations
agcttgntgtttttagctngacactttttattactattttttattttctatatttttcttccatcttattctttcttgctcgctctctttttgctcctttttttccatgagatattttgctacctaaacatacgtatatttttgtgaggtattttgctatatacatgcgtgtccaaggtatcttgctacctaaacatacatatatatgttttgtgagatatttttgctatatacatgcatatccaaggtatcttgctacctaaacatacatatatatattttgtgaagtatttttcctacatacatgcatatccaaggtatctttctacctaaacatacatatatattttgtgaggtatgactaccttccgagctt

SEQ ID NO: 20231 - DNA, 360 bp, Glycine max
  unsure (1)..(360): unsure at all n locations
tctccctctntntcctataaataggggtaggagggcataacaaaaatgttcaaccctcctggtatctgaggatcacttaaaattagtgagaaaaattatntccgtaaaaaaaatccaagccaaggcgcttctgtaacgcttccgagacgtttccgtgggtgatttcgcgaagattttctgtcgttcttcggtcttcaaccggtaagttcccgaaatcgaactttttaattcattctatgtacccttagtggtccccacttgttttgtgtgcttttatttttatttcattaactttccgtaccccctnttgacgtgctttagtcatttattcaagtcatattctcgcctaataaaaactaa

SEQ ID NO: 20232 - DNA, 218 bp, Glycine max
agcttcaaggaaaccttaagtaatttataataaaaaaattaagaggaatttttataataaaacttattaatactataaatgataatttaattgggcaatgtataaaacttatgagaaatctttgaaactcatgaatcaatattgttcaaaagcttattaagtggattaaaagttttaatgccttgtggagtgtcatgtatgcatgaccggtagtggtt

SEQ ID NO: 20233 - DNA, 399 bp, Glycine max
tgactattgatactttatcatttacaacaattactttcagttcttgtattttgattaattgttgttattttagacttgttgaaagacacaaattttaagagaaacgatgtgttatgctacacatgttctggtattcattgattgtttacaatcagatagtaaactcggctgactaaaaaaaatttctagcttaatacttagtaattgattattctaatcttatctaatcaacataatgtctataaatattctaaaatgctaaaattataatagaaacgacaatattctaataaatcacttaggaattccataacttcttcatccatagattaattgaagccaattgcagctacaaataattttaaaaaccacttttagaatgtttgatttctcagctct

SEQ ID NO: 20234 - DNA, 396 bp, Glycine max
  unsure (1)..(396): unsure at all n locations
agcttgctngaggagcttctaggaggctnnnttttgttcttcaatgaggtcctttaatggtggttttccaccatggagatgcacggaagacaaaagagaagaggtgagaggaggcgccatccattaaggaataagccatggaagaaggagcttcaccaccaagatgagccttggataagaagcttggagaggatacttcaatggaggaaaagaaagagggagagaaagagagagggggggagcacgaaattgaaagaagaaaaagggagagaagttgaactttgagttgtgtctcacaagactctcattcatcaaagttacaacaagtgttacacatgcttctatttatagactaggtagcttccttgagaagctctcttgaaaaaacttccttga

SEQ ID NO: 20235 - DNA, 133 bp, Glycine max
tgtagcaatttccaacgacaaggactggatactcagatgtccctatgagtccgctattatatcgagatgctcgacattgcgaacaatagcggtgttcaataacaaacgagagaaacgtgatacactgaagagc

SEQ ID NO: 20236 - DNA, 400 bp, Glycine max
  unsure (1)..(400): unsure at all n locations
agcttgacangcacccaancgccgtctttnnttttcttcgtgtctatcgctatccgagaagagcttcatagattgatgtgccctataattctcttcccaaggcttctatatatttcttcgtgattgactacgaaatcaactgcttcgatgttggatgttccagccaaatactgcggcatattgggtggcttcttgctaaaagtggcttcatatagagaaatccagttccaacgtgcactgaagtattataagaccatccggtccacatcaagaaatagccccatgtcgatggatgatgatggacaaaatcctcaagtattgctcaacaattcaattcattaccttggtcagaccatcagattgaggatgacaagtggagctcatgcgcaacttcatacca

SEQ ID NO: 20237 - DNA, 405 bp, Glycine max
tctggtcaatctaaggagtggtgtctccatgctgcatattgtttgttttgagtggaaaatcctaatggggttaatcctgaaattctgcagcatttgcaaatctgattcatattaattgaagttatgtacgagcactgtagcttttacaaaaataagcactacagcttatttaaggcataaattctgtagcatctgcagtatatgggtggaaaaagagtgggagtggaaatttaaatggagaagacacttgtttgacatagagcttgagagagcatattgtttccgtaatgatgttgctggcagctgtcttcatattcacaaaaaatgatgactggagatacttgacaaggactttgtcttgacctacagctattggtcatctaacatagcatcgggatacgtttt

SEQ ID NO: 20238 - DNA, 400 bp, Glycine max
  unsure (1)..(400): unsure at all n locations
agcttatatcaagtaagtnatgtacacttcacattactattagttaatcaacaatgtatatatttgttatcatcaaaactatgggattttggatcatccagtcaaagcctgacatgagaattgtccagagatgcaacaacactagactcattttaaaaaaaaaattatagttttgtaataatttttttctatattggttttataaataaattaaagtttctatttattttatatctcattttttattcaaattaaaatgtgacatgttattaaaaggtatcattcttttaattaattttcctagcattttacaatcatagattcttattgattgaattttcaactctatgatatatcaacatattgaagaaatacaaaaaaaataaaattataaagaaaa

SEQ ID NO: 20239 - DNA, 414 bp, Glycine max
gcttcctcgtggcttctttgagaagctttctcaagaggcttctttgagaagctagattcttatctatccacacccctctattaactaaattaacttccttaaaaataattatggacgaaaataacgcaacaaataatcaaacatcaaacataattactaataatatatagatatatatatcagggtgttacaccaaccatgataaatgtcggagtcttgcttcgcactgggttttgtttcactttagtaaaacatggggtcgagtcaggcgccttcgcttaaaaataggttctatcaagtcaaggtcaagagcctaggagtcgctagtttgaaagagttaggacagttgatgggtcagctccagcgacaagcttttcgcatagcttacggtaagatctgggacctagccatgga

SEQ ID NO: 20240 - DNA, 418 bp, Glycine max
taagtcacctgcggcatgcaagctttgacatgagtcatcaaagactataatttttgaccatggaatgaattttaagatgatatcaatcatctatctttcaatctttctcaaacatcattcaatatctttcaactctttctacaaaattttctgattctttttctttccatctttctaaaagtttttgttcaaaactttctcttccaataaattttgttcaaaaacttgtgctattcatctttttcattctcttctccctttgccaaaagaacaaaggactaatcgcctgagaatttttttgggtcttccctttcccttaagcaaaagatttcaaaggactaaccatctgagatatcttttgttccccttacaaagattcaaaggactaaccgcctgagaattctttgtcccaacacat

SEQ ID NO: 20241 - DNA, 416 bp, Glycine max
tctcctatttttatctaatctttcgttgatgttatgattttatacagtaatatatttttcatattggtgttttcaggattcctagtgaggatgcagagtctcaactcttaaaaggcagaaaaaagtgcagtggaagcttttgagacagcccaggttatgggtgttattatgtttgacttgccaaattgccctaagaaacattgtcaactagagacatccactgttaatggagaaggatcatctacccatactgttactgcatcttttgaaactaccttgaggtgggcagagaagtagttgttgcagtcaaaactgcatttataaggcttgcaaattgtccttcttttagtaacggtgaattcaaggaactactaagaaaaaatagtgaaaatccagatacagtggaaggtaatatg

SEQ ID NO: 20242 - DNA, 165 bp, Glycine max
aggcccctaagcacgcaacgcccgaccaagccgcaccggaaaaagggaaccccgaagaatgacccaccccgagcacgtagaagagagccaccagcacgctcccaaggacgacactgaggagcgaaaagaccggctagcagcgccggaacacgaccaccatacccc

SEQ ID NO: 20243 - DNA, 386 bp, Glycine max
  unsure (1)..(386): unsure at all n locations
agcttagctcagacactgcttaatttttttggattcagacactgttgactgaactcaaagttccccttctgcactcccatgtcttctgtgataactacagtgcagttgtcattgcccacaacccagttcttcatgcaagaacaaagcatatgaaaattgatgttttttttgttcgggagaaggttttgaccaagcagctcattgttcatcatgttcctgctcttgatgaatggcagatgcactcaccaagccactctatccaccaagatttatttttccaagagccaaactcaatgtgcttgaggcttcatcaaagtctcaaccaccttgagtttgagggggggtattanagcattgtcagagcggtgcagcttaactacactctt

SEQ ID NO: 20244 - DNA, 405 bp, Glycine max
tggttggcttggtttatctttagatgatagttgtttttcttttgactttaattgtgtttcctcatgatttttggttgttttttggggcttaaacccctgtatttcacaaaactaaatataaatagataggagttgagcatgaatcattttttccaagaaatgacaagtactactggcctgtggtttttctctccctgtgagttgtttctctccctattagggtttctctcttaattggtgagaagtcttatccttgttattaaaaccattttctactgcgttcatctccactatttttctcaccatggagcatccagacatccaagatttgtctcttgaagatgaggaggaagaagagatggtgtttacaagtaacactatcataaaatcgggactgaactattc

SEQ ID NO: 20245 - DNA, 331 bp, Glycine max
  unsure (1)..(331): unsure at all n locations
agcttgggaggacccgcctttcnnnttttaatctatgtatgtatgggaatagaggttaccatggctgtgctgacggacgacgcagaaccgggttgagggagtaaagctcattgttcctcccttcaaaggtagaagagacccagatgcctacctgcaatgactacactgatgcgcagaaagtcaagctagcaagatactgaatgctccgactatgcccttgttaggtggcatacataccaataagaattgttgagagaggaacagcgtgaggtagatacatggactgagatgaaaagggtgatgagaaaaaggtatgtgcccactatctata

SEQ ID NO: 20246 - DNA, 397 bp, Glycine max
agcttcacgatctcaacgtctaacttctttatccttcattggaagaactaagaggggacatgcaaaataaataactctgcactcaaataagtacatgaatgagttgagtatgaaattgaaaagggtgaaataagatctgatctttataacgtgagataggagtttcgagtccttgattgtaagagagttattacagtgatgtaacaactctagataattcctaacttgtaaataatatatagtagaaaaatcatagcttgtaaataatagttaatagataattcatcacttatagattatccaatggattatagataatccatttattatagataattcattactagtagataagtaagtacctgtaacttgataaagaaataataacattatcact

SEQ ID NO: 20247 - DNA, 271 bp, Glycine max
ggctctgttattcataggcagaagtgcacattaaattttgggagttaggtgtaatttctcagatcgataatcggaatctagaataatatgaaagttaataacgtaagaggcaagtgtaatttcccctatcataacaactgttcacaataattagccatacccacttataaccagcccaatttaaaacattcacactttaacaagctattcacagtaaactgatcctagtttattgaactttatgctcgattaaatggaataacatttgaaa

SEQ ID NO: 20248 - DNA, 383 bp, Glycine max
agcttttctttctcaataatctatcttctactaacaattctaattgcaagttcacattcttgttctttctttgtctaactacacacttgttcaaactcatgaaaaggaacacaaactccatcataatcatgcattcaattcaaaataaaagcatacaaccattttcacaaatcaataaaagtgcttcactgccatatcattaaacaccaagttaaactgttcaaaatgcttcaggatgagcaaatcaactaatcataaataaaactagcagtgtatgtagacataaaggaaatactgtactaaaaccataattataataataaaaataataatttgaaaagcaacaaaaaaaacaaaatcattaggaatttaaaattcctatg

SEQ ID NO: 20249 - DNA, 410 bp, Glycine max
ttgcgaaaagcttgtcgctagagctgacccatcaactgccctaactcttttagactggtgatccctaggctcttgaccttgacttgatagaacctctttttaagcgaaggcatttgacttgatcccatgttttactaaagtgaacaaatcgatgcgaatcaaaactccaacatctatcatgggtggaatggatgaatgcatgaagacatgcatatgacacatatgcaatttatgaatacgggagcccgggaaattgtctccttcttagatacaacgtcttggggtaacaaagtgcccaacgtatgtatttaagaaggtgacacagacccttcgttgatttgtctatagaggggattaagacggaacccgtgtgtgatgcatatgccaaaggcgcaatacgggaaagtaca

SEQ ID NO: 20250 - DNA, 388 bp, Glycine max
agcttgaccgtcgtctttttctcttgtgagagaacagttctttcaagataatgtcgcatatcccataacaggtcttcactaaagtctataaaaggatgtctcccttaatgaagcaactaacaaaaaatgagaaaactggacgtagctcagattgagcgacccagtataaaccaagtgtttctacttctcttctcataaatttttattgagtattcttattatattttctaacatcactttacaccaagtgtttatttgaaaaactattttaagaacctttaatttgtcaatagacaaccattttgttcttcactatatacttttttatcctcattggatgactagtgtttgacatagtattatcatattaattttgttatcacaaaaa

SEQ ID NO: 20251 - DNA, 394 bp, Glycine max
tcggaagaaagtgatgaggtacaagccctcatggcttagcttggaagagcccgggtagtcaaagagaagttcacgtccatggccatcaaagtctgaagagagtatgatgaactaaggggcgtcaatatggccaccgatgaagccttggaatgagaaaccaagaaggcccgaaaggaagaacacgaccaacacaagttttgaggggctttatacggcagcaatagtgagctcaaactccgaagaggtgaaaggaatcatcacgggtcaaaggcatgatctggaaggacgagctaaaggcttgccttatgtcgaaaagaaatttgtcccaacagttaaagtaagactgaagggaatatgtgggccatcatcgatgagtgcaaagagaagctaaatc

SEQ ID NO: 20252 - DNA, 376 bp, Glycine max
agctttaggaaaaccataatttctatgtagttcctaaacaaaaaacaattgaggaaacttcgccaagaatccccttgaaaaacctttattcaaacctttcaaagttagtgagaaggctaaaagaaaaattagggaacttagaaaaactaaatccttaattgaaggcgtaggtgacaaccatagtgaattactaaacaagattggtagtttacttaaagtcattccagataccccccaagcctcggaaaatacttccaaaatggtaacaagaagtacctccaaattaatcaatgttattaatgaagatagtggccaaaactcagataacacaactgagataggatcagtgtcagagaagaatataaatcccattaat

SEQ ID NO: 20253 - DNA, 384 bp, Glycine max
  unsure (1)..(384): unsure at all n locations
tgttagggattatttgtatgatcaagtggaatcacaagcttcaaaatagtaatagtattttatccatggattttttgtatgatcaagtgaaatcacaagcttgttagggaatttttgtatgatcaagtggaatcacaagcttcgaaatagtaatagtattttcatccaagttgtcttccaaaggactagtgtttatccaagcaattctaattgaaaggtgttcgcttccggcaagtgcatcggatcgcacaagtagtataaaatggtaagaaccgagtatcgaactctcaagaaacttgtgttacttggtaaagctatttcagtgaataggtgtctagtgtgaaaagagatatgtntactatgaacaggtgtgtaacctaacta

SEQ ID NO: 20254 - DNA, 272 bp, Glycine max
tcctgaccgtataacaactttgatgatagacgtcccatagtcgaactgcggccgatcaaaagcttaaaatcatttcttcatgcatggaaacacacacgttaaggggcgaccacaactgcgtaagaaaaaaaacgggccgaactgcgaatcttataagtgctcccgaaaataataaaccagccgcctacaggagaaggctacacacgctgctaaccgaaccagaggagtagcggtgaaacatattttcaaaatgctttttgctaacaaatggt

SEQ ID NO: 20255 - DNA, 399 bp, Glycine max
  unsure (1)..(399): unsure at all n locations
agcttgcctaacaacctcattactcagatnnttttgttgtacccaacacacttgtttgaacaccgtgagaagtaaattctcatgtgagaacagtcaaaacattaaagctggaacatctagaaaattataagcatttaagcatgggatgtaggtgtaggtttggaattgatgcaaatcttttccattggaagtgacattctggtggggaatggtctttccatatgctggtccaggagctcntgccaggtgttttattggggaaatcccattactctgcaatgccaaacaatcatcataccaacaaaaaatgaaaaaaaaaagaagtaaaaaacaagaatcagaagtaacatatacacaatttccagctattttattggggatatgattatttgaataaat

SEQ ID NO: 20256 - DNA, 409 bp, Glycine max
taggtaagtgacctccattttcaactctaagcttcattttcacttcattatttttgctctaatctcacttgtagtttcaaaaccttattttgcactcttgaaggttggaaacttgaatctaaactccctcattcttccttctaaattttgtggagcctacaagaggtaaggggggcctctccaactcttgaaccatgtgcatgttgttgaacttccttgaacatgttgttgctttgaaattttttatctttctgtcatgtattgaatttgcatgctgaactattttcattgagttttgacgacaaaaatgagttctttgcatgttaaaacatagagttagacttaaatttcacttaaattggagtttcctagcaaaagttacaaataaaacaagtttaaggacctttag

SEQ ID NO: 20257 - DNA, 340 bp, Glycine max
  unsure (1)..(340): unsure at all n locations
ttcatttgaggaaacttccaaagaaaaacgtctgttgattttttgattattttattcaaagatattntgattattttattattattttttcaagatattttgattattttattattattttgcctttttttggtttaaccgtggttacagtgattaaacgagattaaaacgtaaataatcggttgaaattcattttatcatttattaggcgagataatggcttaaacgatcagttagagctcgctaaaaacgaaagaaaagaaaaccgaaagtgaacgaaataaagaagaaagccaacaaaacaagaaatgaattgaaagtcttggattcgaaaacttac

SEQ ID NO: 20258 - DNA, 402 bp, Glycine max
ttatgatactgatgaaattcggtcttatggtttacaaaaatcatagttgttgttaggcggttatcgttatcaaaattctagaatgctttgtaaagatgttcatcaggtccaagtctgtgcctatgcattgtagtcgaaatgaattcaagatagtcaattgacccatttccgtcaacatcagcctgaggaaaaaatatacatgtcttgcaaattgaaacaattaggaacaaagcaaaaatgcatgacaacaaaaaaaagtataaagatataggaaatatcatagtttaatcacaacattaaaaaaggctttagctagagcctacataataataattataataataataataataacaacgaagcatacatgcattacaacaaaacaaaattaagaaataataa

SEQ ID NO: 20259 - DNA, 319 bp, Glycine max
agcttctagccaaatggacttacttgtattatttttttgatagcccttttgagccttgtttccctttccttgttttgaagctcacacaagccttaagtgaaaaaccatgatattaccatatccttaaggaattttggagctttggaattgttttgggaataagtgtggggggtttttgtttcattggacaacttgttttgttggctatgcttcatgatgtattttgggccatacttgatgtacattgtatattggctaaatgtcggacatgctgaatgaaatgttgcttctcaaaggcctaagagtataaaattaaaat

SEQ ID NO: 20260 - DNA, 411 bp, Glycine max
  unsure (1)..(411): unsure at all n locations
ntataagtgcgggttcgggagacataggtcaagcgttctcgatatgcgaagatgatattccgagtactttggatttggtacgaccatgctctcctgatttccagctgggaaattggcgagtggaggaacgccccggcatttacgcaacaagcataatgtaaacctttacggttttaaaagctctatagttgggcctatgctttagagttttcattttgttaaggctttgtgtcttttgtgtttgaatttataatacaaggatctttctccatctgttcctggtctctacccattctcattcatttgcatgtttacttctttatctganacggcagatccgatgacgagtcccccgaaggtactaatacctgngacccatctatcgacttcgagcaggatatgaatcaaacg

SEQ ID NO: 20261 - DNA, 411 bp, Glycine max
cggatccttaagcacctgcggctgcagcttaggttctcattgactccatttgttgcaaagaaggacagagatctgtatggtgatctatagaagaacataaccatagactcttgcaacaggtgcagatgcaaatttttgattcatggcaagctgagttactaggttgaccaaggcatcaagttttccctcaagctttttattttcaacaaatgaagatgaatccgtggccacctcatggactcctgtaaggacaatagcatcatttcttgcacttaattgttgggagttggaagccatcttctcaatcaaattcctagcctcaacaggagtcatatcaccaagagctccaccactggcagcatcaatcatactcctctccatgttactaagtccctcatagaaatattgcag

SEQ ID NO: 20262 - DNA, 398 bp, Glycine max
  unsure (1)..(398): unsure at all n locations
tctaccccattttcctataaatagggggagaagtgaatgggaaaaatgttcagccctcctggtaattcgagaatcacttgaaattagtgaaaaaaattgtttccgtgaagaaaatccaagtcgaggcgcttccgtaacgtttccgtgggtgatttcgcaaagattttcaaccgttcttcgacgttcttcgttcatgcttcgccgttcttcggtcttcaaccggtaagtttccgaaatcaaacttttcaattcattctatgtacccttagtggtcctcatttgttttcacgtgcttttattttcatttcatttactttccgtacccccttttgacgtgctttagtcatttgcttaagtcattntctcgcctaatcaaagaataaaataaatttccactg

SEQ ID NO: 20263 - DNA, 396 bp, Glycine max
  unsure (1)..(396): unsure at all n locations
agcttgcttgtggactnctatgnntgttgatctttgagcttcaatgaggtgcttcaatggtgattttacaccatggaatgcagcggaagccaaaggagaagaggagagggaaggcaccatccactatggaataagccaaggaagaaggagcttcactaccaagaattgccttggataagaagcttaaagagatgctttaatggaggaaaagaaagagagaaggggggagcacgaaattgaaggaataaaagagggagagaagtggaactttgaagtgtgtctcataagactttcattcatcaaagttacaacaagtgttacacatgtttctaatcatagactaagtagcttccttgagaagctntcttgagaaaacttccttgagatgcttctttg

SEQ ID NO: 20264 - DNA, 407 bp, Glycine max
  unsure (1)..(407): unsure at all n locations
tgcttctancattttctttcatgatttccattactactttgtcttctgctttatgatttcaaagactacaatgtcttttgtcttttatgctttcaaagactacaatgtcttcagtcatttacgctttcaaagactacaatgtcttcagccatttacgctttcaaagactatgatgtcttgagtctttacgctttcagagactgcaatgtcttcagtcatttaagctttcaaagactacaatgtcttcagtcatttacgctttcatagacttcaatgtcttcagtcatttacattttcaaagactacaatgtctttagtcatttacgctttcaaagactacaatgtcttcattcattcacactttcaaagacttcaatgcctttagtcttatacatttcaaagacttc

SEQ ID NO: 20265 - DNA, 385 bp, Glycine max
  unsure (1)..(385): unsure at all n locations
agcttccccaacatcaagtaattnnntttgttacaacacaaactatcacagccaagaaagcagggcaaaggcagaaaacctgcccaaaacaccaaccaaaatcacagcttttctcaattaaagactccaataacaattccttcgttctagttcgttacccattggatcgactcgaaaattttactggaagtctctagtacataagcctacatttggaccgttgggatctactagcaaacatccggaattcattctgcactactctttccacaaccagcaaaacatggcatttttctgcacttatgcaaaattctgctgcacaatttcacagcaaaattctgcataaagtgcagatttcgaaaatcacactttccctcatccaatc

SEQ ID NO: 20266 - DNA, 358 bp, Glycine max
  unsure (1)..(358): unsure at all n locations
ntgaaggaagggataatcatcaatgatgacactcaatattgtgcaagaagattgcatgcaaatgtcattaagcctaaagtgaggtggactcaatatcctataataattaaacatagggttcctttgattcctgaagaagctaataggaagaatgcaatagatactaggatggttgcttagttatcaatggactcaaccaaagataccatagcaaaaagagagggatgaacaaagaactagaaaggaaaaaaggatgaagaagaaaattggccctcatccatcaccaagtcctttaagactatactatgaatggttgttgttgaacatccatctcattcttctcaacatcatcaatctc

SEQ ID NO: 20267 - DNA, 396 bp, Glycine max
agcttagcgcaactcctcttttcttttcccgcttagtgggccaaaactcgctcagtgcaattccctctcgggttggaatgcacttagcgcgcccctgctcgcttagcgcaattccctcttaggttggaattgcgcttagcgcacccttctcacttagtgagacaccaaaatttgttagtttcaaaatctcaacagtcagactatgtagatgtgtcttaggaagctccaggaaatatttgaagacgatctaacggttaacaaatccgggattttgattttactggaataggtttaggtaaaatttaaaatctcataattttaacttagctcaacaaaactccacataactcaacatccacatcaagaaattcgcacatgattaattcaagtcatacc

SEQ ID NO: 20268 - DNA, 146 bp, Glycine max
  unsure (1)..(146): unsure at all n locations
gntcggatcgtataccaatctagattgttgacaatttataggtatctcttgtcatgaatgggatatacgttagtatgtttcgcattcaagcaagccattgatggtacatacactggtttgtaactaatctccggacatcactcact

SEQ ID NO: 20269 - DNA, 368 bp, Glycine max
  unsure (1)..(368): unsure at all n locations
agcttctttgtagacctcnatcngtatctttccaggccgaggtcgaccgtcatttttttcgatccatttcggtgataatatttttttgccgagatgggcaaaatgccagtttcggccgaataaatgggaaaatgccagtttcggccgaaacgaaaagtcggttgggctcgcacaaaaaaacctagccgacctacattttaaatattttatgcaacaccaaaacaagaaaacttcctgtgccgtaaaaaaaaaaacattacttgacagcgagcgttttgaaaaacaaaattgcgcaacgtcggctgaaaaatatcagtcggggctttttcacgaccgatggcggcttgtgagttttcaattcaattccg

SEQ ID NO: 20270 - DNA, 164 bp, Glycine max
tcaccggatgacgcttatcgttctttttctaaccgtctttatgcaaatgtcgtacacggattgaatagaaaactcgataagcgacatctgacgtgaggtagcgaactatattttctatccgacattgcacaattcttcttagaaaaacttgccggtcgaaaatg

SEQ ID NO: 20271 - DNA, 386 bp, Glycine max
  unsure (1)..(386): unsure at all n locations
agcttatcttatggcctgnctcgattcttaccccccgtgccactccggaagatttaagccaagcccctactttgaagggcaactcccaccttatgaagactatcccggacaagacgatggggaaggagatacccatcttggccccctgctccacctcaaagatccatccccgcatgaactaccccagccgaacagagtccgccatatcccggcctcacccacacccgtaaaagaatctgtttcctttgcggaagataagggaaagattgaggcgctcgaagagaggttaagagcagtcgagattctcggatttggcagatttatgtcttgtgcccaacatcgtcatccctcccaagttaaagtaccagactttgataagtacaaag

SEQ ID NO: 20272 - DNA, 379 bp, Glycine max
  unsure (1)..(379): unsure at all n locations
cttggatccatttgacatctatcatttaaagaatcaagatcatcaaaaccttctcttccatccgagaagttggcaaactcaatattcattttcctccttacatccacatcaagaaagaacctcttgaagcattttaatctttcacgagtgagttccatgtcttgatgtggaagaactcgattagaatcttcacttatccattcatgactataatgtntacaactaanaataaatatatacatgattaaaatttatgtaattctaacaaaaatgtaagtaaaaaagtatagagttaattacctagggattaaggaataagctaaacaatggagtggagtgttactcttagtccaacggtcaattaatatggagtgcacta

SEQ ID NO: 20273 - DNA, 148 bp, Glycine max
ctgggtggctcctagagtggctccagattcattggggctaagcttgcttgacctttataccagccatcgatcgtttacgaactaaattgcgggacgcgacctctaaatcggctctctaatcactgtttagaatgtctcttgttttgcc

SEQ ID NO: 20274 - DNA, 375 bp, Glycine max
  unsure (1)..(375): unsure at all n locations
agcttgtctctcgtgtttgtgatatttaattcttttnnnaacggagagtattaccgtagatgataaaccacacttataattatggatcgatttttgcgtgagtctgatgataagcattttttttttttgaaggggatgataagcatgttaaaatataggtgggttatacatagaaatttgtagtattaataattaataataagattagactcttactaataattactaataagattaaactcttatatttataggtaaattgtagtttatgatttataaactttcgacattttataactgtatgtgtactaaacacattatttcaaaccttagcctgatccttatatatttaaatgcgtgattaactcaatacac

SEQ ID NO: 20275 - DNA, 419 bp, Glycine max
  unsure (1)..(419): unsure at all n locations
tgacactataaaactaagcttatacatgctattggtttttttaatcataaaaatataatatttntcttctgtaaaaagataatatattggtttattgtctctattgaacaaattntctagatccccccttgacattgaggatgagctcagccttgacactataatataacagcaaacacaatacctcctctacattgtataagaaaaaggatgagaatagaatttcgatatattaattctagtgggttgttcgggactcaaacccggaactagtattttctttgttgacatgcaacttatactataagagatagttgtcaaagtggacaacagtgttattgttcatattacatgtacatactgcacattctgtttggacttcatccgacagaaatctagtaaaaactaaggtttcatga

SEQ ID NO: 20276 - DNA, 345 bp, Glycine max
catgatagaaaaaggaaaaaggaaatatagaagtgcacattcacaagtcatacccataattttataaaaagtgcaggaagtaataatgccattctatcaagccaaattatttctacttgagaattatgcatgtattatttgtaatggaacattcggattacctttatggttacataaataagcacaggaagaaattcatcagctcctggaggattctctctcgaagcaaccgaagcattaagtaacaagttgctaataaccctgcaacaattcagaatacagacaagtttatccctgggtgccttgacatgttgatcttctgtaattctttctgtgcaagctgcc

SEQ ID NO: 20277 - DNA, 437 bp, Glycine max
  unsure (1)..(437): unsure at all n locations
tcagactctnttctattctcagtttcatcaactgcatcttgtagtttccacagcatttcctcactatgcttttttgacaaagacagctgttgtcttagttcttgtaactttgattcatattgttccttgataaatgcaattctcaaggactcctgcatagcaaccggaggtccttcatgtcctcttctgtcatgggcattaacacactcagcctcagctttgtctttcagttccttcaaatgaatagacaaattcttaaactcctctgtctcaaaacctgttcagcaagcctctaggtaagttcattacattggttctgcagccttagcagctcatcatctgatagtttaatgaagtgaatgcactttccgttcatccaatctgtcccngagaactatacacttgagttcagttcctccttggacaaaagagatctt

SEQ ID NO: 20278 - DNA, 308 bp, Glycine max
ttgttgaccacagagtggtacctggagatatgtcgcgggggtcaggagaccttggggacgtcaggtggggtgctattgcccaaaaccaagcttgaccaatcccgacccaacccgggcatagtcggtcagtgagaacctgcgatgtacctaagcaggcgagctcatggcagtcaacaaataaaaggaaaacaagaccacaaagcaaggaggcttgtggtggctggccagctgtgaattttgtgtaatatgtggattgtggcctctggtaatcgattaccaaaggtgagtaatcgattacaggcttaaaa

SEQ ID NO: 20279 - DNA, 345 bp, Glycine max
  unsure (1)..(345): unsure at all n locations
ntaacctcatcgtccctcacagtctttagattcgggagccaatccaatccttgagttcggactctcagccacttatgatagccgccgatgatcccattactgcttcccctaagctctctgtcctttcttaacgccgcatcccatgccttgtgaactccttggagtaccctcgcgttgtggtcactgaaacctcgtgcgatgaaaggcgcgatgctttcgtctaatggcgctcctctcatggggtagccaagctgtcttatggcgagaacgggactataattaatacaaccccttgttcccatcaaggtaacatttggacatccttcgcatgaagatagaatcttg

SEQ ID NO: 20280 - DNA, 339 bp, Glycine max
gcttagcgagcatccgctaagcacaacattcctgggctaagcgcgaggaagaatccagaagaagatgagttgtacaggttcgctaagcgtaccgcttcatctctctaagcgcaccgcttcagttcatccgctaggcgagaaaggagcgctaagccaaaaatcactaacgtgcgctaagcggtccatatgtgcgctaagcgcacgagcacgaacaaggccacctatttaagccttaaatcagattgtgtgaagagagtttggactgggatttaaagctttgcatgtctagggtttctagagagagaaaggtccaagttctagagagttttgagagatttt

SEQ ID NO: 20281 - DNA, 429 bp, Glycine max
tgttaattaggactacactgctgaacttcttgagaataggtgttgaaaatgaagagttagcttcctgtttactctatactcactaaaaccaaacctttaaaattatttgaaaggagttcttgaagtataaaaactgaatatagaaaaggaaaagactggttgatagcgatacaagagatgatcgagattgtaatgaattaagcaaattaagaaacactactaactataacatgtccttaatctctttaacactttaaagtctcaatcttcaaacttaaaataggcaaaataaactatgaaggaatggaacgctacatgcaagatcacaaaactgaatgtaagtatgccccagaaatgcaatcaagagctcaggcttattacaaatcagaatgaatcaaaactacaacaactcttgaaccaaatacattg

SEQ ID NO: 20282 - DNA, 166 bp, Glycine max
ggcgccagaaaccagaccaaatgtgactgtgagagactttaacttcacaatttttgcatacatccgcttttatcacttaaacaagcgaaacaacatgacgtcttaaggcacacatgggtttcttatttatattaccaccccgaattgtgtgtccttacgatatttc

SEQ ID NO: 20283 - DNA, 384 bp, Glycine max
  unsure (1)..(384): unsure at all n locations
agctttttgctactatggtctanggannnnnnaggatgaaatcaaaacatttgttatggcattgtgcttgttgcaatttatggaagatgagaaatgaggattatgatgggcaaaaatgacttcaacattctaagattatcttccttggggttgatgtagaataggccatagatagtgctttgccctgttttcttgggcttgatgtttgcctatttcaaaaatgaataagttgcaaaaccaattggagaaagtcgagtctcttactcaagatcttgaagaagggcttgagtttctatctaggtgtttgataaagactagacttgcctttcttattctcctaaaacactaacaagtacccttaaataactacactgtccctaaaat

SEQ ID NO: 20284 - DNA, 442 bp, Glycine max
  unsure (1)..(442): unsure at all n locations
tctatataagctgaaccattntatcaataaacacaagttgagttttattcagaaaattagagtttatctcttttatcttagtgagagtgattctcctaaattcttgagtgattcaagaacaccttggctgtatcaaaggactttcacaacctttgtgtgttgccctcgctggaaagagtgattctttccttcctttcatcatcacccttgttctttcaaaccacaattccagaaaatccacctctgcccagaattatctcgtggccataactcccattttacgcactcaaattaagtgattcttgagcctaaattgaatttcaaaacgagacctttcacctcgntttggaatcacctcatttggagccctgtagcttcaggtattgccatttctatatttctatccagccaccacttaacctacgttntaccattccattca

SEQ ID NO: 20285 - DNA, 318 bp, Glycine max
accatgtctcattttcatgagtctctactttaatcaattaccaagtgattgtaatcgattacatcgttcttgaaagtgttcccagtagtgatcaagaaaactttgatcgattaaatcaagagtctaatcgattacattgttcttgaaagctttctaggtgttgggaagaacactttcatcgattaaaaatgataatctaattgattacttctttaaaataatcgattaatgtggcaatttaatcgattacatgcaattatgaatgttttctctatatatagccaccttgtgttctcagctcttacgactccacattct

SEQ ID NO: 20286 - DNA, 358 bp, Glycine max
cgtaatctctataaggcctcaaacaatctccaaggcgtggtttgacaggctaacaatagttgtcaagcaagatggttttgctcaatgccaaacaaaccatactatgtttgttaagcattctctggatggaaagatagctttgtttattgtttatgtagatgatatcataattctaggagacgattatgatcaaataaatcatctgaagaatcttctagccgaggaatttgaagtcaaggatctatgccagctcaagtattttctagggatggaaattgctcggataaagaatggtatttttgtttctcaaagaaagtacactctagatttacttcaagaaacggggatgcttggatgc

SEQ ID NO: 20287 - DNA, 279 bp, Glycine max
agttttcctgcatatttcctattaatttcatcgttatgcaatatataacaaaaatatttgctgtggcatttaatggatcttaaatacatgactcatttttttttaacttctgttttggcctttctctttatatttttatgaattttcaggtaattaataagttctttcagatcaggcaacattctctgaaagaatttgaagatatgagttggaatgagaaatgtgcatgtcttttgggtgactctgaggaggtgtggagtttcaatgatgcttccacct

SEQ ID NO: 20288 - DNA, 379 bp, Glycine max
  unsure (1)..(379): unsure at all n locations
nttcgttagtttcacatttcactcctatcaaactacagaatatttgagaaaaatactccctataacaacacctatacattaaagagaaatgtttcttcctaggatgagaagaactaaagaaagataacgggaaaaaaaatgaggagaaagaaagaataagagagaaaatagaatctgtaacataaaattgaagattattacatgtaagtatttaatgttcggcagagcacacgacgtacgccccttggaatattcaatgacttcatagcatgagctggaaaataaaatggcattttcattaagaaaagttgtcttccaattctgttttaagaagctatatataattggttatatatgcagaagtaatagttgaagaaag

SEQ ID NO: 20289 - DNA, 360 bp, Glycine max
tttctctaactactcatgttataaaataagttccaataaatctgtaaatcacctgttccaaatatatcattggaacccgtgctttaattaacaaggaaatccaagtttgacaaaagtcgtttcaaatatatttaataacagaaaaatcataaactatataaatattatacgcgtgaatatcatattataataactatcatattgtacgaataaaaaacatggtaggttgttgaaaaaacaaacatcagatacatatttaaatattttctatcaatatcaatcacgagacaaatctcatccgttaaacatatcatataaaatacttaaccacacattgaacaattatgtttatatacatca

SEQ ID NO: 20290 - DNA, 332 bp, Glycine max
  unsure (1)..(332): unsure at all n locations
tatgggaaggcccatttgcctgagaaagctgtggacttgtttcacagaatgtggggtgagtntcagtgcaaacaaaccgtgaaatcattcaattctgttctcaatgtgattgttcaagagggtcttttcaatcgtgcattggagttttacaatcatgttgttgcatccaagagtttgaacattcaccctaatgcactcacttttaatttggtcattaaggccatgtgtacgcttggtttggttgataaagcaattgaggtttttagagagattccactcacgaattgtgctccggataattatacctattcgacattgatgcatgggttgtg

SEQ ID NO: 20291 - DNA, 360 bp, Glycine max
ctccaagtcttttctaggtcttcctgtcctccttttcataggattactacccatgtaatatagggcccgtttgttgaaacattcttttttttttaagaaaagcattcttgttattaagaaaatagttttctgtttttttttaagaaccaactcttacaatgttggtttggacctaactcaacccaaaaagctagctcatggggtgagagtcgtcccccacttttatattatatctttgtcttatctctagccaatgtgggacttatattttttccaatacaccccctcacgttcagcacttttgggcttgatgggtggataatatgataacgtcaccgtttaaatggatctaggataaac

SEQ ID NO: 20292 - DNA, 452 bp, Glycine max
taagacctctgaattctcatattgcacctcttcttaaggaattcagatcacaagtactaatctacaacttcctaggctcaacttactaaaaagcaagttacacgaaacaactccataaatgtgacctttgacactaactactaacccaagcccattaagagtcatggggcctttcaaatatgaaacaaagtcttaaatgcatagcataaagttaacctgaaatactacccatacacagaagccacaaaaattaactaaaatatcttgaaattataaagatagagaaaatatgttatgcactgacaatgtaaaacagttttatatcgtcattcaatcacaattcgtcatgtatggtgagcttgttaacttttatgctatacaatttaaacatcatataaatagtaatttgtgattggataccaacataagattgtttatattgtcaatgtatc

SEQ ID NO: 20293 - DNA, 483 bp, Glycine max
  unsure (1)..(483): unsure at all n locations
ccctccgccctcttcctatcatcatactatacttcatctccaacacgtnaagacagatgaccctgaaacctagtgacacctaatcacccagcaccccagatccaccctaccacacaactccaccaggnnngagggttattatcttgatctctacaatattttacctatccaagttctactattactgaacaaattcctactacatatctccctcccaatttagaagaaatcatttccatccagtctttcacaatttcttaaatatctcttaacgcaaaactcaagactccaacgctagatcactcctcatgagcaagaaccacgtttataaaagaactattattactaatgaaatctgaaacccaatgacacctatcccccactttttcttatggaaccaaactcatcattccctccaaattataaaagtttctattactccactacacacatccaatctaaaacattacaaatccgcacttc

SEQ ID NO: 20294 - DNA, 290 bp, Glycine max
actcatatcatacaattgatcattcacatcattctcaacactcatttcatgaataacaatccactgcatatcaaattccatcaattcactgttcaaacacgcttttggtacaaccaaaccactcagcgtgctgaaacttaaatacctgacatttaaacaactgacacataaaatatgtatactaaatgactgaacataaatcataaaatacctcaaaattaactaaaatgcttcaaatgcacaaatttaaatgttctgcttctgtggttgcccctgtgtatgctcattaa

SEQ ID NO: 20295 - DNA, 350 bp, Glycine max
tgttgattaagatgttatgactgacttctactcatagatccattccagtgctcatggtgatcctcctcatcattaccttctgaagagaaagaagtgatcatcacgtcttaaaagtggattgaaagagtatcaaagatatctttgaggatataacagtgacaaagcgtagtctataacaacaaatcatatagaaaaatcttcagctaatcatgtcaagacattgcgagcgcattaatagaacaataaatggatgaccatttcacttgcagtgtatcatcaaatactatagtgtatctatattagtctaactcacaccaaggcttaaaatactttgtagtatctacaaacta

SEQ ID NO: 20296 - DNA, 395 bp, Glycine max
  unsure (1)..(395): unsure at all n locations
agctntagagctgataactatatatctgctccaagggggnaggaggctctcttctctctctcctctcctttttttttcattttagttttagagtgctactctcaattcgttttagtttctttttcgttttggagaataattctagttttattcgtttctactacaattttcgttttctattgattaatggaaggctaagtctctagcgttgttttctcttgaggatcaagcacaactctctttgaggtcatattattactattaaattctgatcagttattcctcttcaccaattactttgtatttgttgctattaattcatgcatgcttaatgcttgattaattgtctctacgcttaatttacgttcatgcttaatgatcattcatgattaaat

SEQ ID NO: 20297 - DNA, 426 bp, Glycine max
  unsure (1)..(426): unsure at all n locations
ttgaccgatcgtttaagccgttttctcgcctaataaatgataaaaagaatttcaaccgatcatttgcattgtaatctcgtttaatcactcttaaaacaaaatctaactgatcgttcacgttgtaaccttggttaaaccaaaaaaggaaaaataataataaaataatcaaaatatctttaaataaaataatcaaaaaaatcgatcagacgtttntctttggaagtttccttgaatgaattgactaataaccaaagtgaaactaaggctaaatcaactcacaaatcaagttttgtccgcaaaaaatcactgaaaaccgttttaaggtccaacgcctttaacggtcctctntgcttttatcggttaacatggaccgttcaaaagcataaaatcaacacatcactttactggcctttgcgagaactacgt

SEQ ID NO: 20298 - DNA, 307 bp, Glycine max
tcaagccagcctcattggactttggctgagaaactcggccattgacatattcaaagaatgttgaacatgaagaagaaagacatgacaagaagtctaatggtgttttctcgccaaattgctatgcttgccagtttggtaaacaaaatataatgccatttcccaaatcaacttggagagcctgtcaaaagatgcaactaattcacactaatgtggcggaaccttaagtaacaccatctctacaagggggtcatactttatccttacgtagatgattttacaagaatgggttggattttttcttaaaatc

SEQ ID NO: 20299 - DNA, 302 bp, Glycine max
  unsure (1)..(302): unsure at all n locations
tcatggaagtgcaaaaatggctggctgcggttcagtaaatanctatctcctgtccctatcacatgggtggggaagctaggangagggcatgggtttgtactcttgtattatggcaaatgagaaagccccggatgaagcactgtgtctggttccatccgatgcagacaatggtagtgactcactccaattactgcataagttctactctttatttcgaattgcgcggacccatagctcaaagcaaggaacaaagtgttgctacagaccccttagagttgagagttatacacattccagatttg

SEQ ID NO: 20300 - DNA, 359 bp, Glycine max
ttaaaagaggagttagctgcttgctcaaggtccaagagaagcttgtctcagcgtttatgcgagacagagaccaacatgttacccatcgtcagcaagtaccaagaagaattaaatctagccacggcccacgagcacaaagtggcggacgagtatgcccgagtgtacacggaaaaggaggctagaggaagggtgatcgaatcgttacatcaagacgcaacaatgtggatggaccgatttgctcttactttgaacgggagtcaagaacttccccgattgctaggcaaggccaaagtaatggcggacacctactccgcccccgaggagatccacggacttctcagctattgtcagcatatgat

SEQ ID NO: 20301 - DNA, 440 bp, Glycine max
  unsure (1)..(440): unsure at all n locations
tntagtcctcacgttagtttcacaccttgcgttaatctgtgatcacctgngcccttccgctcagttcatgggatcccccaagcgcttaattagaattgaacctgaaccaactttccctaaatttgctgcgtttgaaaacattcatgcatacacatacgcatacgcatgcatattgttgtggtaaaacaggggcaggatcatcttgggctaccttctggggtaaagacaaaacatgaacggtagaaaccaatcaaggtaagataatgacgcggtcaagattggccatacctggttgtttattacttgcaggtacttaaagacggatgcaagtggggatggggtcacggccaaccgatcgttgccccttctctgcgcgaaacgagcagagaatgtcgctgcagggcagcccgtatcctttgtatttgcagctntctttacta

SEQ ID NO: 20302 - DNA, 369 bp, Glycine max
cgggcgatggtgcacaacaagtttttccacatccacaaatcgcgcataaacccaccatcccctgttgcccacctcccaactgagctcacgtactcctacgtagcccatatcctcgtttctctcaacaccgggtccccatcaatcctatcaagcttccccaacatccaagtaaaacaacattcaaacagcacaaactatcacagccaagaaaacagagcaaaggcagaaaactctgccaaaacaccaaccaaaatcacaccttttctcacttaaagaccccagtaacaattccttcgttccaattcgttaaccgttggatcgactccaaaattttactggaagtctctagtacataagcctacattttga

SEQ ID NO: 20303 - DNA, 291 bp, Glycine max
gtttgctctcatcacccagttccaagaagaactaaatctagcctatgcccacgagcatatggtggcggacgagtatgcccaagtgtacgcggaataagaggctataggaatggtgatcgactctttacacccagaggcgaccatgtggatggaccgattttctcttaccttgaatgggagtcaagaacttctcccattggtatccaaggccaaaacaatggcggacacctacttctcccccgaggagatacacggactcctcgactattgtcagaatatgatagatttaat

SEQ ID NO: 20304 - DNA, 345 bp, Glycine max
gaactccattcatttgaagttttactgcaattaaatcatgtaaaaggtggtatactatttttcctacctcgaccttttatccctataaaaatgtaaaaaggtttttgtcgagaaggttttaacgaggcacacctaaacttatactatcaatgaatacatttttccaacaattatacttgtcatttttttttatagtaccctctcgaataccctttttggcagaggttgaactctacgataacaacatgtgttccctctcgaataacttatttgatcgaggatgaacttatttccgtaaacaatagttccctcttgaataaatccctttgccgaggatgaaattat

SEQ ID NO: 20305 - DNA, 473 bp, Glycine max
  unsure (1)..(473): unsure at all n locations
agccgatgnttgacctgaacatgcattcggacctntagatctcaacctcacctgggcccatatgaccgtccttaattcatcatactctttcaaactttatggctatggacttgaacttctccttcactcctcgggcttttaaactctgcctatagggcttgtacctcatcactntcttccgaagcttttacctcatcgtccctcacaagtctttgaatttgggaagccaaccaatccttgtgttcggactctcacccacttatgatagccgccgatgatcccattactgcttcccctaagctctctgtcctttcttacgccggatccatgccttgcgaactccttggagaccctcgcgtttgggtcactgaaacctctgcgatgaaggcgtgatgctttcctttgaggcactcctttatggacatcttcgcataagatagaatcctgatcttcttccttctacgagaaccatt

SEQ ID NO: 20306 - DNA, 333 bp, Glycine max
aataggaaaaagcttagatacagttccttggtttttgatgttgttttccaatcagaattggagtttcactttagaagtccacataatatagatttgcattaaaggattctgtagattattgaaatgaaactccaattctaactgaaaacagcaccaattgcacctaaagaactgtatgcaagttttgtccaaagaaatataccttgaaaccgtgacacaaccgcagatggcaagaagcaaacctcgtagaaggaatcatatccaaccaaaaagacaaatcaagtaaatgactccacagacaaccaccactgcagaaatgagaaacggaatgct

SEQ ID NO: 20307 - DNA, 427 bp, Glycine max
  unsure (1)..(427): unsure at all n locations
taggtcactgggagtttctaggggggaaagcaaagtatctgcttctagaacatcaggtatcttgcattagcctcttgctgctagacactgagcaagctattcctacagcattttaaaacaatttcacatgtctgactttggaaatgaattttgtttttccatccaagataatttgagatatcattgaagtgcttgcttgataattgatattttcacatcattgaagtgattgtgttctgtacatgcttgcctaatgtgctgctgattctctttntcttttattntttcaaataactcatcttgaaaagtttgtaaataaatcttgttttcttgagctnttctgatcgaggatgcaacttctttggagatttacaacctcaataatttctactcaatacaaacatgactgattgagctgttttatata

SEQ ID NO: 20308 - DNA, 344 bp, Glycine max
  unsure (1)..(344): unsure at all n locations
acattcaccacaaattctgccttcttctattttcagattgggaatgcctctaacagcacctttgtcaatgattttcttcatgcctcttaagtgcagatgtccaaatctttgatgccatattctgacttcatcttctctggagaatagacatgtggaggagtaactggtttcttgaggtgtccataggtaacagttgtcctttgatctgctgcccttcattaggacttcactcttctcattcgtcaccaagcattctgaccttgtgaagcttacattgaatccttcatcacacagntgactgatgctgatcaagtttgcagtcagtcccttcaccagcagtactt

SEQ ID NO: 20309 - DNA, 443 bp, Glycine max
acactataaaactcagcttttatccaggcaattcttggtggtgaagctccttcttccttggcttattccctagtggatggtgcctcccctatcctcttctcctttgcctttcgctgcatctccatggtgaaaaatcaccattgaaggacctcattgaagctcaaagatccagcctccatagaagctccacaagcaagcttccatcaagttatgctcgagatcttccgtggttcaatttcgggcgtctccatatgtgatgtgcttgaatcggacctccgtgtgaaaagatatgaccatttgaatttctcgagatcttccgtggttcaatttcgggcgcctccatatgtgatgtgcttgaatcggacatctgagtgaaaagtaatgacaatctcaattactcgagagcttctgtggttcaatcttcaagcgctcgatatattatg

SEQ ID NO: 20310 - DNA, 324 bp, Glycine max
tataatttaatttaagacaaaaactaattacatgctatttgttaagtattttgtggattgtcgtgagtaccaattttctcttgtaataaaattcagtataacttaacaaaaagaaactgtcattttaattataaaaacaataagaaaaatattaccataattttaaaagtcccgtcatttaaatttactaacatacaaagtagcatgggaataacaatttttcgttactatatttattagtaatttattgattcttaataatcttaaaagaactttatttggatttttagattattttatactttatggtaaataagaaaaata

SEQ ID NO: 20311 - DNA, 429 bp, Glycine max
  unsure (1)..(429): unsure at all n locations
tgttgttctcgctaagtctatgcctcgcgctaagtgcttgagacgtgctaagcacgccccttcatcaaatttccaatgtgctcttttgggctttactttactcattaaacatcataaattcatcaacttttaatattttagacacaaaaacttaaatgatgttaaaataatagttatttgcaccaaaaggaagaaatatgagaaaaaaaattaccaatatctatataatttaatcacagaacatacctataaatagtcgttacagttacaagtattaaattaattgtttataccaatacatttttatgtataaagtatccttaacagatacataaacttattatatacctcaatcaatatcatataatacaaaggtacaaataagaaaatcctaacatatgtacaanaaagggatgaaaaattaaattt

SEQ ID NO: 20312 - DNA, 239 bp, Glycine max
agagaatctcaagccagaagcatatcttgtactacatcagaaagcacaactgttctagagaaacagagaaaatcctagctaatgaacaccataataaactttactaccaggcgcactcttctgatagatatcattaaaagtatttacatggcctcgcatgtaagccttaccgtcacaagcgcataaacacattacctccataatgccatacacgggactctatttgaaaatgaatcttt

SEQ ID NO: 20313 - DNA, 312 bp, Glycine max
aaactaggaataactcactttaacctccaattaccactaaatccagatttagcttttcaaacccttaaagcatcacacttttccactcatatcactacattctcactgtttaaccctaggttaactctacccttcatctctatcagttctccatcagcaatctcagcacacaaacatcacaaagcatcatcataaaaccctacaacagaatgggtaagcttgactcacaccaaacatgacaagtttagcatgcttttaacaaattccttcaccaataactaccataacgcataaacctagtcaaactaccca

SEQ ID NO: 20314 - DNA, 330 bp, Glycine max
ctaagcttgcacccagctcgcccacgctagctatgttgcttcctccagaacgcatcgccttctggggaactttctggaacgccctagtgggcctggtttctatttgcaccccctatttactaaatacacccccttacctttttttgctgattctttctccgcaacgttactgaactttacgaattacgtaacgatacttgttttctttctcgaatgtcacgacaccttacggattacgtaatcatcccttctttagcttccgaaatgctatgaaactttacggattgcgcattaacacttcctcttgactttcgacatgtcacgaaactt

SEQ ID NO: 20315 - DNA, 321 bp, Glycine max
tcttgaccgctgttctgatacaacctttttcagcatcattctaatgttcatttcttcagaatgaatgaacatgtcttcttcttaaaacattaaacactgaaacacttaagcaaaatattagtcgtcacttaaaatcatcatcctttcaatttgaattactaatgatttgtcatgattaaaatcaagaatatggatttaacaaggtttgtctagcccatgatcatgccaaagagagacttaacaaggtttgtctagccaatgatcatgccaaaaagagactgaaataccattaccaatgatccattggatgttatctaatac

SEQ ID NO: 20316 - DNA, 349 bp, Glycine max
tgccacccagctcgcccaggcgagctatgttgcttcctccagaaggcatcgccttctggggaacttcctggaaggccctagtgggcctggtttctatttgcaccccctatttactaaatacacccccttacctttttttgctgattctttttccgtaacgttacggaactttacgaattacgtaacgatacttgttttcttttcgtaatgtcacgacaccttacggattacgtaatcatcccttctttagcttccgaaatgttatgaaactttacggattgcgcattaacacttccttttgacttccgacatgtcacgaaacttcacggattgtgcaacaatgcattct

SEQ ID NO: 20317 - DNA, 274 bp, Glycine max
  unsure (1)..(274): unsure at all n locations
ctcaaacttgtgttaaagtggttgttaattggatttgcaccacctataggcttgttttaatttgaagaaattaaggtttaataaggtggaaactctaggcttgtggctgcctcttggctgaccaggagttgtgcatttttccacatgtnttgtgtcttaattctagttttgattaggtataatggcaccaccaattgttgttattggtgatcatttcatcttctcacttttgaaaccaactgatgtcatttctatttataggctacacactttc

SEQ ID NO: 20318 - DNA, 422 bp, Glycine max
  unsure (1)..(422): unsure at all n locations
tgaaatgaggaagtgtagaagggtgaaacttcctgctnttattcgttgaccacagagtggtacctggagatatgtcgcgggggtcaagagaccttggggacgtcaggtggggtgctatttcccaaaaccaagcttgaccaatcccaacccaacccgggcatagtcagtcagtgagaacctgtgatgtacctaaacaggcgagctcctggcagtcaacagataaaaggaacaaagaccacaaagcaaggaggcttgtgtggtggctggccagctgtgaactctgattgatatatgggatatggcctctggtaatcgattaccaagggtgggtaatcgattacaacgcttaaaaatgaagacaggaggctaacatggtctctggtaatcgatcaccaacggagtgtaatcgattaccaggcttg

SEQ ID NO: 20319 - DNA, 364 bp, Glycine max
  unsure (1)..(364): unsure at all n locations
ctcaggatgcgtggagaatctgtagcacttgtgagccttgtcagagagcaggcgtctcactttcatgcagacaacaaatgcctcaacaacccatgttgttctgtgaggtgtttgatgtccggggtatagactttatggggcccttccctgtctcttttggttttgcttatattctccatgatgttgattatgtttcaaaatgggtggaagccaaagccaccagaactaacgatgctaaggtttgttgtggatttgttagatctaatatgttttgcanggttggagtccctacagccatcgtcagtgatcaaggcacccatttttgtaacagatccatgtatgccttgctcaaaagtatggggcn

SEQ ID NO: 20320 - DNA, 396 bp, Glycine max
  unsure (1)..(396): unsure at all n locations
tgctcgctaagccactcagccctgctggctgaataagccttggcttagcgagcttgcccgctaagcccaaggcacatatgattntatgtatattttgtcatgcgctaagcacaatttactctctatttctgtaattgttggaattgggcttagcaagccttctcgctaagccatttatgtccagtagtgttgtcgtgctaagcgcgtctggccgcgctatgcgcaatttggtttctattgcagaattgggcttagcgcgcctgctcgctaagctgattctgcaaaaaattctgatctgtgtcaactcgctaagcacgtggctgtcgtgctacgcgcttgagtaatttttcataaggcgcgctaagcacccaatatgaatttcagttttattttaca

SEQ ID NO: 20321 - DNA, 357 bp, Glycine max
attaggacgcatcaacaagaatcaagccaaggctattgtgcaagcaatcaatggggcaaaacacaccaaatgattataatgatggatggctcaaattctcacaaaggtaaaatcatcactttcaaattgagctttcaaaactatcatgacatgtagagaagaatcaaggatttcaagtcacaaaatgtcaagaacttttattttcaaaacaattacccatttcttgaacatatcctataattcaaagaaaaacatgtaaagtcgtacgtgcacatgaaattgacccaaaatattaaactgaaaatccaacaaaactaacaacattaacaaattaacacaactaacaaattaacaaaa

SEQ ID NO: 20322 - DNA, 376 bp, Glycine max
  unsure (1)..(376): unsure at all n locations
taatgaggagaggcgcaggaacactcaaganaaagatttactgctgcggcaggaggaactaaacaatttgttgttcaggtacttcattttctatctctctctgctgtgtgttttttctctctgcagaatttctcaaatttctccattgggtgttcattcatggcttttggaagatgcaataagcaataaatatttacttatctgattgaggttttttacatggttgtataacccaacccaatggcatagtgtgcaaacagatttttctttttttttttaaagtaaaaaaaatgttacaatgtgaaaaatgttagctacactctttatgcataaaaaataaaataaaaagtatcaaaatttttataataactcataa

SEQ ID NO: 20323 - DNA, 432 bp, Glycine max
tgccacccagctcgcccaggcgagctaggttgcttcctccagaaggcaggagaacttcctggaaggccctggttgctatttgcaccccatttttactaaatgcacccccttgcctcttttgctgattctttttccgtaacgttatggaaacttacgaattacgtaacgatacttgttttccttccgtaatgttacggaaccttacggattacataatcgtccctttttttccttccggagtgttacgaaactttacggattgtgcactaacacttccttttaatttccggcatgtcacgaaacttcacggattgtgctacaatgctttcttttgacttccagcatgtctcggaacttcacaaattgcctaacgatgggtgccaagtacctcgaagtggtcaacgagggtcgcatccacaatggatggcccca

SEQ ID NO: 20324 - DNA, 297 bp, Glycine max
aaacaaaataaactgcacacgaaaggcacaatttaaacacccaacttgcaccctctatggtattatagttcactttgaagcactagaatgacaaataacataaaaaagcaaattcttgaccaagataaaagcacactttgcagtggatttctattcattaggctttactatcatttgaagttgcacatgaatatattttcaaaggtttatctacacatgaaagtaatagctgcatggagttgagattatcccaaggtatcttttcaattacaatttcccataatattactccaaagc

SEQ ID NO: 20325 - DNA, 444 bp, Glycine max
  unsure (1)..(444): unsure at all n locations
ntgtcgattgtgagagagtctgagaatccacttccgaatccaaaccctaaactacaacagccccaggttttgcaagtcagcataaaaatggaaggataaatcataaatggaaacaaaaaatagtttacatggaaacataaagtataaatcaaatatgcaaataacaaaatacatgttaagtaaacactattagaaaatacactttcaacatcggttatttagaacattctacattggttctaaaattgatgttgaaagtgacgatgttgaatgtatgaatgttaacatcggttttggagaaccgatgttaacatacatatgacaacatcggttccctaaataaccgatgttaaacacaatgaacaacagcaaanaaagtgtacgaatgatgaacgttgacatcagttttccactaaanaccgatgtaatatgttagtttaacat

SEQ ID NO: 20326 - DNA, 333 bp, Glycine max
taaaagcgatcttgatggagctcttgattgttctcagtaatccctgtgcactaaaactatcattattcttattcaatagtatttcatgatgaacgctgcgatttaggagaactcctaaaattccttttttttttgtgcaagctaaatctaccaattcaaattgaattttatcattggagcaaaaaatgatagaagttgttgcattctatatagcatcatatgacccatacaaaataatccaagaatccataatggattcttcaaccaaagatgctctaagaattttaatattttctcacttaagaaacatgactatcaaattaatatactatg

SEQ ID NO: 20327 - DNA, 354 bp, Glycine max
ttggttagagctcggagaaggcctcaccttagcaccataagtggtacaacaaaccactgagaaagttaagttaattcaggaaaggatgagagctgctcagagtaggcagaaaagttatcatgataagaggaggaaagatttggaattcgaggttggtgatcacgtattcttgagagtcactccatggactgggttggtcgagcattgaaatcccgaaaactcacatctcgctttattggtcctttccaaattcttaaaaaagttggccctgtggcataccaaattgcactacccccgtcttttttaatcttcacaatgtctttctgtgtctcaacttcgtaagtatattcatga

SEQ ID NO: 20328 - DNA, 432 bp, Glycine max
tataagaacaaaattgccttaatcatttccaaatatgcatgtgaattatgacgcatcaacaagaatcaagccaaggctattgtgcaatcaatcaatggggcaaaacacaccaaatgattataatgatggatggctcaaattctcacaaaggtaaaatcatcactttcaaattgagctttcaaaactatcatgacatgtagagaagagtcaaggatttcaagtcacaaaatgtcaagaacttttattttcaaaacaattacccatttcttgaacatatcctataattcaaagaaaaacatgcaaagtcgtacgtgcacacgaaattgacccacaatattaaactgaaaatccgatgaaactaacaacattaacaaattaacacaactaacaaattaacaaaaccaacataactagcaaaaccaaagaaacact

SEQ ID NO: 20329 - DNA, 322 bp, Glycine max
agagtaacagcctttattcttgttcttagcatttcaaatacttatgtacttttgatttgggctagagtttacaatttacgaaataagcaatgcactcatgcacccacaaattataaagttaaagtaggagccattatattttagtttttaactttcaagcgtgttataacccagaggccacttcttttcgttgcaaacttgtaaccttgtttccgcagctatgacttggaataaatatttgaatattacacccaaacaaacaattaactctcggttggtaactatattaaaccttttattaagacttcttctttttttactg

SEQ ID NO: 20330 - DNA, 464 bp, Glycine max
  unsure (1)..(464): unsure at all n locations
ctattacggacctataaaactcagcttgtaccggcttcgagaagttgttcttccaattctntatctgctcccgccattggatttggtggtgccgtctctgagtctctcttctttctgatctaacacggaatcgcgccacacactctcttctgtttcactccatcgatgccctgaaaacctccaatcgaatcgatttgagatggaaagagaaagattagggttctttacttaaagaaaatttccccctttttccccttttacgagaaacaagaagacagagaggcctggtgacaccacaaaaaaaatctaaacaagagaaagaaaggtctgttttagggaaattntaaaacctgtatcaatataagggaacggttatatatatagagagagagtgtatctaattgtgtatacgtgtgtaattaanaatacttgcagaacaataaaatatataatctgtataatat

SEQ ID NO: 20331 - DNA, 307 bp, Glycine max
  unsure (1)..(307): unsure at all n locations
tggggcggcctggcctctatttgataggactcatatcgngatcacaacattcgctactgcacattgttctggtcatcaccactggtaccaaaccttttcataacttttttatgctctaacttgttcccgctgtttttgtatgttgatttatggcattaattaaataccagttttgttcatacagagtgaaccttagattctctgttgagattgaatacaatgatttttgcggacagcttgcattaatcattgtattgaatcttgatttgtcccgttacacagtctggggagactcaatttttatggt

SEQ ID NO: 20332 - DNA, 409 bp, Glycine max
  unsure (1)..(409): unsure at all n locations
tctagccaaatggacttaccttaaattaattcctttgatagcccttntgaaccttgtttccctttccttgttttgaagctcactacaagccttaagtgaaaaaccatgatatcaccatatccttaagggaatttggagctttggaattgttttgggaataagtgtgggggggttttgtttcattggacaacttgttttcttggctatgcttcatgatgtattttgggccatacttgatgtacattgtatattggttaaatgtttgacatgctgaatgaaatgttgtttctcaaaggctatagagtcaaaaaaaaaaaattcgaaaaaaagaaaaagaaaagcaataaagttgagtgaataagatcttaaatggcacaagaatgatgaaactcttggttctactcttcat

SEQ ID NO: 20333 - DNA, 368 bp, Glycine max
taagtgccttcttggcagggaaatagaaaaaacgaaaagagaacaacaactacatcatcattctttaaaattaaacccgtgttgtttatagagctgctcttgcaaaggcctcacatgattgtggtaaacatgtgcatccccaataacatggataagatcacttggaatgagatctgacaagaaaaacacatagtataaaaattgattattttatgtttaaattgtttttaatgatgtattttctctagtcatattatcaaaatcaacacacttttgaaccctgaatctacctagactagaacttaaattaaaaacttattcataaacttctgaaaacaactctaccaaaaaatctataaaaataattg

SEQ ID NO: 20334 - DNA, 401 bp, Glycine max
  unsure (1)..(401): unsure at all n locations
cgtgggagtttgtgatagtgattntgccacagatgttgatgatagaaaaagtactaccggatttgtattttttatgggtgattgtgtttttacatggagttctaagaagcaaggcattgtgacactttctacttgtgaagccgagtatgtagctacaacttcttgcacatgtcatgccatttggctaagaagattgttggaggaacttctgttgttgcaaaaggaaagcacaaagatctatgttgataatagatctgtacaagagcatgcctagaatccggtgttccatgaacaaagtaagcatatagatacaaggtatcatttcattagagagtgcattaccaagaaagaagtagaattgactcatgtgaaaactcaagatcaagttacggatattttca

SEQ ID NO: 20335 - DNA, 135 bp, Glycine max
tgtgatgaaagatctaccacgcctcttttgtatgggatgtgtgctctatcatgcacgactgcatggtcactcacagccatattctaaatcaattccatggctttttcaaggagcttcaattctatttttccccct

SEQ ID NO: 20336 - DNA, 313 bp, Glycine max
  unsure (1)..(313): unsure at all n locations
tgtggactataccttcgaccgaacacagccatgtatctgtctaggcccggattcaaggtgggctgcagcaccggcttcgcttncctaactgtactggacgcggntgcggtggctttatcctctatggctctctggagatttaacatgacctccgagatggaagccatttgatcttttaaagccgatagatcggccttcatctgttcctgcacgccctcttcattatccatttttctggatcgagagttatacgggtgccttggtgtttccttagttatgatgagactcctaaagaataaacaacggtgagtat

SEQ ID NO: 20337 - DNA, 370 bp, Glycine max
ggtggactataccttcgaccgaacacagtcatgtttctgtctatgcccggattcgaggtgggctgcaacaccagcttcgctttcctaactgtactggaggcggttgcggtggctttatcctctatggttttctggagatctaacatgacctccgagatggaagccatttgatcttttaaggccgatagatcgggctttatctgttcctgcacgccctcttcattatacatttttctggatcgagtgttataggggtgacttggtgtttgcttagttatgatgagactgctaaagaaataaacaacggggagtatgccaccacaacatgaatatgcatatggatgatcggagcacttggatccaccccaag

SEQ ID NO: 20338 - DNA, 177 bp, Glycine max
tttctatctttatattcgcagggtgtgaatgtaaccgataactctactctttttttgggttaacacttccctcgagtgtatttatctggcctggatgattccccatcatcatctaactctccatcaaaactgcgtgtggttaaagaggcacacatgagcctaacccatcttaatctg

SEQ ID NO: 20339 - DNA, 303 bp, Glycine max
  unsure (1)..(303): unsure at all n locations
cttgtgctatgaagcacggataccctaatcccttgtcgtgtccggtgtccgacacgggtccgtgtcagtgtcagacacccgtactacgtcctatattttagacattattggtgtccatgtgttcgtgtccgtatcgtgtccggtgtccgtgcttcataagctctgcgagatgtgagggtgataatgagtcctccaagcatttaatcttgcaatgtctattttctgttagaatttggaattgagcgtagtctttgatcaaccgtgcgagcagctccagctatatcaatgagtntctctcctcca

SEQ ID NO: 20340 - DNA, 281 bp, Glycine max
tccttttttcacttctgttcttcctttctcttgcacaaatttcacggcttgtccattggtgatgatcatggaaggctaaacacttaattaatccaaggatccactataagtaaggctgaatttgagttctggtttagtatttataatctttgtgaatgttcatcttttcttcaatcctattttttattttcatgattatgattatgattaggattgaaaatggattaggttatggattcatctcctaatttcaaaatttaatcacagattgtttggatgat

SEQ ID NO: 20341 - DNA, 451 bp, Glycine max
  unsure (1)..(451): unsure at all n locations
ggaaggtgtgtaccccaccatttnttcatagtaaaacactggtaatgtgtctactattattgtgatcatctccttctccgtcattggaggtaacacttgagctgccaggtctctccacctttgggtgtattctttgaaagatttgtgcccttttttacccatgttttatagttgcatcctatccggagccatatgagaattgtattgatactgcctaacaaaggcaaccattaggttcttccaagaatggaatcgggaaggttccaagttagtgtaccaggtgacagctaccccagtaagactttcttggaagaaatgtatcagtagtttctcattntttgcatatgcttccgacaatacatctttagatggttcttggggcaagtagtcctcttgtacttgtcaaagtctggcaccttgaacttgggaggggtgacgatattgcgtacta

SEQ ID NO: 20342 - DNA, 329 bp, Glycine max
  unsure (1)..(329): unsure at all n locations
ctgagaaaactggggcaaataaagagggtgagaaagagggagaaacccatgctgtgactgccattcctatacggccaagtttcccaccaacccaacaatgtcattactcagccaataacaaacctccttacccaccacccagttatccacaaaggccatccctaaatcaaccacaaagcctgtctactgcacttccaatgacgaagaccacctttagcacaaaccaaaaaacaccaacaaaaaggatatttgcagcaaaaagcctgtagggttcaccccaaatntccgtgtcatatgctaaacttgatcccatatccactcgataattc

SEQ ID NO: 20343 - DNA, 337 bp, Glycine max
gaggtctaggaaggatgctgcggctgaagggactagtgccattcccgagtttggcagtcatcgtttcaggagcgctgagcaccatcagtgtttcgagcccatcaagggatggtcattccactgagagagacgcgtccaactcagggacgatgagtacacagatttccaggaggagatagctcgctggcgttggacgtcgctggtcactcccatggccaagtttgatccagatatagttctggagttttatgccaatgcttggcccacggaggagggcgtgcgggacctgcggtcatgggtaaggggctagtggattccttttgatgcaaacgccctc

SEQ ID NO: 20344 - DNA, 535 bp, Glycine max
  unsure (1)..(535): unsure at all n locations
gtgctggcagcatcagtccttactcgccactctctgtagttccctgtgctcttcgttatcgagcgcgtctgctctactacttgttcgcatctctccgttatgtatcttgcgactccacccttcaccatcgacggcaccaccctctctccttgtgtctctatttnnaaatatacgcactccttgcgataaaagtactgttgccatggattgactgcccgcacctaggattacaactccttatcataatgtgaatagtgaagagtaggaccaattatctattcactaaagcaagcaattggatggcctctttgcgacgacacagccctaatcacactcatttgaaacgtcacactcgcatttataagatttttgaaactgtgcgcagaacaagtatggggggccctagttaactcttgctccataacattgaaagcatgttgttgtttcatgtcccatcttgaaccaacagtattctagagcacttcattgagaggcgccgcccaatgtgctaacatactactccgatcggctatag

SEQ ID NO: 20345 - DNA, 319 bp, Glycine max
  unsure (1)..(319): unsure at all n locations
tgtatggntgctggctagcttgatatactcggcatatcacacggccattgactatatactcccactcagctcgtgggttcacaatcgtgcactgcatttgaccagaaccatatgatgtgcgacttggcgaacccgtgatccattgacagcgatgctagtttctcaccatagatggacttatttaccttacaaaccatagactttgtatcacctgcagcaaagttttctggctgcatcatataaatagtttcttctgtgtcgccagatagacattgacgtttaagattcatttgatgtaactatacaatataatgagcta

SEQ ID NO: 20346 - DNA, 309 bp, Glycine max
ctacccattatatcttccataacctcatacccacgaaaatcaaaggggaaagaactccacccaaacctgaaatttcgaagtcccactcgtagccatgcacttcacgactcccaaaatgcccttctttcgcgatttggggcacaaatgatggccaaacgttgaagctttgtttttagcttcaatggaaaatgaacaatattaaaatgtcatcttgagggagaaaaagagctgtctgaaaatctttttggtcttaaattaaacggctctctctttctcattattctatctacgcaatgccacatttctctc

SEQ ID NO: 20347 - DNA, 441 bp, Glycine max
tctctcctatattgctataaatagggggagaagtgaagaagaaaagggttcagcctcttaggcacttctctctctctcgaaattgctgaggaaaattatttccgtgaagaaaatccaagccgaggcgcttccgtaacgtttccgtgagaaattacgcgaagattctcgaccgttcttcaagattcatcgttcgttcttcgttttcttcaatcttcaacgggtaagtacctcaaaccgagcttttcaattcattctatgtacccgtggtggtccacattttgtttcatgtatttttattctcgttttcattttctttgtatacccccttttgacgtgcttaagtcatttatttaagtcatttctcgcttaatctaaaaataaaataaatttccaccgatcgcttgaattgtatcatcccgtaattttggttaaaatgaattc

SEQ ID NO: 20348 - DNA, 299 bp, Glycine max
gtggcatggataattgaacgaacaaagggacagaaccttaactttgaagtatgtctcacaagactctcataaagttaccacaagtgatacacatgtttctatttatacgcctacgtagctttcttgagaagctagagcttagctacacatacccctctaatagctaagctcacctccttgagaagctttctttagaatctataacttagctacacacacccctctaatcttaaactcaccctcctcagataaaagttagctacacacaccctctaatggcaagctccccccatgcaaaa

SEQ ID NO: 20349 - DNA, 426 bp, Glycine max
  unsure (1)..(426): unsure at all n locations
tgcttctacactttntaattagtcaagacacgttcatccttaattcaaccccccttcttaattattctgaggccacttgatccaacagtaggctgcgccagaggattaggcaagagcaaaggattcttgtgatattggatgatgtgtgggggaaacttaagttgactcaagttgatgttccttttggtgagaacaagagaggctgaaaatgccaattgttggtcacatctagagatcttaatgtgttgaatactaactttgaggtgggcaaggtttataggcatgagggtttgtaggaggatgatagttgggagttgtttgaaaagaagggaggggattcggttaagtatcccagagttcaaccagtggccaaaaaagtcgcgaaaagctatgatgggttgtcgcttttgatagtgaatgtggtgg

SEQ ID NO: 20350 - DNA, 243 bp, Glycine max
atccactgttaacagcgatgccctacgctttggttatggcatcatcacctcagaatttcccatcattgaatttgaaagtgaagttgttgacgtgtatcttttgcatggacctatccacttagagtgcacgtacttgtgcttcctccatggtcccatgtgcattttgttttccttcatgcacctttatgcttccatgcacaacaccttgatgatgttgcttaatctctctattgtccccacata

SEQ ID NO: 20351 - DNA, 412 bp, Glycine max
  unsure (1)..(412): unsure at all n locations
taaccaacatttatgttcttcatatccaaccgaccttgtaaccgcagccagatacacacgcatgatagcattcctgttcatgaaacaattaatcatcattaatttccaaagatagcagccataccataattaatcttaagctaataaaaagccacaagcatgtcacaattgatcagcacagtcaagatttcggggctgaaaactggattactgatgctggtaagagaattagttgactaatcctattacaacaattttagcaccatacacattacacaatcaacttgtagttcactcattggcaagcgaagaccaaggttacagttcaatactgggttccaatagttcttatcaaacctaanatttttcactcaaatactttccctctgacgataactcaacagtaaacatg

SEQ ID NO: 20352 - DNA, 381 bp, Glycine max
  unsure (1)..(381): unsure at all n locations
ttctcactcatttatcaaannnnaagaaggaaacaaaagttgaaatctctcaaaatttaatgggtgataatatccaccaatgaagaacgttaccgtgttataccgatgcattgcatgtgcacgtgcatgtttcactagttaattctacccaacgaaaaataccatggtgtatggtgtgcactttaatctggtaatagtaataattagaaccaggtttatgtactatatacacattttcgctcattttatactatcttatgatttaagaaaatattttccaatatattttttaaactactaatacttgttattcgttaaagtaaaaccagtttgaaacaccctctttttattgaaattttcacattttgcccaaaaaaatca

SEQ ID NO: 20353 - DNA, 441 bp, Glycine max
tgcaaaaaccacccagcacacaggacacgacagtgtaagtgaaacacaaaggaagcgtaaaactggaaggcgtagtaaatttaaagaaaaacaagataggggcaaaattgtcattaaaattttatgaaaaccgaagcttgcattaaatatttttttaattcggattattattataaaatttaatgcatatttaattcacgttgttataaaataaataatatttatttaatattattaaattttttaatacaaataaaatgttgtcataaaaaatattttttatttttaaaaaaatatacagattacataagtaaatatttattattcaaatttacatgcgcattaaatatgtattagaaatgttagtgataattatgtataataataatttatgtatactaatattatttattttataatataattgattcattagtttag

SEQ ID NO: 20354 - DNA, 535 bp, Glycine max
  unsure (1)..(535): unsure at all n locations
ttagctaattacttttgtaactacatgntctctctctatcactaattnagtcgtattttaatactattcttatccgatctactgacaactgttatcattattctacacttcaactctatagttttaattcacttttaatatatatatttatctattccacaatacgnnncacgcctatgctgttataataataaatcataggaaggcgcaatattcttatgttgtcctcttatccataattaaatactctctgttactacatataattttcaattcctctcttttacagtttttaaaaaaaaagacactttcctgctgatcctcttaattattaaaaaaattagtgaaaaaccatccataatttttaatacctggaatgtttttatctaccatgtattaaatcatactgcgtataaaggggactaatacctcaaatacccatattttatagtcacatatactaaccattattctataaactaagaatttattctcaactgtttaattcctgaaattatctattaaacaaataatg

SEQ ID NO: 20355 - DNA, 358 bp, Glycine max
  unsure (1)..(358): unsure at all n locations
ntataagtgcgggtctgggagacgaaggtcaagtgttcgcgatatgtgaagatgatgttccaagtacttcggatttggtccgaccatgccctcctgatttccagctgggaaattggcgagtggaggaacgccccggcatttacgcaacaagcataatgtaaacctttacggttttaaaagctctatagttgggcctaggctttagagttttcgttttgttaaggctttgtgtcttttgtttttgaatttataatacaaggatctttcttcatctgttcctggtctctacccattctcattcatttgcatgtttacttctttttctgaaacggcagattcgatgacgagtcccccgaag

SEQ ID NO: 20356 - DNA, 333 bp, Glycine max
atccaagtattcctagaaaaatcatctaaataatgcctaaaagctaacatgttggccgagctggcatgattcacactccaaggattgtaactgcgaaaggctaggaaccatgccttcaatttattcaaactaaaaatggtgaaggagattgggagcctcagtagtggttcaagcaacaattgttagtgagtggaagtagtacagaccatgtgattcatatcctgtgccaattattcgccccgtattcggtcctacagaaagaatggtaatagaacaattaagattgcgggtgagttggctaacattaaccaggttaaagggagagtgaactac

SEQ ID NO: 20357 - DNA, 418 bp, Glycine max
ttgcagacatgaggactaaacttaagcactcgttttcttattctttctataaaaagctttctgcataaattcttgtaaaatctataaaaactctcaaaacactttgattattttgagagaaaagactaagtgttgaaactacctattcgtttgtaagtgttaatcattgtgcaaacaaacaaatctcttgatttgtattacagccagtaatggcttggtaggataaagaatattggttgtaacaagtttggtgtatagcttgagttaaggaatataagtgacatcgataaatacgtgtatatcgctgtagttagtggaacttgatgcgtcgcctacagctgaacatagtcttattggttgagacgggccaggataaacttgagcttaatttgttatttgccctccgtctttaactaac

SEQ ID NO: 20358 - DNA, 342 bp, Glycine max
  unsure (1)..(342): unsure at all n locations
tcttctagactcattttctccttgaagtggcgtctccaatcatctttcttccttctccattctgctgccatgatcttcaagaagcaaaagacttcattgatgaagaagatccatgacctacaagctccacatggagctacatcatttttccccctttctataaaggttttgtctaatgtcacttgttacctggaagaagttacatttggattgtaggattcttttggcatgttcaaaaggggaaaaaaattattttgattntgatgtttctagtgagttctatggtaatggagccctaaatcttatctttgtggcgagggggtggagctggattgttgaata

SEQ ID NO: 20359 - DNA, 287 bp, Glycine max
gctagtaataactcactttaacctccatttaccacagaattcagacttagccttccaaccctcaaagtctcactctttttccactcataacatcacattctcactttctaaccttgggttagttctacccttcgtctctaacagatttccatcagcaatttcagcatataaacaccacaaacatcatcactaaaaccctaaaacagaatgggtatgtttaactcacacaaacatggcaatttcaacaagttttcaagcaatgtctccacaaataattcatcacacaa

SEQ ID NO: 20360 - DNA, 265 bp, Glycine max
tcttgtagactcaatttcttctgtgggcgtgcgcctccattcatatttcttccttcttcatattgctgctcatgatcttcagaaagcaaaagactctcttgatgaagaagatccatgacctactagctccacatggagctacatcatttttccccctttctatataggtttgtctatgcactcgtacctgtagaaagttacatttggattgtaggattcttttggcatgttccaaagggggaaaaagatattttgattttgatgt

SEQ ID NO: 20361 - DNA, 234 bp, Glycine max
aatacgtcatcttctataaatactcacgaaatcagagctgctgcgcagccaaagcctcctccacgttttcctccatacctaaaacttccaatcttcgaatctcactcaattcttcaccaaatcacgtcccgtaaagcccaatcttcctctttttcactcctctttcacttccaccaatcaaaatccataaaaacttcatcaaatggcggagccatcaaagaagagaagggatca

SEQ ID NO: 20362 - DNA, 100 bp, Glycine max
  unsure (1)..(100): unsure at all n locations
cgctttcgattcattcatgtacccgtagtggtccacattgtgttatgcgcanttatattctcgctctggtgactatgttatacccatcggtgacgtgctg

SEQ ID NO: 20363 - DNA, 284 bp, Glycine max
ctctgcatgctatcatgcgttgagtcttagagatagcaaaagaatgtttatagggataactacttgggaatttccgcctgccccctaacttcatgggttagttcttgacaaaggtagtctgcgcggaacacgacataaatctactcatgtcaacgggcttgttggccgcgattgacaaaggatgcagaagacgacgttagtctctgcatactatcatgcgttgagtcttataggtagcaaaggaatgtttatgcggataacaacttgggtatttccgcccgccc

SEQ ID NO: 20364 - DNA, 450 bp, Glycine max
  unsure (1)..(450): unsure at all n locations
tccccgacttcaccccaaaggtgcatttggttgggtttacttttaattggtatttccgcaaccttccaaacagcttacgcagattgacaaggtgttcagcctcaatccgagacttggcaatcatgtcatctacgtagacctctatttccatttttcccaacacacacttatggttcacacaaaagtttcttcatatacactcgttactcacacacacaagaattcctttccacgcatcatttacacacataaaaaccttctatacacattttccttttacatacatgtataaataaaaacctttttcttttctttatgaacatgacttttattcacaacgcttctttctttttattaggatttttggttcattntatttttaggacgacgttcctaaatgaaaaactctacacgggtccggaatttcaacaaacactattgacaacaatg

SEQ ID NO: 20365 - DNA, 334 bp, Glycine max
  unsure (1)..(334): unsure at all n locations
gacatctcaaacaaacaaatcaaacgtaacaagacaattatagttgctgtttgaatacctcacccactcaagtgtatcacacaattatggcttttctctaatgaaacactcttgccttttaccactctaattccccttgaattcttaagtaattcaagagattatggccacaacaaaaaacaattcaccaatatgtgtaaggtaaggctagacagacaaggaaaaggttaaccaagaaaaaggctaacaatgtttntaggcacaaatgaaggaaataaaattcagaatttatgaattcaagtaacaatccttcatgcaaccaatattttacctt

SEQ ID NO: 20366 - DNA, 318 bp, Glycine max
tcatcctttggcgctcatttctgctccacatcgcgaaaggatggcatttttggagtctcgaaacgcgtggctacgagtgggacttcgaaatttcacgtttgggtggacttctttctctcttaaatttcgtgggtatggggttttgggagatatgatgggtggttttgctagttttctgctgtgagatgattatttgcgaaggcatttgctgaaaacttgttgaaattgccatgtttggatgagttagacatacccattctgttttagggcttttgagatgatgtttgcgatgtttatatgctgaaattgctgatggaa

SEQ ID NO: 20367 - DNA, 355 bp, Glycine max
tcacgcttagttggagtctgcaaagccccaatcattcaacactttgctgaaacaatttctggtactacaactattagaagctttgatcagcagtcaagatttcaggaaacaaatatgaaactgactgatggatattctcggccaatgttcaatattgctggtgccgtggaatggttgtgtttccgtttggatatgttgtcttctatcacatttgccttttccttaatattcttaatatctattccacagggattcatagatccaggtgagttattcctatctgttacaaatcaaaatttaattcttttatggtatatggaattaaacataataagttctcttttataactttttt

SEQ ID NO: 20368 - DNA, 449 bp, Glycine max
  unsure (1)..(449): unsure at all n locations
tgtcctcctccatacatatatttcaattctctcacgagacaatagtaatcgtagtttaataattacttgattagctttccagaagcttatatcttttttcttgaaatggtacaactgatcactattaataattgactgcgccatttgttcttatatgcaatgcaacagcgaaatgcaaaaatcaaaagtctcacacggtacccacatgtccttccaatctaaaaaattcaaagaattgaagatattgaaatctattatattattttagtatttatactagctttattggtcaataattttcattaaggtgtctaatatcntgaaagtttgtacgcaaattgcggcatccatataccgactatatatatgtcaaggatgaaaaaagggtatttgatgagcaaaagtagaaaggcacatgatagcactccaatgcacatccttccttatcg

SEQ ID NO: 20369 - DNA, 362 bp, Glycine max
  unsure (1)..(362): unsure at all n locations
tgaagatcttctaaatagattggaagaagttgtgcccttggtatttattcaaaatattccatgtgcttttgattaccatcgctcattacagttacaattttacgctcttaaatatcataatggctttgaatttcttggtctagtttctgaagttggataagtttctagaatgaggtataatgtggcttagtcaatgtttgaactgaacataactacataaaaccaggctattgtagattcatttgagatcattgacaaattgtctaagctttacttggaacatacctagttgactttgaacaagaatttcttcaggttaaatntaacaaaccaagctacttgaaattggttcaatagaatgc

SEQ ID NO: 20370 - DNA, 415 bp, Glycine max
tcttcatttcagtgcgcatctgattcagtgtttgctctctttcatcatttcctcaacctatacctgtacctctgagcctccctacaacatctatttcatcaatgaaattaattgtatctaatggattaaaagaaatacattgttgcattgctagaatgtttgcttttaagtatgttaatccatctccatctaaaaaattcacaagttttaagagctgtatctaatgtgcgctacactttctttctctggtttcttgcatgttagttctaactcgttattatgaaagttggttaagattcaaacaacccactaattgataaggagcactgcagccaaacaacctagtgatgaacaatactagttgagtaggacttgcagattgcactaagttaaagttgagaataaaagagaaaga

SEQ ID NO: 20371 - DNA, 256 bp, Glycine max
tgatccgataagctgatcaatataatgtgagtatatatttgatattaacacaatttattgattaccacatactgactcctaacaacatgagaaagatcatagcaaattgacactattttagccttctataagttgatcatcatattctggattacttccactttaatgaaaagaagattcacatcatcatcatactctctcaactgtgttgaatatattaattttacttatggaaattactatgtggctataatac

SEQ ID NO: 20372 - DNA, 438 bp, Glycine max
  unsure (1)..(438): unsure at all n locations
tgcttannagattcccagcatgctctagctatatcacccaaatatgtttcgactctagctatcatgtcttggctagtagatacatgattctcatggtttaccctatagtctcttataacagcagaagtccactattctatgtaatttggaagtaattaacggtcaatactccatatgtttaataggagagaaggcatattaaacactggccaatgtctaaaaatagagtcattgtcttcatcaatgtcttcagaatctgtttcattgtttatgaaacttcgtgcttgacacttcttatattcttcccactttntgattgctttaagaagcttttgggaaagaaaattttcttctgaaaaagaattttagtttggttgggctcctcatangggatatatgactcaaaatatgaacagtgccataaattcatcatagaca

SEQ ID NO: 20373 - DNA, 278 bp, Glycine max
gcctacgtgcaagtccaagattagggtgagttttttgtgagaggatgggaatgcagaggccatcgatgaacgatgttgtttcaatgctggagtttgcgctgcacctgcaagagtacggagctgcacaacaataccgtcactacccagtgatgggttgctgcagtcttggactactttcttcaagctaggatatggactcaaagccgcctatagtgaatcaaattaatccaacgctctggaaaaacataatcataatgattataatgtataccaatcaa

SEQ ID NO: 20374 - DNA, 335 bp, Glycine max
  unsure (1)..(335): unsure at all n locations
ntatgaacatatcagcaggattgtgtagagtgctaatcttatgaactctgattcttctttctaaccgaatgaagtgatatctaacatctatatgcttggttctatcatgatgaacttgatccttggccaagcatatagcactaaggctgtcacagtagatgttagcatattcttgattaattccgagatcatttatcagacctctaagccaaattccttcctttgcagctttagtaagagccatatatttagcctcagtagttgagagagcaaccgaaggttgaagtgttaccttccaactcaccaagcagccaccaagggtgtaagcataccct

SEQ ID NO: 20375 - DNA, 196 bp, Glycine max
  unsure (1)..(196): unsure at all n locations
gagactcatcgtaaagatgcacagaccagcgttgcccatgtacaaaaattgtatgacccattgaacgtgctaaatgcaaagaacaatgaaagctctgcccagcaagcccaaaagaaaaggaaggaaggggtacttgaacccggtgatgaccttggacatttgaggacaaatgctntcccagaaggagggaatgatg

SEQ ID NO: 20376 - DNA, 359 bp, Glycine max
tgtataccccatgttgcatttgcttacaatagagttgctcatagcaccactaattgttctcctttcgaactcggttatcgctttaacccactaactactcttgatcatttgactatgcctaatgtttctgtttttaagcttaaagaatgtcaagcaaaggcggactatgttaaaaaactctatgagagagtcacagatcaaattgatacgaataataaaagctatgctacactagccaccagagggagaaagaaagttgactttgaacccagacattgagattgggtgcacatgagaaaagaaaggttctcttaacaaacgaaattaaagcttctaccaaggggagatggaccatttta

SEQ ID NO: 20377 - DNA, 613 bp, Glycine max
  unsure (1)..(613): unsure at all n locations
cagtctacatcatagacattctgcacatcatctanatcattataaataatcatcattagctcttaatctngnatagtctgtagactgancagtctcgatactccatactcatctcactgcaatctctcgtantctatgtctacaatacatcactctcacacatactantcatcttcttctctatcatactactcatctaaacgtcattcacatcgagatcgacactcgatctcnnctctccttctcactatcacactattctctatctgaacaaccttatttttaaaattctattaatataccagacatctatcaaataagttaaatcataattttgtatcaactaataatatcaattaattttatttaataaaattatcttaatattaatgacctaaaacttgatactttaataccactacatgttttatttgaaagagtgcatcaatatgaactcctatacctaatcacgattctggatgtggttaaattaacatttttgctaaaatcccattatacttcacgacttctaacttgggtggattattattacattgaaattgtgtgaaaatacataacttangtgttgcatatacaattaacatccaaaccg

SEQ ID NO: 20378 - DNA, 416 bp, Glycine max
  unsure (1)..(416): unsure at all n locations
taaggaaaatttcaccactcaaatataagacctagaatgttgggtggtcaagagccaacaagaaaataaacttaataccacaaatatgaaaatattacggtggatttggagacacacaagacaagagaaaattggggtagcatctaattcctaanagatggtagaatcatgccttcaatagtttgggcatgtgtggagacaacttgtagaagtcctagtaaaatgaattgatcaaatgggcggtagtccaacagttagcagtataggaggccaagaaaagttttaagtcaaaccaataaggatttagatataaatggcatgtcattgcacgtgatatatcatgggacattatgacatcatttgatccatgccattggtaagttctagaaagagtattttgtgatggttgtcaatga

SEQ ID NO: 20379 - DNA, 346 bp, Glycine max
gactcaatcggacatccgagtaaaaagttattgttgtttgaatttgttcagagcttcaacattcaatttcgagattttcgatatattacgggactcaatcagacatccgagtaaaaagttattctcgtttgaatttgctcagggcttcggtattcaatttcgagcgtctcgatatattacgggactcgatcagacatccgagtaaaaaattattgtcggttgaatttgctcaaagcttcaacattcaatttcaagcggttcgatatattacgggactcattcggacattcgagtaaaaagctattgttgtttgaatttggtcagagctttggtattccatttcgag

SEQ ID NO: 20380 - DNA, 213 bp, Glycine max
taacaaaaggcatgcgaagtgggtggaattcctagagcaattcccttatgttatcaaacataaaaagggaaaaggtaatattgtagccgatgctctttctcggcgtcatgcattactttctatgcttgaaacaaaattgattggtcttgaatgtttgaaaagcatgtatgaaaatgatgaaacttttggagaaatcttaaaaaatggtgaaaa

SEQ ID NO: 20381 - DNA, 208 bp, Glycine max
atattgagtgtccacgtggatatgttctacgattggttttgcatgaatttctaattgccataacatatgattcatggatgtgatctgggccttctttatttctaagccattggcccaacagctgtcccaatgtacattattttctgccatttgcaatccttttgagccaaacatttgatttttaccacaatcctgacctacgatgaaa

SEQ ID NO: 20382 - DNA, 352 bp, Glycine max
  unsure (1)..(352): unsure at all n locations
tgcttgtggagcttctatggaggctggatctttgatcttcaatgaggtcctttaatggtgattttccaccatggagatgcagcggaagacaaaggagaagaggtgagaggaggcgccatccactatggaataagccatggaagcaagagcttcaccaccaagatgagccttggataagaagcttggaaggatgcttcaatggaggaaaagaaatagggagagaaagagagaggggggagcacgaaattgaaggaataaaagagggagagaagtggaactttgaagtatgtctcacaagactctcattcataaaagttacaacaagtgttacacatgcttctatntatagact

SEQ ID NO: 20383 - DNA, 336 bp, Glycine max
tatgcatgtgcgcacgagtatgccaccatgtctctagtatgagtcactttgtaagaggctcgtatacaagagcacaccaacactgctataactccagtatatgccacccacggtgagtgacttatatgctggagcatatcactacgtctccagtgtgtgccactgacggtgagtggcatgtttgcaggagcacggtgcccaaaacctaggtcagataattcctaggtcaatcctccaaaaggctcccaaaacccaaaagtccgcccttggtgagtcccattgattcacacccaccatgtctcagtacatgctactttgtaagaagcacatgtgtaa

SEQ ID NO: 20384 - DNA, 338 bp, Glycine max
cgctcgtggagcttctatggaggctggatctttgatcttcaatgaggtcctttaatggtgattctccaccatggagatgcagcggaagacaaaggagaagaggtgagaggaggcgccatccactatggaataagccatggaagcaagagcttcaccaccaagatgagccttggataagaagcttggaaagatgcttcaatggaggaaaagaaatatggagagaaagagagaggggggagcacgaaattgaaggaataaaagagggagagaagtggaactctgaagtatgtctcacaagactctcattcataaaagatacaacaagtgttacacatgct

SEQ ID NO: 20385 - DNA, 344 bp, Glycine max
aggttgtagagacatagaggggataaattaatatttaaacctatattttatcttaatatttaatttaagaataaaatatttattttaccctttccattgtgttattttttagtttaagtttccataaattatttttattttttttcctagttcctctattggtgacatgacactctttgcatatatgacatgtagtaatcatcttgttaatgatgtgacatgataatatcatcatgaagtaattaaagtgataacaaggcatgatatcaatatcatttctattagacgaattaaaaatttgaacgatgaaagatctttttttttttttgcggtggactaaaata

SEQ ID NO: 20386 - DNA, 231 bp, Glycine max
ttcagaactacaaaccctaagcctacccatctttattagactgcacactgcaacccctactgcaagcctacccaactttttcagactgaaacactgcaaccccacatgctacaacgtgttccgcaggcgccagtggcgggactgatccgttggcatgtcctgacatgaccaatggcgacatgcttaatcagcatgtcccgccagtttcaatagctgaatgggcaatgacta

SEQ ID NO: 20387 - DNA, 273 bp, Glycine max
ataacttaatgccattaacctagggaattaaaaaaaacttaatggctgagtgtaactgaaattgtggcaaccaaaagtcacccccaacagccaacaagtcagccaccatttggtctcccaaaaggctgatgcctaggttgccaattgggcccttattacaacttgaactaaacctaactaaagcccttttaattgattaacccaaaacatatttttggtcagccaactttacaaggattgggccattatttagacaaactaaacactctaaaa

SEQ ID NO: 20388 - DNA, 379 bp, Glycine max
  unsure (1)..(379): unsure at all n locations
tgcctcacagaggtccaagaaggataaggcggccgaagggactatttccgctcctgagtatgacagtcaccgctataagagcgctgtacaccagtagcgcttcgaggccatcaagggatggtcgtttcgacgggagcgacgcgtccaactcagggacgacgagtatactgatttccaggaggagatagggcaccggcggtggacatcactggttacccccatggccaagttcgatccagaaatagtccttgagttttatgccaatgcttggccaacagaggagggcgtgcgtgacatgaggtcctgngtaaggagtcagtggatcccgtttgatgccgacgctatcggccagctcctacgatatcccgtggtgttggaa

SEQ ID NO: 20389 - DNA, 354 bp, Glycine max
gcccggattcgaggcgggctgcagcaccggctccgcttccctaactgtactggaggcggttgcagtggctttatcctctgtggttttctgaagttttaacatgacctctaagatggaagccatttgatcttttaaggccgatagatcggccttcatctgttcctgcacgccctcttcattatccatttttttggatcgagtgttataggggtgctttggtgttttcttagttatgatgaaattcctaaagaaataaacaacggtgagtatgctaccaaaacatgagtatgcaaatggatgatcggagcacttggatccaccccaagatttttagataacggaatgagttcataa

SEQ ID NO: 20390 - DNA, 341 bp, Glycine max
tgaagatgagtagcccaccatcttttcatagtagaatactggtaatgtgtctactatcattgccatcatttttttctccgtcattgaggtgccacttgagctgcgaggtctctccaccttcgggcgtattcttttgaaagatccgtgccccctttttgcacatgttctatagttgcatcctatccgaagacattatactgacactgcctagcgaaggcaaccactaggtccttccaagaatggactcgggaaggttccaagttagtgtaccaggtaacagctaccccagtaagactttcttggaaggaatgtatcagcaattcctcatttttgcgtatgcc

SEQ ID NO: 20391 - DNA, 353 bp, Glycine max
tgtataagtagtttctaagtgaagtagttctcttcatggcccttttttcttctgaatattgaagatttcatcttcccttaatgcatggtagtagtagaaaccattaatcattttccattatccatatgcttcctcaaattgataggcttgtgagctctttctgtttgttcagttctttggcagtagtggtaatgatgcctatggctgtcattaagtgcatattcctgattttgtcgatctcttcttataagttattttttgggaggctacatatttgcctaccatatctgattgctctgtcatttgtaagtttgcgacatccgttgtcattattttttctttagcctattttc

SEQ ID NO: 20392 - DNA, 444 bp, Glycine max
  unsure (1)..(444): unsure at all n locations
tgccactgcagcagttaagtgaacaaatgaagtgtccacagtcattggatggttgcttggtagaggtacatgctaataactaataagatttcctgtgcaaggtatcattgtttttgcatgactgatggctaccttggggctggagattttggttgaatctgcctcaagtgttattttgaaggtaattgagataatcttttgttgttgtttgtttattatatacctaaatttgggttgaagactagttattcaacatgtggattatctaccataagattgttctaataagtgattttatcatttgagcagatgatattatcatttgaccttgcttttgctttgattccgctcctaaagttcagtagcagcaaagtgactagcagcacaagcattgaagaggtgtgnttcctccctgtttgtggattcatgaactataagttaata

SEQ ID NO: 20393 - DNA, 352 bp, Glycine max
ttctatcataaaaattaggcttctagaatggtggttttccttgtgggaagattgatgttttccatcacactgttcatagctaaatacctggtgtgaggtgttttgtacgaactggagctgcttaggaagattgatgtttctttcttttctccacaaacaaataattactcaattctcttttttctccaaaaaaaattacacattactcgatatcacttcaaggtccaatgccttaagcaattctctcatctattttcttaaaattcaacgttacttcatggtctaacgcctgaatgaatctttgtcaaacaattaaaacaaatctttcaaaaaaaaaatccacccaacacac

SEQ ID NO: 20394 - DNA, 303 bp, Glycine max
  unsure (1)..(303): unsure at all n locations
cgcacttcangatgtgttatgctggctaaaaattatgatactgaactacttgaataatcctcaagggtaatcctctggtcattctcttctgccatggtaatggctttacgtaattgagtggcagattcccttgatgatggtgaatcaggtgataataagtcggaggaatgagtctcctcaagaatggatgcaactgttctatcttgcagaagtttccttctcctctcggtcctgttccttcgcaatgtaacttcaatttctaagtccaccggaacttaattgtgtgtgggagatctatgcata

SEQ ID NO: 20395 - DNA, 235 bp, Glycine max
acgactgagaaaactggggcaaataaagagggtgaggatgagggagaaacccatgctgtgactgccattccagtacggccaagtttcccaccaacccaacaatatctttactcagccaataacaaaccttttccttacccaccacccaggtattcacaaagccattcctaatctaccacaaagtctgtctaccgcactttcatgacaaacccaccttagcacaaaccaaaacacc

SEQ ID NO: 20396 - DNA, 370 bp, Glycine max
  unsure (1)..(370): unsure at all n locations
tgttgccgtatgctaagtgtgtgagcaagtcatgtagaaaggttctcggacttcttcggtggtttcaagttccaccctcatattttcttcattttgttgtcgtaggaacaatagtctccttgtcgacggttccccaacttcaacaagaatcatggcgtatgtgtcatatgtaagtcggtaaggaatttagttggtggttatctagggtgtacaatggtatgctcagagtatgctatagagttcttctttccataggcccttagacttgtcaagtctagttcacagggctttgagaatgactttgttagttgtctctgcctgtccgttagtctgaggatgtttgatagaggtgaccangtgcttaatgcct

SEQ ID NO: 20397 - DNA, 278 bp, Glycine max
tttggaacaacacatggagcaaatgaatctccaacaacacacccatcttttattatttgcatttgcttcactagatgctttgatagaaatgcatatatgtgatgaaaaggctcacaaccaacatcaaacattcacttgagaacatcagattagcaatcaatcaattacttgcgtctatatccatcaatgaaaattgtgtaagtcaacgagcaagaacaattcctttttcctttatcttaaccatcacattctccgcttctttcaatcttcttgaaata

SEQ ID NO: 20398 - DNA, 409 bp, Glycine max
tattctcttttaggaatattgagctctgaccctgctcagaaccctggtaagttatactgaatgtaacatgcttatatcatggctttaacttttaaatcccataattgtggctgcatctgtgtgagtttttgagctatatcaaggtttttgatgtcactgcaactgttgcaacttgcaatttaaacccttggcttatgcactgtaaacataacacttcactgcctctatcacaccctaccttgatagttgatactagtcagcaatatcctgctatctttctctctttgtttaccccattgctgtaggaattggcagtcttttgttttaagagcttataataaatgcaccattttgtaagacattttttactatcatcaacatgtgggctatgtttcaattgtatgatcaa

SEQ ID NO: 20399 - DNA, 343 bp, Glycine max
taaaaaaattgcgcaatgtcggctgaaaaacatcagttggggctgtttaactaccgatgctggctacttgtttttctattccacccctgaataatacttggacgatgtcgatttggaaatgttcgatcggagtcatccggtcatgcttctttttaagacctcgatctgtcatcttttcctgcccgacgtcggctagcatttttttcgatcaatatcggcgaatcatgctttttgccaaggtgggctaacgtattcgtggctgatgaaatgagagcatgccagtgtcagccgaaacacaatctcgcacgaaaaaccctagccgacctacattgtaaattttgta

SEQ ID NO: 20400 - DNA, 367 bp, Glycine max
  unsure (1)..(367): unsure at all n locations
ntgcagcagattntagtaatgacccactaacctagaattaaaataacttaatgccattaacctagggaattaaaaaaaacttaatggctgagtgtaactgaaattgtggcaaccaaaagtcacccccaacagccaacaagtcagccaccatttggtctcccaaaaggctgatgcctatgttgccaattgggcccttattacaacttgaactaaacctaactaaagcccttttagttgattaacccaaaacatatttttggtcagccaactttacaaggattgcgccattatttagacaaactaaacactctaaaattgagacaaggtggtgtcatttagtcctcctccatttgggccatgatacaac

SEQ ID NO: 20401 - DNA, 345 bp, Glycine max
catgcactcctctaatgacaatagcatcatgtttggcactaaattgctaggagttggaagccatcttctcaattaaattcctggcttcaacaagggtcatgtctccaagggctccaccactagcaacatctatcatgcttctctccatgttactgagtccttcataaaaatattggagaagaaactgctccaaaatctggtggtgagggcaactggcacataattttttaaatctctcccaatattcatataggctctctccactgagtttcctaatgcttgacatatcctttttgatggtcgcggtcctggaagcagggaaaacattttctaagaatactctct

SEQ ID NO: 20402 - DNA, 368 bp, Glycine max
  unsure (1)..(368): unsure at all n locations
cacaacaagttctccacatgcacaaatcgcacataaacccaccatcccctgttgcccacctccaactgagctcacgtactcccacgtagcccatattctcgtttctctcaacaccaggtccccatcgatcctttcacgcttgcccaacatccaggtaattcaacatccagatcatcacaagctaacaaaccaagcaaaacagggcaaaggcagataactctgcccaaaactcaaaccataatcacagctntttctcacttaaagaccccagtaacattttcttcgtttcaattccgtaaccggtggatcgactcagatcttttactggaagtctctagtacataagcctacttttgaccgttgggatc

SEQ ID NO: 20403 - DNA, 360 bp, Glycine max
  unsure (1)..(360): unsure at all n locations
cctcaaactctagcttggtgatgaatgtcaagaggtatatccatctcttggataaaacactggtacaaactgcttcattagttggttgaaaggagagattgcgaccaataataaaagtaggtacgtagcagattttgtttggaccttcgtaattggattttttgctctttttagtttccactcccccaattgaatccatgatttcttggagttgctacaaaagttttaaaaaataaaaacacaattaacatgcatttccaatccataaaacatagtctaaacaatgatacaataaaagtttgaacaagtcggtaaaaggaggctttccttatcctaantttgcggcagaatgtgtctcca

SEQ ID NO: 20404 - DNA, 406 bp, Glycine max
  unsure (1)..(406): unsure at all n locations
tgtccaaaactaggtaaagatgttcagggtccagaatccaattaattaagtccatgcaaagattagataacactataacaatcatgaagctctcataataaaattaccgcttttatttatggcagatactttactatcaagcaaacaagataaataaaattagaaagatacccaagaaagatgaagaaacacttgagaattttcgttctagtaactaatttggtataagatttgcactgctagatcctcccacaaccaatctttccagaaaaatcattaatgatttaccattcttatttaaaaaatattaaggttaacttttatgaaccataatcatggatcatgttatttgaaagaaaatttataccatcatcaagaaggagaatgatactntaataatgatact

SEQ ID NO: 20405 - DNA, 536 bp, Glycine max
  unsure (1)..(536): unsure at all n locations
cgcattcagtctgtgctcggnatgtgatctgtgatcntactctgtgtaccttcatcanatgttgntgcgtttgtctccacatgcgatgtcgctacgtnaccttagttctacctcgttaacctatctcgctgctacgtacctccaaccatccgtttgtctctttcctctacncnnntcctctgctccgaagcgcccagcgtttcttgtaatgttctttaacaaacgaatatgccaacgtcttaaatcttatttttggatatgagaaactctatctgtatgctttccttcccccttattcgcattgtttctgaataaataagtgtgttgttctgatctggttgggggtttcgctctttaccaatcgtgtccccctgttactcacatatttcaagacttccgtgtcttctgttctttcctttccagacttccctgtcttctgtctcacgtttcaagcccttatggcttcttggttttccttttaacattacacggctctcgccttccttttcaacttccatggctgctgcctccacttc

SEQ ID NO: 20406 - DNA, 414 bp, Glycine max
gtcacctttactagtaatattgatctctttcccctcaacatcatcagtggaagaatttccataattggtcaatctccctttcaattgtctcatactgctatcactaacacctccaccatcacctctattggggcacaaagccacttgcaaatctgaatcagcaaccacatactggaatgaccccattgaataacatctcctaacatccaaattactcgaactactctcacctccaccccctgtttccaccccctcaacaaaatctgagcttctaaacttccctagcctcacagaaaacacccttttccacttattgtgtggaatgttgcatgcttgttgtcacaaacaccctcaccaggaacactaccggaaaccacatcttcttctctcacaccctcaaagtcataaactggg

SEQ ID NO: 20407 - DNA, 363 bp, Glycine max
caactttgccaagagccagctgggagcaattggtcaatctgatcagtggatcagatctgctgctgatctcctaaattgtggtcccctgcagcttcctttctgctacctagggctgcctataggtgtcaatccgagaaggaagatggtgtgggaacctatcatcaacaaatttgaggctagactgaacaaatggaggcagagaagcatatccatggctggtagaatcaccctaattaatgctgtcctaacagctctgccattgttttacatgtcttttttcaggactccttcaacagtgatcaacaaactcatctccattcaaagaaaagttctttggggtgataatcaagaaaggaggaagat

SEQ ID NO: 20408 - DNA, 300 bp, Glycine max
tgcagccgtcctaacaagagtgactatgttgcgctcaacatcatctgcggaagaagttccataacttgggcatatcccttataattgtctcatactgatgtgactaacacctacagcattacactttattgtggcacaaagccacttgcgaatctgtatcagccaccacatactggagtgacccccgtgaataacatctcctaacatccaaattactcgtactactctcacctgcaccccctgttttcaccccctcaacaatataagagcttctaaactctccaagcctcacagaaaaca

SEQ ID NO: 20409 - DNA, 336 bp, Glycine max
aatgaaaatgttagtcagtttgccagattgattgtgaaggaatgcattgaccgtatcccggtgagagtgtgatccttaaattttgagagaaacgactatcatttagtactgatttttgcgtgaatctctgaagtatggactgaatgcatgaaattgaggatgatgaaggccatgtttgattgtgatagccatttaaccacaaatctaaccatgtgcttgaatgatttatcgcttacacctagttgagcagaatgaattattgattgattgaaccctgagcttatatagtgttatctcttgctaccttgactcagggtgtaggagagcatcatccat

SEQ ID NO: 20410 - DNA, 364 bp, Glycine max
cttcacatggagctacatcatgtggtatctagagcatcttcatctaggtgatgttctttagcttcctctacctttttgttcagtcaaatcactttaattccttgttcttcatcttattctccatgtatatcctccatctgtcttgtggtttggtgctgcttacactagattcaagaaagtaaaccgattaaatcttagatctacacttgttcttgcatttcaatgcgtcaaattttatagatctactcttgaatcatgtttttgtggcaatcttaggttctatcatttttcaattataatatctttgtgctgaacctttatgatctaaatttttttccagaatattgattacaaaataacacac

SEQ ID NO: 20411 - DNA, 368 bp, Glycine max
aagccaaagttcgtggcaaccaacgcaagatgatataactaaagtgtacataatcaatcataagtcacaaccaaatataagccaatcatccataagataaaaccaaatataatccaagcataaataagtcataaccaaatataatccaagcataaaagactaagtgctaattatcgaaagataacgaaagttcagaaaatgataacgtaaaaagcatagccaaatagacggcttacaataaaagataataacatcctaaacactaagacggtggtggaaggtcaaagcaccaacgaagataagtgacatcctcttcaagctgggtgatgcgggtatccatgccttcaaagcgaccatccaagtaatcg

SEQ ID NO: 20412 - DNA, 448 bp, Glycine max
aatctcagcttcacatcagaccacttccagggtgctggaactacttcacatggacttgatggggcctatgcaagttgaaagccttggaggaaagaggtatgcctatgttgttgtggatgatttctccagatttacctgtgtcaactttatcagagagaaatcagacacctttgaagtattcaaggagttgagtctaacacttcaaagagaaaaagactgtgtcatcaagagaatcacgagtgaccatggcagagatgttgaaaacagcaagtttactgaattctgcacatctgaaggcatcactcatgagttctctgcagccatcacaccacaacaaaatggcatatttgaaaggaataacaggactttgcaagaagctgctagggtcatgctccatgccaaagaactctcctataatctttgggctgaagccatgaacacagcatgc

SEQ ID NO: 20413 - DNA, 347 bp, Glycine max
cactggctgacatgttctcaattagctcagttgcttctttcggggtcttcaattttatctttccccctgcagaagcatctaacagttgcttggtttgtggtctcagcccatctataaacatattcaattggattggctcggaaaacccatgagtaggagttcttctcaacaagcctctgaatctctccaatgcttcactcagagattcatcaggaaactgatgaaatgaagagattgcagctttcccttctgcagtcttggactctggaaagtatttctttaggaacttttcaacaacttcttcccaggtttttagactattgcccttgaatgagtggagccacccc

SEQ ID NO: 20414 - DNA, 454 bp, Glycine max
  unsure (1)..(454): unsure at all n locations
ntacaacaaatgccactntactccaagttttaaaaggatatgttaacaaggacacacaagtatattcaccaggaaaacattgttgtggaaggaaattgtagtgttgtgattcaaaagatccttccacccaagcataaagaccctgtgagtgtaaccattccttgttcaattggagaagtcactatggaaaggcacttattgatctgggagctagtattaccataatgccactctccatgtgcagaaggttgggagagttggagatcatgcccactaggatgactntacaacttgttgaccgctctattaccagaccatatggagtaactgaagatgtgctggtcagagtaaaatattttatcttcctggcagactttgtggtaatggatatctgtgaagataatgacattcatgtaatattgggaaggccattcatgttaactgcaagctgcat

SEQ ID NO: 20415 - DNA, 352 bp, Glycine max
agcttattcctttcatgcttctttgtatttgtaacttttagaatatttacatgtttgtctctttgggatcttttcttctcacgttatagaatataagtaattaaatttccaattgactatgttttgttttgaaaagcatataaaattataatgaattattacttgattaatagtcttttttatattcccaggtatttggtattgctgctgcggaattctatagtttgttttatattacttgtggaaatggaattaattaactatttgaagtaagattttattgctcaatttctagtttcatttatgtatactatactaaggaattggccctttaatgactttagtcatattc

SEQ ID NO: 20416 - DNA, 433 bp, Glycine max
tattctcttaaatttgaagcggtgaggaaatgatttaccatttctttgtgattgtaggttggcaatggttgatcaaaagattacaaaagctcaaaaaggttttaactttgaacctctatccttccttgctaaactctccattagttgtaattctatcttattgctttaatacataggtagaagctcctagatttatgttttgttaagctttttggttgcttcgtccaactttaaagaaaaacattatgcttcttcggattcttttatatttttttgcttcttcgccttcttttcttgcatggccaggttctgagggcaatttcaggagcttccattcccatttgttaaaggatcgagagggttttccctttgctggtgtaagatctttgactcttcgatctacaatcggcaatattcttgccttttgcttata

SEQ ID NO: 20417 - DNA, 340 bp, Glycine max
aagtggcctcatatatcttaagaaggaggggttgaattacaaactatttccccaattaaaaattctactttgattttaatgcaagttccaatttcccttaaaaatgaatttctaaatgatgattcaaattaaacaatctgaatgtaaatgttaagcaacaataaataatatagtttaagggaagagaaagtgcaaacacagtttttatactggttcgacaaagtccgttgactatgtccagtccccaagaaacccgcttgggagtttcactatctcacaaatcctttacaccttctaaaacacacaaggaaaacccttcctttatgttcaaatgctttac

SEQ ID NO: 20418 - DNA, 458 bp, Glycine max
  unsure (1)..(458): unsure at all n locations
tataagaacagaatggccttaatcatttccaaatatgcatgtgaattaggacgcatcaacaagaatcaagccaatgctattgtgcaagcaatcaatggggcaaaacacaccaaatgattataatgatggatggctcaaattctcacaaaggtaaaatcatcactttcaaattgagctttcaaaactatcatgacatgtagagaagaatcaaggatttcaagtcacaaaatgtcaagaacttttattttcaaaacaattacccatttcttgaacatatcctataattcagagaaaaacatgcaaagtcgtacgtgcacatgaaattgacccaaactattaaactgaaaatccaacgaaactaacaacattaacaaatttacacacctaacaaattaacaaaaccaacataactagcataaccaaagaacactcccnctcatacttaaacaacacattgt

SEQ ID NO: 20419 - DNA, 524 bp, Glycine max
  unsure (1)..(524): unsure at all n locations
ttctttctgttctactcgaatataatatgatcgtcgatctaaatggatcttactactaacgtaagctattcgttgcacatttatgctctctgacctattagtacattcgatatcacttgactctatactagtttctcagtttcttatgaatcatttnntccgtgtgaatcgtatgatgttattcacgcgccccaataaatcttatactttttttttggcgcatggtttcaacatctttaagatggtttttacatttttggggttaacctctatacccttttggcttacatcgaaacccaaaagatttccggatttgacactcaaagagcacttggttgggatcaactttatctgtgaattctgcactcactcaaacagctgattgaaattgacaagatgttctttttctgttatgtatttgtgaataatatgcgcgcatgtcaactacatctcatgatgctttatattgaggaacacatgcctaatagcttgctgatatgatgccccgtagtattaatacccan

SEQ ID NO: 20420 - DNA, 423 bp, Glycine max
  unsure (1)..(423): unsure at all n locations
taaatgtnggtttaggcattaaaaatttggatttttttaaaacaatatataactatatgatcctagtaataatttcatatatttgaaaagtgacaattaatagtgtgcttaaatttgatacatagtgagaaataattaattatgctttcttggtagagctagtaaataatgatttctattttttcaggaccatgattttttacgctataattgatttttttgtgttatccaaacataaagtaaaacgagatgaaggaaataatgaagaagatggagcataatgaagtacttatatggtgttatttgtcttaccacattgatcaccttggtctttgattggagtaacagctccttttaccctccagtctatagcttcaagaatatcggtcacgttttcatacttaaatccatttaacttaaatg

SEQ ID NO: 20421 - DNA, 318 bp, Glycine max
gcatcagtcccgctaactgttgcagcatctgagtgccacgcttcgggaaacgcctcatcagcttgtgtacccatccaaacagccagcattagctcccccttcgctttgtcaccctttctgtcttccagcctataccactgcggtgccaaaggactgtccggtggaacacgcttcgggatctcattgaggtcaaacaagacacgaccaatgaagtcatccttcacgacatccttgtccttcacagtgacttccagtatggaagcctgaatgcggtctttggagaaagcaaaaacctgattccattcaggattacacttc

SEQ ID NO: 20422 - DNA, 429 bp, Glycine max
  unsure (1)..(429): unsure at all n locations
tggaatatgggaccactctcaatggttggaggagaagccacagatcatgagttaccaaacattggccatgtcaaatcatctggcaccattatgagccgttgtgagtcaccagcttctgccttttatgctacagaaaactgcatgggatttgcagaatatgattgccaagttggtgttcactctttgagctctcagttatgtaagattaatgatttggaattccctttgtatcaatctttatccagggaaaatcttttcttggattcagcanaccaatctgaaaccaactttgatttatcaaacactttgcaatccatagttaaatctcaactgaatagtggcaatcaatgccgtagatccgctgaaaagtctaatcanatttcaagtgggaattttcccagttccaagttccttccaatagaacaacag

SEQ ID NO: 20423 - DNA, 328 bp, Glycine max
atgatgaacaaatagctcaagtgaattaaagaacatctcatgagaatctagatcaagatcaagattcatgaatcttgaattcaagactcaagaagaaagcccacaaacatgtatcaagattcaagattcaagatctcaagaatcaaagatcaagatttaagaatcctgaatcaagactcaagatctcaagaatcaagatcaagattcatgactcaagattctagaatgaagaatagactcaatccagataagtatttaaaagttttttcataactttgaatatcacatgagtttttgacacaatctttaccaagagttttactctctg

SEQ ID NO: 20424 - DNA, 443 bp, Glycine max
tgactaggcgagttgattgtagccttagtttcaccttagttattagtcaattcggctaagaatgagaaatcccaaagagaaaatgtccgggtgattttccgctttattttactaaaaggtatatttttgctattatattattattttatctctttttgatttccaacgtggttacggatcaaacggttggaatttattttaaccaaagtttacggatcatacaattcaaacgttcggtggaaatttattttatttttaagttaagcgagaaatgacttacgtaaaatggcttaagcacgtcaacagggggtataaaaagtaaatgaaatgagaataaaatacacgaaacacaatgtggaccaccacgggtacatagaatgaatcgaaaagctcggttcaaggtacttacccgttgaagatcgaagaacgatgaagaacgaatg

SEQ ID NO: 20425 - DNA, 341 bp, Glycine max
ttctcttaattgtctttgggcttggcgaccacgatcaacaaaatactatccgcacctactatatgtttacttcaccaacgctgttattggaatgctgccacaatctttcaacaccttattcacacattctgataggttcgttgtcatgtgaccatatcgtcgtccagatgtatcgaaagccatgctccatttttcctttgaaatgcgatcaatccatcttgctatggctggactcactcgaccaaattcttctaacgtttgatcacacacatgctcgcaaggaatgtacgctgcatcaaattttttatcatctaaagttgcacgtacacatcatactcaaa

SEQ ID NO: 20426 - DNA, 391 bp, Glycine max
taatctcactctgactttggtgggaggaaaagagaaatcgggctttgtgtttcaaaaggctttctatttttcttaaagctgtgccacatgtctccttttgagtggagcaaaaaggggcccaccttttctcttgatgtgactcatactcagtcacaagaagagataaatctgaccttctgaaatgctaaaatcctgcctcggtgtgcgtatcatttctctggttccagtccctcgcgtttctctacacccgtcggggcccgtttttgatagtaagcaatatatatatcaaaacgcttagaatgaaaccccgagtgtggctcagaggttgggttcgttaaattataattgcccgcaaaatgatcatctttagacttaaaagaaaagggacatg

SEQ ID NO: 20427 - DNA, 312 bp, Glycine max
tcattcacttaccaaatcatcaaatgtaccatgagagttcatagcatatagatgtgaaactacacttcatcagagatgtgattgaatctgacaaggtgaacgtggagaaagttctaacagaaaaaaaccccgctgatatgttcataaagtccctctctagtgtcaagttcaagcactgcctggacttgataaattttgaaggtgtctaaagcagattggtagaagagcagcccaaaaacacaaagtagacactcgcttatttaaattcaaggcggagatttgtggtgtgtgaactcaaatcacaattgacac

SEQ ID NO: 20428 - DNA, 570 bp, Glycine max
  unsure (1)..(570): unsure at all n locations
tccatcatcttntactctcatagtaacctanaggacttaattttanaattttaccgaccacgggcancgagggnatgaatttgaatcctctggatacgctagcatactgagacctatagaatacttaagcttgtgcgacactttcctctctgtgtgagttatcaccatggtacaaattaaattcaatctccaaggcaaggttgtgtggtttggttttaatcgcggaccacaaattgctgccaaccaaggaagggttttgaactaaatcccgccacgcatacccaaaagaggttcgttgggatattcaccacacctcacaaaaatctttccaacatcactaactgctaggtcccaaacaatgtcaaatggtacaagacatatatttgccgaggccacaaaaacacttgttcttcattggtctagaacgccccggattagacgaagtggaaggtaaccctctgtctaagcaaaaatgcacaacacaaaatggctcccgcgcctccctggtacggcctaaataaaatggtatgttccgcgagtaagtggtacgggttcttgtaacaaaatttn

SEQ ID NO: 20429 - DNA, 281 bp, Glycine max
tccctgaattgagacatagggcacaacattctcctagtatagccatctacattattggagaagtagataaaggatttctctctattcacttgcttccttgagagcttgcaacagagtccatgacaacattcacgcattgcctctgagtagaagtagcctctccaaaaaggaggtcatgagcaaacataaggttggaagtaaaagcccccccccccccttgccattctcattttaatcaagtgcccttcatccacaacttaaagaattaggtgacaaagctt

SEQ ID NO: 20430 - DNA, 368 bp, Glycine max
ttcactaaggtccttcaatggtgattttcagccatggagttgcagcggaagataaaggagaagaagagagaggaggcgccatctactagggaataagccatggaaggagaaacttctccaccaagagagtgccttggataaaaagcttagagaggaagcttcaatggaggaagaaaatgagggagagagagagagagaaagtggcatggaaaattgaaggaagaaaaagagagaagttgaactttgaagtgtgtctcacaaaactcttattcaacaagttctgacaagtgctacacatgtttctatttatagcctaggtcactatttgtgaatttcatctccatttcatgtgaatctaagagaaatat

SEQ ID NO: 20431 - DNA, 607 bp, Glycine max
  unsure (1)..(607): unsure at all n locations
aactcctctactacgtttntatantnttagtaaangtangtttgtantactgatgggattttcgngctctccgcnananaggggancccacaagggacgttggggtttgtagnacntcttggatccccgtngcaatctcagagacactatactaaactcaagcttgcctgagtgagacatgatgcacaacattctcctcttatagccatatacattgctcggagatattgattaaagatgtgtctctattcacttgttgacttgagagcttgcgggacagccttgacaacagttgcgccgttgactctgtgtacaagtagactctcctatgaggatgtgataagctaacatacggccgcaagtagaaggccccctccctcccgcttccccattctctatgcagtaatctatacgccctgtctccaccacttagagaataaagtgacaaagcttatccattccctacacatgaaacatagggagagaggcgaacgccttatctgagcccccttatacaacacaagaactgtgaactctttccattcacaagaagggttgctgcctgggacacacacctctattaaagccaaagctttgctataacccn

SEQ ID NO: 20432 - DNA, 308 bp, Glycine max
acagctcctccttccgtgtctttttaatttccatttgacattacaacagaatgtacttggctttgaaacttagctagccatcgtgattttccaataaattttcccctgcattttactaagcttatccgagagtatttgaaaatcttcttgaacactcttacccaattgccagaaaaattacaaaaatagcagaaataaaaaaggcttaattttcttaaaattttgctccaaaattcccttccactgtaccagaatgctaatctgaacctgtagggtgccaagttggaaactttttccctgaaaaatga

SEQ ID NO: 20433 - DNA, 390 bp, Glycine max
  unsure (1)..(390): unsure at all n locations
tgtccgcanaanananaaatactaaaaaggattttaaggttcaatacctcagtttttcttaccaagtaaaatggatcatttttaaggtccaacgccttaaaatgaccaccttgcaagtaaaaagaatcgcttgattcacccttaagaaagaactacgtaggtctgatttcctcttcgatggagggtatgtatgagcaagagccccgcttttgtcgacctcaaaataaaaaagaaataaaagtttaggtacacaatttcacacaattctaaaattaaggctgttgttctttgggacaaacgtgagaggtgctaatacctttctcaaatgtaaatacaactcctgaatctggaatattcttcatgaccgatttccttcgggtttttcgacat

SEQ ID NO: 20434 - DNA, 333 bp, Glycine max
ataaatgatatggaacaaattgaagcttcttagttttcttaacacagttttcttacttcttttgtaagattcttttccattttcatgcaatttttctatttgtatgcttaaatgctcgtaaatcaaaacaaaaatagcaattgaacagaagaataaaatctatttcagttgaatcagagaatatcagactcagttagtacctaaagcagagaggctgcgaataaatagatcctgcgaatttccaggatcaggcttcaatatcacctgagatcataaaacaaccaagaattcaatgctaaaaaacaaacacaagttattcaagaaaaagcaatc

SEQ ID NO: 20435 - DNA, 448 bp, Glycine max
  unsure (1)..(448): unsure at all n locations
ntcaccagatcatataagataaatgcattcaggcaatctgcagatatatcccccaaacgtcaaattctccgcctatattttcaacctttccatcactggcacgtggagtgaatcttcctccatggtgcaatattaaagttatattgtcattcattctacacaatcagaaaccacaaacattgtcatatattaggaaataaaaaacctaactcaaactcaaacataggcacatcacacaacaacatacaatgtcatctataaaaacaaagcatcataaacgaaaataataaaagaccataaacctccctacgaagagcgaagacaatgcaaatgaaaccccttgaacatataaaaccccaaatgaaaccaccaaaacaatgcaaacaaaatgaatgcaaaaaaaccaccaacttgactgccaagcgcgaacactcacaatcaccgacaa

SEQ ID NO: 20436 - DNA, 319 bp, Glycine max
tatttgtagacttttgataagtccgtggaaacttagcaggttgccaagaactagacgtaatctgagtgtaaagactaaccaatataacttcctctatttattctttacttcttcttttttgtgttgaatgaaaaagggctcaaatttgtttttagatcttatatttgatgaagcctttcttaaatatctttatttgtttttagttaaatctacgtcagatgataaatgtgttttcaatcaaagaaaaattttaaaatttcgaaaaacataattcaacttcccttatgtgatgcaatcctacccctgaagggcattggat

SEQ ID NO: 20437 - DNA, 409 bp, Glycine max
ggagggatgttgtcacaaagttgtcaaatcactagagaatcattagactcacaacgaataaagtgctatagcgctgtcagtttatatttgacgaaagaaacttgagcgaattgagtaaaccttagctctgccaagttagcaagtttcattgtattcaagcttattgtgtacacattctttgagttattagaatacattttttgtcaaacatctatggtttgtgaaagccaggagtgggttcgtgacaaaagatacttgggtcttaatctcagggagagattaagagcagtgccaagagtggcctagagagtactcattgtagccaaaagtggcataaagaatacttggtcataatcaaagacttgattaatggaacccttccgttttgaagagaactggacgtacccag

SEQ ID NO: 20438 - DNA, 350 bp, Glycine max
caagaaaacagggcaaaggcagaaaactctgcccaaaacaccaaccaaaatcacagctttttctcacttaaagaccccagtaacatttccttcgttcccattcgttaaccgttggatcgactcgaaaattttactgaaagtctctagtacataaatctacattttgaccgttgggatctactagcaaacatccagaactcattctgtattactctttccacaaccagcaaatacatagcatttttctgcacttatgcaaaattctgctgcacaatttcacaacaaaattctgcataaagtgcagatttcgaaaaccacacttcccctcatccaatcttgcccaaataaaa

SEQ ID NO: 20439 - DNA, 330 bp, Glycine max
cgacactagagacaactcaagctctgactcgtatgtctgaccgatgcccaagacatatggagacgctctaaattgagcaacgggatctctcgagaactctaaagactgtaacaccatactctgatgacctattcacgcgcataagatgagtggacgactcgcccggaacttgcgcgctatcgtaaagtcaaacggtcctgacttaagagctcaatgtatgagcgacgcccatgatatatccatactctcaaagctgaacagcataagctctcaagatatatatacagcgataacttttgactcggatgtgcgattcacgcgcatcatata

SEQ ID NO: 20440 - DNA, 359 bp, Glycine max
gttcaacacctatcataaataattgacttaactattattggattgtgaaaaagcttggataaatatcaaattaaaatattttttaatgaattgaattttaaaattattatatataatcttaacacgtccttgtttcaatttaactttaaattttgatacaccatatgaataaagattatgtgtcccaatttaaatattttttttatagttttctcctcatgtttaaaagtattatcgtaaatttatttatatctactaaaataaaatactcaccattaaccaggaaaatatctaatattacgaagtcttatttttaaaaattatatatgtgtgtaattttacacaattaattattgata

SEQ ID NO: 20441 - DNA, 350 bp, Glycine max
atcttatagcatcttcaatcttgtcctaactaagtgcaaaattagtaatgatgactagattaaattgaatcataatttgcacaatcatgtactaatgccacctctagatggctcaatctttatgaactcgttctgtcattatttgtgggatgttaaacaaatgagtagactatagagatgactccaatataatatttcagtgtgtcctctcaaaatgtatccgagagtgagcagcagcaagctagcattcctccaagaggttggaactcctatgattccttttgctggacaatttctgaagaagaattcttacagagtgctgaaatagttctcaagtctccatgatcatg

SEQ ID NO: 20442 - DNA, 274 bp, Glycine max
gaatcgtcagcaatctcttgcgagtggatggacacattatgtcctggctccctataatcagacaagttgtttcaagttcaactcgaaccaaactggatgcccttatatcatatacaaccacattcccttattttactatgaggggtcggcgactggcactcttatcctatcacaattggaaaatgacctgaactctaccatgcgggaggcctttacggataaggtctgtcttccattatttcgattacatattatagatcttcgcgtatgttgc

SEQ ID NO: 20443 - DNA, 446 bp, Glycine max
gctattacgtgacctataaatctcagctttaatatatggcgagtttgggacgatttgtctgttgcattcattgagcactcctttttgcttgttatctatatgcatagattcatattgtacacatttgagaagtacctgatgatttttcatatgcatagattcaagatgaatatgtcactggttcggcctctctttaccaggcgaggattcagcacaaactccgagaaccttgtttcttctgagctctttgagagattgccactggtcattgatacttgtgatctcttgcttttgtgtcccacaaaattgactataatactgctccatatatggattatctctagtattatttaaatcaatcctagcgaagaatactccagattccacttcagattatcggaaggaaataaagaatctgtattatgcttcacatccttatgtgttga

SEQ ID NO: 20444 - DNA, 363 bp, Glycine max
acgatgaagaacgaatgaagaacatcgaagaacggttgaaacctttgcgaaattcctcacggaaaacgatacggaaacgtttcggaagcgcctcggcttatattttcttcagggaaacaatttttccaagcaaattcgaaaaagagagaagtgccaaaggggctaaacccttttcttcttcacttcctcccctatttatagcaaaataggggaggtggttgccgcccagctcgcccaggcgagccaggttgcttcctccagaagcaacaaccttctggaggaatattctggagggcccaagtgggcctgggtgctatttgcaccccccatttttactaagtacacccccctctgctttttttg

SEQ ID NO: 20445 - DNA, 443 bp, Glycine max
  unsure (1)..(443): unsure at all n locations
tatcatgaacttctatctaactcatctattctctcanaagcttacaaaaacttgcaaaaagattcaaaagaatttatccaaagataatttaaaacttgagaaaactcttcagaatcaagtagaaatttcactggacgcatccacttagacatgtggagcttgtatgactcttaaagaaaaagagtccaatatatgtcttgagattgagacaagtgataaggaaaaagctacttttctcaagaacttttaggtgttggaaaacaaattgaaatatcttcaaaaggatctaaaggagctgaatgaacttcatggttatcaaatagaagataggtatgatctatggagagaatgtgcacaagcacacaaagattatgaagatgtcagaatgagcaaacaatactcttttggtggaatgtgaagaacacaaaatatttgtgaaattc

SEQ ID NO: 20446 - DNA, 183 bp, Glycine max
  unsure (1)..(183): unsure at all n locations
atctcctcacatgtcttgtgctaaatgttgttaacatgattctttagaatttccaccgattaatcttgctatagaagctagatttgattttctatggttcaaatttcttgttcatgttcttgaaccatgagttgtgttgagtttaggtttctttgagttttgtcttgctattntttgtggctg

SEQ ID NO: 20447 - DNA, 402 bp, Glycine max
  unsure (1)..(402): unsure at all n locations
ttataagtgcgggtctgggagacgaaggtcaagtgttcgcgatatgtgaagatgatgttccaagtacttcggatttggtccgaccatgccctcctgatttccagctgggaaattggcgagtggaggaacgccccggcatttacgcaacgagcataatgtaaacctttacggttttaaaagctctatagttgggcctaggctttagagttttcattttgttaaggctttgtgtcttttgtttttgaatttataatacaaggatctttcttcatctgttcctggtctctacccattctcattcatttgcatgtttacttctttttctgaaacggcagattcgatgacgagtccnccgaaggtactaatacctgtgacccgtctatcaacttcgagcaagaaatg

SEQ ID NO: 20448 - DNA, 341 bp, Glycine max
  unsure (1)..(341): unsure at all n locations
aaacctttgctaattcaattaggaattcccttcctaatattctagtgatcatcttgatgttgtgacttgtaatcttgaagtattgtcttgaattttaatcttgaaaagcccatttgcatcaattgcaacacatcatcatgatcatcatcaaaacatcaaagccaattgcatctacacatgtgtcctccaccttcgagattggagctatgtttcacgattgcctaagtgcggaccctcaaagcaatccgccattcttcctttttttttcggagacccatgaatgtatngcctaacgctattcatgtgccctccaccttcaaggttggagctatgtttcatga

SEQ ID NO: 20449 - DNA, 442 bp, Glycine max
  unsure (1)..(442): unsure at all n locations
ntataagcgcgggtctgggagacataggtcaagcgttctcgatatgcgaggatgatattccgagtactctggatttggtacgaccatgccctcctgatttccagctgggaaattggcgagtggaggaacgccccggcatttacgcaacgagcataatgtaaacctttacggttttaaaagctctatagttgggcctaggctttagagtttttccttttgttaaggctttgtgtcttttgtttctgaatttataatacaaggatctttcttcatctgttcctggtctctacccattctcattcatttgcatgtttacttctttttctgaaacggcagatccggtgacgagtcccccgaaggtacttatacctgagacccgcctatcgacttcgagcgagaaatgaatcaaaccgaagatgaacgagatgaagatgtgggactt

SEQ ID NO: 20450 - DNA, 288 bp, Glycine max
cacagcttgaaagagcctgtgtagtcgaagagaagttcaagtccatatccatcatagtctgaaaagagtatgatgaactaagggatgtcaatatggccaccgatgaagccttggaatgagaaaccaagaaggcccgaaaggaagaacacgaccaaatcaaatttttgaggtgctttatacggcacccatagtgagctcaaactccgaagaggtgaaaggaatcatcacggttcaaaagcatgatctggaacgacgagctaaaggcttgccttacgtcgaaaaaaaatt

SEQ ID NO: 20451 - DNA, 289 bp, Glycine max
gcgatggtgcacaaacaagttttacacatccgcaatgcgcgcataaacccaccatcccctgttgcccacctccatctgagctcacgtgctcccacgtagcccatatcctcgtgtctctcaacaccgggtccccatcaatactctcaagcttccacaacattcaagcaaaacaacattcaaacagcacaagctatcacagccaaacaaaacagggcaaaggcagaaaactctgtccaaacaccaaccaaatcacagcttttctcacttaaagaccccaggaacaattctt

SEQ ID NO: 20452 - DNA, 536 bp, Glycine max
  unsure (1)..(536): unsure at all n locations
ctacgctcacttccactcttagttatattcttaatctgttcctcttatcatacttataactcattaaccattctcctacttctctatatctattcttctctctctactctccacaattatctacatactctcacatcactcacctattcattccaactccngngnncccgctctactcttccttacctgcttgatagcttccttcatctcttccttgactgtttaacaaatgatcaaggaatcataacgtcaacactaacttatcagcttatcaaaactttcccagaacggccatgtctttcctattgttcaatatacttgagaaagtgtaccaccttggtcctacctttactttgattcttctcatcttccattgctagctgcttttcctctcatctctgataaacactaagaacggaccatgcccccatcaatcttgatgtatgatcacgaaaatctatcccaaccaagctaactactataccaagtgttaccttccttcttttttttgcacatttacctgcaccgaatcacct

SEQ ID NO: 20453 - DNA, 482 bp, Glycine max
  unsure (1)..(482): unsure at all n locations
tggactganactctgatcccgtagaattccggacctatcaattctgagctcgcatgctactctcacgatactctgacatgctctcagaggcccgcgcttagactttggagaatttatcctgaaatcactgaaaaattgcaaaaacgttttataatctattataaatttcagtggacgcatccacttacacatgtggagcttgcttgactcttaaggacatagagcccaatatatgtctagagatcgagacacttgtgctgagaaagctactttactcaacaacttttaggtgctggaaaacaaatcctaatatgctcgaacggatctaatagagcctaactgactccgtggctatcaaaactcatactcgactgatctttgaatagaatgtctcacagcacgcanagaatattgagatgctctactgtagctactttattctgttggtggagtgagaataacacagtctttgtctaagatcg

SEQ ID NO: 20454 - DNA, 308 bp, Glycine max
attcttctgtattttatacttgttttttctatagttcatttcatcatcatcgcaactatagctgcccattataaaatagcttagacaatctatgtctgctgcttctgaaccttttatttatccttgaagtagtttaatttttttttttgtgttgcaatagcgaagagtgaagactgaagttgttctgacagactccgtgatttttctttaatttcgacggaagcctaagcaatacactgccactgaattgccacgaagaaaaattcggcatgatacacacacacacacacacacacaaactctaatga

SEQ ID NO: 20455 - DNA, 568 bp, Glycine max
  unsure (1)..(568): unsure at all n locations
ctctatactatctctgctactttactaaaatatttgatttntcttatacttccccacncagccacacaggatttgaactgagncncttgatacccgtgaaatatccgagacactatgctatattagcgcgggccagcggagacaaaggacatatcgttctccattaggtaggacgagattcctcagtggtatggattcggtgcgaccactccctcaagatatacagctgggaaattggcgattgtgagaacgcccccgaagttacccctccagcattatcgaatcctttacagggttacaagctgtctagatgcgccttagcttaagaggtttttcttctgttgatgctgcggggaaattgtattcgaggatacaatgcatggaaccctctatagctgtgaccagctctctactgatttaaatgcatctgcgtgattactgactcttctctaacagcataagcagtgactagctcacagcatggacataaactagagacccgactatctacttcttgcgaaagtggggcacgcggaatatgactgtatgaggattgngagtancccag

SEQ ID NO: 20456 - DNA, 154 bp, Glycine max
ctaaaacccttacacgacggacaccgaatgcctaaggagtgaggactccaaacgcaaacaacaacgaggagagaccactcttaaaaatgaggaagggattatttgtgggccacaggtgggccaacacagagtgccttaactaagccccaaaaac

SEQ ID NO: 20457 - DNA, 576 bp, Glycine max
  unsure (1)..(576): unsure at all n locations
ntgcggatttggtcttcgccggngaaagggtcgaagcagatcttgaaagatgctatattaatcatnctgctttggacgaatgagaaactggngcanatgaagaaggtgagaatgatggagaaacccatgctgngactggcattcctataccggcacagtntccaccacacccaaaatgtcattacttagcttataacaacccttcttcttacctatccacccagtattcacaaaggccatcccnntaatcaaccacaaacccacctttcacacaaccaatgctaaacaccacctttagcatgaaccaaaacaccaaccaaggaanggaatntgcagcanaaagcctgtagaatcaccccantcttgtgtctatgctacttgcccatatctactgatctgcatggatcatacccntgtgggtnnctcactcatnttcgagatcactcgacgcatgtcgccatatggagagcccgagcatcatgacatgatgacctgagctaagtgcagctaatgtgggtggtgaatgagaaatgtggatctactgcacaaccactggattgacttgtatgttatgta

SEQ ID NO: 20458 - DNA, 230 bp, Glycine max
gctacacatatgatgagtcatgcgaagacgccagcgaaccgtgaggagagctatgtctcttcaagagaggatcaatcctactgactggaagaaactgacctttgctgatgctcctgtgccaagcactaccatgatctcgctatgcctgtggggtaatccaaaagtaaagaacgcaagtatctgctgaaaaggaaaaaggtgccctattaaaactcaaactcagctgcaga

SEQ ID NO: 20459 - DNA, 132 bp, Glycine max
  unsure (1)..(132): unsure at all n locations
ccgacatcatgcacnattggttcatggatngaattgaacactcaatagccgacatcggtcgtgaaatagctccgactgattttttcagccgacattgagcaattatcttntgaaaactctcgccggtagata

SEQ ID NO: 20460 - DNA, 189 bp, Glycine max
  unsure (1)..(189): unsure at all n locations
ggctcgtgggcgtcgagtaacgacgaatggaggcctcgcgcatcatgtgctcgatgagacggagggatagaggtntatggactataaaaataaagaaataacgatatagagatgggagccggttatttgtgttgagaaatattaaaatgtataacaagctaagatctctttatctgttcaaccgatcac

SEQ ID NO: 20461 - DNA, 344 bp, Glycine max
  unsure (1)..(344): unsure at all n locations
gtggatgcanacactgctgtccngacttgtagtgctgcactccacacctcangtctattgtgacaanttgagcactgacaccgtatttcttgctcacaatccagntttgcatacctgcaccaagaacgtggagctngacttctttgtacgcagaaggttctcgcaaagcaacttcaagtntntcatgctcgttcttcagaccaatattctgatatcctaaccaaagctctctctccacacattttacagatcttgtacccaagctcaaagtgggtgattcagcagcttctcaccactgttgaactcatgggagggtattagagtagtatcactcggtgatatga

SEQ ID NO: 20462 - DNA, 197 bp, Glycine max
  unsure (1)..(197): unsure at all n locations
gaacatcttaatgcttcacatctacgaaaatagatagcaagcaacttttaactcctttgacttcatataaaaactcagcgctcccaatgacaatatactanatcgcaactacacatacaataccactacaatacaaactcaactacnnaccagacactcccctctaacaccatgtctatgtgccataagataaacat

SEQ ID NO: 20463 - DNA, 241 bp, Glycine max
agataatgagagggatgtgtactgatttgagagcaaaaatcaacagtattgttagatatcagatgtcacacaagctgttaaatttcaacacctgctaaaaaagttagctcagcctgatcatcagcctgagggaacatcctattgacatctaacttactggatcattaagaagccctgcaaatatggacatcctagtgacatcaaagttagcttccagctttttgttgatgctagtttttgg

SEQ ID NO: 20464 - DNA, 85 bp, Glycine max
catgagcataagaaagtagcaatcttacgtcctctattgctactagtgcatatgtttcaccaaagtctacaccctctttttgata

SEQ ID NO: 20465 - DNA, 338 bp, Glycine max
  unsure (1)..(338): unsure at all n locations
tctgtgctatctctattaataaatataatttagaataatttatgtggcatcccttagttctangttagtggtagatgaatcanataaagtggtgattgtanatgtcctagtagcagtgggtttcctccatagaaaattatatttagtttcatcgtaggctcatctanaagatatgattttaagtaacttgactaagacatattntttttcattgataatcaaaccacttttttctattctttntctttcgngtattcgagctcggactcaggtgatgtattacatgtgaaatcctcgctggactgcttatgtttcaacgctaattatcactggtactt

SEQ ID NO: 20466 - DNA, 178 bp, Glycine max
  unsure (1)..(178): unsure at all n locations
agagttgcatgttcaacttccctttgttgatttgaatgtngaagtgtgagcactatgaatgttcacatgctcaactcccctaatattcggttttttacatctttcaattcttgaaagttgaaactgtctactatcacaattatganttttatcattgaaatggagtaaaatcgggtga

SEQ ID NO: 20467 - DNA, 326 bp, Glycine max
  unsure (1)..(326): unsure at all n locations
accttatgctntaagtngagctntcgaatagcagccgcacttcaccccgtacccaagcctctgcagttatatgagagaattatcattaatacatntatcatctcccttctctgctaccatgtcactatctctctgctccatgtctaccaaacatcccataagctgctgaaaatccnncccacaggtcatccncatttgatttagtaactcacattgtctctcggtaaattcttctntttctttcactgataaagcagaatntgtgtctgtcaataactcctgttggactntatagtnttgcaccactntctactggaatacacctg

SEQ ID NO: 20468 - DNA, 690 bp, Glycine max
  unsure (1)..(690): unsure at all n locations
aganncacgggggtttgggacttgcgcctgctgtacgtgcacttacantctcagctnggctccacatcaagggtcagtaccagaatgcgtatgttcctttccctttgtacatcaacaatatanggagatgaattcttgctgtgaatgtgattacaacttccttgagacccttctggttagtcatcactcgcttacaagaaagtgcatctatctctaaccacacctatagaagtcttattgctgttcactccagctcacagatatgcagtatcacctgtagaagactttaccaaatcaatgtagtatggtaccttcatctccaccaactgctacataccgtggtactcaatcaactgaagaaggttaatccttcacttcttaaccaatccatactaacatacatcgggttgaatcatctcttcttggcataactacacgtcgatgatacctgatagtgttcgtcataaaaccattgcggttgccttatagctagaggtagttgatgataacttctactntattgtcttcgtgtgaacgaccgccantagtggttgcatctactcatcaaactggggcatagatctgtgccatagtcttaatatctcgctcttgtgatcgcatgataaggtccgcgtcaagtgtatacacgtcggagtaatcacgcagatgtacgattgactcctcgcccgn

SEQ ID NO: 20469 - DNA, 235 bp, Glycine max
  unsure (1)..(235): unsure at all n locations
tggttcagtagttacaaacctatgtatagtcccaagggtgtgcaaatgcaccctaacttggcttcattcttgctaattgcaatagtntatgacaacaaattgctttgcataattgattacatgattgtttgatttatacatgaatcaaaggaattgtaccagatgcagcccttatgnattttataacaataaatttgactttgttattcatttaaaaaattatttttacctcatt

SEQ ID NO: 20470 - DNA, 581 bp, Glycine max
  unsure (1)..(581): unsure at all n locations
ncagtgcgcttagtggatctccattgcacnaccnnccccattggnaaagaacctctgtacctatcatggagatgtctcctttatgacattctctctcacgccaccatgatgatcaaccgttgagaggctatatctatgtggacttccagctgtcacccatgttggaagaatatgaagagatcctaacatgtcctctaggaggaatgagaccatacctcttctcatgcctctatccctcatatctagaatccaagatgtccaatccgtcgcatgaatagacctggaagccgtctaatgggtggtggataccgcaatcgcgtaggaaatctaaacctagcacgcgagcgaatggtccgttctaacatatcaactgtggcttgatgagtctgtcccacgtgactgttacgttgaactttactgtctttctattatctgacacatgattccactgcgtttctagcgtcttatacgcttgccgcgtaaagctatcagtcgtangctgtgtaaccaccactcttcattgtttgtcccatggtctgctcgtgtcttcgcctctgtttcttcctctactatcactcccg

SEQ ID NO: 20471 - DNA, 205 bp, Glycine max
  unsure (1)..(205): unsure at all n locations
tcatattctataccttcacattaatcacatggtcataacatatcatctcaagtacaacacaacatctctcacacacaattcattactcaccatcacgtagcaagtcacaatgatcattacacagacgttatgcaacatatatactaagactcaatcctatatngaatgtggcatctcgtcagtgaaaaataacactanggcacct

SEQ ID NO: 20472 - DNA, 508 bp, Glycine max
  unsure (1)..(508): unsure at all n locations
agcncnnccggggatgatcctgtganatgacgnccgttgtaggtgcactctcgaatctcaagcctctcgangtgggantgatatatgccatttccgatagttcatgggtaagctctgtgcaagtagtcccttaaaagggtggaataacactgattaagaatgacaagaatgagctgattccacaagaccataccggtggaaatggttaatatgctttcacagcacaagaacacatttcttccctataataatctgaagtagcgcacctttttttctgtaatctcagatataaatcttgtatccaagatcaaaaacacctaatgccattgagtttctatcgaatgcctggattgatgcctcccatcaagtgctatgccttttactgtgaagctgagtttatgtattctgatcgaatgtacatatctacactgnaagctaaaagctaagactgctatacaatcctatgatcagttgtactaattcaagttatacacaatatgtgaatccc

SEQ ID NO: 20473 - DNA, 150 bp, Glycine max
  unsure (1)..(150): unsure at all n locations
attggtagtggcgattgataataagattttacttggtaattgctgagaagatatgtngccatttccaatgcatgtgtgccaaaagatggagggagtgaagcatgagctaatagagttcgaatgatattattaatggaacggcattttcgt

SEQ ID NO: 20474 - DNA, 225 bp, Glycine max
  unsure (1)..(225): unsure at all n locations
ggacaaaagaaagagactgattctatagtgcaaacagtgaagctgatgcttagagtgccagtaccaaagacatttccctgcatcatgacagagcttgaccctgcangaaatccactactgttccttgatggtttctggtatatgcanatactattgctctgaggataggaaaagacacatcacctgcccttcggactttgctatagaggatgccttcgctggcat

SEQ ID NO: 20475 - DNA, 321 bp, Glycine max
  unsure (1)..(321): unsure at all n locations
cctcgcccagtattatgatcaaccgctgagatgctntacctnntgggacttccagctgtcacccatggaggaagaatttgaagagatcctaggatgtcctctanggngaatgagaccatacctcttctcagggttctatccctcattagctagaatctcaaagatagtccacatcccgacgcatgaattagaccatggaaagcaagtcagatatggtgtggttggaataccgagacaatgttgggaggcaaaagctagaaccttggcatgtagatgcgaatgggccccgttcatagacattatcgcactgtaggtctatgg

SEQ ID NO: 20476 - DNA, 304 bp, Glycine max
  unsure (1)..(304): unsure at all n locations
tctgtgggaagctcttctcatgctatttctattatgaccctctctcacctgtctgattgtttcgctgcatctcatggggaaataccataaagactattaactaagatcagctccataaacaccacaagcagctcataggagtaaagaaactngacagaccttgttgcaacatgtcaacatgatgtaaccagaataatctcattattgaatatgtaatcatctcattagcaactatgacaatcatgaaaacaaatcaactaactggcactcatgatcacccattaccacctaacaacctgacaac

SEQ ID NO: 20477 - DNA, 298 bp, Glycine max
  unsure (1)..(298): unsure at all n locations
actgcatctgcatggtggaaaatcaccattgaaggacctcattgaagctcanaggcccatctgctaactntcttaatatttctgaagcattttcatcagcaaagattatttctctaaaccaatcagagaaagtcttgttatgcgttttcaacacctagttcnttgacattcttggagtattttgttgactaaagcttcatgctgaagtatgtatggcaacacttcattactgttgttcaacacatacaagtgagcttgtaataaatcttctacactnggagtgatacatgcagtcctc

SEQ ID NO: 20478 - DNA, 273 bp, Glycine max
  unsure (1)..(273): unsure at all n locations
gcttgggaactcctgaaggccaagaagctgttgtattgcccccttattactaatacactctgccttnttgctattcntttctgaacgtacgaacttacaattcgaacgatcttggttccttcgaatgcacgaacctaggatacgaacatccttttgctccggatgtacgactccggatggcacatgctncttgactccgatgtacgacttacgatgcctagagggccatactcaatgtcaacaggtcctctacaaagaggcccgacaatagga

SEQ ID NO: 20479 - DNA, 190 bp, Glycine max
  unsure (1)..(190): unsure at all n locations
tataccaccaactgcttgccctatagtggcatatccgaggcaaggctcgaagtcngctagattgtgcgtgggaatntcatgtgtctccccaatggttcgagagacatgtgcatgatcagtctgaggttgtcagctctcaatgagtatgggttcagagttattaacatcctcactgggagtgtatgccaca

SEQ ID NO: 20480 - DNA, 304 bp, Glycine max
  unsure (1)..(304): unsure at all n locations
ctccttctatcatggctgattccttaatggatggcgcctcctctcacctcatttcctatgtcttccgctgcatctgcatggtcggaaatcaccattaaaggaccccatagaagctcaaagatccagcctccatagaagccncacaagcaagctgccatcaagtggtaatcagagcacaagagcttcaagtaggtgctccttaaacctccattatagtgattctataccttctcttccattggtgttactacatctatctccatgtatctattcacatgtctngttctaaatgttgataacatga

SEQ ID NO: 20481 - DNA, 227 bp, Glycine max
ctatgacagggttgggtgtataagtggacctaatatgctctattatactagggactctgaccatattacttatttgtatttatatttataaaagacttatttctcttctcaatataacatttacatccttattttaaacactttacttattatttatactataacttattaatacaacctttcttctttttattaaacttttatttaataatttttattataaaccg

SEQ ID NO: 20482 - DNA, 211 bp, Glycine max
atcatcattgatctcagacacctaataacacctaatgagagatgcatatatggacatacattagttcaattccaggccaatgtataatggaatagtcaaacaaaactttctagatgtgggtgattacatgtctgatgttaaaaaagatgtacagctcttcacaatgttacatgtgtaaaacaaattatagctaagcctgtagttcattatg

SEQ ID NO: 20483 - DNA, 252 bp, Glycine max
  unsure (1)..(252): unsure at all n locations
ttaaaagactaanattatatactagaattatatactaaacataagcataactatatgactgatcaaataactatcaagtcaacagaataaacctgtcatcctctggggacttgtgctcatagacaacaccgacctgggacctgtaagtgtctgctcatgctggcaagtgatctcggtgggtgaagatactgaaatactctgagtgtgttctatacactgtcgctaagatatgctagagacagtatctctgtt

SEQ ID NO: 20484 - DNA, 187 bp, Glycine max
  unsure (1)..(187): unsure at all n locations
tcttcctacttttattcgttgaccacagagtggtacctggagatatgtcgcgagggtcaggagaccttggngatgtcaggtggggtgctatngccaaaaaccaagcttgaccaatcccaacccaacccgggcatagtcagtcagtgagaacctgtgacgtacctaaacaggcgagctcctggtagtc

SEQ ID NO: 20485 - DNA, 164 bp, Glycine max
ctccttaacctccattaatgtttttggttaccttctctacattgatgtgcttcattttcctcatgatctctcacatgttaggctaatgcttaacatgatcttagagtttcaccattacatgcttataactagattgatttctatgttcaattctgtcctgtctg

SEQ ID NO: 20486 - DNA, 140 bp, Glycine max
tgatagaggataaagccatatcctcttccatcaagctgattatacggtatatcttaatccaagtcccatctcttgggggaaagactacactacccacacatttttgggtttggaaccccacaaaattcttgtgaattaat

SEQ ID NO: 20487 - DNA, 325 bp, Glycine max
  unsure (1)..(325): unsure at all n locations
ttgatcatcttgctntgacaaataaagagcctatggcanatagagaggatgagaatgaggaaggaacccatgctgtgactgtcgttcctacatggccaaatttcccaccagctcaacaatgtctntacccagccaatatcaacccttcttattacccaccacccaatcaaccacaaaggtcaccctaaatcagccacagagcccgcctgccgcacatncaataccaaatgccacccttaacatgaaccanaacaccaaccagggaagggaatttccagaaaataagcctgcagaattcaccccaattccaatgccatatgttgac

SEQ ID NO: 20488 - DNA, 243 bp, Glycine max
  unsure (1)..(243): unsure at all n locations
aaaggtgtcacttcgcacatggaactgatgaattgccaagtctggatgtatagtgtataatttttttagcgnggttgaattggcagaatttctagtttttcaattttatanacagctctaatttgtacatgatactaataataatggcgagcttgctcagctctaaattcgatgcctctgcttcaccatttttttacggcactaactaatgtatgcatgtacaacatctatatatatcctatg

SEQ ID NO: 20489 - DNA, 288 bp, Glycine max
  unsure (1)..(288): unsure at all n locations
cgtctctttgtcataactagcatgtaagatgctcacagagtatgggttctgtagaagaaagcaaatgaatatctgaggcaccacatgaatcattaaccaactaatggatggtctatggactgtntggagaatatgaattgctctaatagagctaaattggagcaaatgcataaattgatttagcttctcaatttgtttcctaaaagtgagaaacgagatgatatactggagataggtgttagaagataccttgcggagagcagtggcgagttctccacgcgtgatatt

SEQ ID NO: 20490 - DNA, 253 bp, Glycine max
  unsure (1)..(253): unsure at all n locations
ataatgagtngattcccacaagaaccatgacaagaagaaggatgtgctntgattatcgcanattaaatcaagccacaagaaaagatcacttttctctctttttttatggatcaaatggtggaacgccttgcgagacaagcttattatagnttccttggtggttatatggatacaaccaaatagtcatttataccaaggaccaagagaagaaagctttgtgtgtcctcttgggtatatgcctataagagaatat

SEQ ID NO: 20491 - DNA, 298 bp, Glycine max
  unsure (1)..(298): unsure at all n locations
agagattaatatattaatattggacgataaatactntcaatgcantttttgtttaattatntattaattctgtttagctgaaaataatagtagtttatttaacatatacatgttntgtgccatgcaaatattaatatcgtgtgactgttatatgattcatgaggtgtgagaacatgttgcgttgggattataatatcgtgattgagattgagtataagtgtttggttaatacttgatgtgatattatctcgtgtgtgaattgtgaattatacaataactcgactggagtgtaccttga

SEQ ID NO: 20492 - DNA, 245 bp, Glycine max
aaacactactagagcacctatcctttaaatctgattatatattgcatttctaatatatgagaccctatttattgcaccatagactaaattacaacacacaagggggtgataaatttgcaaaaaagagagtacttgctggcacatttgctaaaaataatagaggggagcttttacaaaatttctacttaagctgggaccgaattaacacacccactctttgatttgttctttgttgatcatcatac

SEQ ID NO: 20493 - DNA, 262 bp, Glycine max
  unsure (1)..(262): unsure at all n locations
agcttctctctctagaaacctgattctgagtatctctgtaccacctaanatctgctaaagttctacacttaagagttgataataattctgcggatctgtctttccacaaggatgggtctccaatgaaatgttgggctattgtaaatattaatgtgttaacagcgtcaggaatctctttatcatcgtcattagtaatgactcttccattgagatccgtcttaactgcactgtacaattttgatttctcttcattagtgagata

SEQ ID NO: 20494 - DNA, 332 bp, Glycine max
tctactcctactccgagcgaatacctgttgagtaaatcatgactgttgctcttcgagccttcattgatattgataatattgtattgttgatcaacttctttggtttgctatgacttatctaacttatggagagttaaaataatgaattgtaattatgacaaacctaccacctgagtgtgatataactataataaagcattaggctggtgtgaagttgctttagatatattgtaataccgacacttccctgatgaagaacacggggcttctaacacactggagaacagtggtttcaggctatacaaaatcattcgccatatgtttttagtttg

SEQ ID NO: 20495 - DNA, 637 bp, Glycine max
  unsure (1)..(637): unsure at all n locations
atgattgtactagacactganggcttcaanatactcaagctgataagccatctactcaatagctcgttgaaaagaactttatgtgaattcttgagatttacatagcaataggaaggatgatactcataagaacaggtattatcgtgagtgaatctactaacactcagttaactcttggtaacggagggaactagccagtaacttttatatggacagagtagtgcttggaccatatgggaacctaaacagatttgagcctatggaagagattcttgtacctgtgccattagccattaggatatgtcatatcctgcagctagactgctctgaacgagattatgtggatcatttggtgcatggtgtgaagcacctgactctggaaaccaagcctangaaatgtatcagtatgtggaatctgttgttcttgaaggcgtgccattatacgttggatatgaggtgatactcaaatgaggtgctgagtctgaaatgtgactggtatattcgttcactgaggtgtatcgtttattcaaatacgtagtctattgcatacttcgacacaatgtgcgtgatatatttgacctgaatgcgtacctgccatatgctgtctcttagttgttcacataactttttcttattg

SEQ ID NO: 20496 - DNA, 382 bp, Glycine max
  unsure (1)..(382): unsure at all n locations
cgtctctcacagtctntagatgtgggagccaatccaatccttgtgttcggactcttagccacttatgatagccgccgatgatcccattactgcttccnctaagctctctgtactttcttcacgccgcatgccatgccttgcgaactccttggagtaccctcgcgttgtggtcactataacctcgtgcgatgaaaggcgtgatgctttcgtctgatggcactcctctcatgggacatccttcgcatgaagatagaatcctgattcttccttgctctagcgagggaaccatttaacagacgccgctccatgctagccaagagttggtcacaacanacaattctcgcgccgctctnttcacatcnccggtcgaacgtgtcataca

SEQ ID NO: 20497 - DNA, 423 bp, Glycine max
  unsure (1)..(423): unsure at all n locations
gcttctaagaaaaacttcttgagaagctntcttaagaaaacttgcttgagatgctagagctaagctacacacacncatctaataactaagctcacctccttgagaagcttncttgagaagctagagcttagctacacacacccatctaataactaagctcacctctntgacaaaatacatgaaaatacaaaataaaagtctcgactacaaagactactcanaatgccctgaaatacaatgctaanaccctatgctactagaatggcacaaatacaaggcccaaacgaaggagaaacctattctaatatttacaaagataagcaggctcatatntagcccatgggctcgagatctaccctaaggctcatgagaaccctanggtcttnccttggatctctgacccaatctacttggagtcttcta

SEQ ID NO: 20498 - DNA, 202 bp, Glycine max
tttttgcagaacgttaaaatctgaaagtattggattataaaagtattgagcaagaatggtaccttccgtaacatacggtagcagaatggactcataccggacacaatagctccaaggctacctagaatgctgcatctatcctaccgatgctccaggattactaagcgtggaagccccttatgccttccagcttgaaactacc

SEQ ID NO: 20499 - DNA, 383 bp, Glycine max
  unsure (1)..(383): unsure at all n locations
ctaaatatactaatcaaggattaaattttggagataactggngatttacagangcanagatctgattacaatggttattagtaaatantaatagtataactttagcctgaagcaacaccaactaatgaaaacgcgttgacaccgcagaaaatggatcatgagttngttaccttaacaccaaacatagtccnatttttattatatnttcttgcaatcgtcttcgacatatatatatcaaagaaagctcgcatgcagctctagcctagtggtgtactgtgagagagacacaaactgactttcataactcaagtgaaggagaggagctatgtcagtcttgtgtgatcttatttctcctcatgaatataacacatttgtattatgtt

SEQ ID NO: 20500 - DNA, 684 bp, Glycine max
  unsure (1)..(684): unsure at all n locations
cgcncctgtgattgggcctttgaatgacgccagctattngtacactatcgntactcaagcctgtaccgctngacantggagtcagagagcgatggtgtatgggtgaacaagcnacagttcaccacaagaacgccaatgtctntggcttcaacaccggttttttccaagagctcgtcgacagccncgaagagcaccgtgtncgtctccttcctcgcctnctcanatgttagtctcggagggatctccagcaggccctcctggacgtangtccatggtcccagaccggaccggtcgagaatcttgttcacaagtttgtaatttccttcgagaggaagccgacgcgattcgctctgtcgagccaacatttcttggagcagaggcatgcaaggcttggcttgaagcatgcaaagtacaccaagntaaatttgttgggtgttctcatttataaatngtatactanggttgcaaccatgcanaaagctatnngtattgaagacganngctcactgngaacatagaactagctatgtgacactatatgcacgtgaagaaatgncatgttgaaatatatgctcagcattttaaggangaagtgttgtgttaggatgtattgcgtagatatttgtantcgaagtttggaggagcaaangggcacatcgtagtatacatctggggtgcgcactn

SEQ ID NO: 20501 - DNA, 608 bp, Glycine max
  unsure (1)..(608): unsure at all n locations
ctccgaggcaggagaactacaaacgaaggtagtntaatgcttagtgtcagacatctcatatattcaacttcattaatttcaagagttaccttctgctatattacanaaactctgcggaggaaatatcgnttctgggtccattttctgggaagaaacaatcagagacaggctatgcttgctgcagagaaagcaatcacacaatgtttcagactaatggataagctaaaattccaacgaatttctatcatcaaacagctaatatcaaatatcaccagaccccagtcatcttgatactaacagaaagtttaggcaatatatatgccttggtgccaccgcttactgtcgttaaagcttntantaaaatctntttcttctttcagtnngatanagaaggccacatatctatgaacggttcaaaccccccgacatcatatacagatggcgttataatagtagctcacaaacatgacangttctaaccttgccatgaaggaataccttatatttgcacgcaatctctcgtctcctcttctctgaacttatatgagaatctatttactgtctttaaggatntcatatcacatacactatggcgctcaaacttgacg

SEQ ID NO: 20502 - DNA, 393 bp, Glycine max
  unsure (1)..(393): unsure at all n locations
accgctgaacaagcagggcattcaaatattcagcatgattgacacttcctctgatcctgnaatgcatggagaagccccataccacagctaagaacctacgttaaacttatgtggctagttaagtttcttggtaagttggatttgtttaaatataacaagacttttattgtctacgcttaccattatcattgtgtacttttttaacgattcatacagncccgagctatcctgacgcttactcacaaacataacgaataggacagtgtgctcctgataagagccctagaaataggcttaaaacaatatactgatgcggaagaaaatgccgtccttttgaataatcgtgatcaaattggacaatccgttgtatgccacatttttatgttgtattca

SEQ ID NO: 20503 - DNA, 330 bp, Glycine max
  unsure (1)..(330): unsure at all n locations
tctggatgaatcttctggagggcccaagtgngcctggttgctatttacacccnctatntactaaatgcacccncnctttctatttntttgtaattctttntccgtaacgttacgaaactttacgaatntcgcaacgatacttattntccttccgcaaggttacgaatccttacggattatgtatttactctnntttagctttcgaagaagttacggaaacttacggattgcgcataaacacatcttttcgatttccgcacattacggaatntcacggattgcgcaagcctgcttccttttnngattttgacgcgtctcggacttcattca

SEQ ID NO: 20504 - DNA, 193 bp, Glycine max
  unsure (1)..(193): unsure at all n locations
gatcgnnnacccactcattaatacaactagcttattgctagcaaaatctagtcatattcatagttctgatgctttcaatgatagattcgctattgtggcaatgcttcttctgatgatgagatggcttttgatctgatgatgaatcttctccaccccgaataggatcctgtagtgcaagaattgccaaagttga

SEQ ID NO: 20505 - DNA, 83 bp, Glycine max
  unsure (1)..(83): unsure at all n locations
gacaaatacatgaaaaacaananattcctactacaagactactcaaatgccttgnaatcaaggctataccctatctactggat

SEQ ID NO: 20506 - DNA, 224 bp, Glycine max
  unsure (1)..(224): unsure at all n locations
agtacgtgagctcagttgaaggtgagcaattagggatggtgggttcatgcttgatntatggatgtgggagagttgatntgcaccatcgcccgatcgccacctagtaccacatatgacggataccccataatccaacaagctggatgtgaganagcgtggaagagtcagtcttcctacttttgtttggtgaccacagagtggtacttggagatatgtcgcggggg

SEQ ID NO: 20507 - DNA, 674 bp, Glycine max
  unsure (1)..(674): unsure at all n locations
tgctaatagggttgnncttgggntcgctgacngtgctacaacatttgtcattcgatatcagaactcgnaagcttctataaattagaattntagtgtaatgaataattactattatattgatacataangagatnctatgtctattactctaataagttgactttatagatgtttacctntaaattgtgaattctcttcacgaatctagacgtatcaaggggaacataaactcaatgagggaacatgcagagctcttgagttctgtcanggatgatattactgactttaaagtgaatcatgagtttgatttgattaaatgacatagctattttctcatagctgtactagacttaccttcttctggatacatcaagcaggttgtaccaacgatgcctgtctacgtgagagagctgcatacatggaagtatatcttatgtatatatctctactatgagacttgatcgactgtgnttactatactntaatatctcatacggtgaacatctttcatcagccacttgcgactgtcaacatgtattgtnctctgaatgtcaatagangtgctacgtantcttcttaatatatgttattgctgtactacatcttacttctcgcgaccacgtcacttatcatatatatttattcatgttggcgatatcctaatgtatatactt

SEQ ID NO: 20508 - DNA, 270 bp, Glycine max
  unsure (1)..(270): unsure at all n locations
ctgcagcaccggcttcgctttcctaactgtactggaggcggttgcggtggctttatcctctatggttntctggagttntaacatgacctccgagatggaagccatntgatcttttaaggccgatagatcggccttcatctgttcctgcacgccctcttcattatccatttttctggatcgagtgttatangggtgccttggtgtttcttagttatatgagactctaaagaaataacaacggtgagatgccccaaacatagtatgcaatga

SEQ ID NO: 20509 - DNA, 701 bp, Glycine max
  unsure (1)..(701): unsure at all n locations
tcctcgcacatcattaactcctntcanatcaattgntctctnntnnnncnnnnnnngggctgtgatggcgctagattgatgtcgttcactnacanaccagcnggatagggcaaatggaaatagacaaacaagggacgtgtgtttgtctctttacatccgtangggagcgccagcaagtgtgagccctatacactgtataactctcttccacacactctncgcgagtttacgccatgggtcataggtgcatgctatcgngcaacactgttcgtggcaagtagcgagatgcagacactgtactcactgattctgaaatatacatggcttgtcaacacaatacttgatgatgtcgcagctggtgtggcctantcacaattaacatgttataatacctactgcactctagcttgtttatactgtgcttgtatctctcacagagaggcaacacaccagtgacatcttctaatactatgtctctttacttgatatgcaactatatactgtgtggatataagagaaggcacatgcggtacgatactatctgtaacgatatattaacacagtggggatggcaatcaatgagatagagcgcttctccaactatacgagatatgatatgaatgagagacctactctttgatatgccttcatcttgagaagataccattgaagtatgtgcctataacgacttctaataacag

SEQ ID NO: 20510 - DNA, 361 bp, Glycine max
ttcatgtaagctgcctgctattggtaatctcaagctcatagctagtctttatagacttcaagctgtctattagatattctttgtgaactgctaaaaggaacagtaaagtctttaaagctaaatgttttcactttagccttaagctttcacctgattgttgaccaacctactgcatccctctaatgaatatgctggtatgatggacatacccagatggaatggtaggtcctaccccaagatgagctttgatgcctttataattcttaaagatcaaatgaaaagcttgttctcttatcaaatgaccaggaagttgaatatctttgaaatctggaaaatggctacctatttcctcagacaccac

SEQ ID NO: 20511 - DNA, 124 bp, Glycine max
  unsure (1)..(124): unsure at all n locations
cttatagcacactgctcatggtctgacactctgaagatgggatntgtccaatggaacactggattcacctgcctcattcacaaccatctcacctcgtaatggaccctacaagagttgctctact

SEQ ID NO: 20512 - DNA, 464 bp, Glycine max
  unsure (1)..(464): unsure at all n locations
tcaaagatacccacncatgatatattcttctccctcaatctatntcacaagacagagatatagaaatcaagtgattcaacttaaagacaagacatccaatagaattactacttctctctggtaaaattattgttgcgatagagttccatgaatgagtcagaaagcttcaagtccttcagagctagaacaccttgatcaggccttgatggatcatatattatgcatacctagcgtctactattctccttgaaaacattgccaagtttgaacaaatggtcattaccaattagatactttgaagatattgttatcggccacaaacaatatatgcacagagtctgcgccaataactaatantctattgaaatatcatactatctcaacattatagtagctatatctacataagaataatggtagtcagatatacataacctttgtcaatcacatttggactaatatta

SEQ ID NO: 20513 - DNA, 274 bp, Glycine max
  unsure (1)..(274): unsure at all n locations
aatgattttcttcatgcctcttaagtgcagatgtccaaatctttgatgccatatnttgacttcatcttctttggagactagacatgtggaggagtaactggnttcttgaggtgtccatanngtaacagtgtcctttgatctgctgcccttcattagaacttcactcttctcattngtcaccaagcattctgactntgtgaagtttacattgaatcctcatcacacaactgactgattgctgatcaagttgcagtcagtcccttcaccagcagta

SEQ ID NO: 20514 - DNA, 381 bp, Glycine max
  unsure (1)..(381): unsure at all n locations
tatcttgaaccacttacttaatgtatgaaaatctcaactatataaccatacatcaccccagccncaatcagttccaacttcttttactntgatatgaaaggttaaaatgaacatctatctcagtaaagtgtcatagaaggaaggagaagagacaaaagtcaaagtaaacaagaaccaaaaagaaaaaaaatgaaaggtgtaggagaataaattaaagaaaaaaataacanataaatgaaagctggagtttatttgaatcattctgcaagataataattaataccctatanaaggtggtnntaaatacaaacatganaaactaagtntattttcttatggtttaacccccaatttaggtgcataatcaaaacttctaatgac

SEQ ID NO: 20515 - DNA, 316 bp, Glycine max
  unsure (1)..(316): unsure at all n locations
tctgacattcaccacagattctgccttcttctattttcagatngngaatgcctctaacagaacctttgtcaatgattntcttcatgcctcttaagtgcagatgtccaaatctttgatggccatatttgacttcatcttctttggagaatagacatgtggaggagtgactggtttcttgaggtgtccatangtaacagttgtcctttgatctgctgcccttcattagaacttcactcttctcatttgtcaccaagcattctgactntgtgaagttacattgaatccttcatcacacaactgactgatgctgatcaag

SEQ ID NO: 20516 - DNA, 261 bp, Glycine max
taaacctaggtggttgaaagttctcttcttatctttggtggttgaatatgtcataacataaaagatgacaatttgcgtcgattttgagccaagaggagaacagatggaaattaattatcctactgttcgtctttttatatattgctttgaatatttcagaataatatttatagaaatttctataatatgcgatatattatctcttctctcccacactatggaatatataacaaacaataatttttgtagatatatttctat

SEQ ID NO: 20517 - DNA, 322 bp, Glycine max
  unsure (1)..(322): unsure at all n locations
cgagacgctnganattgaacaacggaagctctcgagaaattcanatggtcattaactttcacatggatgtccaattcaagtgcataatatttngagatgctctaaatntaacatggaagcacaagggaaattaanacggccataacctttaacaaggatgtccgattcaggccaataatatattgagacgctcgatattgaacacttatgctctcaagagaatcanattgtcatacattntcactcggatgtccgattcagacgcataatataccaacatgctcgaaataaacatacagcgcaagcanattcaacggtatac

SEQ ID NO: 20518 - DNA, 193 bp, Glycine max
  unsure (1)..(193): unsure at all n locations
aacaagtaaaagtctctcccagccaaaatttgttccacttctagaaccttagagctcctattctcatgacctattggaccaactgtatctctctctggacacaaatatggtctggtcatagtggacgaatacactagatggacatgggtcanggtcctaactcacaacgatgagtctttttgatactgtctat

SEQ ID NO: 20519 - DNA, 391 bp, Glycine max
  unsure (1)..(391): unsure at all n locations
attctggagagacananaattcttaaagcacanacactacaacttgaataccatccccatcacctattcattatttaatntccatgctattntttcccaatgcangtgacactatcattgtgaaggaaagacaagtagatcatggaaaaggaattaagacaggaatatgtactctggaatttccttcagttgtgttgttgcaacaatagcagcactgatgtntttgctaaatntcacatgctntttcttcccaaggtaacttcttggtgacanaacattgagaanaggactagctgcatgagaaatganntagtgtacattnngaaaagcatatactaatctaactcttttgatatgcaagaatagtcacactcattntctctgatcatta

SEQ ID NO: 20520 - DNA, 309 bp, Glycine max
  unsure (1)..(309): unsure at all n locations
tggttgctattgcacccctctgtttactaaaatacatccccctgccttttttgcttattctttntccgtaacgttacggaactntacgaattccgtaacgatacttgttttccttccgtaatgttacggaaccttacggattacgtaatcancccctttttggcttacggaatgttacggaacctcacgaactgtgtaacaatgcnttcctttgatttccggcatgttacggaacttcacggatcgtgcaacaatgctctctnttaacttctggcatattatggaacttcaggtattgtgcaacaatgg

SEQ ID NO: 20521 - DNA, 292 bp, Glycine max
cttaaaacgatctcactgaattagaacctgcttcttaaggccatatgcctaaattgtatgaatctctgcactacttaacttaatacgtaatcctttagatacacgcatattctgcacttttaaagcagcccagccgtagtttagcggtctgaaactagtaactgaaacagtaaacgttatcggtggcgaacacgctaacagaatatacgatgtgcctatgtcatgatatgaacacattcttgacgaaaagagtatacagatccagcaccctaaaagtgacaaaggctcttcg

SEQ ID NO: 20522 - DNA, 397 bp, Glycine max
  unsure (1)..(397): unsure at all n locations
tctctactgactaacaattctaaatgcaagttcactttcttgttctttctntgtctaacatacacattntctcaacttcatgaaaggaaacacanatctcatcttaagcatgcattcaattganaacaaagtcatacacccattntcgcanaaagataaaagtgtntcactgccatgtcatcaaaaattaagttaaactgttaaaaatgcttcaggataagcatactaactattcatatataaactaacgagaagtaaataatgtacgaaaaccataattatataatagatcaaaaagcacaaaaccagaaatcaacagggaattaaagatcctgtgatnggcctgngtgtcctgtgtctgaaacctcctctcgtcagtcaaatgtagtacaagagt

SEQ ID NO: 20523 - DNA, 327 bp, Glycine max
atgcctttagagactgtactggaagaaacagagtgacacactaagctaactgatttggcttgccagattgaatgttggtaaatatctaaaactcaataaggacgccttaacttcggtattatgtctggtatgagaacccttaacacttacaagattgataacttggagtgattttcgatgaggccctcaaagattattcacaatttcaatacgagactctgcgtgatttagctcctgtaactatggagaagctggacgtagaagtagtatgaatgtctgtacagcgttcttgttgtggacattctgcaaagtatcatcatattctct

SEQ ID NO: 20524 - DNA, 351 bp, Glycine max
  unsure (1)..(351): unsure at all n locations
ctctcngtcgttcgctcgttcgcgttcatggcggaagaaatatngagtcctggatcccctcactctctgaagaacagactcagattctctctctgcttctcgtgttgcttccctcaccagcgcgtgaggccgagaatcgttcgaagcgcgtcgctccacaacaagccacgctccaccgatttccccttcccgcaactcaaggaaaagtgctgcaacttcatcaaccgcatcggcggccgccaccgccgacgccactccgncgaattccactacgacgcactcagctacgcgctcaacttcgaagacggcgccaccgccgacgagaggtacgtggacgaactcaagagtttc

SEQ ID NO: 20525 - DNA, 135 bp, Glycine max
  unsure (1)..(135): unsure at all n locations
gatcttatgaactntgattcttctttctgaccgaatgaagtgatatctaacatctatatgcttggttctatcatgatgaacctgatccttgtgcaagcatatagcactaaggctgtcacagtagatgttaccata

SEQ ID NO: 20526 - DNA, 92 bp, Glycine max
  unsure (1)..(92): unsure at all n locations
acattatntccatgacacgcgcgcaacaatgatgattcagatactttatgcagaactggtcacacattcacctatgtggacactcaagcatc

SEQ ID NO: 20527 - DNA, 323 bp, Glycine max
  unsure (1)..(323): unsure at all n locations
taacacaccatcccagtgccacttgatgagctaccctctcgagcctatctcgtcttcagaccggtcccataacctcagattcacaatatcaacattcaatncatttgcatgaaactaccctaaccaagaaatatagggggcgaaacttgacnactataaatcacagttctatactactagacatctttgtcatcgtgcatgacgctgaattacgaggtctaacaaattagttgcgtgtacggtgaaattaacacaagcacatccggcagctgcacctttgtattgaattgtgcatgagttttgattggaagaactgtgtttca

SEQ ID NO: 20528 - DNA, 453 bp, Glycine max
  unsure (1)..(453): unsure at all n locations
tgacatctatccccacatggaanaaggccaatgtgcggacatgacattcagaggatgtggcggaacattgacattgtccgcgtatgctngacatntatggcatntccttacatgggcgcagcaatcgctntccatagtgagccagtaataacctgctctaaggatcttcctggccatagcatgcccattggcatgtgtcctcaatgaacccccgtggattccctcaatcatgtagttcgcctctttggcatctacgcatcgcatgaaggtcatgtcgtggtttcgtttgtacaggatggtaccactcacanagataccagtagccaatcttccttaacgttctttctcattgtcganaatccctggtggatattctgtgttctcgatgtactatntgatatcgaaataccacggtntcccatctcgcttntcctctntcacacaacaatgtgt

SEQ ID NO: 20529 - DNA, 629 bp, Glycine max
  unsure (1)..(629): unsure at all n locations
gtgcngctgtgatcgntcgcantngactctcaagctacacgagctcggcgcgctggatctctantcaccagctgtgatggaaggttttctcctgagctagctggctgctcaaaggtgcgaaagcttgttctccatcactgcaatctctcggatcacactcgcgcgagatattggacaccgtagttcgctcagtgtcgtcaacactcgaaagaatggtgtctatgtgctcatctactgacaattcatcatgcaccaaactgtactagatcacgctctgtgagaacatattctcacgtgctcatccatccgaagtacgaagtggtacttgagtactcgtcatgctggacttgagtgcaaaccactattcttgagctatctcctcattcctcgatatcgaacgagctgcaagacgttatctctcttaaccatctgtaaggcactttctctaacttggcaagtaccagctgtaatgctcaatacctctgacatttattgactattcctcaactttcatcgttccttaaccacttctatacatacagtgtacgtgtcacaacctggccgagccctggtggacgattccattcacctcagtgagcacgcgacgctcgctctcccctaaatcaccg

SEQ ID NO: 20530 - DNA, 359 bp, Glycine max
  unsure (1)..(359): unsure at all n locations
gttacccactataatatacatatnttatgtntatggtattcttaacattggttataattaggcttcacctctactgctgtttggtttaactaaggtgcttctcagcttggttaattgagtttaatgatgtcaattntctaccagttgtgtatgtgaacactaaagagagtctggacaattcgatntattggtctgccgaagataaagtcatactaattgaacctgccatcaccatagtcatgcttattgttaactaaatctttctacgtatgtaacttaatctgacatatattatagatatgagttgttcgtcatatatgactattatgtaccatgacaaatatgtgcattctgagtga

SEQ ID NO: 20531 - DNA, 282 bp, Glycine max
  unsure (1)..(282): unsure at all n locations
tcaatcctataccattcaggagccaatggactattatgtggaacacgtctaggaacatcatggagatcaaacttcacagtgccaataacttcatcaagtaacatattcttgtctttgaccacaacttcaagcaaagttgactgctgattntcccttgcataggcaaacactngattccattcaagatcttgtgttttctcagagtgtatggtaattcctctgaaattgcaacctttacctccacatatggatcaatgctcccagtcaaacgagctcttacaa

SEQ ID NO: 20532 - DNA, 365 bp, Glycine max
  unsure (1)..(365): unsure at all n locations
taagagctagagctagctaccatacctctctaatagctaatctcacctgcttgagatgagaaactagagcttagctacacancccctataatagctaagctcaccctcatgaaaaaatacatgagaatacaaaatagaaatccctactacaaagactactcataatgcctggagatacaaggctaaaaccctatactactagaatggccaaaatacaaagctcaaacgaatgaataatctattctaatatgtatatagataagcgggctcatacttagcccatgggctcganatctaccctaaggctcatgagaactctangaccttcctttggatctctggccagatctacgtggagtcttcta

SEQ ID NO: 20533 - DNA, 301 bp, Glycine max
  unsure (1)..(301): unsure at all n locations
ctatgactngcatcctttngagttcaaccattcccacttctgcaccatgaggtntgntacctggtgggaaaaatattattcgacccgttcgattggagacactactgccatgatctccaggcttgagagtggctntgcgcaaccaacggtcgagaatattcgctcaagccttcaagctcganggtataaattactcttgactntntaaatngatatgtattcttgccttttctaatattattactgtcacgcanagcacccatgacgaagaggagtgctgaaacgtctcgagctgacgtga

SEQ ID NO: 20534 - DNA, 192 bp, Glycine max
  unsure (1)..(192): unsure at all n locations
acattatntccatgacacanatgcaanaatgatgaattggaaactntatgcanaactggtcatgcatgcacctatgcggacactcaagtgtcaaattttatggtcatgtgatgctanggctcangattcgttttctctattttaaataacccaatgtnttcaaaatatgttcttttatcaatttgtgcattc

SEQ ID NO: 20535 - DNA, 310 bp, Glycine max
  unsure (1)..(310): unsure at all n locations
tcaaagagaagctcaagtccatagccatcanagtctaaagaagagagtatgatgaactaagggacgtcaatatggccaccgatgaagccttggaatgagaaaccaagaaggcccgaaaggaagaacacgaccaatacaagtgttgaggggctttatagggcagcaatagtgagctcaaactccgaagaggtgaaaggaatcatcacgggtcacaggcatgatcttgaaggatgagctaaaggcttgccttangtcgaaaagaaatntgtcccanaagtaagcgagactgaagggaatatgtgggccatca

SEQ ID NO: 20536 - DNA, 441 bp, Glycine max
  unsure (1)..(441): unsure at all n locations
agcttctntgagaaaacttccttgagaagctagagcttagctacacacacncctctaataactaagctcacctccttgagaagcttccttganaagattcctaaagaagctagagcttaactacacacacctctctaatagctaagctcacctccttgagatgagaagctagaacttagctacacacccnctataatagctaagctcacccncatgacaaaatacatgagaatacaaaaaaagtccatactacaaagactactcanaatgcctcgaaatacaaggctaaaactctatactactagaatggccaanatacaagacctanacgaagganaaacctattctaatatntacanagatatgcgggctgatacttagcccatgggctcaaaatctaccctgaggctcataagaacactagggccttcccttgatctc

SEQ ID NO: 20537 - DNA, 317 bp, Glycine max
  unsure (1)..(317): unsure at all n locations
aatgagggtaaattgaagcanactctcacctcacacaagtccataacatcaatctaaacttgctcaaactgaatntacacctaannatccaccgaatcanaatttgactcttcaacacccaatnttgccctagaaatggctctntgttcactttggtcatntgtttctccctctagcacagcctaacctttctcacatgtcctaaatgacatttcaagctaggaaataactcatttaacctccatttaccacagaattcagacttaaccttccaactctcaaagcctcactctntntccactcataacaccacattc

SEQ ID NO: 20538 - DNA, 378 bp, Glycine max
  unsure (1)..(378): unsure at all n locations
agtagctatatggtcatgaatgcntatcatgactgtcaaaactagctacaagtattgcgaactttgttgtacgaatagaataattattgattctaaatntacattgtttcctatagaaatcataaaatagaaatgtctctctgctatcactattttacggctgagtgcataatatattagcatctaagggaatgactacgatgacgggtagcctgtgacttgtgtatctagatgcacttgcatagggtatngattaaaataacagaaagaggtacaaagcacacaagcatcaaacttaccataatgttatactatgatatcagcaatgaatatatntcatggtccaacttaaacaagtattccattgtgactcataag

SEQ ID NO: 20539 - DNA, 226 bp, Glycine max
  unsure (1)..(226): unsure at all n locations
aagctcatacaagccttaagtataaaaccatgatatcaccttaccccttaaggaatttggagctctggaantgttntgagaataagttgcgaataagtgtggngggtatgtttcattggaagatataattcttgccatggctaatgtttattntggccatgcttgatgatacatatattgctagtcctgcttaatctcatatcgtattgtaaaagaaaatgaaaac

SEQ ID NO: 20540 - DNA, 162 bp, Glycine max
  unsure (1)..(162): unsure at all n locations
tggtatctgagaatcacttanaatgagtgagaaanattgtgtccatgaagaaaatctgagccgaggcgccttcgtaacgctntcgagacatttccgtgagtgatatcgcgaagattntccgtcgttctttgttcgttcgttgtcgttcttcagtcttcaacc

SEQ ID NO: 20541 - DNA, 321 bp, Glycine max
  unsure (1)..(321): unsure at all n locations
cctctccatcatgccagacaacagcatctatgacaggccctntatcatcatagctctaaaacatanaacagcatntccttgtcaatgtaaggaattcaagttgaacaaattctcagtgggagcacaaacacaagtataaatgtctctgctagtntgagtcattgagacgagtcatagggagaataaacatgaaattcattgttatgtgtggccaggtgtaaaaaaaaattcaacatattcatacagagacaatatctatcaattcctattccaccattatgagtgcctataatgattaaatcaaatcattggtattaccta

SEQ ID NO: 20542 - DNA, 217 bp, Glycine max
  unsure (1)..(217): unsure at all n locations
atgcacatggaactagacaaggtcattaaatcaagatcctgcttangatcaggaagggctaaagatcataaatcatggaaccttagcaaggatcataagatcatacaaaattcttaatatatgtgtgagagcataatagcatataaattcatatttctgctattaaagaatattagatgttcaatctactcttatattgatagtgattataaaaata

SEQ ID NO: 20543 - DNA, 325 bp, Glycine max
  unsure (1)..(325): unsure at all n locations
tcaagatcaagattcaagaatcaagagaaaacttaatcaagataagtactaaaaaaagtgttcanaacatcgagtagccaagaaattttcacatgatctttctaccaaagagtttactctctggtnatcgagtagccagcattggtttcaaaactgatttacaaagctgggaatcgataccataatcatgtaatcgattactaatggtttaaaatggtggatttcacattcaagagtcacaactagtgataaaaccatttcagatcattntaaacttgtgtaatcgagtacacactacttgtaatcgattaccagagtatctaaa

SEQ ID NO: 20544 - DNA, 329 bp, Glycine max
  unsure (1)..(329): unsure at all n locations
acctcctattttaatggcgtgngttaccattattggacaacctgtatgcanactcttatagaggcaatagaattaaatatctgggaagccatagaaatagggccttacattcccactatggtggtaggaagtaaaaccatagaaaagcctatggaagaatggagtgaagaagaaaagagattagtgcaatacaacttataagctaataatataattacatctgccttaggaatggataagtactttacggtatcaaattataaaagtgcaaaagacatgtgggataccctacaagtaacacatgagggcacaacanatgtaaaaagatc

SEQ ID NO: 20545 - DNA, 128 bp, Glycine max
ctcagctcgttgtcaattcagcatgcgaatggaagtcctgttccacttcctgtgaaacacataccatgggattctcgagagatcctgtgctcatacggcgcctgcaatgtatgacgtgctcgagacgt

SEQ ID NO: 20546 - DNA, 228 bp, Glycine max
  unsure (1)..(228): unsure at all n locations
gtgaacttgagtatgtctcacaagactctattcatcaaagtcaacaagtgtacacatgcttcttntatagactggtagcttcttgagaactntcttgaagaacttcttgagaaacttccttgaaagctgagcttactatcacaccctctataactaagctcacctcttgagaagctccttaagaagattctaaagaactagagctagctatacatacctctgtatagc

SEQ ID NO: 20547 - DNA, 336 bp, Glycine max
  unsure (1)..(336): unsure at all n locations
tctatgagtgaagaatattttcctatannnaataataaagttaattctatgnttgctgctatgaaatcagcgactaagaaagctcgatttacccanacaaggaaggctacaacaaccctctcatatgtgtgctcaatttaagtaatgtaatatgagacactaaccattntctacccgtagtaggcacatgacaagactctacatcacttgcaatgatgagggtgcacttggaagtcannagtgaaccttaacatggtgagtntctcacaccacctaagctagaatntctaaacaaactggctccacttaaccaataataagatgcattcacataga

SEQ ID NO: 20548 - DNA, 194 bp, Glycine max
ttcatctaagctgatgctgcagccttgagacccggtccgactaatttccttggagcgtacattatgcgagttccactctacggaacctgcttccactaacgctgcacactcctcttgccactgggtatacgagagccgcccgacccctcgacagtcgcaactgatgcaatgcgctgatcggattttcctaccat

SEQ ID NO: 20549 - DNA, 505 bp, Glycine max
  unsure (1)..(505): unsure at all n locations
tatgctatactaattctgaatgctnttagcttgtgcctctganatagtgaaatgtgtgcatgaaattcaaaaatggtgtgaacccatcagtcantttatattactggctaagaatctttgaccgtgtgctaaatatgaaagaaatgaagaatgtgaacggaagctgctaatggtgaagtgaatggagaatgagatgaacgctaactatgaaggagaggttgcatgaatgaagagaatatggtattctaaaaccccaaattccattactgnggaaatatatgtttctagtcatgttacatgttagccaaacagatggaggattaacaaaacgtacgcatagggagctgataacgatccaatacacaatatatagttaagaacctaatagtcagatatgatcataacatttatatcttaattatatcagatcatttcaatcttatatttngttctgtgccaatatatcttatgttctttactactaatgtgagtagtatcttataca

SEQ ID NO: 20550 - DNA, 582 bp, Glycine max
  unsure (1)..(582): unsure at all n locations
cggcgtaagccctggatcgttcgantnaccnncagcntgggcngatgctccantgacgactagatagagggatagagagagagatgtgtgagctcttattctattgaatacanacggaaggcaaatgcacttcgagtgttatctctcaccactctcatgcactagagccacaacatgagcatcacatgtgtcgttctatactctcagtaccctcctccaagaactcttcgtgagagaatccgtcttgatacgccttctatgacaaataccggcgcgtcaagctagagctctgatacgcacacccgttcaatactgtattggtggcctctataggccttacttaaaatctctgatggcatcactttcttcgccatcagtctatccttagtgccgtcgggagtgatctacacactcgaccaccctcaggttgtgtagcactgcaatactatatctaagtgccgtcgctcccgtctaggcctatatgctgactgtttcgtggtgcatgtggcccctcaaaattttgcgtgcgagtcgtgcttattccgaggaaatacagggctggatgagcgtctttatcgctct

SEQ ID NO: 20551 - DNA, 300 bp, Glycine max
  unsure (1)..(300): unsure at all n locations
tccttgagttctgtctctcagccacttatgatagccgccgatgatcccattactgcttccnctaagctctctgtcctttcttaacgccgcatcccatgccttgtgaactccttggagtaccctcgcgttgtggtcactgaaacctcgtgcgatgaaaggcgcgatgctttcgtctaatggcgctcctctcatggggtagccaagctgtcttatggcgagaacgnggactataataatacaaccccttggttccatcaaggtaagcattggacatccttcgcatgaagatagaatcttgat

SEQ ID NO: 20552 - DNA, 300 bp, Glycine max
  unsure (1)..(300): unsure at all n locations
acatagacttcttgcttaataagtccattgaggaacacacattctacatccatttgatacaacatcataccatgatgggcagcanaggatattaaaatgtgcattgcttctagacgagcaacatgagcaatagtttcagtcgaatctataccttcttgttgtgaataacccattgccacaagcctagcattgtccactcacaaccttacatatttcatcgagcttgtntctgaacacccactntgctccatagcatatatgccattgggaagatctacaagcttctagacatcattcttc

SEQ ID NO: 20553 - DNA, 121 bp, Glycine max
catgagaatcaaatttaagtctgagagtcacactctcagaaataactgtgtattaatacacagtatgtatcgattccagtatgaattttcaaatactccagagcacactgtcatatttttg

SEQ ID NO: 20554 - DNA, 529 bp, Glycine max
  unsure (1)..(529): unsure at all n locations
ngtaaattacgtcctgtacgtacacttaaatctcagcttgacaattactnggccttatntaactatctctgggctnggtggccactctcaacaaagtactnntgacacctactgtacgtngatttgaccaaggctgntatgggaatgttgcgacaatacttcaaaaccttatngatacattctaatangttggttgtcatgtggtcatatcaacgtccttctctatcataagccatcgtccatatttctttgaatgcgacaatccatgtgctatggtgaacttagtcacagattttctaaattgataaaaatgtctacatgagtgagctgataaatattataatacatttaattattgagtaataactgacataattgaatttaccactctcacatcttttgtgagtatgatttcataatgctcttgtgtcaccaaacattacggggagtgcacatctttacaacgatttctccgtacattaaaaacttattgctttccatggcaaatacccttactactaacgatcag

SEQ ID NO: 20555 - DNA, 356 bp, Glycine max
  unsure (1)..(356): unsure at all n locations
tgagaatgtcttatccttacnctcggaagcaaagaaaaaaggagagaaggataatntccaatcaaaggaaacaaggagaggaaagggaaatcccaatcaaagagtgcgagaaagcaaaaagataagatagaacattcccaatcaaagaatgcgagaaagataaagagaaggagaagaaggaaggaaagctcctgatcaatgatcgaaagaaaacagaagaaatgtgcagaggggatctctggaccagacaatatctaaacaaatacagaattgtcaccaaatgaacaaaagaaagaaaagganaccataacctataagtggtcttcttcctttgataccaaccaanatcctgtgcg

SEQ ID NO: 20556 - DNA, 663 bp, Glycine max
  unsure (1)..(663): unsure at all n locations
attgggcttaaattggctgcagctgtaangtgacactatagaatctcaagccttgcggatntggtcttcgccagtgaaaggatcgaagtggatctgattagatgcanatctaatcatcatactaggacgactgagagaactgatgcataataagaaggtgaggatgagggagatacccatgctgtgactgccattcctgtgcgggcaagtttgccaccaactcaacaatgtcattactcagtcaatcacagaccatcttccttactcaccagccagttatccatcgaggccatgcctgacatagaccacaaagcctgtctaccgtacatacaatgactagcgctacgcttgagctcaacctgataacaccaactaagaggactctntagcatatatcctgtagggtacaccgcgaattcagttgatatatgctatactggatcctgtgctacttgatgatcaattgatgacatagcacttccatgggacatgaacctcagttctccagaatcacttaacgcacatgtcgtgtccataaagcctggtgcttcattagcttgtttattccatcatattttgaagcttactatcacgtcggatagattangaaattgcgtgtatctgacattgttaaagtcgctcatatgtatacgtgacgtctcg

SEQ ID NO: 20557 - DNA, 430 bp, Glycine max
cttaccatgggaagaaattcaccctctctcataaggcctccttcaactgcaataacctatttcctcatgacaacaatcaaggtgccaaatgctccatgcctgtgtgccaatattgtgttacacggtgtcacatgataggttaggaaaaccactcatggctaggtttaagatatgattggccaagcaatgaagtgctttgccgaatgccaactgatagagaatgagcaattgtgcctctctttgcacaatgccatacacacaattctccaaccttggtgtccgtccttaacagaacatgcaacaagctcaaataacaatgcttggagttgttgctgcacctgcccgtcactacactagacttcaacactctcatacctcctttatgaccttacacactcttgtctgataccacacactcatcgttcacact

SEQ ID NO: 20558 - DNA, 477 bp, Glycine max
  unsure (1)..(477): unsure at all n locations
agcttgtgcaatcaaatcactcctacattntatctctagcatgcattgtatgttggtctcgtcctttgtcacgggaagccggaaggtccatatcaccttcttaattgtacacatggggcactacgcccccaaatgcgcaagtaagaagagataattttccgggctctcgtgtccgtaaaatgcattcatatcatgcatcgcataagcatctcttcataacatcataatggacatatcctgcatttgtccgttatcatattccagcctcacattttgcatgagtcatggcatcatcatgcatatgcgttcaacaaactttttgatctgcaaaatcgcataccatttgttttcatgtntgctcatccttgcgttctcctctacaaaacaaaaacaaaaaagggggaagcgtgaaacttcacactacattcttagtttcatgtgttaggcaccacgagccaaccatgttgggatcataaa

SEQ ID NO: 20559 - DNA, 833 bp, Glycine max
  unsure (1)..(833): unsure at all n locations
tgtannccttgagggnccaggccattggtaaagantcgtccgggggnaanttnntaacattaaccctcgacatgagattttttcgactcgcaccactaatcccaccgggggtaacaaaaatatatggctcacctcgcccacggcggaatatagtttattgaaaaaatatcccgtcgagttccgtctctgttcattgtcccgatattcctctgaaatactgaactgcttagactttatccgttgcatccatgttccgctcatagcccggcatcctcccgaaatctcgactctaacaaatcagatgttgatcatcttatttatcactctttcactttcctcatcctccctcattctttctattctactcttttctccggggggaggggggcgttttctttctccacttacatcatcattccctattctcctcaactttctccatctcacctctctcacttccatcactctttttcttctttctctccttattcatatattatcttctgtcccttatgcctaccctcctcttcaacttaggtgccactctctcatcttctgtaatcctaatcctccctactcacccttctttttcctcccactttcccttctctacctcttactaaatcctttatcactccgcttctcattgtgttcctaactacatcgtttggcttcctatatattatacatcttcgttccgtggaacccatactcgtcctatctactccctatcacaatatcccacgttgttcccttacaaccatctgtttgttcctactttcttttattgccaatctagccctggtatctactcctacacttttcttcacccg

SEQ ID NO: 20560 - DNA, 410 bp, Glycine max
tccgtcatatgtggtactaggtggcgatcggtcgatggcgaaaatcaactctcccacatccacataacagacatgaacccaccatccccagttgcccaccttcaactgagctcacgtactcctacgtagccattatcctcgatcctttcagcaccacgtccccatcatgccctccaagcttccacaatatgcaagccatgcaattccaactatcatgaactaccctaaaccaagaaaacagggcagaggcagagaactctgcccaaaacacattcacatattatagcattccttactgaaataccccacgaacattctctgtgtatcaattcgttaacctgtggatcgacttgaaaattgtactataggttcctagtacataaatctacaagttgaccgttgggatctac

SEQ ID NO: 20561 - DNA, 257 bp, Glycine max
agaggcaaatatgattatcctgctttgatgaatgcgaaaactagggcccataagaacggtgagaatgagggagaaacccatgttgtgactaccgttccaatacagccatgtttgccaccaatccaacaatgttattactgagccaataacaaccctctttcttacccaccacccaggtattcacaaagatcatccctaaaataaccaccaaacccaccttccacacaaccaatgctaaacaccaccttttgcacaaa

SEQ ID NO: 20562 - DNA, 469 bp, Glycine max
gtcacctgcggcatgcaagcttatttaacatgccccatatatatttgcaagcgcttactgttaaaaaacaacttatatatatagtttcatgttgtgattgatgaccatgatttgggttacaatctaaaaaaataaatgatcttagaatcaatcatgcataaatataattatgaattaaaattattacatgatatgcacattaacaaaaccatacataatatgattatagtgatcttattcagttcaaggatatgaagaatatatgtgatttaaacaaaacataaaaataaaaccatatgtaaaaagaaaagaaaacttttttgactgcaaaaaaatgatcctcaacacattcagaccgaataagagaaagcactttgtaacatacaataacaaaagaacgtctgcactaccagtaaaaaataactatctattctggttgttataatattaaataatgtatgacataaca

SEQ ID NO: 20563 - DNA, 79 bp, Glycine max
tcaccaaattttctcattgttacacctcatctcttcatatgccacccacaaaatgacattatgagtcacccttttctct

SEQ ID NO: 20564 - DNA, 398 bp, Glycine max
  unsure (1)..(398): unsure at all n locations
aaaattccttcatctgacttagcatcaaattttcctatgttttcttttccattgtttaatacaaaacacttgcaaccaaagacatgaagatgtgagatgtatggtttcctaccattgaacaattcatatggagttttctttaagatgggccttattaaagccctattcatgatgtaacatgcagtattaacggcttcagcccaaaaatattttggaagaggaatatcattcattaaggttctagcaatttcttccgaagacctatttttcctttcaacaactctattttgtagaggggttctaggtgcannaaaattatgtgcaatgccatgctattcacaaaataaatcanattctttattttcaaactcaccctcctgatcactcctaatagatat

SEQ ID NO: 20565 - DNA, 322 bp, Glycine max
  unsure (1)..(322): unsure at all n locations
gccttatttttggagtttcaactgcctcgcttagcgtgttgactcgctaagcgagcacaccatgacatttgagttntcacactcatgcgcttagcgggaaaactcgctcagcccaatgccaaaaaaattgaaattccagaaaaggaattgggcttagcgcgacaagtcgcgcttatcaagttctgtagctatgattggcctgtaactctcgcttagcgggccatgggccggcttagagaattatcatgctccctgatgttgtagtgggttgcacttagcacattcttctcgcttagtgcaattccaaacccaaaagttattt

SEQ ID NO: 20566 - DNA, 451 bp, Glycine max
  unsure (1)..(451): unsure at all n locations
agcttgtgctcacttccncggccggtaggtgccgtaattgctatttagctatttttcccttaacaatcacaaccacaaccatgtgagtgcgtactttgattgattgaatatgtgggtgtgcagtgaggctgagatatacctgtttggaggtttcattacttcttggaaagttcccagtggtaaggacctcctctttgttcgccccgacgctgttttcaatgggaacaaaccgataagggtagcttcttctcttctctttacttcatatctttaatctttaattactcttttaagtctctccacctatgctgttttcatccactatgcaaaccaattcttttttacgttgtaatttattaattctggatcctccagacactgattcantttatatatttgggcagtggtggtgttccgcattgttttccacagtttggtcctggtccaattc

SEQ ID NO: 20567 - DNA, 391 bp, Glycine max
ctcatcgtctctcacagtctttagatgtgggagccaatccaatccttgtgttcggactctcagccacttatgatagccaccgatgatcccattactgcttcccctaagctctctgtcctttcttcatgccgcatcccatgccttgcgaacttcttggagtacctttgcattggggtcactgaaaccccgtgtaatgaaaggcatgatgctttcgtctaatggcgctcctctcatggggtagccaagctgtcttatggcgaggacgggattataattaatacaaccccatgttcccatccagggaacattcggacatccttcgcatgaagatacaatcctgattcttccttccttctagcgagggaaccaattaacagacgcccctccatgc

SEQ ID NO: 20568 - DNA, 236 bp, Glycine max
agctggagttgctgcacatgatgtccaacgttatgtcaaagaataagatcgggctgcacaatgcacaacgcaagataaagtgtcaaatgaagaattgaagctgcaggattcacgatgtcggatacaatgtccaggacatcctgcctgaaaatactggaattgctaaaagcattgaagctgcaagatccacgatgtcggatacaatgttcaggacatcctgcccgaaaatactggag

SEQ ID NO: 20569 - DNA, 337 bp, Glycine max
agcttgagatgaggaagtgttgaagggtgaaacttcctgcttttattgttgaccacagagtggtacctggagatatgtcgtgggggtcaggagaccttggggacgtcaggtggggtgctattgcccaaaaccaatcttgaccaatcccgacccaacccgggcatagtcggtcagtgagaacctgtgatgtacctaaacaggcgagctcctggcagtcaacagataaaaggaacaaagaccacaaagcaaggaggctggtggtggctggccacctgtgacatttgtgtaatatgtggattatggcctctggtaatcgattaccaaggggtgggtaatc

SEQ ID NO: 20570 - DNA, 1013 bp, Glycine max
  unsure (1)..(1013): unsure at all n locations
aaaatgcgcncctcttntantcacactatanaatactcaaacttgaagtgaggaagtgtggaagggtgagactttcttcttttattctgtgaccacagagtggtacctggagatatttctcgggggtcaagagaccctgtggacgtcaagtggggtgctattgtccaaaaacaaacttgaccaatccccacccaattcgggcataattagtcagtgcgaacctgtgatgtacctaaacaagcgagctccttgcagtccaccgattaaagaacaaagaccaccaaaccaagaagcctgtgtggtggctgggcaactattgagcttgagtgaaatttgggatatgggctctgggtatccaataccaagggttgggtgatcgattacaaagccttaaagtgaagaccaacaagtaagattgtctcttggtatctattacaaaccaagtgtaatcgattaccacgcctcaaaaatggacaacgaagtctagatagcttcttgtnattgattaccaaagggtgtantctattccatccttaaaagatgaactggatattgagggggcctctgtattattaccactgtgtgtatcaattccaaagacagccctgcgatcattacctttttgtattttaccacgcatttgcagttcatgtctgactgtattaaattggcgctgtaagataccaggcgtggatgattaccacacaaaagctgggatacttttattatgcgagttggaccctgtgctatcgcttaacctccgaaaaagacccctctttcttcttgtattagcagcgcctttatcctcacaatgaatgaagcttaacgtttaatacatctctggctctacccacttgtggattaccaaactgttgttggatgtgagacgaggtgacttgatctagtattttctgcaattctattaataatntctatgctcttattcactcctactcctcctattctctctcactattatcacctcttctattattctttctaaattctcattt

SEQ ID NO: 20571 - DNA, 287 bp, Glycine max
gagcaaattcaaacgacaataacttttgactcggatgtccgattgtgtcctgtaatatatcgagacactcgtaattggaaacagaagctctgagcaaattcaaacgacaataactttttactcggatgtccgattgaatcccgtaatatatcgagacgctattaattgaaaatagaagctctgagcaaattcagacggcaataacttttaactcgggtgtgcgattgtgtctcgtagtatatcgagacgctcggaattgaaaactgaagctctgagagaaatcaaac

SEQ ID NO: 20572 - DNA, 122 bp, Glycine max
  unsure (1)..(122): unsure at all n locations
tcgtctcgatatactgcgggacacaatcggacacccgagttaaaagttattgtcgtntgaattggctcagagcttctgttttcaactacgagcgtctcgatatactaccggacacaatcgga

SEQ ID NO: 20573 - DNA, 317 bp, Glycine max
agcttcatgtaacccagtaaattagcatggctatacctctcctgcgtatatgatgaccaattgtgttgatgttaatacatttccaaagcaatcagattaagatcatttgtagttaactgcaacgttattaacaaatctgcaagttgtgatagattcacgacatctactttttgcataattacatccataaaaaaattcacctcagtgttatcttgctaagctcgcaacatgagtggcttagatatggtttatctactgcgacttcactttaagactacatgtgctagatagttgttgagcgccaaattatattaaca

SEQ ID NO: 20574 - DNA, 283 bp, Glycine max
tagaagtttagcccaatagtgttcatctattctgttgccgactgcagataatttgcagcagaatgcgggaaaattggatttcctatgaagatgtatttcagtggttatattttttctgaccattcaatgcggtccagaatgcgggattccttttgtacaataagagttgtttctcaatatattacataatattttgaatcttcattaacttgctactcctagaacttatttagcatgttcttcaatatgcatgaggttatcgggtatttctgtatatcatgtt

SEQ ID NO: 20575 - DNA, 202 bp, Glycine max
  unsure (1)..(202): unsure at all n locations
atgatcttgtagtattatatcgtgatttattcaatacgactgatgatgtaactctattagcatatataatccataatagaaatggctgtttgtgttcgtgaagaggtanatacaattataataaaatagttagataatgtgtttatgtgtgtgggttatgagaggtaattgtgatactttatacatgcatgtgtttgttcaa

SEQ ID NO: 20576 - DNA, 912 bp, Glycine max
  unsure (1)..(912): unsure at all n locations
actattgattgactgcatccctcccccccagtggcattgggaccaagactgcaagactattggacctcagatgcatgagacggtgctatggttctcatgaaccttatgatagattctgggcccaagggcttgatataaaccctcttatctatgacatcatacactagaagatgattattctttggaccttgtgtttagggctcataatgcacgtgagagaccttatatacgtatgattttacaagccttgtattatatggcacctacactagactttggtatacggatacctttggtatgtcatcagcaataaactgaatattagtgggctgtgtgggataagacttatttgatttggagcagcgcattccactatactatagagggagaggtgagctattgcttgctcggctcgtggcacatcaatactcaccgtttgtgcatgtcgtcatgctttcatgtctcatgcacctatacactctctacggacatcttggactaatcattgattattggctgaccctacttaactcactattctgattaggaatcttgcccaaactcgtttcctaatcaatcttaatcctgtgaagttggtaaaactaagatgactgattttgcggacataagcataaatagacctgggtgcattttacttttcctataaatatgtcgggttgaactttgagccaaaatggcttttctctcccttactttttcatctaacccttgctggtttatgggctcttgtgtattttctgaagagttcactcttctcttactccgtgcctgactcaagcgagactcttgagaaatagcgctggtcatgcgctctcagaaatttcgtaggtacctacaaacttctcctggtaaagcacattgagacactccgctttggggaganacctggtc

SEQ ID NO: 20577 - DNA, 1032 bp, Glycine max
  unsure (1)..(1032): unsure at all n locations
aaggtgacgcctatctttccttcaagagacactcaancatcttaagcctagaagtctttgtatgaggaaagcctcaccttctatatacaaggcttgttcaccaacgnggcccttactggaaacaagagccaccttacatattccaagcgcacgtcctctccagcttgctcacttattaacaccctacctgccttcatagttctttgatgaaagacctggcatcctattcatcactctataaaaaatgtggcatcaaatttgaatatcacgttccataccacgaagcccatttccacacctcttctagaaatataaaatagaggaatctttatacttgtgtttcagtattgtcatgccaatcgcaagcattgaaatctcattctacataattggatgcaaaaaaccgttcttttatgagacatgagatgtcattctcctggaaccacgtttcctaacctcaacaacaatacgatgaaagccctgacaatatctgtatttctctatctanggtgcgttaggatattatctgaacttatgtgcccgacgactcttggggggatggagccatgctgcatcagtgatanagtctttgaacccgtccattatgctaaatcatgtcatggttttcttgccgacatatccaggctgtactgggacttaaaattttattcggctgtatcaatctaagctggttaccgccacccagttatcaagaatatctttgttggtttcttgacttctacttggcccaacaaactgcccctatggacatttgctcttatcctaagggggacgcaaacacacgtgttaataaccacgaaaaattgtcttctttgattatagaagactgctctatagctcaattgtacaagggaccctcgttctgtacacagcaaatcgttcctatttcattgttttatctgttcacatatagctctagagaagtggtcggaaaaaacataccatctctccttatataatctcttacacaactccaccgagccctcttgttgttctgcatctcttcttccg

SEQ ID NO: 20578 - DNA, 293 bp, Glycine max
  unsure (1)..(293): unsure at all n locations
agcttangacaaaccaacttcttagaatgcacacaaaanacaaaagcataacaagatatcatgctgaaccagacatctatctattaagaattaagctgttgtaaatgttaataaccaattcttccaaaagatagacctttctgtatcaaattctccaaaactatacatataaaccaaaagtaggtgaatgaattacctaatggatgttcattgaatacaatatcatcaccaacctcaataagctaggactaatttgatactcctactgcaatattcatggaagaaataaggag

SEQ ID NO: 20579 - DNA, 333 bp, Glycine max
  unsure (1)..(333): unsure at all n locations
atgactctgatgatgagaatacttctgaggagcaaacaaatgaatctgagtctgtcaataccacttgcttggatagggagaagaatgacattactaaagccagtaaatctaatactggtaaagtgtgtctctttacttttgaatggttagaacacaatccttcataagaggagcttncaaggagcagcatgggttctagtancctatctgctgcctccaagggaccaaagacagaattcttgagtaacacactcanaagagatggtatgaagtgcccatcactccagagaatggtatctgacaacaaaaatgatctagtccctgttacaaaaa

SEQ ID NO: 20580 - DNA, 434 bp, Glycine max
  unsure (1)..(434): unsure at all n locations
agcttgaagagtggactctctccatgaggaaaggatgtgcattaaatgcctccaacggtcacattcatcatatgaagaccaagtgaagaaatctatttgttgtaagacaatagataccaagcattaaatgtctccaacgactacattcatcatatgaagatcaagtgaagaaatctatctattataagacaacatacacttgaagatgatgtctatataaaccatttgaagattcgaagaattaatcttgcgaaaaacattcattattctttntgcacaaagccttttgtatattcttggtaagttagataaaactatcaaaacaccttgaatatattgagagaaaaagactaagtattaatcgtatatatgtctctaagacgattctagatttagtctctgtgcaaacttaaattacgaatctcttctgattt

SEQ ID NO: 20581 - DNA, 329 bp, Glycine max
ccttacttgaatcttatgccccaacactatttcttcttgaaccatgaaatggcatttcttccaattgagaactagattggactcttcacatctctttaatactctttcaatatttgataagcacccttcaaaagatggcccaaaaatagagaaatcgtccatgaaaacttcaatgcatttttccaccatatcagaaaaaatagccatcatacacctctgaaatgtagctggggcattgcatagaccaaaaggcatgcactgatatgcgaatacaccaaaagggtaggtgaaagctgtcttctcttgatctttgggatctacaacaatct

SEQ ID NO: 20582 - DNA, 481 bp, Glycine max
  unsure (1)..(481): unsure at all n locations
agtcacctgcaagcatgcaagcttcttaaatatgagagataatgtttatcttcaaatatatagataaaaagataaaattattttaaatcaaacctctcattttttgtttgaaaagatctaaattcatatctctttaacattataattacaaacatccacatccgaataaagaagatcagacacaaatgataaaaaagttcaagacttatttctaaacttgaaaagtaaaaaaatgttttattctttagaattacactcatcataaaattgatagttgatacacaaatattaatgtggatctataaaattttcacattattaaaagaaaatttttgttggtttaagaacgcacgtgcatttggatatacaaattnttttgtatntataatgtttgcagcatattttaaatggagattataattttgtattgaaaggatccgaaacactcttatttaactatcatccttcgcatataattcat

SEQ ID NO: 20583 - DNA, 454 bp, Glycine max
  unsure (1)..(454): unsure at all n locations
actctcttggtggcgaagctncttcttccatggcttattccctagtggatggcgtctcctctcacctcttctcctttgtcttccactgcatctccatggtggaaaatcaccattgaaggacctcattgaagctcaaagatccagcctccataaaagctccacaagcaagcttccatcagagagggtagacacaacaatattggaacaattgccggcattgcttgatgtgcgagccatcttgtccttgccttcaacaaaaaacccttttcatgtcttggatggtaaagtaccttgcctttattgtgcctgtctctgtataactatgacttctctgattgtgtgatatgttttttctatctctataagaataatggatgactttgtgtggtggcctttagtgaagcacgtcatacttgtagatggtgacgtgccgccttcccagtcaatgtcaatg

SEQ ID NO: 20584 - DNA, 433 bp, Glycine max
  unsure (1)..(433): unsure at all n locations
agtcacctgcagcatgcaagcttcacttgcctaattnttcttcatcccagctcctaactgcggtggcagtcttcattgcaatgcctagtttgtggatcacagacctttcttccatatctttcctttcaagtgttggcattctcatgtctctactcattttcctgtgtgtagcagccactgcactcttaggacatgtccaatctaatcattccatacctgtcctccacctccataatattccatcagtatctggcctctacgttttcggctatggaggacatattgtcttccctgaattatatacagccatgagagacccctcccaatntacaaaggtacccaacttcatgaaattttataaactgaattatatgcttaatcaaaactntcaataaatataaattgatccggacagcacatcatatttatgttt

SEQ ID NO: 20585 - DNA, 549 bp, Glycine max
  unsure (1)..(549): unsure at all n locations
gtcacctgcggcatgcaagctntcaccccataattccnnccaaattgggcaaatttgctttgaactcaaaatttccttttatgaatgatgctctcctacaacctaagataaggtagaaggagataaactatacaggctcaaggttcaatcaaacaattatactttcagctcaaaatggtgcaagggataaatcaatcatgcacgaggtaagctttttagctaagtggctatcttcaatccaaacatggccttcatcatctttaatttcacgcattcattccatactcaaagattcatgcaaaaatcattactcaatgttagtcgttctctcacaattaaagatcacactctcaccgggttacggctaatgcgttccttcacaatcaacctgacaaaccaactaacattntcattcatgatcctcattccatgttctttctcttctaatgattgcatgctcattcaaggcacatgatctacgcattccaattcactcanatcacgcaatngatcaattcaaaccaatcacaaacactaaattccgaaatc

SEQ ID NO: 20586 - DNA, 397 bp, Glycine max
  unsure (1)..(397): unsure at all n locations
gtcacctgaggcatgcaagctntgagccaaagtcccaactcaccattaaacttttccctcaaaaggaaacaaaaaaaaaaggagaaagaggaaaggagaaaaggagaaaattcccaatcaaagagtgggagaaagcaaaaaaaaagaaaagaaggaaagttcccaatcaaagagtgggagaaagcaaaaaagaaaagaaggaaaattcccaaatcaaagagtaggaagaagaaaagaaaggaaagaaaattcccgatcaatgatcgaaagaaaacagaagaaatatgcataaaggtcttttagaccagaccacatctgaacaaatacagagttactaccaagtagacacaaaagaagggggggaaaaccatgacctgaagtggtcctcttcctttga

SEQ ID NO: 20587 - DNA, 414 bp, Glycine max
  unsure (1)..(414): unsure at all n locations
tacccatcacatgtggtactaggtggcggtcgggcgatggtgcacaacaagttttcccacatccacaatgcgcgcataaacccaccatcccctgttgcccacctccaactgagctcacgtactcccacgtagcccatatcctcgtttctctcaacaccgggtccccatcaatcctcccaagcttccacagcatccaagcaaaacaacattcaaacagcacaagctatcacagccaagcaaaacagagcataggcagagaactctgctcaacacatcaaccaaaatcacagcttttctcacttaaagaccccagtaacaattccttcgatccaattcgttaaccgttggatcgactccanaattttactggaagtctctagtacataagcctacatttgaccggtgggatctact

SEQ ID NO: 20588 - DNA, 237 bp, Glycine max
  unsure (1)..(237): unsure at all n locations
tcttaatgtctttagatgttactctctcgttgacatcttttgtcttgaatggaattgccatgacaggtttattgctactgtctttgatatttcggagtagatattgtgttgcgggagggaattccaattggattaactcaccatccttcacttgccacattgttatgacgtctgatgttggatcacctatgatgtcttgnttccaagggtaatctatctcctttctgatggcataag

SEQ ID NO: 20589 - DNA, 473 bp, Glycine max
  unsure (1)..(473): unsure at all n locations
tctgagtcacctgccgcatgcaagcttgtgtggaatcgacaagcatggacaaaaaggaatcttcaagtgacgtgacgaggaatccgtggggtagctcactataggtaaggggagtctattataaaatctaccattctaacaccatagttaggattaaggaacctagctatgaagatatctgcctgtccttgtgcatgctgatttttcttctaagaaaattacgttataactagtgggatgcgatatatatattgtgatgaatgatatagttttggctgactgaaagctgtgcgtgaggaaatgatattgatgtgtttgtatgaattgttgttgatgttactattgacgattntaattgatatgcgaagataatgatgattatgatgatatgtgattgagatgacagtgctaataaagaccatgtcgacatgaattgttatcattgatgaatatgtgaatctganctgatgttg

SEQ ID NO: 20590 - DNA, 312 bp, Glycine max
tcaaacagcacaagctatcacagccaagcaaaacagagcaaaggcagaaaactctgctcaacacatcaaccaaaatcacagcttttctcacttaaagaccccagtaacaattccttcgatccaattcgttaaccgttggatcgacttcaaaattttactggaagtctatagtgtataagcctacattgtgaccggtgggatctactagcaaacatccagaactcattctgcactagactttccacagcccaccacacacaagcatttttctgcacttgtgcaaaatcctgctgcacaatttcacagcaaaaa

SEQ ID NO: 20591 - DNA, 294 bp, Glycine max
agcttggagttgggtagaagaggaatttggtggtcatgtgggcgcactagaggtaagccttgaggttctttaacaatgggggagaagccttggagtagaggttggacctcacgtggaaatatggtgaactcgatgtttggtttacgtgtggattgcgggtttgggtttggggatacgtcttgctcacaataagaaatgaggtgtaagaatgcaataaactcctgtcggatgatactttatattggcaacagtgccaatatgtcttgctgcctatatcgaatggaaccttttgtg

SEQ ID NO: 20592 - DNA, 309 bp, Glycine max
agcttggcacttgttgcatttcctcatgtgaacacaacaatcattctccattgtgatccaataatacccagctctcagaacctttcggcccatggtatgcccattgacataggttccagaggatccttcatgaaccttcgctagtatctactcgggctcggctgcattcacacacctgagcaataccatatcatggttccttttatataggacatcctcgatcagaaggaaactggtcaccaacctgcgtaatctcctctcatcattgtcagaggccccaggcgggtattccttgtccttgatgtatcg

SEQ ID NO: 20593 - DNA, 423 bp, Glycine max
  unsure (1)..(423): unsure at all n locations
agcttancatttttcctctcaaaagtcaaccaccacccgatacttctacgcaccgcatgatatgcgttggtcatgtgtttggaagtcattttgttcaggtccattgaaaattcgtttactcaaatattttcaattagtcaataagttgggttgttcgtttaacttattattgttatttcacttacaacaggtttatctcatttgtcccttaccgcctatggtgttgttgtggtcaagcaattcatatcctcaggcaaaacagtggccaactgcatacgtacgtagaatgcaacactacttaagcctaatgacaattaaaacaatgcacgtagacctaagcaaacactgaagttgtaacatttatgtatctgtatttacaattggatttgtgttgatgtaacatgttagtattgaaatactaat

SEQ ID NO: 20594 - DNA, 874 bp, Glycine max
  unsure (1)..(874): unsure at all n locations
cggtgtctagcctgcactggcttcggcncgggaccctcagagtgagcttgcaggatgctgctttaacaagagtctgtacaataagcatctttaaggatgaactcacaaacccccgtcttattcttagtccgtccccgatattaaagagaagagtccccaacctggatttgaagcccctcgatgaccgccttgcgatgcgatgtgcttctttacaatgggcgagtgaggcgaagccgagctatgttgagctaaaaggttatgaaggagaaagatggcacttgaggagagagaaagtgtctaaaatgggcggctgagtgaaaaaaaaaacttttggtataatacatgtgatcctttttttatatatatgaatcatgcccatgctcattgaggagcaaaagggccacttacctttgctgtaccctctcgccacaagtggaaaactacttgaacgctaaatcagctgggtggtgcgtttttggtcagtcctgcgttcttgctcgcgggcagtttcaagcagcatatttataaaacctagatagacccgacgtggcagagtggttcttaattttatcccaccaacgagatttaactatactagacttaccaaccccagttgatctttctcatagcaaccggcgttgccccttcattctcatgctttgtgaaccgagtaacttactgttggttgttttccctaccgtccgaccccgggaattatctttcctcatcctgccttcttcaagaccacctaccgcgttgttggtcgtctccacattattacatcggttcagtgctgtcttatttacctacgcgctctgaccagcggtcttgacctgctgcctacctatcttatgtgcgcctctgtccgttcccc

SEQ ID NO: 20595 - DNA, 185 bp, Glycine max
gcgaagagggtggaattcctagagcaattcccttatgttatcaaacataaaaagggaaaaggtaatattgtagccgatgctctttctcggcgtcatgcattactttctatgctcgaaacaaaattgattggtcttgaatgtttgaaagcatgtatgaaaatgatgaaacttttggagaaattttt

SEQ ID NO: 20596 - DNA, 929 bp, Glycine max
  unsure (1)..(929): unsure at all n locations
cggtgggttcctttaccngngctccgatacagtcgatcctctagagtgcacctgtcagactgctagctggccgcctagctcacacgcgagagcaatgttgcttcctcatgactcacatcctcttggaggaaacttatggagggaccaagagggcctggatggtatttgcaccccccatatcactaagagcagccacttcttgtttctgtggtgattgtttttccgtaacgcacgaagctgcaccaatctgtggaatgatgtctattatagcattcgcgagagatacataaacgtacgtgataatgcgatctataatttatcccgtaataacgnagagacgcagactaactgttcgcgacactttaccgtctttgatatccgtcacatagagaagtctcggattgggctgcctgctccatttgattacggaactgcacggacttattcattgcgcgaccaagacggcagtgtttcaagcgtctataaaagtgtgataatcatatcatgcccgacaaattaagatgcaggcgccctatttctacctatcgcgaaataagagagcagagagacgcttttcggcggctgccttcggagacataatgattatactctgggtttctgcgaagaaggcacaactccagaaccactgttccttgccattccttttgggaggacgctggaaacacaaaccggtcgccccaaggttggtgaaaggggacttaccccatcattatacgtgccgaatgaaatggggcgcctagcccctttgggggaagctgcctcccaatgggcaaggccgcttttgctttgttttttagggtttgagtgtggggactaccaaaaagcccgtcctcagggggaaatacttaccctcgggggaaggggtgagagtggttctcagttctccactaaaacacgaaatacccccg

SEQ ID NO: 20597 - DNA, 338 bp, Glycine max
  unsure (1)..(338): unsure at all n locations
agtcacctgcagcatgcaagcttcatgatgatgaatcaagttgattcaagtagttgttgatgatgacaaggatgatgacaaacagcccagcgaatgatttcaagattaagtcaacaagttcaagatcaagagtaatttcaagtttcataagaggaaatccagaagaatcacgaatcaagagaagtttgatttccagattcgagagaagatgaattcaagattcaagagaagaaatcaagaggacttcacaaggggagtgttgaaaagatttttcaaagaacaaacatagcacactnttgttttttcagaagagtttttgtcaaaatttgtctaagtac

SEQ ID NO: 20598 - DNA, 865 bp, Glycine max
gagtccatcgttggcctctggatcacagctggagggtgcgcccccatctgtatagaggaaccggggggtggtgccctcattgtcgtaagtgatctctccgccaatgaagaggcacctcaactgtcaagtgtcttcaaccttgggcgtcttatttttaaagatacttgccccccttttgcgcatgttctggggggctttcttccccacaatttgtctgacactgcttactaagccaccacttggacctccacaattgaccccgaaaggtcctggtggtggccacgaaatagctccccgatagaactcttttgatggaatgttttcaaatcctccaatattgggtatccccatttccgggacacattttcaaaagtttttgggaaaaatccctcgccttcttcaaacccttcccccgatgggagtcactgtgcctttaccccacttcggtggacggcgtgtttatatcctttcgccgcgctttctcatgatcactccctttttcctccccacgatcactcttttgaatctatagtccttgttagacccgccctcacgtatgtgggcaatcccagcattctcccgtttaaccacgactttgcactttttgtggggcgatcttagcccggtctacaagcccacgtgggttggatcagctcggtggtattttctttcataccccctcttgcgcttgtaaccctaagcggagggtgagaacctcccgggcgttcttcacttctaatgtacctcacccttatccagtaggactagtcccttttggctcccttattgcactatccaagctcgcctcacttatgtctcctctaagatacattccctccccgctcgtctctactatcgtagtccg

SEQ ID NO: 20599 - DNA, 430 bp, Glycine max
attcaaaattctaatagttgttataaacagtttcaactgctggtaatcgattacaagccttgtgtaatcgattacatgctttcaaaaatatttaaaaacatttcaaaaagcattttggccactggtaatcgattacatcctcgggtaatcgattagcagagagtaaataccatattttaaaatttcaaacaagcatcctttggccaaacctttgcatcatcaattagtgaatgctttctaagactcttaagaactaacatcaacatttatcttggatttcttggagtcttgtcttggatcaaacacgagaagcgtgtttctttggcatcatcaaaacttcatgatatatttgcttctacaggatttagtccctaaacctgctctcacaagccaatcgaaaccaaatgagcatttcaaaacaagcttgatg

SEQ ID NO: 20600 - DNA, 389 bp, Glycine max
  unsure (1)..(389): unsure at all n locations
acttatatcatattaacatgctaggctaacaggtcaagttagacttttaaataggtcagatcagtcttaaaaataaagtctatggcaagtaacatgttaagctcacgccttgaattttttaacaaactagacctatttaacaaaagccttgtttgacctaacctattttcacccctagttgtgataaagatctaactactacctagttgtgtgccatttatgttgtaaaaaatttgaaaattataacgtagatgcaataagttggtattgggctcctttatttaatcttatttttttataaaaaacattttttagtaaataaataattntctatcttttaatgtggttatctacaatttcnttttaaaacaacgctatttttgttacct

SEQ ID NO: 20601 - DNA, 393 bp, Glycine max
  unsure (1)..(393): unsure at all n locations
agcttcanacttttgagttgaccttcaatcaaatgcaacaattattctatttatccatgctagacatcatcatgcaagagatggatattatgaccaaaagtgttcaaattggtattattgaattatacctcctagaattgttatcccttgaccctggattttctgaaaaccaatacaccacactgctgcaccaccctgtaacatagtttcaccatagcatttagtgagatacatagagtatataaaaattgaactataatttaccctgaaatatctatgagacgtgtctaaaatgttctcaacactttaaggtatcagatttcaattgaaaaatgacatgtaatgagaaatggaagaaaagttgtcattntttttactgataatgcactcaaa

SEQ ID NO: 20602 - DNA, 401 bp, Glycine max
ttaagtcacctgcggcatgcaagcttgagaatggagaattgcactaagcaatcactacgcatagctctcaactcgaaggtggaggacacatgaacgaaaacacaattcatggggctccgaaaaaggggttgagaatggagaattacactaagcaatcactactcatagctccaaactcgaaggtggaggacacatgaacgataacgcaattcatggggctccgaaaagattgagaatggagaattgcactacgcaatcactacgcatagctacaaacgcgaaggtggaggacacatgaatgaaaacgcaattcatggcgctccgaaaagattgagaatggagaattgcactaaacaatcactacgcatagcttcaaactcgaaggtggaggacacatgaat

SEQ ID NO: 20603 - DNA, 460 bp, Glycine max
  unsure (1)..(460): unsure at all n locations
gtttctaactctcgaactgccgagtaaccctcgtttccggtgctaagcactttctattctgtatcaggattcaggagtctctgatgttntagtatagtactattacaactctattacgcgcctttnttttccttaaccatgccttgccatcttttcatgattcgcataagtgtgaagattgaatttttgcatagaatattacctttccaatgttccttgtctccactattagaaaaatcccagatgctataactactttttgctcaaattcctttgcaagacaaggcatatgaactttactacaggtagattgggataaaaaaacgcttttgaagatgtcttaccacgtaccattggtcgctgtctttcaatgttagtggtctatcggggtatcccgtaccaaaatatggactcatcttcgaanacgtgtgtacttttgtatagtctacaaatctttaac

SEQ ID NO: 20604 - DNA, 418 bp, Glycine max
  unsure (1)..(418): unsure at all n locations
tctgagtcagctgcggcatgaagcttctccccaattntctataacagggggagaagtgaagtgaataagggttcagccccttaggcacttctctctctttcgaatttgctaggaaaaattgtttccgtgaagaaaatctaagccgaggcgcttccgaaacgtttccgtaacgtttccgtgaggaatttcgcgaaggtttcgaccgttcttcgacgttcttcattcgttcttcatcgtccttcgatcttcaacgggtaagtacctcgaaccaagcctctcgattcattcaatgtacccgtggtggtccacattgtgtttcgtgtatttttattctcgtttcatttactttttataccccctcttgacgtgcttaagccattntatttaagtcatttctcgcttaacctaaaaataaaat

SEQ ID NO: 20605 - DNA, 525 bp, Glycine max
  unsure (1)..(525): unsure at all n locations
gcttgtcctaagctctctntatagtaggagggaatgtgcctcttcctaagggcactcttaagatcattccaatactctactggaggatccccatgaatccttcgttccctaacaagggaagtccaccaatagagggcatacccttgaaagctaagggtagccaatggaacttttctctcttcgctaatatggtggcaagcaaagagttgttcaaccttcatttcccaatctaagtaggcctcaacattatcttttccatggaaatatgggaggctaatgttaacctcttgaggccttctatccttttctcttctttgggagtgatgtttagtatgtgaactatggcgccctctataatagtcactaagttcttcacttaaactcttgcaagagtcatgagtactaaaggagacatgtntntctcttttcattnctttcattattnnttctctcttttcctctcttatttctctctttcatctggacccttattcttcccactctttttaccctattcttttctct

SEQ ID NO: 20606 - DNA, 408 bp, Glycine max
  unsure (1)..(408): unsure at all n locations
agtcacctgaagctgaagcttctaactntgacaagactgaagctctgataccacttgttgaacaagtggcctcaaatatcttaagaaggaggggggttgaattaagatatcacaaactattccccaattaaaaattctactttgatggtaacccaagacccaagattccttttaaaattaattcctatataataattcaaattaaacttactgaatataaacaatgagcaacaattaacaaaagagtttaatggaagagaaagtgcacacacagtatctatactggttcggcaaagtgcgttgcctacgtccaatgcccaaaaaatacgcttgagagttgcactatctcacaaatcctttacaccttatgatacacacaaggacaacctttcctttgtgctcatatgc

SEQ ID NO: 20607 - DNA, 333 bp, Glycine max
tgtttcacaaatgtccattttttgaatttgaagatgatccttgtatcctgccattttcctattcatgaattggtgtcattccctataaatgatatttagtctttgtatgggtgtcgacaccaagttttcttccaagttatccgaacttgattgttttattttctagaggtgatcatgttgaaatgactttagctattgacattctatgtgaggttacaaatgtcaaacaaatgtgaggaaataaagtaagggttattataatgtggtcagtgtccctagttgatgaccttgctaaaccctatgtaattgaaatggcgttacttgataaagaag

SEQ ID NO: 20608 - DNA, 407 bp, Glycine max
  unsure (1)..(407): unsure at all n locations
tactcacatgcagctgcngcatgcagactgggttcgaggtacttacccgttgtagatcgaagaatgacgaataacgaatgaagaacgtcgaagaacggctgaaatatttgcgaaattcctcacggaaaacgttacggaaacgtctctgaagcgcctctgcttatattttcttcacggaaacaatttttccaagcaaattcgaaagagagagaagtgcctaaggggctgaacccttttcttcttcacttcctcccctatttatagcaaaataggggaggtggttgccggccagctcgcccaggcgagctcagctcgcccaggcgagccaggttgcttcctccagaagcaacagccttctggaggaatattctggagggcccaagtgggcctgggtgctatatgcaccc

SEQ ID NO: 20609 - DNA, 361 bp, Glycine max
agcttgacaaaaaggaagcaagttgtttaaaacaaaaacgttgtttctacttcaaaaccccttgaactacttcacattgatttatttggtccctctagaattatgagtttaggcggaaattactatggcttggtaattgtggatgattttcaaaataaaaaacgaagcttttgatgcttttccgaaacttgccaaggtgattcaaaatgaaaaaggtctcaacattgtttcaattagaagtgatcatggaggtgaatttcaaaatgagtcttttgaacacttttgtgaagaaaatgtaattcaccataatttttcagccccaagaacacctcagtatgatggtattgtggagaggaaaaat

SEQ ID NO: 20610 - DNA, 340 bp, Glycine max
  unsure (1)..(340): unsure at all n locations
agcttgttaagtcatgtcaaaactaacggagcacaacataagtgcctatacaaagatgttacaaaacaaattaccctgccaaatcagctccactggaaccatttatgttggtcttacccttcctttntcagattctttcactgttcaccactcacgcatttgaagacctcctctagtataaatgagtcatcttacatttgaattgaaaaccaacacaatccactcccctccaagttcattgtcttcacggtgactgattcagtcattgttagccaaaaaaacaccacaattatggcaggtggtaataggcaaaagaagtcttcttcgggtttcttctcta

SEQ ID NO: 20611 - DNA, 212 bp, Glycine max
  unsure (1)..(212): unsure at all n locations
gcttgaaagacttttgaacaatactcgggttatagtcttatagacgctatagaaactaaagcatgggtgnacactatggatttttaaatatgtcagtgcttgataatactacaaaagaaataaatttagggtcatgatatctcaaatgaatgttaattaattatatttgtgttatgtgccataacactatcgataactttagtgagtgtatg

SEQ ID NO: 20612 - DNA, 325 bp, Glycine max
tttctctacaatcgcatcacgctctctttgagctggtgaagaagaatgcggcatttacctggggtgaataacaagagcaagcctttgctttgctcaaaaaaaagcttactaaggcacctgttctagctcttcctgacttttctaaaacttttgagctataatgtgatgcctttggagtgggagttggagctgtattgctacaaggtgggcaccctattgcttagtttagtgaaaaacttcatagtgccgccaccctcaactaccccacctatgataaagagctttatgccttaataagagccctccaaacttgggaacattacct

SEQ ID NO: 20613 - DNA, 158 bp, Glycine max
agcttctacttatgtggcagggcgggcttccttcactttcttgtctccaacgcgagctctgaccactgtccttccttcccgcggtgcttcttttcatgtccgcctgagtgggcttatagcctaaaccatactttccacgatatccttgggtttttatc

SEQ ID NO: 20614 - DNA, 420 bp, Glycine max
aatgtgaagcatgtattcaagcattacaacctagaatggattttagtacatgtattgaaagagaaattaacttgcttgaattggttcatagtgatatatgtgatagtaatgatgtgctaacacatggtggtaagggatactttattactttcattgatgatttctccaaatattactatgtgtatttagataatcacaaaagtgagttgttttataagttcatagtgtataaaacagaagtagaaaatgaattagaaagaaaaattaaaattttacgctctgatagagatggagaatacacatctttgaatatgagtaatttttgtgaaatgcatggtattattcatgaagtgacacctgcatatgctcctgaatctaatggtattgtggaaaaaaaagaatcataccttgcttgatatg

SEQ ID NO: 20615 - DNA, 463 bp, Glycine max
actaagctttattaagagatgctttatttacagctaatatttattattaatttattaaaaaacttgttataacctacctatttatttcaaattaataatcaacatatcaatattataataaataataatacgttagacatgtacaaataattaaaacccattttagtaattacattggtcaaaattaattttgattaaatgtattcaatcatcattccattaaacaatcaatttttgaaaaggattgaagagttcaatttccgcccatctgaataaatgaataattgttatcatcatttaccataacgatctcctattacctttattcaagaaaaaaaattaaaaatatttaattataacgagttctagaattctaaatatattcttctaagaaaattctatatatattattataagggcagtgcatataatattaacataacataaattcaccaacacattt

SEQ ID NO: 20616 - DNA, 1037 bp, Glycine max
  unsure (1)..(1037): unsure at all n locations
tggtggctgctctgactggatctctgagtcacctgcggcatgcaagcttcaatcttttctcanactgcattgtttgtgttttctttcttatttatttttcactgtgagtggtatatatgtgtgtgtgtgtgtgtgtgtgtgtgtgtgtgtgtgtgtgtgtgtgtgtgtgtgtgagaaactgttgttaatagttgagacaatatctgtgggtttccagcattagattgtggccttagaaagtgtagtaatgatcttctcatttcttgtgcccgtgatgggtggaagagatgtaagttatctctatgctcacgtcaagtccttttaagtttaagtacttcagtttgtgttattgttttgattgatactgatgaaattctttagatatattattggcacacctatatatactaaagaaaagttttggcgttatgaacgtgtgattgatttgatcttgtcatgtactaccattaagggggcggatccccccaaatgaattgcaaatatagagagagagagagagaatggcattctatattgactgggtgggttaacagagacaaccagagagtttaatagttcttcctaacctatgcccttcattctctcacaaattcttatgtaacgaaacaaccccgctcttattatgactcatacctcatatatttctgatctcgcacatggggctttttactagtaacttctcttcggaaccttttcgtgctcctactaaactcgcatcgcgtataaattaactctaaatatattatcgcttctcctgcaatcccataacctacacactgaaagggtgatccgtccttattctgttataattactcactcgcactattactctataatacattctacacgctctcgcgctactctgatattataatctcgtatacgttgtcatttcgtcatacatactcaaccattgttcccattgcacgtctatttcacattcttccgatatacctcttgtcgtatattcctatccttcaatagcgtttagttatcccctctacatataactcccg

SEQ ID NO: 20617 - DNA, 370 bp, Glycine max
  unsure (1)..(370): unsure at all n locations
tcactgattgctttggacctttgccattgtccaccaaaaaggccatctttagcccccatgttgtgtgtacctccaagtggcagtgcatgaaccaaactcctatcaaacacatacccaacatatattttagtactgggatgagtttgttacactcttaaaaacaaaggcttctaagtgtgaaagactttntatattgtgatctaattatgtatagtaatatatgataaatntgttgactctaaaaataaattntgatggttgatattttaagaatttttacatttgaccatacatcacaattaagctttaagttntagggataattatatncaatttctttgatgtgtgaataattactcagaatttactt

SEQ ID NO: 20618 - DNA, 329 bp, Glycine max
gggtgataatagatccccttgcctaagtccccctttgggggagaactcagccatggggctaccattcaccaaaaccgaaatagacgcagattttaaacaccctcaatccatttggaactgaaatctgttatttccaacatgtacaacagaaaataccaggagaccgagtgccttctcataatctactttgaatacaaggaatgatttgctgctctttttggcctcttcaatcacctcatttgcaatgagagcacaatgtaatagatgtcttccctcaatgaatgcatattgggtctcatctacgatatatgccatcaccttcttcattc

SEQ ID NO: 20619 - DNA, 355 bp, Glycine max
agcttgaccaatcccgacccaacccaggcatagtcagtcagtgagaacctgtgatgtacctaaacaggcgagctcctggcagtcaacagataaaaggaacaaagaccacaaagcaaggaggcttatggtggctggccagctatgaactttgattgatatgtgggttatggcctctggtaatcgattaccaagggggggtaatcgattacaaggcttaaaaatgaagacagaaggctaagatggtctctggtaatcgattaccaagaggtgtaatcgattaccaggcttgaaaacgaggtcaggaagccatgagggcttctggtaatcgattaccaagggggtgtaatcgattacc

SEQ ID NO: 20620 - DNA, 235 bp, Glycine max
aataccaaagaagaatgtccaattgatttttttttattattctgcctcttttggttttaaacgtggatacggcgtgaaagatcggttggattttattttaacagagattaaacgatattacaacttcaatgattggtggaaattcatattattgtttattaggcgagaaaacagtttaaataaatggttaaagcacgtctaaagggggtacggaaaacaaaccaaaataaaaata

SEQ ID NO: 20621 - DNA, 361 bp, Glycine max
agcttggtgtaacctgtataagtgcaaagacaagataaacacaccatatagtatccctagtgtcacaacctacccttcggcgggagggcgacgcgtgactcgcgggatgcgtgttccacgaaaggaatactcgcggagtcaccaccaacgtttatttgaggaaaacgtcggatataccggaaaagacgcgatctacgaactttttaagtgaaaggttcgggagttgtatttacgtacggagaaggtattatcaccccacacgtccgtcccaagggacgggagcctttaatagaatgtgcgaacatgactttgattttttacgttcccttttatgtccttatatcctatatacctttattat

SEQ ID NO: 20622 - DNA, 314 bp, Glycine max
  unsure (1)..(314): unsure at all n locations
ggcgcctagtctcacctcttctcctttatcttccgctgcatctccatggtgaaaaatcaccattgaaggacctcattgaagctcaaagatccagcctccatagaagccccacaagcaagcttccatcangttgggtccactctattttataaatactagaatatgtntttgcttcttttgggccttgtattttggccattctagtagtataaggttttagccttgtatttcaaggcattntgagtagtctttgtagtaaggaaattttttctattttcatagtattttggaatggnggtgagcttanctattat

SEQ ID NO: 20623 - DNA, 207 bp, Glycine max
  unsure (1)..(207): unsure at all n locations
gcttgttgagaaagcttctcaaagaagccacaatgaagcttctggaggaagtctcttaatgaaacatctacagaaaactacatgtagctgcctcggtataaacgctggccangcttcggtaaccagcggatcttctccaaattagagttgctacttcacaagacaacttaccatgattctaccgtagggatcgttgagaaagtatct

SEQ ID NO: 20624 - DNA, 459 bp, Glycine max
  unsure (1)..(459): unsure at all n locations
actcagcttggactcttggcatttcttttaaaaactagtcacttaaaaagtcgcgactgttgaaaaaatcttcataaacaagtcacttgaagaattgtgacttttggaaatgtattttttgaaatcactcactgttaatcgattaccattaaggtgtcatcgattacacatcaacagatgtgactcttcattttgaattttgaaaatcttaacgttttaaaacactggtaatcggttactaccttctggtaatcaattaccagagagtaaaactctttggtaatgattctgtgaaaacttcttatgctactcaatgttntgaaaaacttttttaatacttatcttgattgagtcttctcttgattcttgaatcttgagtcttgaatcttgatcttgattattcttgaatcttgattcttcaatcttgaatcttgaatcttggaactgtattcttgaatc

SEQ ID NO: 20625 - DNA, 508 bp, Glycine max
tcagagtcacctgcggcatgcaagcttggtgggttgccaataactacacgtagtctcgggttttagatgaaccaatataattctttgcgtgcttctatattgctttaattgacaaagagtttgaattttttttttagatcttatatcttgttttgttttacaaaaaaaactattttcacattgtcctatatagtatgatctctaagtgtttgtaggtctatttacattacacaataaatatgtttttagtcttagaaaaagttttaaatttctaaaaacacaattcaactcccttcttgtgttatttgcttctacaattgtatctagaacaatattcttcttgtcctttagttgctaattctctctcatggctcgaagatttctcttcatccaataaacatgttgacttcattgtagtggaaacacagggacactttgagtctttttttgagccttcacgtcaaatcgtctttttgagtgagtcatgctaacccttgagttactttat

SEQ ID NO: 20626 - DNA, 337 bp, Glycine max
  unsure (1)..(337): unsure at all n locations
agcttagcttcgaaccananaaacaacacatttctattatgtgaggatgaaaaacatactgaaaattttgcaaggataaattccaaacattttgatatttataagaacaaaaaatatattgtagccttgtttttattgttaaaaaaaaagagaaatgctactaacatactctttaacacactccttcatacacactttctcttatgtgttaaaatgtatttagttgaagaacaagttccacataatcttgaacctaccaaatgtgatggttgggattggtatgagtgggatcatttgccacaccctttggttgggcctcttgagaaaatggtcaaag

SEQ ID NO: 20627 - DNA, 344 bp, Glycine max
  unsure (1)..(344): unsure at all n locations
atcaagttgatctgtatggtctacggatcatcccactctcgaacacccagcagagaagcagagatgcagaaatgcatacctcgcacctcgtacctcgtttgtcgctgacgtcgaacaaaccaccgtaacaatgaacaccgaccccttcaccttcaccgagagcacacctagggtaaggaaatatctcatggtagagagaaatgcttgaaaaaaaagctccacagcggaaatcactgtgcacctagcttgttaaagaagataagggaaggggcattcttttaaaatgttgggtgcactatctataatgctgggtgacttagcatctntcaaattatgcacatgcc

SEQ ID NO: 20628 - DNA, 237 bp, Glycine max
  unsure (1)..(237): unsure at all n locations
agcttacacaacaatcaactaaatctattttngaacaaaatgaagttactaaataactaaaaaaatttcactaatacatagagtgactactcaaaaggaaggaatgagccttgattaagagcatctaatctacctaattaaactaattatacaaaacaaagccaaactcgcaacccaattaatcgattgcatatattgtaactttcaagcttggcgcgaactacccttcggcgggag

SEQ ID NO: 20629 - DNA, 993 bp, Glycine max
  unsure (1)..(993): unsure at all n locations
cggtanctctttccctttagtgaccttagaaactcagcttgccaatataataaagagatgaaagttttatgggaatgtaccgcggcctttcaccacacaataatggcattactctccaaatgggcagtgaggttcttttccttttggcactctaactacattgatccatgtctattgcaactaaagatgcaaggctctgtgaaacacgggttggaattacttttgttttggctttggttaacattcattttcctctcatcttttcatgtgatatgcgccaactatacataaacatagacgaaacattattgataagccccaaaattggaagtacacgggtctcatgaatagctgatgattatcttcanatcaatttttatttgtcttaatatcctctctaagatacaggctctacaagctacctgattggtcattaccactatgnttgaaaaatcttggtctccttaatccttattccttaacacgggctatcactttctttggttgcttattttataaanaaacataaagtatgttcacgctcctcctctgtgtaggtaaggctaatgataaaccttttctgcatctgttttgaaaataactgacataatcttcccatcaattctatttgcatataatctctctaagtacagcttaacaaggacatgcaaatatggtcattatcatacacaactcacaaatctggccatataaaagnttaccttctgttgtcattataaaaaccaaggatgttggccccatctgttactaggggaaaaccaattgcttcttaaaaataatggaggtcccagcattccagcactggtgaaaaacgtggtaatttgtgctacccctcaaccaccttttgcccactaatcttggtgagagtacaacaatctaaaatatcttgtctcacacgcctttaagaatcatatatatccaacggcaactctcaacttagacgactaattataaaaggcatttgtgatatat

SEQ ID NO: 20630 - DNA, 401 bp, Glycine max
agcttatagaactatcccaaggaaacaaggcaataggtgctaaatgggtgtttagaaacaagctagacaaggcaagtaaagttgtgagaaacaaggcaaggttagtttccaaaggctactcacaatagaaaggtataaattatacagaaacttatgcccttgttgcttgtttggaggctatatgcattttaccatcatttgttgctcatactaaaatgggactatataaattggatttaaaaagtgcactcctcaattgatttatacaaaaggaagtctatgtagaaaacccccctaggtttgggagtaacacttttccacaacatgtttttaaactcagtaaagctctatatgagctaaagcaagctccttgagcttgctatgaacgtcttcgttcattc

SEQ ID NO: 20631 - DNA, 435 bp, Glycine max
  unsure (1)..(435): unsure at all n locations
agcttngtattttctcacagataggacatgcatgatgtcctttgacactatatcaactcaaatttccatatgctagaaagtcattaatggtacaaaaaaccatagcacgtaaattgaatgtctcttgaagattcccatcccacacatcaaccccgtcttcccacaattttctcaagttttcgatcaatggagtgagatacacatcaatgtgatttcctggttgccttggactggcaatcatcatgcaaagcattatgtacttttgcttgatgcacaaccaatgagggagtttgtaaatcatcagcaaaacaggccatgaactatgattgatggttaagttaccaaaaggattcattccgtcggaagcaagaccaagcctaaggtttattgtgttgtctgcaaaattaagatacaaatgatcaattgtcttccatt

SEQ ID NO: 20632 - DNA, 444 bp, Glycine max
ttagtagttgttgaaccctaattaaagtggcttttgttaaaatattaaatcttaactttttatattgttgtcttttttatctttgatatattcattaaattttttattagcctttctaaataaatcatgattttattatttttatattaatttatatgtttctgttactttaagaggtaattttaacaaatacttataatttaataaattaatttttgaatttccatccaatttttcatctattgttgaacataaccttcataccaataagcattttcttttataaagatgctaaaaaagaaaaaagtgaataattcttttcttacgaacacacatcgtgtatgataaaagtcatgcttacaacgttttgtattaattgatattataagacatgttacactagagtgcctagaattacctaaaaaaaaatcattgtgagagaga

SEQ ID NO: 20633 - DNA, 539 bp, Glycine max
  unsure (1)..(539): unsure at all n locations
aagcttgtcatacctacaagcaatttttttnttgtgattttgattctttatttttgaaacttacaactccctcttaggacaatacaggttcaaccttcaatgattaaagttgagcaagacccaagtgtgcatatgcaaagcataaattcattggaggtagttgtcgcaacatgccagtttgcgggcgagcgagggcgaggctcacgggtgcgctttccaaaggaggaaagatgtgcaaagtcgccaccaacgtttatttgtggaaaacgtcgggaaaaccgaaggaaaccggtcaaaatgaaaattctaagttcgggagttgtatttacgcttgaggaaggtattagcacctctcacgtttgtctcanaggacaacagcctatnttttagaattgtggaaattgcgttaccttaacttttatttctttttattttttgaggtcgacaaaagcggggctcttgctcctacgtaccctctatcaaagaggaaatcagacctacgtagttctttcatatgcgtgaataagtgattcttttac

SEQ ID NO: 20634 - DNA, 344 bp, Glycine max
  unsure (1)..(344): unsure at all n locations
tctagaaatcatagacaatccacttccaaagaagaagaagagggtgagtgttcacatgcaagaagtcacggaagaaggcgaagaggtgaactaataagagataattatatggggagcattaagatggcaatccctatgtttcaaggtaaaaatgatcctgagttgtatttggagtgggggagaaaggttaaacatgtgtttgattgccataattattctgaggaaaaaaaggttaaactaattgttgttgaattcaccgattatgctagtatttggtgggatcaacttatgactaatatgtgtaagaatggtgaaaggtctattantagatgggatgagatgaa

SEQ ID NO: 20635 - DNA, 455 bp, Glycine max
  unsure (1)..(455): unsure at all n locations
ttaagtcacctgcggcatgcaagctctcgcggattggtcttcgccagtgaaaggatcgatgtgggtccgaaaagaggcatatttgatcatcctactangacgactgagaaaactggggcaaatgaagagggtgagaaagagggagaaacccatgctgtgactgccattcctatacggccaagtttcccaccaaacccaacaatgtcattactcagtcaataacaaacctcctccttacccaccacccagttatccacaaaggccatccctaaatcaaccacaaagcctgtctaccgcacttccaatgacgaagaccacctttagcacaaaccaaaaaaacaccaacaaanaggaattttgcagcaaaaagcctgtagggttcaccccaaattcccgtgtcatatgctaaacttaatcccatatccacttcataattcaatgggagccataacccc

SEQ ID NO: 20636 - DNA, 376 bp, Glycine max
gaggaagcttcaatggagggagagaatgagagagagagagagagtggcatggaaattgaaggataatagggagagaagttgaactttgaagtgtgtctcacaagtttctcattcatcaaagttgtgacaagtgttacacatgtttctatttatagcctaagtcactaactaaattgtgaatatcattctcatttcatgtgaatctaaaaggaatattccaagaatatgccaaaggcatcttagcatattccctttaaatgccacaagcatggaaggtgtgactctagcacatgggaagcttccttgagaagcaaggaaggtagcttccttaagaagcaaggaagaaagcttccttgagaagctagggggggggggg

SEQ ID NO: 20637 - DNA, 359 bp, Glycine max
  unsure (1)..(359): unsure at all n locations
ttacaaccttattgaaattgtaatcgattagagattnttttttgagacaatgattgattgaatacattgagaacaatttaatcgattaccatgtgatatgatcggttacttctctttctataagtatttcagaagtgatcaagaacactttaattgaatacattgagaatctaatcgattacattgttcttgagaggtttctagtttttggaaagaacactttaattgattgaaaaagtaattaatcgattattccattaaaataatcaattatattggagatttaatcaattacaggctggtataactattttctctatatatagccacctagtngtctcacttctaacaacttttgg

SEQ ID NO: 20638 - DNA, 429 bp, Glycine max
  unsure (1)..(429): unsure at all n locations
gcttcaatggaggaagagaaagagggagagaaagagagagggggggagcacgacattgaaggaataaaagagggagagaagcggaactttgaagtatgtctcacaagactttcattcatcaaagttataacaagtgttacacatgcttctatttatagactaggtagcttccttgcgaagctttcttgagaaaacttccttgagaagcttctttgagaaaacttccttgagaagctagagcttagctacactcacccctctcataactaagctcacctccttgagaagcttccttaagaagattcctaaagaagctagagctgagctacacaccccctataatagctaagctcacccgcatgacaaaatacatgagaatacaanagaaaaatccctactacacagactactcataatgcctcgaaatac

SEQ ID NO: 20639 - DNA, 346 bp, Glycine max
tgggttcgacgtattcttttgcttgaattacactagatcccttcccgccttgtagatctcactggtaggctaccggggaaactcggtggagccgctggtggttctttgtctctttggcccttaattggcgccctagtcaacctcttattctctctatccattgcacattccactttctgtaagtcccttactctgtgtctcgcgcttttcagcctgaattccattcccgtaattcttctatgatatgaaactacatacatcaattaagaaaatactatagtaatcgaagataagataaagcttgctagtggccatttctgggactcttgggtgagactggaaagca

SEQ ID NO: 20640 - DNA, 958 bp, Glycine max
  unsure (1)..(958): unsure at all n locations
cgcgtgntttgccttactcgtgcctcgngatcctctacagtctagcttgaagcctgcgggcttctgaagatagtgatgaggttcatgccctacatgctatcttgatacatcctgcgtagtccaatagagactcaagtgcgtctccctctaatcttgaaagatgatcatgaactaagggatgttactctaggcaccgatgaattctcggaatgagaaaccacttgcgcccgggaggacgaacacaagcccacgactaggtctgcgcgctttataggacgacataagtgcgctctcgctccgaacatgtgtaagggatcatcatggggcatacgcattgttatcaatgacgacctanatgttcgtcttgggacttatattaactcgtctccaccgttaaccacactgtacggaagatgtgggcgtcatcccttactcatagagaagccttattttccgcgactccttacattggcttaggattatacgccagaaatcaggatattgcagcaggacctgtatttgattattgaccactgcgacttcttgagggccgattctcttatgggcaatcaagccgacccttctcgcctcgagatatcaggactatttgctatgtagcaattgaagactactggcctattattttatccggcgaggtaggatgcgcccaactgcttatttacttatacaaatgattatcccacttactccaataaggcgacatcactctctttttctaacgctggtgtggttcactgtcaggatcggaggccatccttttatgcccaggggactccccaaccaaaaaaaaaattacggcctggctcaagttttttgcacatcatttttgttactaaaagtcccgcgctgtatcaaccattgaggggcgcttcctactataacttttgcgatctctctttaggccctcgtctcacacaaaaggatccacactctctcc

SEQ ID NO: 20641 - DNA, 392 bp, Glycine max
  unsure (1)..(392): unsure at all n locations
gaatcaagccaacgcgtttgtgcaagcaatctatggggcaaaacacaccaaatgattatgatgatggatggctcaaattctcacaaaggtgaaaccatcactttcacattgagctttcagaactatcatgacatgtagagaagaatcaaggatttcaagtcacaaaatgtcaagaacttttattttctaaacaattacccatttcttgaacctatcctataattcaaagaanaacatgcaaagtcgtacgtgcgcacgaaattgacccaaaatattaaactgatgatgcgacgaaactaacaacattaacatagtaacacaacttacaaattaacanaaccatctaaactagcaaatcaaagaacactcccccccccccatactaaacacac

SEQ ID NO: 20642 - DNA, 386 bp, Glycine max
ttaagtcagctgcggctgcagcttgatttttatctttttattcttttaataactactcttaccactaatgttataaacattgatgatatttacaatatatgtttgggattgagacaacggcttgaccaactccaagtataaagaccaacgctgataatatttacaatatatgttataaatgttgataatatttacaatatttactgtgtattgttggtcgtagtcaacaataaccattataacctttgtgtttatctttgtttttgtctgttgccttataagtatattactggttgtgtaaacttatttaagcctggagattctagagttttttaggctttgtttatgcttctgtcattatttatcacaagcatatgttcattatg

SEQ ID NO: 20643 - DNA, 246 bp, Glycine max
tgagagagatccatgaccctcataatctcgtgtggtgattagggtacaggtagattttggatcaacgtctggataggccatatattataacctttggtcaagtacctcgctcctatcaactctctacatggagatatacatttcaatgtgtacatagcactcaacaaacaactgccacattggcagctgagatatctatcttctgtctgcattattctatcttgaaggacagtaacaaacaccgaa

SEQ ID NO: 20644 - DNA, 399 bp, Glycine max
  unsure (1)..(399): unsure at all n locations
agctaacaaaaggcatgcgaagtgggtggaattcctagagcaatttccttatgttatcaaacataaaaaaggaaaaggtgatattgtagccgatgctctttctcggcgtcatgcattactttctatgcttgaaacaaaattgattggtcttgaatgtttgaaaagcatgtatgaaaatgatgaaacttttggagaaatttttaacaattgtgaaaatttttcagaaaatgggttctttagacatgaaggctttcttttcatagaaaacaaattgtgtgtgcctaaatgttctactagaaatttgcttatttgtgaagcacatgaaggaggtttaatggggcattttggggtccaaaacactctaganacattacaagaacattnttattggcctcatat

SEQ ID NO: 20645 - DNA, 211 bp, Glycine max
cttcggcattacattttatctcgatccattgtcgataagtacctttgcgacaacgtggtccatacatctcaccgacacatgtaaagacttggtgtgtcctttctcctcaatgagaatctcttcttccgcaaacgcgatataattggatgaggttatatgattaacgatgccttacaaaccctcaactgaaaattcatgcgctacatgggca

SEQ ID NO: 20646 - DNA, 859 bp, Glycine max
  unsure (1)..(859): unsure at all n locations
cggttgacctcactctacncttntacgagacactatataatactctagctttgaagatttggtggtcccttgcagtanctggtccatatttggagacttggtggtcccgtgaagcaactgtttcatatctgaaatcggggagccgtaccccttctatgttgtcgggagggcgcggtaatatatccgcattggttgcaccatctgggtcgtatttagcgaacaaactatcatgacatgtattcccgaataaagttttccactcgcggatgtcgttcctatgagtatggaacttcccgcagttactaacctttctattgtgaaagaaaacattgtgagtcgtctgtgacatgtgatgaccaaaatataaactgaaatgcgctacacttcacattatcgattaaccgcttacaatttcggacctctaactactaagcaaaacctccccccgcctcaaacaaccatgtctcttgtcccattaaaattaaacataattttcacacaccgcactgtattacgcgaaggatcgaagacactcctttctcggggagagaggggataggagctctcccctactcctaaaacgtcggggaggctaatcagccctactgactttgtgtgaggcttgctactgcctagaaactttacacaagacctccttcttctacctctatcacttatatataactttgcacccaattttctctctcggactttgtttttgactgttcgggcttgggttttacacctgacttttctccgtctaaatgactctcctgttgcatcctgaaaacttcaaccctgaatttgttttatcaggctactacaccgccatttggcgaattaattgttctataccccg

SEQ ID NO: 20647 - DNA, 328 bp, Glycine max
  unsure (1)..(328): unsure at all n locations
agcttcaaccaagaggggatggtccatttcaagtacttgaaaggataaatgacaatgcgtacgagattgaattgcccggtgagtataatgtgagtactacatttaatgtgtctgacttaactctttttgatgtagatggagaagccgatttgaggacaaatccttttgaagagggagagagtaccaaggaagctcttcaacaagtgttaaccatgctatttgaatttacgcccaagttacaagtggagaagcttcggattgttaattgcaccatgttccaagaagagtagagggtgccacttttgttgagtggttntattagcatttt

SEQ ID NO: 20648 - DNA, 425 bp, Glycine max
  unsure (1)..(425): unsure at all n locations
agcttcatgatgatgaatcaagttgattcaacaagttntgataatgacaaagatgttgacaaaaagcccaaagaatgatttcaagattaaatcaagaacaaattcaagaatcaagagaagtttgatttcaagattcaagaaaagatgaattcaagttccaagagaagaaatcaagaagacttcacaagggaagtattgaaaagatttttcaaaaaacaaacatagcacaattttgtttttcaaaagagttttcaaaaaaatttctaagttaccagagtttttactctctggtaatcgattaccagtttcctataatcgattaccagtggcaaagtttaatttcaaaagctcttaactgaatttacaatgttccaattgatttcaaaatggtgtaatcgattacaagatattggtaatcaattacc

SEQ ID NO: 20649 - DNA, 291 bp, Glycine max
  unsure (1)..(291): unsure at all n locations
tcaagtccactcagtacatgctctggatgatcatcataaatggagacatacccattcatagactaaaagcataatggacagacaatgatattgctacaatgaagttaaacacaaaagctcattatactatgacgtgtgctctatccaagaatgagtacaaaagagatatgggactcgttgagtatcaactatgaaggtccataatatgctcagttgagaaaagttgttactctaatgagaaattntgagagcttttccatgaaagaaggagaatctataaatgatatgttt

SEQ ID NO: 20650 - DNA, 508 bp, Glycine max
  unsure (1)..(508): unsure at all n locations
agtcacctgaggctgcagcttcaagcaccctttgcactgagaatctattggattgcgaacttggtggtttcgtgcttgtttgccacttcggccattgttcgattgataactgtcgatgtagtgaaattggagctaagtttgagagtggatgacatattctcgttggttaatcttccactgtccgccttccttttcctagtagcaatgaaaggatcaacggngattcaagtgattagaatttctgatgtagtgacaacatatcagtccctttacactgacagaactntgagcccttatgcctattcttcgttcttctccaaaacagtgtggctttggatgaaccctttgctgaacaaagggtacaaaacatccctcaagcttgaagatgtgccttctcttcctattgatttcagagcagaaaagatgtcagagcttttccatagcaattggccaaagcctgaggaaaacagcacgcactcggttgtactcaccttgttgagatgcttct

SEQ ID NO: 20651 - DNA, 359 bp, Glycine max
  unsure (1)..(359): unsure at all n locations
ctgcttatactatgaaccattgcatgaaagaaagagtgagatgtggaggaatattccgtggcttcggtatgaattccgcttcatcaacaacgtcttcttcgtcttgggtttcttcttctgttgatgatggcacaggaacgagttggggttgggcgtttgctantcctatgagagctttcaccaccaaagggtctcctccttcttcttcttcgaagagagatgcttctgataagaacaacgccacgcctaacttatcagccattcctaccttgctcactgttagaggctgaaagagaataaaaatgataactattcgaggctttatttattgttatatgcacataccatctctgttatct

SEQ ID NO: 20652 - DNA, 1076 bp, Glycine max
  unsure (1)..(1076): unsure at all n locations
ggaatagacaactgtgcacnctgcgtcntncntctcagagttacggtagacgctanatanaactcggggttnagttcgatcaccctttnacnnccnnncnncccaggtggttctatgcctggcncgtgcagncgacagcangcatgcaagctgccaagtggatgntgatcacacatggaaatcgacacctccaattatctatttggctctctctaccgcagaatcaatggacaatgcgaagacggatgagagaaattacccaatacaagaccacgcgctcctccttcgagtagcactatacacaccgcggatccccgacacaaagataggagcgcgactcgacctggcctaaccccacaccatacgagattgaagcaggagttctatctaaacagctcatggtaacctagactaggttacgcacaggcgaggagagactgatcaatcacgattcatcgccgccacgaggtgtgaaaggcgcaatcgctatcgagtatacagagcactggtcgaaacgtggacggagaggcatacaaagcaagatgngaaaagctcgaccagagggcccccccgtcgaagagagagatgaccaacacagacgaagatgtcgatgacggtgctaattgctgtcaatactctcacaatatccggagggccgggttggtattctccaggaacaacatccccgcgctccgcgggagaagagacacccacagtgggctactgcgccctcactcgcgccctagggacatcaagaggggggcacacgccgcctacgacgaagtcgcctgctctaaagacagaacccgggctgggtctaaaccccgaggcgaacgcgcctctacgctgtacgtacaaccgtcccagaaccactccggccaactatgcgagggctgtcggccccgcgcttctgccgcgctcccaatactacttacaacacggggcgtggtcacgcattcacacctcgcgccgactcccccaccgtacatgcaccgtggaccgcactccctgaacggggaccgggccgccgccatcttagctaagtgagccggtggtggaggtaccctcctcggctc

SEQ ID NO: 20653 - DNA, 384 bp, Glycine max
aggcatctcggagaggatcttttctcggtcatatttgcgcaaaatctcttgaactaggaagatgttgtccatcgtctttctgttcttaatgaaagcagtttgagtttccccaataatagtctcaagcactggggctatgcggttagccagaattttagatacaatcttgtataacaaattacagcaagatatgggtctaaaatggttaacctgggaggcctggtcatgcttatgaataagcgcaataatatcatggttgagctgctttataatttttccagctgcaaagatatcatcaccaatgatatgtcaagccttcttgaagaataaaacattgaaaccatctggcccaggagctctattattatccatcacagaaataac

SEQ ID NO: 20654 - DNA, 985 bp, Glycine max
  unsure (1)..(985): unsure at all n locations
agttggttgcctgcctgtgcccgnacagccacctgaggctgcagctatgatgagacaaagaattacttanaactagccctgcagatgtatcttattactccgaacaaaactcatctgtgacgtggtgagaaccgaattattatactgtctttgaaagagccattacatcatatagttaccaacacccatatcaggcacaagtggtgtgcgaatatgatggaccattactatacactgggcacagtaatgtgctgcttccggactgtcggcaaacgggaaaaaggacatgaatgcttgatttaaataaggtgcatctgatgtgtgccaataccaccacatccaattcttcaatatgtgatgcaccacatcgccgagctaagactgctgctgcagacctgtcncttcttgagacgtgctaatacactactttttgactcccaacagaacgagaagatatataccatggcgaacgcttcttttgacatcagaactgggactctcgagaatataccacagtctgttttctctttctatattaacagaagcctcaagtgagccccacttatactgactgtggctgcacacaagtacattcgtacccagcaagatccgctcccgcccttccaaagttctatgctccttggactgcgattgcttccggaacggggagcccagaggcagacctctcaccataatgtttgcgagacaagtcatcgctcangatatttgttgttgcttccgccccccgctcacgcccgcctttttctctttctcaacacccacatggtntttctctacaactctgcctcttcaaagggagggttctggtctctgaccatataatatgagcacctgggggcgccctgtatctacctagagcgactccttctcctctaaacgtctcccccttccccccccgccctaccttttcttacccttcgctgcgctcctcctctactcctccttaccgtcacagcattcgtcc

SEQ ID NO: 20655 - DNA, 450 bp, Glycine max
agcttagagtgcagaagaagaagcagcaatcaatttaataatgttctttaaacatgcaaggcaaaattgattgtaataacataaatgagataagggaagagagaatgcaaacacagttttatactggttcggcaaattttgtgcctacgtccaatactcaagcaacccacttgagatttccactatctttgtaaaatcctttacaacttctgaaccacacagggacaacccatcccttgtgttcaggaatccttataactcaagagaccctcaatcccttaatcaatcttactgaatgagaagaaagaaagaagaattatttcttgaagagaaggatattacaatgaagatccatggatgaactcttaatgggattgcaagtgtttgcccacgagttcttgagagagcatttggcaatgaagttctcttggaatctctcttattttcttt

SEQ ID NO: 20656 - DNA, 319 bp, Glycine max
atctcaatattattaattttaaaaaactgatgttgtcaaagcttatacaacatcgatgttgagatcgttctattaatcgatttttaaaaatcgatactaataataatatcttatttacaaaaatattcaacgtgtattttttagcataatggtacaagtcattttttattagtaatattttttcttcctcctgaaatgtgtgttccagaggataaccacatattggccgacgaaatctcccaatttacacaaatataaaaatgctaattttaaataatatttcttatttagtggatttaaataaagaaaaaaatgactc

SEQ ID NO: 20657 - DNA, 333 bp, Glycine max
  unsure (1)..(333): unsure at all n locations
agctntacacaaatgccactatactccaagttttaaaaggatatgttaacaaggacacacaagtatattcaccaggaaaacattgttgtggaaggaaattgtagtgttgtgattcaaaagatccttgcacccaagcataaagaccctgtgagtgtaaccattccttgttcaattggagaagtcactatggaaaggcacttattgatctgggagctagtattaccattgtgccactctccatgtgcagaatgttgagagacgtggagatcatgcccactaggatgactttacaactgttgaccgctctatgaccagaccatatggagtaactga

SEQ ID NO: 20658 - DNA, 362 bp, Glycine max
  unsure (1)..(362): unsure at all n locations
aactgagtttttcccacgatcagatgcactgattatggtgattgtcaagaggtccttaccgaaattaaacaaacagatcacttgcagcaaataccaggaagaattaccaacattggcaaaccaaactcttggatgactaaaaagataagactaccagtgaaaataacatgttcaagtgcaagtcatagagaagaggctaccaagcttgaaaggatgcacgatgagaaattattgaatcaattacataattcaactctcaaactcaggcacaagctcacaatcacacaaatgaagcttgccatatananactcttgggaacaacaaaaatgacagagaaaactgttaacgataatatatactc

SEQ ID NO: 20659 - DNA, 377 bp, Glycine max
  unsure (1)..(377): unsure at all n locations
agcttgactaggcgaggtgattntagccttaatttcactttagttattagtcaattcaattaagaatgagacatcccaaagagaaaacgtccgattgatttttcgctgtattttactaaaagggcattttttgattattattctacctcttttttgatttccaacgtggatacggcacgaccgaacggtcggaattcatttaaaccgaaattaacggatgatacgattcacacgagcagtggaaatttattttatttttagattaggcgagaaatgacttaaataaatggcttaagcacgtcaaaagggggtataaacagcgaatgagaacacgaataaaaatacatganacataatgtggaccaccacgggtacat

SEQ ID NO: 20660 - DNA, 376 bp, Glycine max
agcttgcttgtggagcttctatggaggctggatctttgatcttcaatgaggtcctttaatggtgattttccactatggagatgcagcggaagacaaaggagaagaggagagaggaggcgccatccactatggaataagccatggaagaaggagcttcaccaccaagatgagccttggataagaagcttggagaggatgcttcaatggaggaaaagaaagagggagagaaagagagaggggggagcacgaaatggaaggaagaaaaagggagagaagttgaactctgagttgtgtctcacaagactctcattcatcaaagttacaacaagtggtacgcatgcttctatttatagactaagtagctttcttgagaagc

SEQ ID NO: 20661 - DNA, 474 bp, Glycine max
  unsure (1)..(474): unsure at all n locations
ggcgatatcaccttgtcccttcgcatatatttggcatgcgaaacaggggcgagaatctgtcctacttgctcactctatcatacgtggtaactcacccacgatctgctctacccttatcactctttaactcttattgctctcgccccctccactccccactccattctctctcgtaccatcatctgaacctcgcgctccttcctcatccctaacctctctacccctctctctccctacccgtcctctgtcccctcactatctctctctccctctcccctttccttccctcctcctcctactccgctctcttcacacctacaacttcctctctanctcttctcaactccgtattatttcttacactctcttcatccgtatctctacgtttcttctcattccactctcacgtcactatcactgagtgtctccttatctcttaccttctcctactatccgttcactctgcgactcccg

SEQ ID NO: 20662 - DNA, 336 bp, Glycine max
  unsure (1)..(336): unsure at all n locations
agctntgagccaanatcctgactcaccataaaccttgacccagggtgagaatgtcaatccttacccttggaagcacaaaaaagaagggaaggaaaatttccaatctaaggaaaaaagagaggaaaggaaattcccaatcaaagagtgggagaaagctaaaagaaaagaaagaaaattcccaatcaaagaatgggagaatgataagaagagagaaggagaagaaggaaagaaagctcctattcaaagatcgaatgaaaacagaagatatgtgcagagaggtctttggaccagacaatatctgaacaatacggaactgtcaccaaatgaacaaaagaa

SEQ ID NO: 20663 - DNA, 1137 bp, Glycine max
  unsure (1)..(1137): unsure at all n locations
cctccacctaccttccactataccacgtttctttactttcagatggactacctagtcgtttttactcctctcctgctttctnctntntnnnncnnnncnnnaagtttatttactctccctttaaggacctataaatactcaagcgtgtgtattnctgcattatactaatatatgcgatagcccattgctttgcctgagaataacanttggatgagcacaacagcgctgggggcggcgacggacaatggtcttttccataaacctgttgtccatgaacaaacattatatcatgcgctgaccgtgccatacgaacacacgaagacattgcataatttgttacactaactatattcaataggcctgaacacaatgatgtctcaacacgcgaccgactcatatgatgcggtggccacaatagtcaagtggtggttgacttttaacagggaaaaatgaatgctttgttgttggacaaccatgccaacgattcgttataccgcgaagcaacacatataccatgtatgttatatccttccgcttgtctcggctaccttggtgaacaanccataaccatgggagtatattaatctttgctatttaaaaaaatatagctgaatatcatgactatgaaaatccattcacactacggacaactttaatggtcaaatattttcttgccacagagaagcttctggcttgtcccgacacctatcccctctttaaatcatatattactcacttgcggcgacgaatatttcccctttcctattaaacgcaatgtgccgtttacaagtaccgcgcgtttcctctcacgtgccattgatcctgtataatgaccacctagacacattggaagtctttgtgctgcccgggaaacaatgagctattgtactcagagggtgttgtaaagaggaagaacaatacttccttaagaagaccttttggggtactttttttcagctttgacgcctccttctctttggggcgcccaacttgaggatggagactttattaacttcactcttcgctggtaaactcgaaatctatataatcttctttgtgtgcttcgctactccctccggaggtaccaccatatgtccttgtacggagacaatatatacacgtaccgctgtctctctt

SEQ ID NO: 20664 - DNA, 420 bp, Glycine max
  unsure (1)..(420): unsure at all n locations
agcttgaattctagtaaaaaaaaactcctcaaacatattctaatactcatgcatcttttacattcaaaactggaaacttagattcctagccatgagtcatccttttggcactttagtttagcttctacaaactacccacacactcacaatgtgcacaatttgtttcgcaagctaaattccacaaaatcatccgcaaatgccattgaggcatttcaccgaacacttggtgggcatatgtttaagcatgaaaatcaagggaatgagggcaatgtggcttgccccattatctcagaatgcaccctaggcctaaggccataccctacaaccccacaattcaacaaaaacaagcannatcaaggatanatccctcacgttntgagcanatatatgcaacttagagcacccaaatatatcaatgga

SEQ ID NO: 20665 - DNA, 397 bp, Glycine max
agctgtaagggcaccaaagttttttataaatgattataggtttgttttttaattttgtgggagatggaattagtgattagaatttagaaggtgagaagagatattcactggaaactaaggacataagcatcattatggaatcacacacataaaagcatggcaagttgaagagtactaaagagataatacaacttagaatacactaactttacaatcctttgaagtttgagcatcaagggtacccttctatagaaatatctaatcactcttttattgttttagctagacatttcataaaacaagttcatctgtaagagacacataactgtttgaaaaaataattgacgaaaaaaactactgagcactactgatacttgctcaactgataatcttgcaa

SEQ ID NO: 20666 - DNA, 1015 bp, Glycine max
  unsure (1)..(1015): unsure at all n locations
ccccttcaccccatccactcgtcctctctcacttaacgcatcacttaaagtctaatatttggactcttcctctcccccccccnnnagttgcctctttacccctatgacctcagcttgtgatcgggctgaggcgagtatggacatcgtaactgcaggtgctttggtgcttactctgggtgggcacaacagtccattatccgtgctccgctagagtctttatttcaaacaaatatggctcacctctactatttatcatgcctttcctcccccatgaatctcatcgatacgacgccattctttacaacccttctcaagaaccttgaccgctttactgtccaacacaagaccttatgcatataattcgcttgtcattgcagtcaacatgncggttgaacattatattgaacaatagggactattgccttttgcgccctctgcaaagattgccttgtactctatatcttgaccctatgccggccgagagttgctcctccttggccctcctaccacgtggagcttccttaccaccacccgaaatcccttgaaggtaaataaatagccgggccaactccgcaataccctccacttgacactcgttttgtactttcactctgccgcctacctctggctctgcaccgcccccggacggtttaattcttactctcacggccccacttccccctcctttaatccctacgacggattccgatccccccttctctcccccacccgtaactcaagatgccacccgccccaccgatacctttgctcccgccgacaaaacctcctccccaagggcgctgcatatagcaccacctcctcacgccccctcggggagctttcttttcctgcactctctcctccctcggggctgacgcaccctccaccctcatccctccgtctcctacccccactctgactcacctccctccctcggcgcctccagtgcatcccaatacccctccctcgacaatgcgtcgggttctcaccatccgcacagaccccgcacaatccg

SEQ ID NO: 20667 - DNA, 473 bp, Glycine max
  unsure (1)..(473): unsure at all n locations
agcttattattctattntatcacactccattataaaatcatgtaatataaaaatatattaaaaaaattaaacacaataaaaaaattattaaaaataaaattgtacaataatttttaaaaaaatataatgacacaaacataacactattaataatatgttgggatatataacataagtttctacaatttgtatttaatttctatcaagcaaaaaattacatcagtaaaataaaaaatatacataggatttatatttccaaaatgtaataataataacaattaaatataatacaattacagtattacgttacttacattccataataaatggacagacctagaacagggatgggccatacttgcctaacttattccgacttctactcatacttagactaccaaaaaaaggaaaaaaaatcaaaataatccattgaagaaggaaatggttgtcaacttgtcatggattgctacatt

SEQ ID NO: 20668 - DNA, 312 bp, Glycine max
aaacacaaacaccaatgtaaatttagagcaaactcatgcacatactttcttatgaacattcactcgcacaagatattcttctacctaagaaaaatgcacccatgtgcaatcaaggcaccttcgttacgtagattatttatatgtactttcaaggtgtatttgctacctacatcacatacacttccttggctaaatttacatatatgcatactcacagcattttggctaccaaaaattgcacacgtgcacattctggtatttctaatacctatgcatatacaaactttgtgatgaatcttggctatctacaca

SEQ ID NO: 20669 - DNA, 56 bp, Glycine max
gccggagatgctgatgatagaatatgtatctaccggatttgtatattttatgggtg

SEQ ID NO: 20670 - DNA, 345 bp, Glycine max
  unsure (1)..(345): unsure at all n locations
tgagcttagcgcagtagggcgcgcttagctctttctctacgaacataacangggcttagcgtagcaggctgcgcttagccttattcaaaggttgaaaaacagaagcaaagtggcacttagcctgacaggtcaggcttagtgctgaacaaaaatttgaaaaatcctaagtgtctgaaacactatgctcgcttagcgcacagacgtgcttagtgggttcatcattgaaactcatcataaggatgaatgtgcttatcgcgacatggtcgggcttagcacgatcatctggaaacctaaaaattcatcagttacgatgaacaggctaagcgcagaaggcgtgcttagcgc

SEQ ID NO: 20671 - DNA, 1076 bp, Glycine max
  unsure (1)..(1076): unsure at all n locations
agtaattgccttcctgaccgcgacagctaaagagactgcagctatggtggagtgtaataattgctatgacactgcggaaagtgaaatgtttatcatagatggaanagagaaaccaaatcggccggctactaccgcatggaacgaccactaatgagcggccgtggcttctaagatgcattcttcgagtgcgacaacgtcacatataatagcaccgtgcactctggtgcctgtgctcaatctttacaattgtggttaaacaccatttatagagagagcgacagcttgtaagagccaaagcacgggattcttttttatgtgatacaataaaacacccacaattatgtgctgttgcgactcggtcaaataaaactccttgtggtcgcttctatatttccagcattacttgcatacaagacatgctaatagaggtggctttccatgcgccttgatctctatggccataagtcttctcctccngattacacatcaagcgaacgggtgtggtggttgaaactcacatggaccatgcaagccgatacctccattcgccacgcctgacagcttgctttaaattcttccctctcgtcactttggtccacgacgaatcactctctagtgtccccctcttctcatatctgctcataatctaataatggaattcatacataattatctgttctccactctcacatggacttcattgtactaaaaatgacccattcngtacactccatgatcttacttctctgtattctcgctgtccgtgcgcaacatcatgctcgccgcgctcgcttcgtactccctattatactcatctgtactcggccgataacatccttccgtgttccacggtcggcgatgtactgtcgctccccttcttcacggctctcctctactacatataccgctatcaccctacctnttcgtgtttgcacctcctacccttcacctcatactcccatcctacacctctaatactatacagttacgccgtcgttgtcttcactccaatctacattatctcatcgctcgacgatcgcgtgtacgacatctgtgattatactatgctcctctct

SEQ ID NO: 20672 - DNA, 407 bp, Glycine max
  unsure (1)..(407): unsure at all n locations
agcttatccatgaacactgatatatgtagaagcaagcttcttgatgtctaatcaagattaattccagttgttttgatgataacaaagatgatgacaacaagctcaagagaatgatttcaagattgcgtccagaacacttcccatgagaatgatttcatagattgagtcaagaacaattcatgaatcaagagaaatatgatttcaagaatctcgattcatgaataatcaagatcacgattcatgactcttgactcaagaatcaagagatgactctntcatgatatgcattaacaagtttttcaaaacattgagtagcacatgaagttctcacactatcttttaccagagagtttctactctctggtaatcgattactagcttactgttatcgattaccaatgacgaag

SEQ ID NO: 20673 - DNA, 341 bp, Glycine max
  unsure (1)..(341): unsure at all n locations
gcttgttcgcacatcgttcgcgtgtatgatatccactcgacaaggtttgaagtagaggagacctttaatcctataatgcaacgtggcggacaaaagtgnggcagtaacttgaatggccattattgtcaatgcggaaggtattctgcgtttcactatccatgttcacacattattgcagcttgtggttacgtgagcatgaactactaccaatatatagatgttgtttacaccaatgagcacatcttanaagcatacttcgcatagtggtggcctcttgggaatgaagcggcaattcctccttctgatgaggcatggacactaatccctgacccaactacaac

SEQ ID NO: 20674 - DNA, 457 bp, Glycine max
gtcttattgatgattccgcttgatagttttactatgatgattgttgtgcactcttggaagaagattgtgatggctgaagcttgtcgctaatttttagatgttgttgtttataacatagcattctacacttagtattctatatctatcaggctcaaaatttcatcagattaacttataatatgcatgggagttatcctccccacctgtagtactagccacggttaaatataacacacttacagtgttacgttacttacatttcataataaatggaccgacctagaacagggatgggccatacttgcctaacttattccgacttctactcatacttagactaccaaggaacggataacaaatcaatataatccattgaagaaagaaatggttgtcacttcgtcttgattgctacattacaagcaagtcgtcttttctctctttcggggctattaactac

SEQ ID NO: 20675 - DNA, 276 bp, Glycine max
gctgatgcatcctaccctccagggtattggatagaagactccaagaggagtgagctatagctgctaaagaaggccttggggttctcatgaaccccaaagtagatttctgagcccatgggccatggttgggtccactcttctttgtaaatattagaatatcgttctccttcttttgggccttgtattttggccattctagtaagataagagtctagccttgcatttcatggctatttgagtagtctttgtagtagggactcttttttttcatgtatt

SEQ ID NO: 20676 - DNA, 534 bp, Glycine max
  unsure (1)..(534): unsure at all n locations
agctntaactcaatacaatttcatccaactacaggatctcaatatgtaatagacatctctatagattaaaataattntaaatgtttaatgtgtatccaattaattatatggatgtgtatctcaatatgtggtaaacattagaatgaattttaatataatacataagttatttttatttgtcaaacctatctgtcatataatgaaaaagacaaaaaaaaatgtacaataacaaattaaattttatttattttctataaattctctatatcttttctatatatagaatatagaattcctatatatagaatatagaattcttttattctttaaccttctttagttaataaggttaaagaataaaagacaaaaaaaatagaagcgtccattgtctaatggataggacagaggtcttctaaaccttaaagtataggtcanatcctaatggacgcaaattgtttgatatnattgatatatatgcaactattgcattgaaaaatgatttcattgataatgaccatgcataaaaatgacaca

SEQ ID NO: 20677 - DNA, 986 bp, Glycine max
  unsure (1)..(986): unsure at all n locations
tagagtgaccatatttggattcattggacatgcactcgtgtttgtggtctcatcaccctcatcacacaaacacacacacacacactcatcacagtcacacacatacacactcatnatagccacacacacacacacacacattgtctatggttgttgctttgatgcataatgcggtccttataaggaaagttggaagtctgagagtttggccaccatgttgctatcgaaaacaattttataaggtgttacgtcatgatataagatggctcacttgggaattgtgtcaaagtagtatggacatgttctggcttgtgcagatctttaaccttcatttccatcgacaaatgtgtcttttctggcacgaatcccttaaggagcagtcgtcacaaggatccttcctccctcatggacgtgaggatgttctcaccgctagtattgcgcgtccagagcaccctggatgtgtccatgctgctggagccactgctctactaagcaatcctatgaacgggttctgcgatgccccgcatatctttttgctgtctttgataaaaacaaatctgcactcacaacttgacaacatcattgtatattacaaaataacgtgggcttacctgtcctctccgtctcacactcatgtatacacatatatgtcaatgtctgtataatagtgccgtgcatctacgtgaatcttgtctatcatctgtatcacacatcacatatactctctctaatcacttcctactcagacgcaaatcttacctgccgcctctacttgtccccccactctaacatccacgcccnacttcgtttactactcactctctctacttatactcttaccactacgcatacancacaatacttagcgaactgttctatctgactcctttcgctccctcctcaagaccgtgcgatttacatcacacttccgtatactggttagtttacctatcaatatccatcactacatacgtcatactcagtcg

SEQ ID NO: 20678 - DNA, 1148 bp, Glycine max
  unsure (1)..(1148): unsure at all n locations
cggtgcttctcttccttnccncttacaccgaccctcagagtcacctgaggatgcagctatgccatattncttacactcgtctcttgacaataanaatagaaagacccatatcaatcaggcagctcttcacctatattatgtaccacgactctcaaggagtattngctacttacctcacacacatctccttggctaaactcacatacatgcatactccatgccttatggggtaccaagaattgcacctgagcacatcttggtatttctaacacctatacatacacaacacttcatgatgtattttgactatctaccacaaacgtgctacaatccatgcctgttttctagctattgctacctaaagacggaggcgaattccagcatattctcctttgctgactcataaatgtaccaccaatatcatatactcttgtgaagtatgcctctttccctataccactaacacatatgtatatatggtttataacttagagcccttttacctaccaaaacgactcatatcccaccaatacggtctactgctcctctgtcgccacacgtaattatttccttacatatgaagtgtatcttaatctcacactacagaccttctctactggctcctaatcatatatanaccacttgcgatgtgcatatactgtatcaccactcacattgaccttctttgtatctcctcgcaaaccttagtgagtccacacatacggcacatcancaacaagaatgactatgtgccacctctcgttcttctcggctataagtagaatatatttacactaacgtttctctccatctatacacaattgttataataagaaaataatcctcgcntntatcatatctgagcgtcacctcttanctcanctttcagctctatcatattaacacactcgcgctatgtgcgtcacatgcctntcatattatactaanccnacctatngtgagcactcaataagacactgatatcatagtccccacatctcgcgttctcatattataataacatcatcactctcatctgttatatgtcatcatattatacaatctacagcgatgtactctattgtgctaaacacatacttcattcctcctctgccgtgaccgtactatcttacttcacaccanctccg

SEQ ID NO: 20679 - DNA, 366 bp, Glycine max
  unsure (1)..(366): unsure at all n locations
agcttcggtagttcaatttcgagcctctcgatatattatgcgcctgtatctgacatctgngtaaaaaggtatgaccattttagtttatcgggagccttcgtttttcaatttcgagcgtctctatatgtgatgagctcgaatcgacatccgagtgaaagttatgaccatctgaatttctcgagtgctttcgttcttcaatcttgagcgcctcaatatattatgcgcttggatctcgacctccgcgggaaaagtattgaccatttgaatttctcgagagctntcgttgttcaatttataatgcatcggaatcggacattcgtgtgaacagtatgacccattgattttttgagagcttccgacgtttaa

SEQ ID NO: 20680 - DNA, 318 bp, Glycine max
tgatggcccgagttatgttggggaactgttactaacccggaatgggtttaggcaaagacaacagcggcattgttatacaagaggcctcacatatcttaagaagggggggttgaattaagatattccacactgtttccctaattaaaaaccatttcctttttactcaagttatgaattcccttaatgacaatcttcttaaatattaattcaaatgaagcaactcgaatatgaatattatgcacttataaataaacgagattaagggaagagaaaatgcaaactcagttttatactggttcggccacactccttgtgcct

SEQ ID NO: 20681 - DNA, 251 bp, Glycine max
  unsure (1)..(251): unsure at all n locations
agcttggttcgaggtacttacccgttgaagatcgaagaacgacgaataacgaatgaagaacgtcgaagaacggttgaaaccttngcaaaattcttcacggaaaacgttacggaaacgtttcggaagcgcctcggcttagattntcttcacggaaacaatttttccaagcaaattcgaaagagagagaagtgcctaaggggatgaacccttttcttcttcacttcctcccctatttatagcaaaatagggga

SEQ ID NO: 20682 - DNA, 51 bp, Glycine max
gcttgcttgtggagcttctatggaggctggatctttgagctgcaatgaggt

SEQ ID NO: 20683 - DNA, 165 bp, Glycine max
  unsure (1)..(165): unsure at all n locations
tcttcattttcttcagtcttcaacgggtgagtacctcaaaccaagcttttcaattcattctatgtactcgtggtgggccacattttggttcatgtattnttattcctcgtttcatttgctttttatacccccttttgacgtgcttagccatttatttaaggcact

SEQ ID NO: 20684 - DNA, 120 bp, Glycine max
gcttgtcggtgtacctgaagatgctattaggctcagcctgttctcattttctttatctagggaggccaagagatggttgcattcattctagggcaacagtttaaagactagggataaggt

SEQ ID NO: 20685 - DNA, 301 bp, Glycine max
  unsure (1)..(301): unsure at all n locations
ctcacgtactcccacgtagcccatattctcgtttctctcaacaccgggtccccatcaatccttccaagcttccccaacatccaagtaattcaacattcaaacaacacaaactatcacagccaagaaaatagggcaaaggcagaaaactcttgccaaaacaccaaccaaaatcacagcttttctcacttaaagaccccagtaacagttccttcgttccagttcgttaaccgttggatcgactcgaaaatntcactggaagtctctagtacataatcctacattntgacgcgtgggatctact

SEQ ID NO: 20686 - DNA, 399 bp, Glycine max
  unsure (1)..(399): unsure at all n locations
agcttataatgacattaaagaaacgttgtataggaggctatttccatatatagatttctaactcatcatcttataaaatcaacaagtagttaatggaccatatgtgcatgcataacttttgctaaaaagtgggtttggacttaactcaatcttacaaaatcaatttataaattaaaaattacttttatttatataggttatctcaagactatctttatttgatgtaggactctaacatgttccattcttttcatggntacttgttatggggactttcaacatactcctttatctaagtgtgactacatctctccttatactcttaaaacgtgacaaacatagaaatctatttatgatagattgtaataccatgtcaaacaatgagtgaatctaattcta

SEQ ID NO: 20687 - DNA, 317 bp, Glycine max
  unsure (1)..(317): unsure at all n locations
agcttatgcgcatatttccctacgaacgttcacttgcacatagacattctattaactaagaaaaatgcacccatatacaatcaaggtagcttcattacctagattatntacacgtacttccaaggtgtatttgttatttacatcacacacgcctccttgggtaaatatacatacatgcatactcaaagcattttggagtaccaaacaatgcacatgcgctcatcttggtatttctaatacctatacatatacaaactttatgatgaatcttgactacctacgcaataaggtgctacatttcatgctctttttttcaa

SEQ ID NO: 20688 - DNA, 358 bp, Glycine max
  unsure (1)..(358): unsure at all n locations
agcttcttttttccaccacattntatcctcagaccgatggtcaaacttatcataaggatgcacaagctaaagttgagtatgtgaaaagattgcataagcaagtgaaggctcaaattgcaaagaagaatgaaagctacgccaagcaagccaacaagaacaagaagaaagtggtacttgaaccatgtgattaggtttgggtacacatgaggatggagaggttctctatacaaaggaagttgaaactcaacctagaggagacgaacctttccaagtactagagaggatcaatgacattgcttacaagattgatatttcaagtgagtatggagtacgtctcttatttaatgctgctgacttg

SEQ ID NO: 20689 - DNA, 401 bp, Glycine max
  unsure (1)..(401): unsure at all n locations
ctcagcttctntggaatcttcttaggaagcttctaaggaggtgagcttagttttgagaggggtgtgtgtagctaaactctaacttctcaaggaagttttctcaaagaagcttctcaagaaagcttctcaagtaagctacctagtctataaatagaagcatgtgtaacacttattgtaactttgatgaatgagagtcttgtgagacacaactcannagtcaacttctctccctttttattccttcaatntcgtggctccccctctctttctcttcctctttcttttcctccattgaagcatcctctccaagcttcttatccaaggctcatcttgatggtgaagctccttcttccatggcttattccttaatggatggcgcctnctctcacctcttttccttt

SEQ ID NO: 20690 - DNA, 202 bp, Glycine max
agcttgaagcttctcaaggaagctacatgaagctgtctcggtaaaatatgcttcccagccttcgctaaccattggatcttctcataattctgtctgcagcttcacaagacaattttccataatctgaccggtgggattttttagaagatgtctcgagggcatgcgacgtttccgtctctgagatcactgttcacttgcgcgt

SEQ ID NO: 20691 - DNA, 88 bp, Glycine max
taaaaaaggttcattggggcggtttttcttgaatgggggggggggggggcaaaaaaaaaaggggggggggggggtatatttttttttt

SEQ ID NO: 20692 - DNA, 318 bp, Glycine max
  unsure (1)..(318): unsure at all n locations
tgcaagcttgaanaggctgttttcaccttctcgctaagctaatctgttgttttagtgagcatccgctaagcgcaacactcctgggctaagcataaggaagaatccagaagaagatgagttgtaatggttcgctaaacgcaccgcttcatctctctaagcgaactgcttcagttcatctgctaagcgagaaaggcgcgctaagccaaaaatcactaacgtgcactaagcggtccatacgtgcgctaagcgcacgagcacgaacaaggccacctatttaagcctgcaacagattttgtgaagatagctcggactgtcatt

SEQ ID NO: 20693 - DNA, 121 bp, Glycine max
  unsure (1)..(121): unsure at all n locations
agcttcaggttgctcattgactccagattgctgcaaagaaggacagattatctatcatggtgacntctgcaaaagaacatacgaccatacgactcttgcaacacggtgtagaaatctctga

SEQ ID NO: 20694 - DNA, 206 bp, Glycine max
  unsure (1)..(206): unsure at all n locations
agcttttcgattcattctatgcacccatggtggtccacattgtgttttgtgcattnatatactcgntatgtgtactttatataccccctgtcgacgtgctcaagccatcttacttaagacatttctcgctcaactcataaacaaacttaatttccaccgcacgtttgaataggattatccgttaacttaagataaaatgaattccg

SEQ ID NO: 20695 - DNA, 1032 bp, Glycine max
cggtgctgccatgcctaccctggaacgcgacccttagagtcacctgaagatgcaagctttgaataagtcactgctcgcttattgtgacaaagttatcgacccagcccacaatctagatgatcacggagggtagtatcgcaccactaattttccatttctgagcggtctgctgtaatataaaatttataacagtacagctacagtttcgtcgttaacacaaccttacctggcgcgtatatactgatcatatctgtccgggtatttataccactattgccgaataaagaagcggttactttccttgcctgtgtaggcttactacattctcttctaccgcaactcacgctccctcacacatctataccgtacacgcatcatctctttctacataccctcacatctacctcccctctacaaagaaatatactactttgacgatctacatcatcattaattaagcaataccatccttctcttcacattacgattattatcttaccatattcacaccacttcttatacctctcttcttatcatcgtcactactctataaactactgttctccctcatctccacatttcaatacgtacttctcttcctacaatacacactttctttaatattcgtcatactgccacctcctctctccctaccacgctctagttctctattatatgtgcaaattacacttctaacctacatccttggatctccatcaatcaactctatctcattgcctcatctcatcattcaatcctctttcctcttaataatcgcgacgaatatgactcctcggtatcctctcagtttctcacactactctacgttcatacaacagcaattactactaccaatctgacatacaaactatacctcgatgatatatagaacatcatcatctctctgctaagacaatcaaaatcagtcttcttctcttacgtactctttaaccttatacttctctgcctctgtcctctctatacctcagtttactacacagttgtcaattcatactctcctgtgtacctacc
